United States Patent Application Publication US 2013/0332133 A1 - sequence listing, part 14

SEQ ID NO: 154423 - protein, 271 aa, Unknown
  Bacterial polypetide isolated from the Sargasso Sea
LEGVFEPRDLELCSRLGLWHAVHCDEQIDMLAAHKTQVPHRVFLKMNSGMNRLGFTPERYRAAWARLNALPQVDEISFMTHFSDADGPRGIAHQMAAFNAAAQDLPGERSLSNSAATLRHAQDAGVRADWVRAGIVVYGSAPDFPEHNASHWGLQPTMTLSTRLIATQQLQAGDTVGYGSRFTADGPLTIGIAACGYADGYPRHCDTGTPVLVNGVRTRLVGRVSMDMVTVDLTPLQQAGVDVGFGSEVTLWGRASNGVVLSIDEVAQAAG

SEQ ID NO: 154424 - protein, 261 aa, Unknown
  Bacterial polypetide isolated from the Sargasso Sea
MESVVEGLKEADGLAVLEIREAREARELGWQKPILLLEGIFARQELQNISNLDLEIVLHNSQQIAWCLSSKIKFRKIWVKINSGMNRLGFKEGSFSLSSNINDTLNQLRFECSQTGALGWMTHFAVGESTDFCLEQEEEFKKTISLLGFRDGESISYSNSDAIIHNSKFCLDWVRPGILLYGAPSSLNPNFDMKTFLNVLQPCQSLQSEIIATQVVKAGEAVGYGKTFVALKEMVVGIAAIGYADGYPRSIKKGTCCIVEG

SEQ ID NO: 154425 - protein, 219 aa, Unknown
  Bacterial polypetide isolated from the Sargasso Sea
MNTVTASIDIDALQHNFAVVRRHAPHSKIIAVLKANAYGHGLLPVAHALAQADAYAVARVEEALVLRANAITKPILVLGGFFSAEALPLLAKHELQTTLHTWEQLALLEQASLPAPIKVWLKLDTGMNRLGLRAEELPAFIERLSHCRNVVQPFHLMTHFSQSDEQDTQATQLQIEEFNRLSAHLPGERAMANSAGILAWPASRSDWIRPGLMLYGASP

SEQ ID NO: 154426 - protein, 66 aa, Unknown
  Bacterial polypetide isolated from the Sargasso Sea
EVPIVGRVAMDMICVDLGPEAQDKAGDSVILWGEGLPVERIAEMTKVSAYELITRLTSRVAMKYID

SEQ ID NO: 154427 - protein, 146 aa, Unknown
  Bacterial polypetide isolated from the Sargasso Sea
MLYGATPFEQAQEQAARLQPVMTLESKVISVRELPTGEPVGYGARFVAERPTRVGVVAMGYADGYPRHAPSGTPVMVDGQLTRLIGRVSMDMLTVDLTDLPQAGLGSRVELWGKQVLASDVAMAAGSIPYQIFCNLRRVPLLYLEG

SEQ ID NO: 154428 - protein, 360 aa, Unknown
  Bacterial polypetide isolated from the Sargasso Sea
MDRGYIYVNKTNYLNNISYLKSLSNKEICLVVKANGYGHGIEWAVKTAIEGGVKWFAVAAINEAIKVRNVSDSVRILLLTEPSLSEIDKIVSNNIDLTVYNDFFIEGLEKSGNSFNTHIKIDTGMHRVGCEPEDFENIYEKIKSSSNINLAGICTHFPVADIEKAPTDVSIKLFKDLISNIDTSGLLIHVDNSGSTFYNFDPMFNLSRIGLAAYGCNITPVEVDHKLKPTMEIKTRISNIHHRKKGEAVSYGKALTLERDSIIGIAPVGYADGYPWNSFPEGKVIIDNQFCNLIGRVTMDQILFDITDVNAQVNDEVVILGSSEDGKSNISVFDIAEWNKTIEWEILTNITERLERVEVE

SEQ ID NO: 154429 - protein, 363 aa, Unknown
  Bacterial polypetide isolated from the Sargasso Sea
MFSPKAIIHLENLKYNYHLLKDQLNDVPIMAVVKANAYGHGVIEISRTLRDEGVKFFGVFTFSEALELRSAGIDEEILVFCRPSKEMIEIAYDKNITLNLSDTDDLKLFRGNRFSPKFHLKLDTGMTRLGISLDESYKIIKIIKNETLKCHGIYSHYATADEGDITYSEHQLDQFKTILDFIKEIDLSINYIHFSNSGSIINIPHSSYNLVRVGMLLYGAYPSDEVSKDIPIKPVMEFKGPVVSLRNIKAGTKVSYGGVWEAPKDTIIGVIQTGFADGFPREWYINGYISLKGKKYPIAGRVCMDQFMVDFGDAEVKIGDEVLIFGQNNKDKILVDDIAKDIKSTSYVILSNIGGRTERKYIN

SEQ ID NO: 154430 - protein, 347 aa, Unknown
  Bacterial polypetide isolated from the Sargasso Sea
MRKTELQINLSNLENNLKVIKSTTSAEIQAVIKANAYGLDINEICENIENEVESFAVITVDEALNLRKKTKKPILILQGVHEIADYDKVKDFNLDFVIHSDWQLYDMPEIDFSNSRAWLKINTGMNRLGFHPEEFLDRYQKLADKNLKDLILMSHLASSSEKSDPRNMEQIKLFSNLTKGLNNKRSLANSGAVFNFNESHFDIVRPGIAIYGGKYFEHGIKPVTCLRSKITMLKNIKAGDSVGYDGSWVADSDCIIAGIPIGYADGYPYSSKSTEVSINGKKFKTAGKINMDLITINLEQDSSIKIGDWVELWGFNTDLTNFSQEFDSISYQLLTNISGRVNKNYLE

SEQ ID NO: 154431 - protein, 342 aa, Unknown
  Bacterial polypetide isolated from the Sargasso Sea
MQINLSNLENNLKVIKSTTSAEIQAVIKANAYGLDISEVCETIEDQVESFAVITVDEALNLRKKTKKPILILQGIHEISDYQEIKNSDLDFVVHSDWQLENIPNIDFSNTRAWLKINTGMNRLGFHPEEFSDKYQKLIDKKFKDLVLMSHLASSSEKSDTKNIEQIELFTSLTKDLDNKKSLANSGAIFNFKESHFDIVRPGIAIYGGKYLEHGIKPVTCLRSKITMLKNIKAGDSVGYDGSWVADSDCIIAGIPIGYADGYPYSSQSREVSINGKKFKTAGKINMDLITINLEQDSSIKIGDWVELWGFDTNLTSFSQEFDSISYQLLTNISGRVNKNYLE

SEQ ID NO: 154432 - protein, 352 aa, Unknown
  Bacterial polypetide isolated from the Sargasso Sea
MTCVLEIDLSAIRENYQYLARDTSKRIAGVVKADAYGLGAARVVSELVNLGCKDFFVANVEEGKALRSRFDEIILYVLEGVLDSTYDDLLRHNLRPVLNTLAQCELWSKQSAPCAVHIDSGMERLGLNEDEMNQVLGDPNQLNPQLLMSHLARADEPDHRFNQLQIERFNLIRQRVSDRFPEVETSMTNSAGLAHRGYVDDLGRPGIALYGGNPFSDRSNPMSPVVRLMAQVLQVRRVEQGVPVGYGGTFVTDQASVLAIIGAGYADGISRALSNKGRAFVSGSYCPIVGRVSMDTIHVDVTGIEVKEGDWIELIGSNMSLDEVALQSGTISYEVLTNLGRRCSRVYLGSAT

SEQ ID NO: 154433 - protein, 262 aa, Unknown
  Bacterial polypetide isolated from the Sargasso Sea
MPRPIVAQIHPAAVAHNLSIVKQRAPRSRVWAVVKANAYGHGIERIFPALASADGIALLDLDEAVRVRELGWTRPVLLLEGIFRPDDVRIAQLFDLSMAVHCREQLDLLRLSSSGKRVNVNLKMNSGMNRLGFRPDAYRAAWEEAKSIPGIADITLMSHFANADEGDVAWQMDRFDAVTQDIPGQRSLANSAAVLWHPQAHRDWVRPGVVLYGGSPTGQSRHIDDVGLRASMTFTSEVIGVQSLSAQETVGYGRAFAANRDM

SEQ ID NO: 154434 - protein, 347 aa, Unknown
  Bacterial polypetide isolated from the Sargasso Sea
MRKTELQINLSNLENNLKVIKSKTSAEIQAVIKANAYGLDINEVCEAIEDQVESFAVITVDEALNLRKRTKKPILILQGIHEIADYHEIENSDLDFVVHSDWQLENIPDIDFSKNRAWLKINTGMNRLGFHPEEFSDKYQKLTDKKFKDLVLMSHLASSSEKSDTKNTEQIELFGNLTKDLNNKKSLANSGAIFNFKESHFDIVRPGIAIYGGKYLEHGIKPVTCLRSKITMLKNIKAGDSVGYDGSWVADSDCIIAGIPIGYADGYPYSSQSREVSINGKKFKTAGKINMDLITINLEQDSSIKIGDWVELWGFDTNLTSFSQELDSISYQLLTNISGRVNKNYLE

SEQ ID NO: 154435 - protein, 86 aa, Unknown
  Bacterial polypetide isolated from the Sargasso Sea
MDNRPIGVFDSGIGGLTVVDAITNNLSSEDIIYVGDTARVPYGNKSKNRIQQYALEITKWLITQDCKMIVVACNTVSALALDYFNS

SEQ ID NO: 154436 - protein, 159 aa, Unknown
  Bacterial polypetide isolated from the Sargasso Sea
TKNNKIGVIGTQATIQSNAYVKSLHSIMPDIKVISKACPLFVPLAEEGMVDGDIPSAIADYYLKDIQSSDIDTVILGCTHYPLLKKVIGAALGSRITLVDSGNAIAKAVTFELDKHNLISTIKKGGTQCFVTDDPKDFDVFASKFLQTPITQTQHIDLS

SEQ ID NO: 154437 - protein, 170 aa, Unknown
  Bacterial polypetide isolated from the Sargasso Sea
PGAIAANEATRNGHIGVIGTQATIRSGAYERLVGELNSELRVTSRACPLLVPLVEEGWLDHEVTDAVLREYLMPMLESGVDTLVLGCTHYPLLKESIARVTGPEVALVDSAETCAAFVQRELQWHHLLATEGEGCVRIHVTDEMERVSEMAGRFLGGPSNAVQQVELGAL

SEQ ID NO: 154438 - protein, 150 aa, Unknown
  Bacterial polypetide isolated from the Sargasso Sea
PATVASEAYSASIEALHPGALFVEQACPAFVPLIEAGDCSSDELRQVARSYLDPLLAASVETIVLGCTHYPLLIPLLKQLLPDAIQLIDPALGVARQLDAVLGVPDASTGDTLELGQCRFCVTADPDGFANRATPWLGARPEVHLQRLQS

SEQ ID NO: 154439 - protein, 116 aa, Unknown
  Bacterial polypetide isolated from the Sargasso Sea
MDNRPIGVFDSGIGGLTVVKSLKESLPNETICYVGDTARVPYGNKSKQRIQQFSKEIVKWLIQKNCKIIIVACNTASSLAIEILKKEFSIPIFGVINPGVDYAINATKTYNIGVLG

SEQ ID NO: 154440 - protein, 92 aa, Unknown
  Bacterial polypetide isolated from the Sargasso Sea
LSIIDTLILGCTHYPLLKPAIKTITKGLTLIDSADSVANETNEILKNNNFINDNNNQGQKKFYVTDSPLNFSNVAKRFLGYPIKDVETARIS

SEQ ID NO: 154441 - protein, 154 aa, Unknown
  Bacterial polypetide isolated from the Sargasso Sea
VYLGTTATISSKSYENTLLKINRDINVFSKACPLFVPLAEEGWVSGNIPKSIAEIYLKGIKKSNIDTIILGCTHYPLIKLVISEILGGEINLIDSGKAAAESVEEILIRKNLKAYINNIPEINCYVTDSVETFIVLADKFLTFPINSIKHIEIF

SEQ ID NO: 154442 - protein, 140 aa, Unknown
  Bacterial polypetide isolated from the Sargasso Sea
LKVIRPKINILNQPCPLFVPLVEEGLTRGPITKLIVESYLSHFKNTDVDTLILGCTHYPILTAVIKDVVGKNISLVDSGKATAKVVMDVLKKNGILSKESNGGVHSFVTDSKQSFQKVITKALTSEINISIKSINRIDIG

SEQ ID NO: 154443 - protein, 189 aa, Unknown
  Bacterial polypetide isolated from the Sargasso Sea
TTNALARDVAEGQAGGPVIGLIGAAAAMVETRRVGVLATPATVASAAYSASIEALHPGALVLEQACPAFVPLIEAGDCSSDELRQVAKAYLDPLLAASVETIVLGCTHYPLLIPLLKQLLPDAIQLIDPALGVARQLDAVLGVPRSTPGDTLELGQCRFCVTADPDGFANRATPWLGARPEVHLQRLQS

SEQ ID NO: 154444 - protein, 233 aa, Unknown
  Bacterial polypetide isolated from the Sargasso Sea
MAVGIFDSGLGGLTVLDAVQHRMPDLPLAYMGDNAHAPYGVRGADDVYELTQKGVERLWQEGCDLVILACNTASAAALRRMQENWIPSDKRVLGVFVPLIEALTERQWGDNSPPKEVSVKNVALFATPATVSSRAFQRELAFRAIGVDVEAQSCGGVVDAIEEGDNILAEALVRSHVSALLRKMPKPQAAILGCTHYPLMQDIFQDALGPRVKVFSQASLVAESLADYLVRHP

SEQ ID NO: 154445 - protein, 212 aa, Unknown
  Bacterial polypetide isolated from the Sargasso Sea
ASQITRFLLEKNAKLIIVACNTASALAIPTLQNEFNVPVVGVISPGANAAAQITKNNNIGVVGTIATINSKAYHKELIKINPSINTFSQACPLFVPLVEEGLLSGAIVSSIITYYINNLDLSTIDTLILGCTHYPLLKPAIKTITKGLTLIDSADSVANETNEILKKNNFINDNNNQGQKKFYVTDSPLNFSNVAKRFLGYPIKDVETARIS

SEQ ID NO: 154446 - protein, 221 aa, Unknown
  Bacterial polypetide isolated from the Sargasso Sea
MVVACNTATAAAIHEVRSSHPELPLVGLEPAVKPALVVTQTGHVGVIGTRGTLTSAKFGKLMASLADQAHFVVQPCDGLAHAIERSVALPAAAPDSPVSTTETGALCERYVQAMGSFGTGPGQMDTLVLGCTHYIFVAHELRALVGPDVQFIETGEPVARQTRRLLEAAGLLALPPSGQPTSPMGSEPVQLLTTGPVAMMQAAAQRWLNLPARLCQSVSVP

SEQ ID NO: 154447 - protein, 271 aa, Unknown
  Bacterial polypetide isolated from the Sargasso Sea
MAVGIFDSGLGGLTVLDAVTKKLPEESFVYMGDNLHAPYGVREPSHIFDLTIKSIERMWDENCDLIILACNTASAAALKRIQEEWLPKNKRVLGVFVPLIERLTKRNWGDNSPPREVDVQNVALFATPSTVASRAFQRELAFRAIGVDVESQACGGLVDAIEDGDIILAEALVRSHVDALKRKMPKPQAAILGCTHYPLLEEVFQDALGKKVQVYSQANLVAESLSDYLKRHPDLSSTNNPKNRFITTGDPAIVSMRASQFLKRSVEFTSA

SEQ ID NO: 154448 - protein, 132 aa, Unknown
  Bacterial polypetide isolated from the Sargasso Sea
MPDIKVISKACPLFVPLAEEGIVDGDIPSAIADFYLKDIQSSDIDTVILGCTHYPLLKKVIGAALGSRITLIDSGNAIAKAVTFELDKHNLISTIKKGGTQCFVTDDPKYFDVFASKFLQTPITQTQHIDLS

SEQ ID NO: 154449 - protein, 228 aa, Unknown
  Bacterial polypetide isolated from the Sargasso Sea
ARVPYGNKSTQKIQQYSHEIAEWLMQKNCKMIVVACNTVSSLAMDYLQSYFPLPIIGVIQPGVDFAIQTTKNNKIGVIGTQATIQSNAYVKALHSIIPDIKVISKACPLFVPLAEEGIVDGEIPSGIADFYLKDIQSSDIDTLILGCTHYPLLKKVIGAALGSRITLVDSGNAIAKTVTFELDKHNLISTIKKGSTQCFVTDDPKYFDVFASKFLQTSIAQTQHIDLS

SEQ ID NO: 154450 - protein, 133 aa, Unknown
  Bacterial polypetide isolated from the Sargasso Sea
MDNRPIGVFDSGLGGLTVVKALKELLPNESIVYFGDTARLPYGVKSQNLIKQFSKEIIKFLLEKNAKAIIIACNTATAMALNSLKNEFNNIPIIGVIEPGSEKAVFETTTNKVGVIGTIATISSGSYEKSIHQ

SEQ ID NO: 154451 - protein, 112 aa, Unknown
  Bacterial polypetide isolated from the Sargasso Sea
MRSKVDNRPIGVFDSGLGGLTVVKAIKELLPNESIVYFGDTARLPYGVKSQSLVKQYSKEIVKFLLEKNAKAVIIACNTATAMALNSLKNEFKNIPIIGVIEPGSEKAIYET

SEQ ID NO: 154452 - protein, 266 aa, Unknown
  Bacterial polypetide isolated from the Sargasso Sea
MSREELPIGVFDSGMGGLTVLKELCQRLPDEDFIYLGDTARLPYGTKSPQTVHKYSMQAADKLMQMKVKALVIACNTAASFSLGKLSTAYYPTPVYGVIEPGAEKACERVDASGILVLATEGTVSGGAYQRSILNKNPEAPVYARACPLWVTLAEQRQQDDHITRSLIEYYLQGFIGKGPSTVLLGCTHFPLFTAFIREMLGEGCRVVDSAVTTANHVASELELKGLLNSNGGEISFMATDGLGRFSRIGEQFLNTKIVNVSEVDL

SEQ ID NO: 154453 - protein, 249 aa, Unknown
  Bacterial polypetide isolated from the Sargasso Sea
MSNNPIGFFDSGIGGVTLWKEVHSLLPYESKIYLADSINSPYGDKSDKELEEISFKNSEFLLEKGCKLIIVACNTATTKCIEKLRKRFDIPFIGIEPAIKPAALNTKTGKVGVLATKGTLGSDLFYKTSNKHASSVKIIEQSGRGLVPLIEQGKIDGDEIKNLLKKYLQVMINENVDKLVLGCTHYPLIIKSISEILPETIEIIDCNKAVAIQTKKVLENNRIINLNKIESNNIFYTNSESNILGKIID

SEQ ID NO: 154454 - protein, 111 aa, Unknown
  Bacterial polypetide isolated from the Sargasso Sea
MDNRPIGVFDSGVGGLTVVSALVQNIPSETIYYVGDTARVPYGNKSKDRIQQYSEEIIEWLIKKDCKMIIIACNTASSLAIDYLEKIFSLPIIGVIDPGVRLAINKTNSQS

SEQ ID NO: 154455 - protein, 221 aa, Unknown
  Bacterial polypetide isolated from the Sargasso Sea
MVHIGEKSKKEIDEISIYNSRFLIDRNCKIIVVACNTATTNSISKLRRKFKVPFIGIEPAIKPAALNSKTKKVGVLATKGTLTSNLFFKTSSDQIADVELINTYGEGLIELIEKGDCENELNVLLKKYLIPMIDYGIDQLVLGCTHYPLIKDSIKNIVGEGINVVDCNDAVAMQTKRILELNYLIQNNKLDSPNHCFFNSGEDDFSIKEILQNKYEIFKFE

SEQ ID NO: 154456 - protein, 226 aa, Unknown
  Bacterial polypetide isolated from the Sargasso Sea
MPDSRPIGVFDSGLGGLTVAKAIKEKLPNENIVYLGDTARVPYGNKSTSLVTSYATQITNFLLGENAKLIVVACNTASALALPALQSEFLVPILGVIIPGSQAAVLATRNKHVGVIGTTATINSNAYTHALRGIESSIQITAQACPLFVPLVEEGWLNGPVPLEITASYLKSINMANVDTLILGCTHYPLLKPMIKDIVNDNTVIIDSAETVAEGVATILLDKKIS

SEQ ID NO: 154457 - protein, 230 aa, Unknown
  Bacterial polypetide isolated from the Sargasso Sea
SIDIIEKRSLQICKYFIKEKKVSCLVIACNTASAVFFNTLEKKIKKKQWYNEVPIFGVINPVVSHIKNNQYKKIAIIGTERTVASKSYKKVISRFNSNIEVMQTACPLFVPMIEEGLINKKLMMDIIDLYLRPFKSQNIDAIILGCTHYPIIANQINKYFKNKIEIIDTGKSVAEEVHLFVKKYHINQSKKQPTIKILSTDITTNFHDMTRRILNIDNINVNKIDFNGPI

SEQ ID NO: 154458 - protein, 179 aa, Unknown
  Bacterial polypetide isolated from the Sargasso Sea
RQYYPDWPLVGMEPAVKPAAAATRSGVVGVLATTGTLQSAKFAALLDRFATDVRVITQPCPGLVELIEAGDLNSPALHSLLQGYIEPLLSAGCDTIILGCTHYPFLKPLLAQMLPPSIILIDTGAAVARQLKRLLGERDLLAIGEPEPAQFWTSGDLCHLRNILPTLWKHPGVVRSFGS

SEQ ID NO: 154459 - protein, 223 aa, Unknown
  Bacterial polypetide isolated from the Sargasso Sea
MTPNNSPYGTKSYDELINISKENVDFLINKKCKLIVVACNTATTNSINFLRESYDLPFIGIEPAIKPAALNTKTGKIGVLATKGTLGSSLFEKTSNIHGNKVEIIEQHGIGLVELIEKGIYSGSKIDSLLKEYLNPMIENDIDKLVLGCTHYPLIIDSIKKIINESIEIIECSDAVALQTKRILIKTNLINSRAEKSENLFYTNGDKNVLNSLLNNKFEILMV

SEQ ID NO: 154460 - protein, 236 aa, Unknown
  Bacterial polypetide isolated from the Sargasso Sea
NIIYVGDTARVPYGNKSAPLIIKYASQITRFLLEKNAKLIIVACNTASALAIPALQNEFNVPVVGVISPGANAAAQITKNNNIGVVGTIATINSKAYHKELIKINPSINTFSQACPLFVPLVEEGLLSGAIVSSIITYYINNLDLSIIDTLILGCTHYPLLKPAIKTITKGLTLIDSADSVANETNEILKNNNFINDNNNQGQKKFYVTDSPLNFSNVAKRFLGYPIKDVETARIS

SEQ ID NO: 154461 - protein, 203 aa, Unknown
  Bacterial polypetide isolated from the Sargasso Sea
NTQFLIERNCKIIVVACNTATTNSISKLRIKFKVPFIGIEPAIKPAALNSKTKKVGVLATKGTLTSDLFFETSSDHKADVELINTYGEGLIELIEKGDRKNELIDLLKTYLNPMIDHGIDQLVLGCTHYPLIKDSIKNIVGEAINVVDCNDAVAMQTKRILELNNLINKKTLGPPNHCFFNSGEDDFSIKEILQNKYEIYKFE

SEQ ID NO: 154462 - protein, 87 aa, Unknown
  Bacterial polypetide isolated from the Sargasso Sea
MDNRPIGVFDSGVGGLTVVSALVQNIPGETIYYVGDTARVPYGNKSKDRIQQYSEEIIEWLIKKDCKMIIIACNTASSLAIDYWKKN

SEQ ID NO: 154463 - protein, 107 aa, Unknown
  Bacterial polypetide isolated from the Sargasso Sea
MSQPILVFDSGIGGLSVLAEIRKLLPHHDYCYLFDNARLPYGELEEQELVSGCVALIDQVVERTHAAIVVVACNTASTVVLPALRATYLFLFVGVVPAIKPAAQLSK

SEQ ID NO: 154464 - protein, 234 aa, Unknown
  Bacterial polypetide isolated from the Sargasso Sea
SIRYVGDTSRGPYGPLPIAQVREYSLEIMDGLVDDGVKALVIACNSASAATLRDARERYEVPVIEVVHPAVRRAVSATRGGRVGVIGTEATIASGAYIDAFAAAPQVTVYSQACPRFVELVEAGVTSGDEAIAVAREYLAPLQESEVDTLVLGCTHYPLLTGVLAYVMGDDVTLVSSAEETAKDVYRVLVAGDLLRSEGEGSPTYEFLVTGDPDAFEDHGRRFLGPEIGRVSSL

SEQ ID NO: 154465 - protein, 251 aa, Unknown
  Bacterial polypetide isolated from the Sargasso Sea
GLTVVKAMKKLLPNESILYFGDTARLPYGVKSKELVIQYSNQIAKFLIKKNAKMIIVACNTATAMALEELKYNFKDTPIIGVIKPGSIQASLDSKNKKIGVIGTVATIKSRAYEHALKSIDNNINVFSKDCPLFVPFVEEGMVEGEAINLIVEHYLSSFLNNIDTMILGCTHYPLLESVIKKYVKNIKLVDSASAVAKHADKILNDHEIKNKYKKRVSLDCFVTDLPRQFEKLGRIFLGESIKEPHLVDDF

SEQ ID NO: 154466 - protein, 236 aa, Unknown
  Bacterial polypetide isolated from the Sargasso Sea
MRNKVDNRPIGVFDSGLGGLTVVKALRGLLPNESIVYLGDTARLPYGVKSQSLVKQFSMQITKFLLEKNSKAIIIACNTATAMALNSLKNEFKDVPIIGVIKPGSEKAISETITKKIGVIGTIATISSGAYKKAIQQKDNSIEIISKACPLFVPFVEEGLINGTAINEIAKHYLSSFNNKVDTLILGCTHYPLLKDIIFENTENINLIDSASSVAEVAYKVLFDQKLLSHENPPGT

SEQ ID NO: 154467 - protein, 266 aa, Unknown
  Bacterial polypetide isolated from the Sargasso Sea
MPDSRPIGIFDSGLGGLTVVDAINRKTPNENIIYVGDTARVPYGNKSAPLIIKYASQITRFLLEKNAKLIIVACNTASALAIPTLQNEFNVPVVGVISPGANAAAQITKNNNIGVVGTIATINSKAYHKELIKINPSINTFSQACPLFVPLVEEGLLSGAIVSSIITYYINNLDLSIIDTLILGCTHYPLLKPAIKTITKGLTLIDSADSVANETNEILKKNNFINDNNNQGQKKFYVTDSPLNFSNVAKRFLGYPIKDVETARIS

SEQ ID NO: 154468 - protein, 132 aa, Unknown
  Bacterial polypetide isolated from the Sargasso Sea
MDDRPIGVFDSGVGGLTVVSALSNALPNESIYYVGDTARVPYGNKSTQKIQQYSHEIAEWLMQKNCKMIVVACNTVSSLAMDYLQSYFPLPIIGVIQPGVDFAIQITKNNKIGVIGTQATIQSNAYVKSLHS

SEQ ID NO: 154469 - protein, 327 aa, Unknown
  Bacterial polypetide isolated from the Sargasso Sea
MPKQAPCGRYTCALPRFREFPVTGAPRVSLSPMSTESPSSSVGIANSGDNSRAPVGIFDSGLGGLSVLRAVRAQLPNEALIYVADSLYAPYGERDDDFIADRTLAIGEWLAKQGAKALVVACNTATAQSIALVREKLAIPLVGVEPGIKPAALQSKTRVAGVLATQVTLRSARFQALLERYASDCRFLCQPGHGLVQAVERCDVGSAELRALLRSYLEPMLDAGADTLVLGCTHYPFLDAAIRDIVGDRLMLIDTSVAIARQLERVLDQHGLRAMAASPGSVPARFYSTDDGAHQQQLAATLLHIDATVDRVVIPSRRTAAPDSQAA

SEQ ID NO: 154470 - protein, 261 aa, Unknown
  Bacterial polypetide isolated from the Sargasso Sea
MPIGVFDSGMGGLTVLKELCRRLPDEDFIYLGDTARLPYGTKSPQTVHKYSMQAADKLMQMKVKALVIACNTAASFSLDKLATAYHPTPVYGVIEPGAEKACEKVDASGILVLATEGTVSGAAYQRSILSKNPEARIYARACPLWVTLAEQRQQDDHITRSLIEYYLQGFIGKGPSTVLLGCTHFPLFTALIREMLGEGYRVVDSAVTTANHVARELELKGLLNSNGGEISFMATDGLGRFSRIGEQFLKTKIVNVSEVDL

SEQ ID NO: 154471 - protein, 266 aa, Unknown
  Bacterial polypetide isolated from the Sargasso Sea
MSDIRPIGIFDSGLGGLTVANALKQILPSENIIYVGDTARVPYGNKSAPLIIQYASQITEFLLDKDAKLIVVACNTASALALNTLQNNFDLPIIGVIAPGASFAAELTKNNNVGVIGTIATISSNAYEKELYKINPDIKIFSQECPLFVPLVEEGILEGPIVSAIIEYYLKNLELSIIDTMILGCTHYPLLKPAIKKYLNDLVLIDSADSVAKEVYKILKNNHIVNNNTDKGKQRFYVTDSPSNFSNIAKRFLGYSIKNVETAPIS

SEQ ID NO: 154472 - protein, 265 aa, Unknown
  Bacterial polypetide isolated from the Sargasso Sea
MDNRPIGVFDSGIGGLTVVNALTEALPNESIFYVGDTARVPYGNKSRNSIQQFSCEITKWLIEQDCKMIVVACNTVSSLALDELNRQFSIPIIGVIEPVVRHAVNTSNNSSIGILGTQATVKSDAYKKCITAINSQLNIVSQACPLFVPLVEEGWINGKVPHLVASHYLKKFENMSVDTIILGCTHYPLLKSVISSVLGNRIQLVDSGESTAKVVSDLLYNNKLISGEQKGGIQCFVTDDAKSNNILAVKFLNKKIFKTKAIDLS

SEQ ID NO: 154473 - protein, 265 aa, Unknown
  Bacterial polypetide isolated from the Sargasso Sea
MTKQLLGFFDSGLGGLTVLRRVLERHGPVPCVYLGDTARVPYGNRQPDDIRRIAAEVVGWLRDQQVSTVVMACNTTNALARDVAEGQAGVPVIGLIGAAAAMLETRRVGVLATPATVASSAYRVSIEALHPGSVVIEQACPAFVPLIESGGMNSDDLRRAAQAYLEPLLTASVDSIVLGCTHYPLLVPLLRQLLPESVQIIDPAIGVARQLDAVLGPPARISPAPRPFSLESCRFCVTADPDGFAVRATPWLGQRPAVRLQLLQD

SEQ ID NO: 154474 - protein, 266 aa, Unknown
  Bacterial polypetide isolated from the Sargasso Sea
MPDSRPIGIFDSGLGGLTVVDAINRKTPNENIIYVGDTARVPYGNKSAPLIIKYASQITRFLLEKNAKLIIVACNTASALAIPALQNEFNVPVVGVISPGANAAAQITKNNNIGVVGTIATINSKAYHKELIKINPSINTFSQACPLFVPLVEEGLLSGAIVSSIITYYINNLDLSIIDTLILGCTHYPLLKPAIKTITKGLTLIDSADSVANETNEILKNNNFINDNNNQGQKKFYVTDSPLNFSNVAKRFLGYPIKDVETARIS

SEQ ID NO: 154475 - protein, 221 aa, Unknown
  Bacterial polypetide isolated from the Sargasso Sea
MKIGIFDSGIGGLTVFKEISKALPSFEIIYLGDTARLPYGIKSKRTIDRYSINNVKLLKSLDCEIIVIACNTASSYSTNLLKSKFKIPIFDVISAGVKAALKDNPKILGVIGTDSTINSMAYNKIILNNNSNIKVYTKACSIFVPIIEQGLIKKKHYNKIIEENLKFFKNKNLNGLILGCTHYPIIKRKIKDYLGDDIRLIDSSLEVSATLKKYLEINYPE

SEQ ID NO: 154476 - protein, 189 aa, Unknown
  Bacterial polypetide isolated from the Sargasso Sea
MDGLGNDFVIIDTRQKIINLTKEQIIKICDRNFIGCDQLILVKKNQTSDAALEFYNSDGGVSGACGNGTRCVANLLSRESDKKEIILTTLSGDLKSRIIAEKLVSTEMGVARTRWNEIPLSEDLDTNNLKIKLIDLNKNEFFGGTAVNVGNPHIIFFLDNNENFEIKKIGPEIENHSLFPEKCNVTLAT

SEQ ID NO: 154477 - protein, 226 aa, Unknown
  Bacterial polypetide isolated from the Sargasso Sea
YEGEVSEIQIIALVSDAEYDVDGVIFVEPLDNNSVKMHYFNNDGSDAELCVNGVRCVAKFALDNNYLDVDRFIVKAPVGDLEVFVDDNIVEVSTPIPTYEEEKINVNTFEGVKSSVGNPHFMIEVDDVDRLDLENLNSEVLNENIFPDGVNVEIYQIVSKNYIKARVFERGVGETDACGSGALCMFNYLNKTDQIDNNSYVMYPGGDLNLRFENDNLYLSGEVIYL

SEQ ID NO: 154478 - protein, 121 aa, Unknown
  Bacterial polypetide isolated from the Sargasso Sea
MDGLGNDFVIIDQRTTKINLSKDQILKICDRGFIGCDQLIYITENNKSDAGMEFYNSDGSTSGACGNGTRCVAYLLSKEKNRDEINLIVSSTELKSKILSNKLVETSIGVPKTNWDQIPII

SEQ ID NO: 154479 - protein, 97 aa, Unknown
  Bacterial polypetide isolated from the Sargasso Sea
LWLEKNSIFPEFANIEFVSVLKDKSLRVRVWERGAGMTSACGSGACATLVAASSLGKSNKENKIVLDGGDLFIKWLDNGSVTLSGETERVFEGFIGE

SEQ ID NO: 154480 - protein, 254 aa, Unknown
  Bacterial polypetide isolated from the Sargasso Sea
RSSRINLSNDQILKICDRSFIGCDQLIYITENNKSDAGLEFYNSDGSTSGACGNGTRCVAYLLSKEKNKDEIKLIVSSTELKSKILSNKLVETSIGVPKTNWDQIPIIKSVDTKNLGLEIKDRKNVIIKGGIGVNVGNPHVIFFVNDINNFDLKIIGPEIENHELFPEKCNVTLAKKVNDNHYKVKVWERGAGLTKACGTAACATAVAANLEKIENTQTEIEFNLGKLLISIDKNKIISMRGPVSEIEEIKINI

SEQ ID NO: 154481 - protein, 276 aa, Unknown
  Bacterial polypetide isolated from the Sargasso Sea
VFMHEFKFVKMNGLGNDFVVIDQRESEFDLSEEQIKLICNRTDGVGCDQLIMIRKSQDNSDPMIKFFNSDGSEIDACGNGSRCVANFLMKETKSEKINLTTRERTIACEKIDNVTVSVNMGKPKFKWNEIPLTEDIDPVDINFSIRDLTLKKPFLVNIGNPHIIFFDDEIEKYDVESFGSLIENDNLFPEKINVSFAKLKSDNHIVLNVWERGVGKTNACGTAACATAVAGVEMGVIKNKVTVTLPGGDLEIYYKSTDNIIMTGPTEINFTDKYKL

SEQ ID NO: 154482 - protein, 235 aa, Unknown
  Bacterial polypetide isolated from the Sargasso Sea
TGNDFIVGKYEGEVSEIQIIALVSDAEYEVDGVIFVEPLDKNSVKMHYYNNDGSDAELCVNGVRCVAKYALDNNYLDVSRFIVKAPVGDLEVNVDENIVEVSTPIPTFEDGKIKVHNFEGVKSEVGNPHFMIEVDDVDGLDLNKLNSEVLNQSIFPDGVNVEIYQIISRNYIKARVFERGVGETDACGSGALCIFNYLNKTNQIDNNSYVMYPGGDLHLKFENDNLYLSGEVIYL

SEQ ID NO: 154483 - protein, 126 aa, Unknown
  Bacterial polypetide isolated from the Sargasso Sea
LLDIKNDRISLPIIPVGIGNPHAVIEVTNLQDYPVAEIGKKVCSHENFPNGANVSFIELVSRQQLNLRVFERGVGETSACGTAACAAAACGIKKGTLDAEVLVNQPGGGLNIIWNNFEKPMIMSGP

SEQ ID NO: 154484 - protein, 170 aa, Unknown
  Bacterial polypetide isolated from the Sargasso Sea
MVPFTKMHGAGNDFVVIDLRAHQLDLSAEAFAVIADRHRGIGCDQIILIEPPQNGADVRFRFHNADGSEAGACGNGARCAASKVMAEDGANKLSIETHSAVLSAKRSASGDITIDMGPAHLDWENIPLSKAISTCNLPSLIDGLAAPIAVGVGNPHCVFFVEDAEAVEIE

SEQ ID NO: 154485 - protein, 121 aa, Unknown
  Bacterial polypetide isolated from the Sargasso Sea
MEFNAFKMDGLGNDFVIIDLRKKNISLSNQQIIKICDRKFIGCDQLIFIKKDNNLDAKLEFYNSDGSKSDACGNGTRCVAHLLSKENNKKEINLTVASKILKSKIFENNLVETSIGSPKMN

SEQ ID NO: 154486 - protein, 240 aa, Unknown
  Bacterial polypetide isolated from the Sargasso Sea
MDGLGNDFLIIDRRKNSISISKEKIIELGKRDNIGFDQMIFIERDEEISGRVYITIFNSDGDEVSACGNGSRCVAKILCDEKKMEHAVIITSNRILKAQKVSEYNIRIVMGEPLFGWKNIPLSKNINHKNINLNINGIKLVEGYALNVGNPHIVFFVDDCFKYDLKKIGPLIENHNLFPEKVNVTFAQIKSDNNILVNVWERGAGLTKACGTAACATGAVAFEKSLAGKNTNIHFKEGFL

SEQ ID NO: 154487 - protein, 89 aa, Unknown
  Bacterial polypetide isolated from the Sargasso Sea
FPDRINVEFATVQNKSKVPVRVWERGAGQTAACGSGACAVLVAAVLRGLTERKAEVVLDGGPLLIEWRDNNRVSMTGPTEISFNGSFSI

SEQ ID NO: 154488 - protein, 249 aa, Unknown
  Bacterial polypetide isolated from the Sargasso Sea
MEFKAYKMDGLGNDFIIIDRRENPINLTKEKIIELGNRSNVGFDQIIFIDKEKESSFPIQIFNSDGGEVSACGNGSRCVAYLLSKNLNTKEIKLKTNNRFLNAKIVGNLEVELEMGKPLFSFEDIPLSKTVNPADISLKINDKIFSNGFCVNIGNPHIIFFVKNCFNYDLKIIGPKIENHDLFPEKVNVTFAEVKDKNNMTVNVWERGAGLTKACGTAACASAVAGFKKNLVNDKVNINFSEGALKIEI

SEQ ID NO: 154489 - protein, 235 aa, Unknown
  Bacterial polypetide isolated from the Sargasso Sea
FIGCDQLIYIHKNKDNKDKLTFYNSDGSISGACGNGTRCVAKLLSKEYKNQEINLETSSGILHSSILEENVVETNIGKPSMKWDEIPLIKAMNTKDLQISIKDINENNFVGGIAINVGNPHIIFFVENNENFEIENIGPKIEQHQYFPEKCNVTIATIKNNNLINVKVWERGAGLTKACGTAACATAYAGFVTEKTSNNVDIKFTTGILSIRIDKNNSIFMKGPVSNIEEIKVNL

SEQ ID NO: 154490 - protein, 121 aa, Unknown
  Bacterial polypetide isolated from the Sargasso Sea
MDGLGNDFVIIDNRQKITDLTKQQIIKICDRKFIGCDQLILINKNETSDASLEFYNSDGGTSGACGNGTRCVADLLSKENNKSLITLTTQSGDLKSEILGNRLVSTEMEKVKQRERNPLSK

SEQ ID NO: 154491 - protein, 114 aa, Unknown
  Bacterial polypetide isolated from the Sargasso Sea
MIDDCDGAPVNTLGPLIESHERFPDRVNVGFMQIVSRTELKLRVYERGVGETEACGSGACAAVVHGIGLGLLDAAVAVKLPGGKLSVSWDGAEAPVWLGGPTASVFDGTISLRD

SEQ ID NO: 154492 - protein, 266 aa, Unknown
  Bacterial polypetide isolated from the Sargasso Sea
MDGLGNDFVIIDNRQKITNLNKEQIIKICDRSFIGCDQLILIENDNSADAYLKFFNSDGGESGACGNGTRCIANFISKETNKKTIILKTFSGLLKSEILGNKIVTTEVGKAKTEWNEIPLSEKLDTKNLNVKILDKNDKEHIGGTAVNVGNPHIIFFVNELNDFNIKKIGPEIENHFIFPEKCNVTIAQVINKDLIKVKVWERGAGLTKACGTAACATAFAGKINNLTENKTDIEFSTGKLSIWIDAKNSIHMKGPVSDVEEIESN

SEQ ID NO: 154493 - protein, 159 aa, Unknown
  Bacterial polypetide isolated from the Sargasso Sea
MDGLGNDFVIIDNRKKITHLSKEQIIKICDRNFIGCDQLILIEADKSADAYLKFYNSDGGESGACGNGTRCVADLISKELNSKKVILKTLSGNLKSEILGNNIVTTEIGKAKTEWNEIPLSKKLNTKNLNIEINDKNNKKYSGGTAVNVGNPRYYFFCK

SEQ ID NO: 154494 - protein, 247 aa, Unknown
  Bacterial polypetide isolated from the Sargasso Sea
SKEEIVKICDRNFIGCDQLIIIKKNKELDASLEFFNSDGSTSGACGNGTRCVAYLLSKENNKKEITVWTSSSILKSKILDNNIIETNIGVSKILWNEIPINENKNTKNLDIKIFDNNNNEHRGGTAVNVGNPHVIFFVEDINNYNIKKIGPSIENNKLFPEKCNVTIAKVVNNNLIKVKVWERGAGQTKACGTAACAVAVAGNINNYIKEKVDVEFELGKLSIYIDEKKNIHMKGPVSEIKEIDIKL

SEQ ID NO: 154495 - protein, 45 aa, Unknown
  Bacterial polypetide isolated from the Sargasso Sea
MQKIEFIKMHGLGNDFVIIDKRSNNYEINDNLIQKLADRKTGAGC

SEQ ID NO: 154496 - protein, 151 aa, Unknown
  Bacterial polypetide isolated from the Sargasso Sea
MDGLGNDFVIIDQRNSQFALTNDQIKKICNRNFIGCDQLIFIRKNKNTDADIEFYNSDGGSSGACGNGTRCVAYFLSKEMNKDKIILGTESGNLESKILGEKLVETNIGPAKAKWNEIPLSKELNTINLNYKIIDKNNNEYFGGTAINVGN

SEQ ID NO: 154497 - protein, 218 aa, Unknown
  Bacterial polypetide isolated from the Sargasso Sea
MDIKAFKMDGLGNDFLIVDRRKKSISIKKEKIIELGKRDNIGFDQLIFIDEIDNITPSYNPITIYNSDGEKVEACGNGSRCVAKILCDQEKKGEAVIVTSNRVLKAQKISENNIRLEMGEPIFEWKKIPLSKDINHKKINIKIDDLELKDGFAINVGNPHIVFFVDDCYKYDLKKIGPLIENYELFPEKINVTFAQIKDSSNILVNVWERGAGLTKAW

SEQ ID NO: 154498 - protein, 211 aa, Unknown
  Bacterial polypetide isolated from the Sargasso Sea
SDGGRSGACGNGTRCVADFLSKENNKKEITVWTPSGILKSNILEKNIVKTEIDKPKTNWEEIPLKKNVNTKNLEIKISDKNKNIHIGGTAINVGNPHVIFFVENIDDYDLKKIGPNIENHELFPEKCNVTLAKVINKNLIKVKVWERGAGLTKACGTAACATVVAGNIKKLVQPNTDIEFELGKLSIFIDDKNIVHMKGPVSDIKNIEINL

SEQ ID NO: 154499 - protein, 184 aa, Unknown
  Bacterial polypetide isolated from the Sargasso Sea
MDGLGNDFVIIDNRQKVTNLTKEQIIKICDRNFIGCDQLILIENDNNADARLKFFNSDGGESGACGNGTRCVADLISKEKDKKNITLTTLSGNLKSEILGNNFVTTEIGNAKTSWNEIPLSVEVDTKNLNIKINDLNKKEHSGGTSINVGNPHVIFFVDEIKNFDITKIGPSIENHKMFPEKCN

SEQ ID NO: 154500 - protein, 243 aa, Unknown
  Bacterial polypetide isolated from the Sargasso Sea
EDSNKVDFVKRICNRKMSIGADGVIFVEKSDKADIKWDFYNDDGSSAEMCGNGGRCVARYAVEKKITSNELTLETVAGIIAAKVDGVNVRVKLTSPENLKQDIVAELNGLQYKIDSLNTGVPHAIIYSEDIENVNVKEVGNGIRFHEVFAPSGTNVNFVEKVGEHDLKIRTYERGVEDETLACGTGTVASALLSSYKNLVKPPVKVETRGGEILKVDFDPSNETDVFLEGLTRIAFEGVLKEY

SEQ ID NO: 154501 - protein, 140 aa, Unknown
  Bacterial polypetide isolated from the Sargasso Sea
MDGLGNDFVIIDQREKKYDLNNSQIKKICDRGNIGCDQLILINKSDKFDAFLTFKNSDGSDSAACGNGTRCVARLLSKESSKNFITVETSSGKLESKILKNNLIQTNIGKPKTNWDQIPLSEKNDTKKIKVMVGDIEFLG

SEQ ID NO: 154502 - protein, 170 aa, Unknown
  Bacterial polypetide isolated from the Sargasso Sea
MDGLGNDFVIIDQRINNLNLSNDQILKICDRDFIGCDQLIYIKKSQKADADVAFFNSDGSRSDACGNGTRCVAYLLSIEKNKKEIEISVSSKILKSKVLNNKDVETIIGTPNLEWNKIPLSKDLDTKNLSLGMIDIDGNKMNGGIAVNVGNPHVIYFCEDIEKINLKKYG

SEQ ID NO: 154503 - protein, 109 aa, Unknown
  Bacterial polypetide isolated from the Sargasso Sea
MQKIEFIKMHGLGNDFVIIDQRSKNIPITQDLIQKISDRRTGAGCDQLITISNSKNNVDADMEIFNPGGDRAEACGNGTRCIARILFDENKNKELLRIHSDAGILEAQK

SEQ ID NO: 154504 - protein, 101 aa, Unknown
  Bacterial polypetide isolated from the Sargasso Sea
MEIKAFKMDGLGNDFVIIDQRKEKINLSNDQIIKICDRQFIGCDQLIFIKKNNDLDAELEFYNSDGSKSDACGNGTRCVAHLLSKENSKKEINLIVASQIF

SEQ ID NO: 154505 - protein, 219 aa, Unknown
  Bacterial polypetide isolated from the Sargasso Sea
DAGMEFYNSDGSTSGACGNGTRCVAYLLSKEKNKDEINLFVSSTELKSKILENNFVETIIGLPKTNWDQIPITKLMDTKNLGLEIKNRKNVITKGGIGVNVGNPHVIFFVDDIDNFDLEKVGPEIENHELFPEKCNVTLAKKVADNHYKVKVWERGAGLTKACGTAACATAVAANLEKLENTRTEIEFDLGKLLISIDKNKNIAMKGPVSKIVEIKINI

SEQ ID NO: 154506 - protein, 166 aa, Unknown
  Bacterial polypetide isolated from the Sargasso Sea
MQKNKALILVLIVGKISNNWKDIPLNEEIDTLNIPIEVEGFSKGVGVNVGNPHVVFFGKNIDKINLHQIGPTIENHKFFPNKTNVEFIEIVDFKKIKMKVWERGAGMTLACGSGACAAVYAGWKKKLIDNQAEVLLEKGSLHINIFNEEAIMTGPAEVSYHGYVEI

SEQ ID NO: 154507 - protein, 211 aa, Unknown
  Bacterial polypetide isolated from the Sargasso Sea
SDGSKSDACGNGTRCVAYLLSRENNKKEINLIVASQTLKSKIFENNLVETSIGLPRMDWNEIPLSKETDTKNLKIKLVDKENKEFYGGIAVNVGNPHVIFFIENIEKFNIEKIGPEIENHELFPEKCNVTLAKKISPSLIKVKVWERGAGLTKACGTAACATAVAANLENLSNSKTEIEFGMGKLLVSIDENHNIKMMGPVSEIKEIKINI

SEQ ID NO: 154508 - protein, 111 aa, Unknown
  Bacterial polypetide isolated from the Sargasso Sea
FFGQNINDVDLGMIGPKIENHKFFPKKINVELVEIINRNKIKIRVWERGAGLTLACGSGACASVYAGTLKNLLENEVEVILERGSLYINIVNGEAIMTGPAEISFYGSLDY

SEQ ID NO: 154509 - protein, 198 aa, Unknown
  Bacterial polypetide isolated from the Sargasso Sea
MDGLGNDFVILDQRFNEINLTKEQIIKICSRSFIGCDQLIIINNSEDNDGDLIFYNSDGSESSACGNGTRCVAYLISEENNKKEINLRTKSGILNSKILDKNLVETVIGIAKTDWREIPISHKIDTKNLNLRIEDKNKNEYFGGTAVNVGNPHTIFFVDKLENYNLSEIGPSLEKNKLFPDRCNITLAKIENSKKIFV

SEQ ID NO: 154510 - protein, 108 aa, Unknown
  Bacterial polypetide isolated from the Sargasso Sea
KSIKNVNLTKIGPKIEKHHFFPNKTNVEFIEIVNSKTIKMKVWERGAGVTLACGSGACAAVYAGWKRNLIEKNSEVQLTKGSLQINIIDDEAIMTGPAEISYSGYIQI

SEQ ID NO: 154511 - protein, 128 aa, Unknown
  Bacterial polypetide isolated from the Sargasso Sea
MTCVSMGNPHAVFYCHDVMAIPLETVGPLLECHPMFPKRMNVHFVQRLTSGRVRMRTWERGSGITMACGTGASAVCVAGVLTGRTDSQLVAELPGGELVLQWDGKGEVFMTGPAEEVFEGEWYLEHQK

SEQ ID NO: 154512 - protein, 246 aa, Unknown
  Bacterial polypetide isolated from the Sargasso Sea
MDGLGNDFIIIDRRSNSINLTKDKIIELGKRSNIGFDQIIFIEKEKENSFPITIFNSDGGEVSACGNGSRCVAYLLSKSLNANQIKLKTSNRSLNAKIVGNLMVELEMGKPLFKFEDIPLSKKVNTADVSLDIKGKKFTGGFCLNIGNPHIVFFVDDCFKYDLKVIGPLIENHELFPEKTNVTFAQILDKRNILVNVWERGAGLTKACGTAACATAVAGKNNELIENKVAIKFKEGILNIVLDEKN

SEQ ID NO: 154513 - protein, 139 aa, Unknown
  Bacterial polypetide isolated from the Sargasso Sea
MDGLGNDFVIIDQRHNHIELTNDQIKKICNRNFIGCDQLIFIKKNEKTDAGIEFYNSDGGTSGACGNGTRCVAYLLSKEMNKDKIMLETESGNLESKILGEKLVETKIGLAKTKWNEIPLIKELNTNNLNYKIIDKNNK

SEQ ID NO: 154514 - protein, 165 aa, Unknown
  Bacterial polypetide isolated from the Sargasso Sea
DQRKDVYTVDMNGQTVELSAISMGNPHGVLVVDDVDTAPVESLGPQLEKHPRFPARANIGFLQVIDRRHARLRVFERGSGETLACGSGACAAVVAGCLRGLLDSRVEVELRGGRLVIEWQGEGTPVMMEGPATTVFEGQLRLPGEPQPRRRRSARPNTRPHKNGA

SEQ ID NO: 154515 - protein, 172 aa, Unknown
  Bacterial polypetide isolated from the Sargasso Sea
MDGLGNDFVIIDQRAVQFGLTNDQVKKICNRNFIGCDQLILIKKSKKVDASMEFYNSDGGTSGACGNGTRCVAYLLSKEIKKNKIILSTKSGNLESKILGEKLVETKLGMAKTNWDEIPLAEELDTVNLNYKIVDNNNKEHFGGTTVNVGNPHIVFFVNNIEDFNLEKIDQK

SEQ ID NO: 154516 - protein, 159 aa, Unknown
  Bacterial polypetide isolated from the Sargasso Sea
MDGLGNDFVIIDQRKRSVSLTKDQIIKICDRNFLGCDQLIFIKNSTISNASMQFYNSDGSTSGACGNGTRCVAYLISEEEKNKNISLNVDNQILSSKILDSKQVETIIGKPKLNWKDIPINRELNTRNLELTISGVDNNKITGGVGINVGNPPCNFFCK

SEQ ID NO: 154517 - protein, 272 aa, Unknown
  Bacterial polypetide isolated from the Sargasso Sea
MNIPFVKMHANGNDFVIIDNRTKRFLFKESQVLLLSNRNTGIGFDQLILLEKSKSSDVSMKIYNSDGREAKMCGNAATCVASLLFASKNTNSITIETISTKITAKLNKSGAVNTTIKLPSQIFSYIIRDKNIDTNNINFSKIHPSLHSGILVNMGNPHIVFIVNNLEEIDLLKYGKKIETNELFLDGINVEIVELVNKKKFKVKFWERGAGLTLSCGSGILSSFYACYKKSLCEKEIEIMIPLGEVNTRINGTELTITSTPQVSFLGEFNYE

SEQ ID NO: 154518 - protein, 137 aa, Unknown
  Bacterial polypetide isolated from the Sargasso Sea
MDGLGNDFVIIDNREKITNLTKDQIVKICDRNFIGCDQLIFIESDSSADANLRFFNSDGGESGACGNGTRCVANLISNENNNKSIILNTLSGKLKSEILEKKIVTTEIGKAKLKWDEIPLSKEMDTKNLNIKIIDIN

SEQ ID NO: 154519 - protein, 114 aa, Unknown
  Bacterial polypetide isolated from the Sargasso Sea
MDGLGNDFVIIDNRQKITNLTKEQIIKICDRNFIGCDQLILIEKHKTSDAYLKFYNSDGGESGACGNGTRCVADLISKELNTKVVNLKTLSGNLKSEILGNNIVTTEIGKAKTE

SEQ ID NO: 154520 - protein, 148 aa, Unknown
  Bacterial polypetide isolated from the Sargasso Sea
MQKIEFIKMHGLGNDFVIIDQRSKKIPITQHLIQKISDRRTGAGCDQLITISNSKNNVDADMEIFNPGGDRAEACGNGTRCIARILFDENKNKELLRIHSDAGILEAQKEGGNISINMGYITMDWRKIPLSQHFDTLNIPISIEGYSK

SEQ ID NO: 154521 - protein, 69 aa, Unknown
  Bacterial polypetide isolated from the Sargasso Sea
MDIKAFKMNGLGNDFVIIDNRQKITNLTKDQIIKICDRNFIGCDQLILIENDKSADANLKFFNSDGGSQ

SEQ ID NO: 154522 - protein, 221 aa, Unknown
  Bacterial polypetide isolated from the Sargasso Sea
MDGLGNDFIIVDRRKNSINLTREKIIELGSRSNIGFDQIIFIEKEKENSFPITIFNSDGGEVSACGNGSRCVAYLLGKNLNTKEIKLKTNNRLLNAKIVGNLQVELEMGKPLFNSEDIPLSKKINPADITLEINNKKFTGGFCVNVGNPHIIFFVKNCFEYNLKTIGPKIENHILFPEKANVTMAQIIDENNITVNVWERGAGLTKACGTAACATAIAGFK

SEQ ID NO: 154523 - protein, 214 aa, Unknown
  Bacterial polypetide isolated from the Sargasso Sea
FYNSDGSTSEACGNGTRCVAYLLSKEKNKNQINLVVSSTELKSKILDDNLVETFIGVPKTNWDEIPIVKSLDTKNLGLEIKDKNNYVTQGGIGVNVGNPHVIFFVNNIDNFVLEKIGPRIENHELFPEKCNVTLAKKIGDNHYKVKVWERGAGLTKACGTAACATAVAANLEKLENTRTEIEFNLGKLLISIDENKNVSMRGPVSKIEEIKIDI

SEQ ID NO: 154524 - protein, 236 aa, Unknown
  Bacterial polypetide isolated from the Sargasso Sea
MDGLGNDFVIIDCRSEEINLSKKQVIKICNRDFLGCDQLIIINKSNSADAELIFYNSDGSESYACGNGTRCVAFFIFKETKKSIINLKTKNGFLKSEILDKNLVETVIGKAKTNWRDIPISKNINTKNLNIKIEDNNKNLIIGGTAVNVGNPHVVFFVDNIDSFDLKKIGPMLEKDELFPERCNVTIAKIENKKSINVKVWERGVGLTKACGSAACATAYAGKINGLSENKVKINS

SEQ ID NO: 154525 - protein, 120 aa, Unknown
  Bacterial polypetide isolated from the Sargasso Sea
MDIKAYKMDGLGNDFVIIDQRNKITKLSKEEIVKICNRNFIGCDQLIIIKKNKELDASLEFFNSDGSASGACGNGTRCVAYLLSKENNKKEIIVWTSSSILKSKILSNNIVETNIGVSKI

SEQ ID NO: 154526 - protein, 158 aa, Unknown
  Bacterial polypetide isolated from the Sargasso Sea
MSSIDFIKMHGLGNDFVIIDLRKQNLEISNRAVKSIANRRTGVGCDQLIAIEEPKKSENDVRLRIWNADGGEVGACGNAMRCVGHLILKETNKVEIAIETVSGIIKVNSKKEGKLSVDMGPPRIHWNEIPLATECDTLSLDITINRLKDPVGVSMEIH

SEQ ID NO: 154527 - protein, 145 aa, Unknown
  Bacterial polypetide isolated from the Sargasso Sea
MDGLGNDFVIIDQRNKITKLSKEEIVKICSRNFIGCDQLIIIKKNKELDASLEFFNSDGSASGACGNGTRCVAYLLSKENNKKEITVWTSSSILKSKILNNNIVETNIGISKIQWNEIPINENKNTNNLGIKIFDNNNNEHIGGT

SEQ ID NO: 154528 - protein, 98 aa, Unknown
  Bacterial polypetide isolated from the Sargasso Sea
MEFKAFKMDGLGNDFVIIDNRSNNVELTRDQIIRICDRKFIGCDQLIFVNKSNKGDAEMEFYNSDGSISGACGNGTRCVAFLISKETDKKVVDLFVGS

SEQ ID NO: 154529 - protein, 55 aa, Unknown
  Bacterial polypetide isolated from the Sargasso Sea
MKKFDFIKMHGLGNDFVIIDERNGELGLSTAEIVSIANRHTGVGCDQLITISYDS

SEQ ID NO: 154530 - protein, 241 aa, Unknown
  Bacterial polypetide isolated from the Sargasso Sea
MDGLGNNFIIIDRRKNALELNKDKIVNIANKKMVPFDQLITLEKEEKNIFPIKIYNPDGIEVGACGNGSRCVAYLISKEIKKTKVSIKAENRILDAEVIGKQIVTINMGFPKFNDWKDIPLENERLNPKMVPIDFLEKEYGTGTCVNVGNPHIIFFVKDCWKVDIQKIGPVVENHHYFPERVNVTFAEVLDDHENIKINVWERGAGQTKACGTAACATVVAAYLKSLAKNNCNIHFKEGTL

SEQ ID NO: 154531 - protein, 167 aa, Unknown
  Bacterial polypetide isolated from the Sargasso Sea
YSLDNNYLDVSRFIVKSPVGDLEVNVDENIVEVSTPIPTFEDEKIKVNNFEGVKSAVGNPHFMIEVEDVDELDLENLNTEVLNKNIFPDGVNVEIYQIISRNYIKARVYERGVGETNACGSGALCMFNYLIKTDQIENNSYVMYPGGDLNLRFENERLYLSGEVIYL

SEQ ID NO: 154532 - protein, 121 aa, Unknown
  Bacterial polypetide isolated from the Sargasso Sea
MDGLGNDFVIIDQREKKYDLNNLQIKKICDRGNIGCDQLILINKSDKFDAFLTFKNSDGSDSAACGNGTRCVASLLSKESSKNFITVETSSGKLESKILKSNLIQTNIGKPKTNWDQIPLS

SEQ ID NO: 154533 - protein, 191 aa, Unknown
  Bacterial polypetide isolated from the Sargasso Sea
MDGLGNDFVIIDNRHKITKLSKEQIIKICNREFIGCDQLILITKNNSSDASLEFYNSDGGSSGACGNGTRCVADLLSKEKNKSLITLTTRAGDLKSEILGEKLVSTEIGKGRTRWDEIPLSEKLDTNNLNIKITDLNNNNHNGGTAVNVGNPHVIFFVKNNENFEIKKIGPEIEHHPLFPEKCNVTLATVV

SEQ ID NO: 154534 - protein, 79 aa, Unknown
  Bacterial polypetide isolated from the Sargasso Sea
MEFKAFKMDGLGNDFVIIDQRYNKLELSNEQILKICDRNFIGCDQLIYITESNKGDAGVEFYNSDGSLSGACGNGTRCV

SEQ ID NO: 154535 - protein, 244 aa, Unknown
  Bacterial polypetide isolated from the Sargasso Sea
QVKKICNRNFIGCDQLIFIKKNEKIDADMKFYNSDGSASGACGNGTRCVAYLLSKEMNKNKIILGTESGNLESIILEEKLVETKIGKAKTNWKEIPLIEKLDTSSLNYKIVDNNNKEYFGGIAVNVGNPHIIFFIDNIENFNLEKIGPEIENDKLFPEKCNVTLAKIINENRIKVKVWERGAGLTKACGTAACATAFAAKINGKIKNKTEIEFELGKLSIFIDDNGNIFMTGPVSNIDQIQIKI

SEQ ID NO: 154536 - protein, 82 aa, Unknown
  Bacterial polypetide isolated from the Sargasso Sea
MEFKAIKMDGLGNDFVIIDQRKTKINLSRENIIQICSRDFIGCDQLIYINKSEDNKDKLTFFNSDGSTSGACGNGTRCVAKI

SEQ ID NO: 154537 - protein, 238 aa, Unknown
  Bacterial polypetide isolated from the Sargasso Sea
MHIYSGLGNVIAIIDAVRNDLSIDSTHVTNICSVQGINFDQLLVVLPPQKADIDLDVKIYNKDGSLALNCINGARCLAKFIKDNDLLVKECFDVQTDGGMWNLEIIDDTTFTASFTFVEKVTKLSYEYGENYINLSCLDLGNPHGVTFESLPQGSNFVELGKDLQNSDSFHEGINFGVAQIISEDEINLKVYERGAGETLACGSGACAAAVLGIIEKNLVSPVKVNFKLGSLLVDYQT

SEQ ID NO: 154538 - protein, 63 aa, Unknown
  Bacterial polypetide isolated from the Sargasso Sea
MTIPFLKMHGLGNDFIIIEEFSRKFSIGKELIKKMCSRQFGIGCNQLLVIKEFEDYEALVEIY

SEQ ID NO: 154539 - protein, 240 aa, Unknown
  Bacterial polypetide isolated from the Sargasso Sea
ICNRKFIGCDQLIFVKENTEIDAELEFYNSDGSKSDACGNGTRCVAHLLSKENDKNEINLIVASQILKSKIFENNIVETSIGSPRMNWNEIPLSKESDTKNLKIKLVDNENKEFYGGIAVNVGNPHVIFFLENIDKFNLEKIGPEIENHELFPEKCNVTLAKKISPSLIKVKVWERGAGLTKACGTAACATAVAANLENLSNSKTDIEFSMGKLTISIDENHNIRMMGPVSEIKEIKINI

SEQ ID NO: 154540 - protein, 106 aa, Unknown
  Bacterial polypetide isolated from the Sargasso Sea
MTRFYKMHGLGNDFVIFDSRKIKLEFNTENIKKTCDRKLGIGCDQLIIIEKDAQVDCFMRIFNKDGSEAESCGNAARCVARLLQEESKKIAYKINTKGGLLKSKKI

SEQ ID NO: 154541 - protein, 185 aa, Unknown
  Bacterial polypetide isolated from the Sargasso Sea
MDGLGNDFVIIDNRQDIIKLSKEQIIKICDRNFIGCDQLILIEKNSSSDASLKFYNSDGGESGACGNGTRCVANLISKEKNSKTIILTTLSGNLKSEILGNNLVTTEIGHAKVEWNEIPLSSELNTKNLNIKISDQNNKNHSGGTAINVGNPHVVFFVDNIDDFDVSKIGPKIENHKMFPEKCNV

SEQ ID NO: 154542 - protein, 123 aa, Unknown
  Bacterial polypetide isolated from the Sargasso Sea
MDGLGNDFVIIDNRHKTTDLTKQQIIKICDRKFIGCDQLILINKNDTSDASLEFYNSDGGTSGACGNGTRCVADLLSKENNKSLIILTTQSGDLKSEILGDRLVSTEIGKGKTEWNEIPLSKN

SEQ ID NO: 154543 - protein, 147 aa, Unknown
  Bacterial polypetide isolated from the Sargasso Sea
MDGLGNDFVIIDNRQKITDLTKQQIIKICDRKFIGCDQLILINKNETSDASLEFYNSDGGTSGACGNGTRCVADLLSKENNKSLITLTTQSGDLKSEILGNRLVSTEIGKGKTEWNEIPLSKKLDTNNLNIKISDLDNNNYMGGAAV

SEQ ID NO: 154544 - protein, 140 aa, Unknown
  Bacterial polypetide isolated from the Sargasso Sea
MEFKAFKMDGLGNDFIIIDQRSQNINLTKEQIIKLCDRKFIGCDQLIYIKKNIEIDASLEFYNSDGSESGACGNGTRCVANFLSKESNKKEIYVRTLSGNLRSKVLDNNQVETEIGVPKFNWSEIPLTHDGRHKKFKNTN

SEQ ID NO: 154545 - protein, 206 aa, Unknown
  Bacterial polypetide isolated from the Sargasso Sea
MSGTGNDFICTEYDRDLSDIEIISIVSDALFPIDGVILVEGIDSSTVKMHYFNNDGTPAELCVNGVRCTAKFAVDNNLVDTKNLIVKAPVGDIKAFVENDYVKIEAPLPTTGDSIEIDSYTCTTSEVGNPHLMVEVDDVEKFDLEKFSVNARKLDVFSNGVNVEIYSVVERKFIYARVNERGVGETDACGSGALALFTYLREINKV

SEQ ID NO: 154546 - protein, 69 aa, Unknown
  Bacterial polypetide isolated from the Sargasso Sea
MKIPFIKMHGLGNDFIIFDNINDPVIHESEFIKKIGHRRFGIGCDQIMIIENTENKENFRVKIYNSNGT

SEQ ID NO: 154547 - protein, 239 aa, Unknown
  Bacterial polypetide isolated from the Sargasso Sea
MEFKAYKMDGLGNDFIIIDRRENPINLSKEKIIELGNRSNVGFDQIIFIDKEKESSFPIQIFNSDGGEVSACGNGSRCVAYLLSKNLNTKEIKLKTNNRFLNAKIVGNLEVELEMGKPLFNFEDIPLSKKVNPADISLKINDKIFSNGFCVNVGNPHIIFFVKNCFEYDLKIIGPKIENHDLFPEKTNVTFAEVKDKNNMTVNVWERGAGLTKACGTAACASAVAGFKKNLVNSKVNIK

SEQ ID NO: 154548 - protein, 92 aa, Unknown
  Bacterial polypetide isolated from the Sargasso Sea
QHHFFPNKTNVEFIEVINSNTIKMKVWERGAGITLACGSGACAAVYAGWKKKLIEKNSEVQLEKGSLHINIVNNEAIMTGPAEISYNGYIHI

SEQ ID NO: 154549 - protein, 205 aa, Unknown
  Bacterial polypetide isolated from the Sargasso Sea
MDGLGNDFVIFDARNKNLSFSKEEIIKIADRKFLGCDQVILVKNDTDSDAYLSFFNSNGEEASACGNGSRCVSYLLSKEKNKNKIKIKTKGGILNSDILEEKIVRINIGKPKFLWDEIPLNKKMESQNLKIELSDLNNNIHKGGYAVNVGNPHAVFFINNCDSFDLKKIGPEIENHKIFPEKCNVSLAEIKNKSLIKLKVGNEGQ

SEQ ID NO: 154550 - protein, 219 aa, Unknown
  Bacterial polypetide isolated from the Sargasso Sea
MDGLGNDFIIIDRRESSINLTKEKIIELGSRTNIGFDQIIFIEKEKDNSYPITIFNSDGGEVSACGNGSRCVAYLLGKNLNTKEIKLKTSNRILNAKIIKKFYVELEIGKPLFSSEDIPLSKTINPSKISLNINNKTFTNGFSLNVGNPHIIFFVEDCFKYDLKIIGPKIENHKLFPEKTNVTFAQVIDQNNITVNVWERGAGLTKACGTAACATAVAA

SEQ ID NO: 154551 - protein, 142 aa, Unknown
  Bacterial polypetide isolated from the Sargasso Sea
MDGLGNDFVIIDQREKKYDLNNSQIKKICDRSNIGCDQLILINKSDKFDAFLTFKNSDGSDSAACGNGTRCVASLLSKESSKNFITVETSSGKLDSKILKNNLIQTNIGKPKTNWDQIPLSEKIDTKKIKVMVGDIEFLGTA

SEQ ID NO: 154552 - protein, 253 aa, Unknown
  Bacterial polypetide isolated from the Sargasso Sea
MDGLGNDFVIFDNRIKSISLTKNQIIEISNRNNIGCDQIIFIDKDKSSNAFLKFYNSDGGEISACGNGSRCVAYLLMKENNNKKISLKTKVGVLEAELNDQNLVSINMGQPIFEWNKIPLLKKMDNQNLKIKINSIDGKEVVGGFSLSIGNPHIVFFVEDVNQFNLKEIGPKIENHTYFPEKCNVTLANIKNKKLIKVKVWERGAGLTKACGTAACATAVSGAALQLNDRCVDIEFAEGLLNIDWKKNNNIYM

SEQ ID NO: 154553 - protein, 144 aa, Unknown
  Bacterial polypetide isolated from the Sargasso Sea
QVHGPDHLQVRVWERGAGPTLACGTGACATLVATHLRGACDRQVTVELPGGPLQILWDNSNHLQMAGPAVFVFAGELPSPAAGIEAEVVDCANLCGDGCIRPEACPSAAAREQAMSFLDRLSLDDMVGLANESLEERTRRRAGF

SEQ ID NO: 154554 - protein, 250 aa, Unknown
  Bacterial polypetide isolated from the Sargasso Sea
MDGLGNDFLIIDRRKKSISIKKEKIIELGKRENIGFDQLIFIDEIDNGTPNYNPITIYNSDGEKVEACGNGSRCVAKILCDQEKKEGAVIVTSNRILKAQKISEDSIRLEMGEPIFEWQKIPLSRDINHKNINIKINDLEFRDGFAINVGNPHIVFFVDDCFKYDLKKIGPLIENYELFPEKINVTFAQIKDSSNILVNVWERGAGLTKACGTAACATGVVAFEKKLSGNNTNIHFKEGLLNIKYNSVIS

SEQ ID NO: 154555 - protein, 123 aa, Unknown
  Bacterial polypetide isolated from the Sargasso Sea
RCCCYIGNPHVVFFGKNIDQLNLLQIGPTIENHKFFPNKTNVEFVEVVNLKKIKMKVWERGAGITLACGSGACAAVYAGWKKKLIDNQAEVLLEKGLLNINILNEEAIMTGPAEVSYHGYVEI

SEQ ID NO: 154556 - protein, 254 aa, Unknown
  Bacterial polypetide isolated from the Sargasso Sea
MVKFIKANGLGNDFVIIDGRETPIILEKETVIKLADRKKGVGCDQVIYLKDSPKADVYMQIFNPDGSEAEACGNATRCVGYLLEKDLGLIETKVGLLRSHKKEGGDVEVSLGESSILHENIELDGVIRAMAVSVGNPHLVCFVESLEKFPVDRRGKELEYHPFFPNKTNVEFVQILGKGHLKAYVWERGAGRTLACGTGAAAAAKAYQEITQEEVDVTVDLQGGSLKVSFISKVQAVITGPVEINYYGQFDLSA

SEQ ID NO: 154557 - protein, 137 aa, Unknown
  Bacterial polypetide isolated from the Sargasso Sea
ISIDFLNKEIGNGICINVGNPHIVFFVKDCENIDIKNIGPKIETHHYFPERVNVSFAQIVNDKNIKLNVWERGAGQTKACGTAACATTVAANIKSFSKNECVIHFKSGSLKIDYNKNVGEVFMSGRVSKIEKISFNY

SEQ ID NO: 154558 - protein, 243 aa, Unknown
  Bacterial polypetide isolated from the Sargasso Sea
EDIIKKLSDRRTGAGCDQLITINNTNNLSADAEIEIFNPGGDRAEACGNGTRCVAKILFDEDANKEVLKIKSDAGILESKKIDKNISVNMGLIKNTWDKIPLRKEVDTMNIQISIDGYSNGVAVNVGNPHVVFFGKSIYETNLESIGPKIENHELFPKKTNVEIVEVINSKLIQMRVWERGVGITLACGSGACAAVYAAWKKGLIENNAEVKLEKGSLYINIINDEAIMTGPAEISYQGTLEI

SEQ ID NO: 154559 - protein, 237 aa, Unknown
  Bacterial polypetide isolated from the Sargasso Sea
MDGLGNDFIIFDNRKESISLTKDQIVKISDRNNIGCDQVIFIDKDKNNDAFLKFYNSDGGEIAACGNGSRCVAYLLMKENKKKKISLKTKVGVLHANLNDKNLVSINIGQPNFQWDKIPLLKKMDNKNLKIKINNIDGKEIISGFSLSVGNPHVVFFVEDLNQFNLKEIGPKIEHHSYFPEKCNVTLANVKNKKHVKIKVWERGAGLTKACGTAACATAVSGAVLELNERHVNIEFT

SEQ ID NO: 154560 - protein, 232 aa, Unknown
  Bacterial polypetide isolated from the Sargasso Sea
CDQLIYIKKNQKIDADMEFYNSDGSVSGACGNGTRCVAYLLSKEIKKNKIILGTESGNLESKILEEKLVETKLGIAKTNWDEIPLAEKSNTIDLKYKIIDKNNKDHFGGTAVNVGNPHIIFFVNNIEDFNLEKIGPEIENDKLFPEKCNVTLAKIINENHIKVKVWERGAGLTKACGTAACATAFAAKINGKIKNKTEIEFELGKLSIFIDDNGNIFMTGPVSNIDQIQIKI

SEQ ID NO: 154561 - protein, 264 aa, Unknown
  Bacterial polypetide isolated from the Sargasso Sea
MDGLGNDFIIIDRREKSIEIKKSKIIELGNRANIGFDQIIFIEKQKEGSYPITIYNSDGGEVSACGNGARCVAYLLSENLNTKKIQIKTNNRLLNAKIVGDFQVELEMGKPLFGSEEIPLSKKINPNNVVLNINDQKFSEGFCVNVGNPHIIFFDKDYLKHDLRIIGPKIENHNLFPEKTNVTFANVIDKKNIKVSVWERGAGLTKACGTAACATAVASFSKNLTERKVQIAFDQGFLKIEYNKDKNIFMTGPVSKINELSISI

SEQ ID NO: 154562 - protein, 274 aa, Unknown
  Bacterial polypetide isolated from the Sargasso Sea
MHEFKFVKMNGLGNDFIVIDQRVSEFDLSEEQIKLICNRTDGVGCDQLIMIRKSQDNSDPMIKFFNSDGTEIDACGNGSRCVANFLMKETKSEKINLTTRERTIACEKIDDVTVSVNMGKPKFKWNEIPLTKDVDPVDINFSIKDLTLKKPFLVNIGNPHIIFFDDKIEKYDVESFGSLIENDSLFPEKINVSFAKLKSDNHIVLNVWERGSGKTNACGTAACATAVAGVEMGLIKNKVTVTLPGGDLEIYYKSSDNIIMTGPTEINFTDKYKL

SEQ ID NO: 154563 - protein, 274 aa, Unknown
  Bacterial polypetide isolated from the Sargasso Sea
MDIKAFKMDGLGNDFVIIDNRQTITNLTKEQIIKICDRKFIGCDQLILIKKNDISDASLEFYNSDGGMSGACGNGTRCIADLLGKENNKKEIVLTTLSGKLKSNIVGEKMVSTEIGVAKTKWDEIPLSKELNTNNLGIKINDKNNNEFSGGTAVNVGNPHVVFFVDNNENFEIEKIGPKIETHSLFPEKCNVTLATVVNKELIKVRVWERGAGLTKACGTAACATAFAAKQNGLVNDKVDIEFSTGRLTISIDENNSIHMKGPVSDIEEINFKI

SEQ ID NO: 154564 - protein, 53 aa, Unknown
  Bacterial polypetide isolated from the Sargasso Sea
MKKPFIKMHGLGNDFVIIDSRNNNYLIDEDAIKLISNRRFGVGCDQVIEMRNS

SEQ ID NO: 154565 - protein, 185 aa, Unknown
  Bacterial polypetide isolated from the Sargasso Sea
MDGLGNDFVIIDQRNKTIELSNDQILKICDRSFIGCDQLIIIEQSPFNFLKEEFDPGIIAEINYKLGDHKIKPDNIKNIYNHLTSIYAKLKFYNSDGSSSGACGNGTRCVAYLLSKEINKNEITFWIQNSLAANEIGNPIIPSKILGDNLVETIIGVPQTNWDEIPISKPLDTKNLGIEIKDKKN

SEQ ID NO: 154566 - protein, 259 aa, Unknown
  Bacterial polypetide isolated from the Sargasso Sea
VIIDQRSKDLNLQKEQVIKICDRNYIGCDQLILINKIDSNKNSLFFYNSDGGVSGACGNGTRCVAKLLSEESKENIINLETASGKLISKILDDNTVETNIGKATIEWKKIPLSKKVNTKNLELKIKSINNSEFTGGIAVNVGNPHVIFFVENLEDYKIEKIGPEMEKNKLFPEKCNVTIANILDNKNIKVKVWERGAGLTKACGTAACATAFAGFITGRTQNETKIKFELGDLSIKIENDHSILMRGAVSKIKEIQIKL

SEQ ID NO: 154567 - protein, 253 aa, Unknown
  Bacterial polypetide isolated from the Sargasso Sea
MGNIIVIVDSVRKDISIDSKTVLSLYENKGINFDQLIQVLPPLNPENDFDVKIYNNDGSLALNCINGARCVSKFVEDNCLSATKEIKVSTDGGLWHLQAKSKEEFSASFEITNSINQITLDLGEENLILDCINLGNPHGVIFQDKDSTVNFLKTGKDLQDNSYFPDGVNFGLANKLNDSEIDLRVYERGAGETAACGSGACAAAIVGISRKNMVAPVKVNFQLGSLLIDYKKESNLIVAEGSATLVEKRQIEI

SEQ ID NO: 154568 - protein, 196 aa, Unknown
  Bacterial polypetide isolated from the Sargasso Sea
MEIKAFKMDGLGNDFVIIDQRKEKISLSNDQIIKICDRKFIGCDQLIFVNENANIDAELEFYNSDGSKSGACGNGTRCVAYLLSKENNKKEINLSAASQNLKSTIFENNLVETSIGLPRMNWNEIPLSKETDTKNLKIKLVDDENKEFYGGIAVNVGNPHVIFFIKNIEKFNLEKIGPEMKIMNYFLKNVTLLSKK

SEQ ID NO: 154569 - protein, 274 aa, Unknown
  Bacterial polypetide isolated from the Sargasso Sea
MDIKAFKMDGLGNDFVIIDNRQTITNLTKEQIIKICDRKFIGCDQLILIKKNDISDASLEFYNSDGGMSGACGNGTRCIADLLGKENNKKEIVLTTLSGKLKSNIVGEKIVSTEIGVAKTKWDEIPLSKELNTNNLGIKIIDKNNNEFSGGTAVNVGNPHVVFFVNNNENFEIKKIGPEIENHSLFPEKCNVTLATVVNNELIKVRVWERGAGLTKACGTAACATAFAAKLNGLVNDKVDIEFSTGRLTISIDENNSIHMKGPVSDIEEINFKI

SEQ ID NO: 154570 - protein, 204 aa, Unknown
  Bacterial polypetide isolated from the Sargasso Sea
MDGLGNDFVIIDNRIDDIKLSIDQIIKICNRSFIGCDQLIIINHSDESDADLIFYNSDGSESGACGNGTRCVAYLISEEKNKKEINLRTKSGVLNSKILDKNLVETVIGIAKTEWKEIPISQKMDTKNLNLKITDKNKNEYFGGTAVNVGNPHAIFFVDKLENFNLEDIGPNLEINKLFPDRCNVTLAEIKNSKKIFVKVWERG

SEQ ID NO: 154571 - protein, 237 aa, Unknown
  Bacterial polypetide isolated from the Sargasso Sea
MSGTGNDFICTEYDRDLSDIEIISIVSDALFPIDGVILVEGIDSSTVKMHYFNNDGTPAELCVNGVRCTAKFAVDNNLVDTKNLIVKAPVGDIKAFVENDYVKIEAPLPTTGDSIEIDSYICTTSEVGNPHLMVEVDDVEKFDLEKFSVNARKLDVFSNGVNVEIYSVVERKFIYARVNERGVGETDACGSGALALFTYLREINKVDDDAIVLYPGGELELSYENEKLYLKGEVTYL

SEQ ID NO: 154572 - protein, 279 aa, Unknown
  Bacterial polypetide isolated from the Sargasso Sea
MLPFVKLQGAGNDYIALDGRNKNYDWNQLSLDMSKPAFGVGSDGIVVVFESETADIRMRIYNPDGSEAEISGNGIRLFTKFVIDSKIISPNKESIKIETGDGIKTVYPKIQDDKVISSRVEMGVPNFVASKIPISVPSISDNDSPKFPLEILGKKLDITCLSIGNPHAVIIIDENVDDFPLVEIGTIVEKHEYFPNRINFEIVNILSRNKIRARIFERGAGETLSSGTGSTASASAARYNGLVDDNVEVILDGGSLNISWDKNDMAMLEGPSEEVFSGI

SEQ ID NO: 154573 - protein, 165 aa, Unknown
  Bacterial polypetide isolated from the Sargasso Sea
IAMGKPKFLRDEIPVSQDIFKDNTDVNELVLDLEKKITVSCVNIGNPHAVSIMDEDVDNFELRTIGPLVENNPAFPNRINFEIVNIISKNEIKARIFERGAGETLSSGTGTSACAIIGIKKKLLDNNVRVNVPGGHLNISWVPGEESYLEGPTERVFTGNWKIKE

SEQ ID NO: 154574 - protein, 237 aa, Unknown
  Bacterial polypetide isolated from the Sargasso Sea
MSGTGNDFICSSYERDLSQIEIISIVGDSLLPIDGVIFIEQINSSTVKMHYFNNDGTPAELCVNGVRCTAKFAVDNNLVDNPKLIVKTPVGDIEAVVENDTVKIEAPMPTIGKEVEIDSLICTTSNVGNPHLMLEVDDVDKFDLDSFSDKARNTDFFKDGVNVEIYSVVDERFIYARVNERGVGETDACGSGALALYSFLRFNNKVQDEAVVLYPGGELDMSFEDEKIYLKGSVTYL

SEQ ID NO: 154575 - protein, 100 aa, Unknown
  Bacterial polypetide isolated from the Sargasso Sea
MEFKAFKMDGLGNDFVIIDNRSNNVELTRDQIIKICDRKFIGCDQLIFIKKSNKGDAEMKFYNSDGSISGACGNGTRCVAFLIFKETDKKVVDLFVGSIN

SEQ ID NO: 154576 - protein, 238 aa, Unknown
  Bacterial polypetide isolated from the Sargasso Sea
MSGTGNNFVISEYENSKTDIEIISIVADSLFDIDGVIFVEKIDSSTVRMHYYNNDGSTAELCVNGVRCVAKYAIDNSFVDNNELTVIAPIGNIKTTVNEENVSLEVAIPTYDKNKILIDGLECIKSNIGNPHLLVEVKDVEKFNLEEFVARVYETNEFENGVNVEIYNMFDKKIINARVYERGVGETDACGSGAICMFYYLYNTDQVNNNSLIFYPGGELEMSIEKDIITLNGKVTYL

SEQ ID NO: 154577 - protein, 238 aa, Unknown
  Bacterial polypetide isolated from the Sargasso Sea
MSGTGNNFLVSEYENSKTDIEIISIVADSLFDIDGVIYVEKIDSLTVKMHYYNNDGSTAELCVNGIRCVAKYALDNSIVDSNEVTVVAPIGNIKTNIKENTVTIEVSTPTYEKNKLLIDGLECIKSNIGNPHLLVEVDNVDKFDLEQFVKKVYETKEFEKGVNVEIFNLFDKKIINARVYERGVGETDACGSGAVCMFYYLYNTNQVNNNSLIFYPGGELEMSIEKEIVKLSGEVTYL

SEQ ID NO: 154578 - protein, 263 aa, Unknown
  Bacterial polypetide isolated from the Sargasso Sea
MPIDLYIYSGLGNIIAIIDSLRNDISINSEDVLKIYQNHKIDFDQLILVLPPKEPKNDFDAKIYNNDGSIASNCINGARCVSKFLEDHSLCASKKVKVKTDGGIWYLESLSEDRFSASFEILEEINQVTLDIEGQELFIECIELGNPHGVTFVDRDSKVDLSVMGEKLQTNKLFPDGVNFGLANIVNDNEINLRVYERGVGETLACGSGACAAALIGIKNKAMSSPVKVNFKQGSILVDYKIGSRKIYAEGSATFLKEIVIKI

SEQ ID NO: 154579 - protein, 264 aa, Unknown
  Bacterial polypetide isolated from the Sargasso Sea
MDGLGNDFVIIDRRKNSINLTKEKIIELGSRSQIGFDQIIFIEKEKENSFPITIFNSDGGEVSACGNGSRCVAYLLGKNLNTKEIKLKTNNRLLNAKIVGNLQVELEMGKPLFGSEDIPLSKKINPADITLEIHNKKFTGGFCVNVGNPHIIFFMENCFEQDLKSIGPKIENHVLFPEKINVTMAQIIDENNITVNVWERGAGLTKACGTAACATAVAAFKNKLVNNEVDIKFKEGFLNIKIDKTENIFMTGPVSEIKKIDFET

SEQ ID NO: 154580 - protein, 263 aa, Unknown
  Bacterial polypetide isolated from the Sargasso Sea
MPIDLYIYSGLGNIIAIIDSLRNDISINSEDVLKIYQNHKIDFDQLIMVLPPKEPKNDFDAKIFNNDGSIASNCINGARCVSKFIEDYSLCASKKVKVNTDGGIWYLESLSEDKFSASFEFLEEINQVTLDIGGQELFLDCIELGNPHGVTFEDRGSKIDFPVMGEKLQTNKLFPDGVNFGLANKVNDNEINLKVYERGVGETLACGSGACAAAVIGISNKAMSSPVKVNFKQGSILVDYKIGSRKIYAEGPATFLEEIEIKI

SEQ ID NO: 154581 - protein, 244 aa, Unknown
  Bacterial polypetide isolated from the Sargasso Sea
MTNFAYMSGTGNDFIVGHYEGEVSEIQIIALVSDAEYEVDGVIFVEPLDNNSVKMHYFNNDGSDAELCVNGVRCVAKFALDNNYLEVDRFIVKAPVGDLEVYVDKNIVEVSTPIPTYEEEKINVNSFEGVKSSVGNPHFMIEVEDVDGLDLENLNSEVVNENIFPEGVNVEIYQIVSRNYIKARVFERGVGETDACGSGALCMFNYLNKTDQIDNNSYVMYPGGYLNLRFENDNLYLSGEVIYL

SEQ ID NO: 154582 - protein, 265 aa, Unknown
  Bacterial polypetide isolated from the Sargasso Sea
MDGLGNDFVIIDRRKNPVSVSKEKIIELGKRDNIGFDQMIFIDELDHKTPNYNPITIFNSDGDKVTACGNGSRCVAKILFDENKKEDAVIVTSNRILEAKKVSENSIRLAMGEPIFDWNKIPLSKNIDHKKISLKVDGIELKEGFALNVGNPHIVFFVEDCFKYDLKKIGPLVECHELFPEKINVTFAQKKDSSNILVNVWERGAGLTKACGTAACATAVVAFEKGYAENNTNIHFKEGFLNIQYDRLILMTGPVSDIKEIKIKL

SEQ ID NO: 154583 - protein, 265 aa, Unknown
  Bacterial polypetide isolated from the Sargasso Sea
NGLGNDFVVIDQRVSEFDLSEEQIKLICNRTDGVGCDQLIMIRKSQDNSDPLIKFFNSDGSEIDACGNGSRCVANFLMKETKSEKINLTTRERTIACEKIDDVTVSVNMGKPKFKWNEIPLTKDVDPEDINFSIRDLTLKKPFLVNIGNPHIIFFDDEIEKYDVESFGSLIENDSLFPEKINVSFAKLKSDNHIVLNVWERGAGKTNACGTAACATAVAGVEMGVIKNKVTVTLPGGDLEIYYKSSDNIIMTGPTEINFTDKYKL

SEQ ID NO: 154584 - protein, 280 aa, Unknown
  Bacterial polypetide isolated from the Sargasso Sea
MNKDTNQIMALLNAYRMDGLGNDFVIIDRRKKSIDLTKDKIIELGRRSNIGFDQIIFIEKEKENFFPITIFNSDGGEISACGNGSRCVAYLLGKNLNTKEIKLKTKNRLLNAKIVGNLQVELEMGKPLFSFNEIPLSKTVNPADITLEINNKKFTSGFCVNVGNPHIIFFVKDCFEHDLKMIGPKIENHDLFPEKTNVTMAQVIDKNNINVNVWERGAGLTKACGTAACATAVAALKNKLSDDKVDIKFKQGSLKIKIDKTDNIFMIGPVSEVKKIELEV

SEQ ID NO: 154585 - protein, 272 aa, Unknown
  Bacterial polypetide isolated from the Sargasso Sea
MATINAYKMDGLGNDFVIIDRRTSSINLTKEKIIELGSRTNIGFDQIIFIEKEKENSFPITIFNSDGGEVSACGNGSRCVAYLLGKKLNTTEVKLKTNNRLLNAKIVEDFKVQLEIGKPLLGFEDIPLSKTINPADITIKINNKTFTGGFCVNVGNPHIIFFVKNCFEHDLNKIGPKIENHDLFPEKTNVTFAQIVDEKNITVNVWERGAGHTKACGTAACATAVAAFKSRLINNEVDIKFKEGFLNIKIDKTDNIFMTGPVSKVKKIEIKI

SEQ ID NO: 154586 - protein, 272 aa, Unknown
  Bacterial polypetide isolated from the Sargasso Sea
MAGINAYRMDGLGNDFIIIDRREKFIEIKKNKIIELGNRANIGFDQIIFIEKQREDSYPITIYNSDGGEVSACGNGARCVAYLLSKNLNTKKIQIKTNNRLLNAKIVGDFQVELEMGKPLFETEEIPLSKKINPNNVVLDINNQKFSEGFCVNVGNPHIIFFNKDYLKHDLRVIGPKIENHDLFPEKTNVTFANVIDKKNIKVNVWERGAGLTKACGTAACATAVASFSKNLTERKVQITFDQGSLKIEYNKDKNIFMTGPVSKINELSISI

SEQ ID NO: 154587 - protein, 272 aa, Unknown
  Bacterial polypetide isolated from the Sargasso Sea
MATINAYKMDGLGNDFIIIDRRSDPINLTKDKIIELGKRSNIGFDQIIFIEKEKENSFPITIFNSDGGEVSACGNGSRCVAYLLSKNLNVNQIKLKTSNRSLNAKIVGNLMVELEMGKPLFNFEDIPLSKTINPANVSLNVKGEKFTGGFCLNVGNPHIVFFVDDCFQHDLKEIGPLIENHELFPEKTNVTFAQILDERNILVNVWERGAGLTKACGTAACATAVAGKNNKLVENKVAIKFKEGILNIVLDEKNNIFMTGPVSEIKNIKVEI

SEQ ID NO: 154588 - protein, 273 aa, Unknown
  Bacterial polypetide isolated from the Sargasso Sea
MEFKAFKMDSLGNDFIIIDQRSKVINLSKEQIIKICDRKFIGCDQLIYIKKKEIDVGLEFYNSDGSQSGACGNGTRCVAYLLSKETKKNEITIWTSSGNLKSKIFDNKDVETEIGVPKFNWREIPLKYDLDTKNLNIKLISKDNKEHYGGIAVNVGNPHVVFFVDNLDNYNLEEIGPQIENNDLFPQRCNVTLAKKVSKNLVKVKVWERGAGLTKACGTAACATAVASNLEELKYSKTEIQFSLGKLIINIDDKNRIHMKGPVSDVKEINIKI

SEQ ID NO: 154589 - protein, 272 aa, Unknown
  Bacterial polypetide isolated from the Sargasso Sea
MEFKAFKMDGLGNDFVIIDRRKNSISIVKEKIVELGKRDNIGFDQLIFLDEIDPQAPNYIPITIFNSDGEEVEACGNGSRCVAKLICDEKKIEHAAVLAGNRVLKAQKISENNVRIVMGNPIFSWQKIPLSKNIDCKNINLKIGNEEFKNGYALNVGNPHIVFFVDDCYKYDLKQIGPLIENHELFPEKINVTFAQIKDSNNILVNVWERGAGQTKACGTAACATGVVAFEKKIAGNNNNIHFKEGFLNIEYDGIISMTGPVSDIKEIKIKL

SEQ ID NO: 154590 - protein, 284 aa, Unknown
  Bacterial polypetide isolated from the Sargasso Sea
MNKDTNQIMALINAYKMDGLGNNFIIIDRRKNALELNKDKIVNIANKKMVPFDQLITLEKEEKNIFPIKIYNPDGIEVGACGNGSRCVAYLISKEIKKTKVSIKAENRILDAEVIDKQIVTINMGFPKFNDWKDIPLENERLNPKMVPIDFLEKEYGTGTCVNVGNPHIIFFVKDCWKVDIQKIGPVIENHHYFPERVNVTFAEVLGDHENIKINVWERGAGQTKACGTAACATVVAAYLKSLAKNNCNVHFKQGTLKINYDRGNGQVYMSGPVSEVKKINLNI

SEQ ID NO: 154591 - protein, 274 aa, Unknown
  Bacterial polypetide isolated from the Sargasso Sea
MDIKAFKMDGLGNDFVIIDRRKNEINLSKEQIIKIGDRNNVGFDQIIFIEKEIKGVFPIKIYNPDGIEVGACGNGSRCIAYLISKENNQKTIKLEADKRILEAEILGERMVRINMGFTKFKEGKDIPLIEGLDPRKVSIDFLEKEYGFGYCVNVGNPHIVFFVKDCEKVDIEKIGPKIENHHYFPERINVTFAEVADDCKNIKVNVWERGAGKTKACGTAACATVVVGYLNTLTERICNVHFKEGSLEIFSDMGDCHVYMTGPVSDIKEITLKI

SEQ ID NO: 154592 - protein, 239 aa, Unknown
  Bacterial polypetide isolated from the Sargasso Sea
MRFKKSINKDKTKNMNNLEAYKMDGLGNDFIIFDNRKNSISLSKDQIIKIADRNNIGCDQVIFIDKDSSNDPFLKFYNSDGGEIAACGNGSRCVGYLLMKENQTKNIILKTQVGTLKAELKNENLVCINMGQPNFEWDKIPLLNKMDYKNLKIKINDENGKEIIGGFALSVGNPHIVFFVEDLNKFNIKKIGPVIENHNYFPEKCNVTLAKIKNKKHAIVKVWERGAGITKACGTAACA

SEQ ID NO: 154593 - protein, 160 aa, Unknown
  Bacterial polypetide isolated from the Sargasso Sea
MEFEAFKMDGLGNDFIIIDQRINNLNLSNDQILKICDRDFIGCDQLIYIKKSQKADADVAFFNSDGSRSDACGNGTRCVAYLLSIEKNKKEIEISVSSKILKSKVLNNKDVETIIGTPNLEWNKIPLSKNLDTKNLSLGMIDIDGNKMNGGIAVNVGNPH

SEQ ID NO: 154594 - protein, 166 aa, Unknown
  Bacterial polypetide isolated from the Sargasso Sea
MEFKAFKMDGLGNDFVIIDNRSNNVELNKDQIIKICDRNFIGCDQLIFINNSDNADADLEFYNSDGSGSDACGNGTRCVAFLLSKEKNTKNINVQVASKQLNSKLLDDGQVETIIGVPRTSWKEIPLSKKLDTKNLGIIIEDNNNQEVSGGIAINVGNPHTIFFVD

SEQ ID NO: 154595 - protein, 272 aa, Unknown
  Bacterial polypetide isolated from the Sargasso Sea
MAAINAYRMDGLGNDFIIIDRRENFIEIKKNKIIELGNRANIGFDQIIFIEKQREDSYPITIYNSDGGEVSACGNGARCVAYLLSENLNTKKIQIKTNNRLLNAKIVGDFQVELEMGKPLFGSEEIPLSKKINPSNVVLDINDQKFSEGFCVNVGNPHIIFFDKNYLKHDLRVIGPKIENHDLFPEKTNVTFANVIDKKNIEVNVWERGAGLTKACGTAACATAVASFSKNLTERKVQIAFDQGSLKIEYNKDKNIFMTGPVSKINKLSISI

SEQ ID NO: 154596 - protein, 117 aa, Unknown
  Bacterial polypetide isolated from the Sargasso Sea
PHAVLRVDNVDDAPVHTLGPKLEHHPRFPQRVNVGFLQVLDRKHARLRVWERGAGETLACGTGACAAAVAAIRQGWMDSPVQLELPGGKLSIEWAGEGQPVMMTGPAARVYEGQIRL

SEQ ID NO: 154597 - protein, 266 aa, Unknown
  Bacterial polypetide isolated from the Sargasso Sea
MDGLGNDFVIIDERFDKINLRNKDIIKICNRKFIGCDQLIIIREADQNDAELIFYNSDGSLAGACGNGTRCVAYLLSKENNKNLITLKTLGGILESKIYENQIVETKIGPGKLSWADVPLKEKMDTRNLNFSFEDIQVEMKNGTAINVGNPHVVFFVNELEKFNIEKIGPKIENHNFFPEKCNVTIAKKINENHIKLKVWERGAGLTKACGTAACATALAGKINNLIKSPVNLEFELGKLEINVDDNNFISMKGPVSKIQEIKINF

SEQ ID NO: 154598 - protein, 253 aa, Unknown
  Bacterial polypetide isolated from the Sargasso Sea
MDGLGNDFVIIDKRSNKIDLSKDQILKICDRSFIGCDQLIYITENNKSDAGMEFYNSDGSTSGACGNGTRCVAYLLSKEKNKDEINLVVSSTKLKSKILKDNLVETFIGVPKTNWDQIPMNKSLDTKNLGLEIKDRENAITKGGIGVNVGNPHVIFFVNDINKFEIEKIGPQIENHKLFPEKCNVTLAKKVGDNHYKVKVWERGAGLTKACGTAACATAVAANLGKLENTKTEIEFNLGRLLISIDDNKVISM

SEQ ID NO: 154599 - protein, 111 aa, Unknown
  Bacterial polypetide isolated from the Sargasso Sea
MLNFSKMHSLGNDFMVIDGVTTSVELDPEQVAAWGNRQRGIGFDQLLLVAPPSSPACDFDYVIFNADGSEAQQCGNGTRCVTDFVHRLGLTRQNQLSWHSKGGIIRTAKQP

SEQ ID NO: 154600 - protein, 273 aa, Unknown
  Bacterial polypetide isolated from the Sargasso Sea
MENIIFEKYQGNGNDFIIIDSRNNEIFNKFNSNVFFDIKKLCNRQFGIGGDGVIFIVEPDGNNFAKMIIYNSDGSEAQMCGNGIRCLVEYIHKSNKINNDSSEYRIETRAGLKIAQYNDGEITVKMGKPILETNRIPTTIDTKQNNLPTYFFKESNFEQKGYAIGMGNPHLIFFVKDINKISLSLLGPIFENNKLFPEKTNVHFSQILDRDNIKVRVWERGAGPTLACGTGACAVHVAAYKLGLCNSETTINLPGGNLKINWSRIEDEILMTG

SEQ ID NO: 154601 - protein, 231 aa, Unknown
  Bacterial polypetide isolated from the Sargasso Sea
MDGLGNDFVIIDNRQKITNLTKDQIIKICDRNFIGCDQLIFIDPDSSADASLRFFNSDGGESGACGNGTRCVADLISKEKNNKSIVLNTLSGKLKSLILDKKIVETEIGKARLKWNEIPLSKEMDTKNLNIKIIDTNNKELLGGTAINVGNPHIVFFVKKIEDFNIEKIGPEIENHEIFPEKCNVTIAQIFNKNLIKVKVWERGAGLTKACGTAACATAYAGKLNNLTENK

SEQ ID NO: 154602 - protein, 227 aa, Unknown
  Bacterial polypetide isolated from the Sargasso Sea
MDGLGNDFVIIDNRHKTTDLTKQQIIKICDRKFIGCDQLILINKNDTSDASLEFYNSDGGTSGACGNGTRCVADLLSKEHNKSLITLTTQSGDLKSEILGDKLVSTEIGKGKIEWNEIPLSKKLNTNNLNIKISDLDNNNYMGGTAVNVGNPHVIFFVDNNENFEIHKIGPEIEHHPLFPERCNVTLATVVDKELIKVKVWERGAGLTKACGTAACATAFAAMNNGL

SEQ ID NO: 154603 - protein, 269 aa, Unknown
  Bacterial polypetide isolated from the Sargasso Sea
MQKVDFIKMHGLGNDFVIIDKRSNNIAITEDIIKRLSDRRTGAGCDQLITINNTNNQSADAEIEIFNPGGDRAEACGNGTRCVAKILFEEDSNKEILKIQSDAGILESKRIDNNISVNMGSIKNTWDKIPLSKEIDTMNIPISIDGYSNGVAVNVGNPHVVFFGKSIKDTDLESIGPRIENHELFPKKTNVEIVKVINTNLIEMRVWERGVGITLACGSGACAAVYAAWKKGLIENNAEVKLEKGSLHINIINNESIMTGPAEIVIGVV

SEQ ID NO: 154604 - protein, 264 aa, Unknown
  Bacterial polypetide isolated from the Sargasso Sea
MKLYNFTKMHGLGNDFLIFPWSEQLPQKNLIKALSSRSKGVGCDLVVFLVKLEKNIANYKTHFFNHDGTRAEICGNALRCIGKLHYERFNSKNCLIETDSGLIDIEFNDDYTVSVDIGSPKFDWKDVPLIREMDGSNLGFDFPYLKNGFALNIGNPHLVFVVDKIDKKKLIQDSLKVRNSKIFPEGVNINVVEILKKNEISILTSERGVGLTEACGTGACASVIATNRMQLVENKVSVNMPGGGLKVEITSNEHIFMTGGATKV

SEQ ID NO: 154605 - protein, 268 aa, Unknown
  Bacterial polypetide isolated from the Sargasso Sea
FVVLPDLEGKMELSAERVRWICNRRHGIGADGVLRVVRCANDPEFASFADVAEFFMDYRNADGSIAEMCGNGARVFVRYLHATGSLTGRTTVVATRGGLVEAHVGGHEAEEIAISMGVATMQDGASEVSVALGERRWDAVAVSVPNAHAVVFVESLDADVQSLAQAPVVAPAEAFPDGVNVEFAERVAPGHVRMRVHERGVGETRSCGTGACAVAWVAASEAGDQTGSFRVDVPGGTVWVDIEPDGPLVLRGPAELVARGTVQWPRGA

SEQ ID NO: 154606 - protein, 243 aa, Unknown
  Bacterial polypetide isolated from the Sargasso Sea
MDSINTNNLPFIKMHGLGNDFVIIDARKRDIQLTQKVISGIADRHFGVGFDQLAVISKGEFDAHLTFYNADGSESLACGNATRCIARHLMDEGSKEKLILTTKHGQIPAIDLGNGVTSVNMGQPELDWDKVPLAENIPTLELPIDGTPTATGMGNPHCTFFVEDASKINLDEMGPKFENHPLFPERTNVQIASISAPDQIRMRVWERGVGVTLASGSSSCAAAVAANRRGLTGKKVQIELDGG

SEQ ID NO: 154607 - protein, 143 aa, Unknown
  Bacterial polypetide isolated from the Sargasso Sea
ENSNNKHIIEVEDQEIELGVIDLGNPHAVSFKELNEGISLKRVGEVLQNSEWFPEGVNFGVGKILSKNEIQLRVYERGAGETLACGSGACAAALIAINDQTIESPVRIKFEKGSIFIDYNIENQEITAKGEAEFIEQIHISIQ

SEQ ID NO: 154608 - protein, 184 aa, Unknown
  Bacterial polypetide isolated from the Sargasso Sea
EYRIETKAGLKIAKYINDEITVKMGVPILDSQNIPTTIEKKINSIPSHEFTEKNFNNLGYAVGMGNPHLIFFVENLESIVLSRLGPIFEKNELFPEKTNVHFCQILNRDNIKVKVWERGAGPTLACGTGACAIHVAAYKLGLCNPQTIVSLPGGNLKIDWSKDDCEVIMTGNAKKVFSGSMLLN

SEQ ID NO: 154609 - protein, 274 aa, Unknown
  Bacterial polypetide isolated from the Sargasso Sea
MDIRAFKMDGLGNDFVIIDNRQQITNLTKEQIIKICDRNFIGCDQLILIENDKSSDACLKFFNSDGGESGACGNGTRCVAELISKETNKKTIVLKTLSGNLKSEILGNNIVTTEIGKAKIEWNEIPLSKKLNSKNLNIKIHDKHNKEYSGGTAVNVGNPHIIFFINKVDSFDIEKIGPDIENHEIFPEKCNVTIAEVINKNLIKVKVWERGAGLTKACGTAACATAFAGKLNKLTENKTDIEFKNGKLSILIDERNSIHMKGPVSDIKEITFKL

SEQ ID NO: 154610 - protein, 154 aa, Unknown
  Bacterial polypetide isolated from the Sargasso Sea
PNLKPNKIPLKASKRELTYIIRTEEHTVFSGAVSMGNPHCVLEVDDIHTAEVNTLGPLLENHERFPQRANVGFMQVISQDHIKLRVWERGVSETLACGTGACAAVVIGQVQNKLANTVQVDLPGGSLQVRWQGEGHPVRMTGPAEHVFDGQVAL

SEQ ID NO: 154611 - protein, 250 aa, Unknown
  Bacterial polypetide isolated from the Sargasso Sea
MKKITFEKYQGNGNDFIVIDSRGNDFYKNYGTNKIFDIKQICNRQFGIGADGVIFIEEPNEDNYAKMIIFNSDGSEAQMCGNGIRCLVEYLHVNDSMNNKNIEYKIETKAGLKIAKYINDEITVKMGVPILESQNIPTTIEKKINSIPSHEFIEKNFNNIGYAVGMGNPHLIFFVKDIESIVLSRLGPIFEKNELFPEKTNVHFCQILNRDNIKVKVWERGAGPTLACGTGACAIHVAAYKLGLCNSQTI

SEQ ID NO: 154612 - protein, 253 aa, Unknown
  Bacterial polypetide isolated from the Sargasso Sea
KGSMKLIFTKELISKLSDRKSGAGCDQLITINNSSKKGIDIDAEIKIYNPSGDQAEACGNGTRCVAKLLFEESNKNDIKILSDAGILVAKQKDNNISVNLGKLTTNWKKIPIMKDMDTMNVPIKINNFSNGVAVNIGNPHLVFFGQNINDVDLGTIGPNIENHKFFPNKINVELVEIINRNKIKIRVWERGAGLTLACGSGACASVYAGTLKNLLENEVEVILERGSLYINIVNDEAIMTGPAEISFYGSLDY

SEQ ID NO: 154613 - protein, 264 aa, Unknown
  Bacterial polypetide isolated from the Sargasso Sea
MDIKAYKMDGLGNDFVIIDQRIKNIDLSKDQIVKICNRNFIGCDQLIIIKKNPELDAELEFYNSDGSTSGACGNGTRCVANFLSREKNQKKITVSTSSGVLKSNILDNNSVETEIGIPKVKWNEIPLSENLDTKNLKIKILNKNNIEHIGGTAINVGNPHVIFFVEDVENFDLKKIGPEIENHKLFPEKCNVTLAKVINKNLIKVKVWERGAGLTKACGTAACATAIAGNINGLVEKKTDIEFKLGKLSIFIDDKNIVYMNGPV

SEQ ID NO: 154614 - protein, 131 aa, Unknown
  Bacterial polypetide isolated from the Sargasso Sea
DEFEAFCLSMGNPHAVIFINNLKELENLNINSIGPRLEKHSIFPEFANIEFISVLEDKSLRMRVWERGAGITSACGSGACAALVAASLLDKSAKENKIVLDGGDLFIKWLDNGSVTLSGDTERVFEGFIGE

SEQ ID NO: 154615 - protein, 274 aa, Unknown
  Bacterial polypetide isolated from the Sargasso Sea
MDIKAFKMDGLGNDFVIIDNRQKITNLSKEQIIKICNREFIGCDQLILITKNDSSDASLEFYNSDGGTSGACGNGTRCVADLLSKENNKSLITLTTQSGDLKSKILGEKLVSTEIGQGRTEWNEIPLSKELDTNNLNIKITDLDNNHHSGGTAVNVGNPHIIFFVDNNENFEIKKIGPQIEHHSLFPERCNVTLATVVNKELIKVKVWERGAGLTKACGTAACATAFAAMRNKLSGNKVDIEFSTGKLSILIDENNSIHMKGPVSDIEEINIKI

SEQ ID NO: 154616 - protein, 251 aa, Unknown
  Bacterial polypetide isolated from the Sargasso Sea
MDGLGNDFVIIDQRVKAVNLTKENIIKICSRDFIGCDQLIYINKNNDNRDKLIFYNSDGSISGACGNGTRCVAKLLSKEYGKEEINLETSSGNLHSLILKENLVETNIGIPSMEWDKIPLIKEMNTKNLNITINDINKKKFTGGIAINVGNPHIIFFVENNNNYEIENIGPVIEQHEYFPEKCNVTIATIKNENLISVKVWERGAGLTKACGTAACATAYAGFITNKVSNYVDIKFSTGILSIRIGNDNSI

SEQ ID NO: 154617 - protein, 259 aa, Unknown
  Bacterial polypetide isolated from the Sargasso Sea
MKNIPFDKYQGNGNDFVVIDSRGNDLYKNYKTNKSFDIKKICNRQFGIGADGVIFIEEPNEDNYAKMIIFNSDGSEAQMCGNGIRCLVEYLHINDSIKNKNIEYKIETKAGLKIAKYINEEITVKMGVPILDSQNIPTRIEKKINSIPTHNFIEKNFNNKGYAVGMGNPHLIFFVQDLESIAVSSLGPIFEENELFPEKTNVHFCQILNRENIKVKVWERGAGLTLACGTGACAIHVAAYKLGLCNSETIVTLPGGNLK

SEQ ID NO: 154618 - protein, 236 aa, Unknown
  Bacterial polypetide isolated from the Sargasso Sea
MDGLGNDFVIIDQRSQNYNLSKDQIIKICGRDFIGCDQLIFIKNSGKKDAELEFYNSDGSISGACGNGTRCVAELLSKESDDKEIILWTSSGTLKSKILGNNLVETEIGVAKTNWDEIPLKKDLNTKNLNIKIISKNNNEHIGGTSINVGNPHVVFFIDNIEDYDLKKIGPEIENHNYFPEKCNVTLAKVINRNLIKVKVWERGAGLTKACGTAACATVVAANINGLTDKQADVEF

SEQ ID NO: 154619 - protein, 249 aa, Unknown
  Bacterial polypetide isolated from the Sargasso Sea
MKNISFEKYQGNGNDFVIIDSRGNELYKNYKTNKIFDIKKICNRQFGVGADGVIFIEESNEDNYAKMIIFNSDGSEAQMCGNGIRCLVEYLHVNDSMNNKNIEYKIETKAGLKIAKYINDEITVKMGVPILECQNIPTKIEKKINSIPSHEFIEKDFNNMGYAVGMGNPHLIFFVKDIESIVLSRLGPIFENNELFPEKTNVHFCQILNRDNIKVKVWERGAGPTLACGTGACAIHVAAYKLGLLIHKP

SEQ ID NO: 154620 - protein, 190 aa, Unknown
  Bacterial polypetide isolated from the Sargasso Sea
MRKIEFIKMHGLGNDFVIIDRRKNNYKINEELIRKLSDRRTGAGCDQLITIDKNLSSDHDASIKIFNPSGDSAEACGNGTRCVAKLLFQEKKTKNIKLHSEAGVLYAKKINDDIISVNLGKVSYNWKDIPLSKNVDTLNMPIINKNFVYSVAVNVGNPHIVFFGQNIDEFKLEDFGPKIEHDSLFPEKIN

SEQ ID NO: 154621 - protein, 102 aa, Unknown
  Bacterial polypetide isolated from the Sargasso Sea
MQKVDFIKMHGLGNDFVIIDKRSNNIVITEDIIKRLSDRRTGAGCDQLITINDTTNKSVDAEIEIFNPGGDRAEACGNGTRCVAKILFDEDSNREILKIQSD

SEQ ID NO: 154622 - protein, 214 aa, Unknown
  Bacterial polypetide isolated from the Sargasso Sea
MHGLGNDFVVIDSRRKSTYLTTNLIKKLGDRNFGVGFDQLAIIHDSKVSDARLTFFNSDGSKSVTCGNATRCIANFLMEEIKRDEIELSTDHKLLKAKREADGSVSVNMGLPEIEWQKIPLLEDVDTLFLPIPGKPTATSMGNPHCSFFVDNLDQVKIEAEGAEIENHPLFPQKTNVQFVSLISKDRLRVRVWERGVGVTKASGSSACAAVVAS

SEQ ID NO: 154623 - protein, 243 aa, Unknown
  Bacterial polypetide isolated from the Sargasso Sea
MDGLGNDFVIIDNRQKVTELSKEQIIKICDRNFIGCDQLILIEKNNISDASLKFFNSDGGESGACGNGTRCVADLISKEKDNKNIILTTLSGNLKSKILGNNLVTTEIGNAKIRWNEIPLSDELNTKNLNIKINDLNDHEHSGGTAINVGNPHVVFFVDEIKNFDIEKIGPQIENHKIFPEKCNVTIAKVVNKNLIKVKVWERGAGLTKACGTAACATAFAGKINNLTDNNTDIEFETGKLSI

SEQ ID NO: 154624 - protein, 286 aa, Unknown
  Bacterial polypetide isolated from the Sargasso Sea
MNNIIFEKYHGNGNDFIIIDSRNSNIFKKFLSDKTIDIKNLCDRQFGIGGDGVIFILEPDRNNYAKMIIYNSDGSEAQMCGNGIRCLVQYLHNSNKGSYSVSEYRIETKAGIKIAQYNNGEITVKMGKPILETKSIPTKIDTKINSIPSYLFKEPNFEQQGYAVGMGNPHLIFFLEDITQISLSLLGPVFEKHKLFPEKTNVHFSQIINRDNINVLVWERGAGPTLACGTGACAVHVAAYKLGLCNSKTEINLPGGHLIINWSRSEDEILMTGSAKKVFSGTYILK

SEQ ID NO: 154625 - protein, 214 aa, Unknown
  Bacterial polypetide isolated from the Sargasso Sea
MHEFKFIKMNGLGNDFIVIDQRVSEFDLSEEQVKLICHRTKGVGCDQLIMIRKSQKNSDPLIKFFNSDGSEIDACGNGSRCVANFLMKETKSEKINLKTRERTIACEKIDDVTVSINMGKPKFKWNEIPLTKDINPMDINFSIKDLTLKKPFLVNIGNPHIIFFDDEIEKYDVESFGSLIEKDNLFPEKINVSFAKLKNDNHILLNVWERGAGK

SEQ ID NO: 154626 - protein, 127 aa, Unknown
  Bacterial polypetide isolated from the Sargasso Sea
MQKINFIKMHGLGNDFVIIDRRVNEINITKELISKLSDRKSGAGCDQLITINNSSKKDIDIDAEIKIYNPAGDQAEACGNGTRCVAKLLFEELNKNDIKILSDAGILVAKQKDNNISVNLGKLTTNG

SEQ ID NO: 154627 - protein, 223 aa, Unknown
  Bacterial polypetide isolated from the Sargasso Sea
TINASKDSNAEVKIEIFNPSGDKAEACGNGTRCVAKLIFEESKKNEVNILSDAGLLKAKKVDSNNISVNLGQLSTDWKIIPLSKKVDTLNIPIKIDEFENGVAVNIGNPHIVFFGKNINNVDLSKIGPDIENNSLFPNKTNVEIIEIINRKKIKMRVWERGAGITLACGSGACAAVYAGQLKDYLDNNVEVLLDLGSLFITINNKEAIMTGPAEISFHGNIDI

SEQ ID NO: 154628 - protein, 232 aa, Unknown
  Bacterial polypetide isolated from the Sargasso Sea
TGAGCDQVITINQSLNNNSDATIEIFNPSGDRAEACGNGTRCVAKLLFKENKNIDSLNISSDAGILIAEKKDNNISVNMGKVSINWKDIPLSEEMDTLNIPLHIEGFSRGVAVNIGNPHVVFFGKNINQLNLLQIGPKIENHKFFPNKTNVEFVEVINLKKIKMKVWERGAGITLACGSGACAAVYAGWKKKLIDNQAEVLLEKGLLNINILNEEAIMTGPAEVSYHGYVEI

SEQ ID NO: 154629 - protein, 270 aa, Unknown
  Bacterial polypetide isolated from the Sargasso Sea
NDYVFIDGRNSTLNWSSLAVSISDRHFGVGSDGLIVALESEDADIRMQMYNLDGSEGKMCGNGIRCFVSFGVNIGLLERDSASYSVETASGTLEVTPIWENDQMVAASVNMGQPGFLSSEVPFVLEGYDAVEDHDLEIEGQHFAVSALSMGNPHAVTILDTPISSFDLAHIGPKIENHPMFPEQVNFEIINILNRDSIALRVWERGSGQTLACGTGACAAAVIAIKKGLVNNKVTVKLPGGDLEIHWENNSDVYMKGPIATVFQGRYNLN

SEQ ID NO: 154630 - protein, 197 aa, Unknown
  Bacterial polypetide isolated from the Sargasso Sea
LFIENSTNNINIETNAGILEAWKDNNSNLISVNMGKPNFIWSEIPLSKNIDHTNVDLGFEKGNNAFCLSMGNPHAVFFVDNVESVNISLVGPKFENHPIFPEKANISFAEVKSKSKIKMKVWERGAGQTAACGSGACAVAVAAKQLSKINNNCEIILDGGILNVTILDDESIVLKGPTEISFQGIFGDRINKLIKFP

SEQ ID NO: 154631 - protein, 120 aa, Unknown
  Bacterial polypetide isolated from the Sargasso Sea
MQKIEFTKMHGLGNDFVIIDRRSKKIEINDDIIQKLSDRRTGAGCDQLITINDPKNNKVDVGIDIFNPAGDKAEACGNGTRCVAKILFDENNERETLKILSDAGTLIAKKSGDKISVNMG

SEQ ID NO: 154632 - protein, 199 aa, Unknown
  Bacterial polypetide isolated from the Sargasso Sea
MKPIIFQKMHGLGNDFVVIDSRDDDLFISTELVKSLADRHCGVGFDQLAVIYKSKKTGAAAKLDFWNCDGSKSATCGNATRCVAKLLMDETKSNEIKLMTSHAVLSCKRLANDKISVNMGQPQSSWKDIPLTESCDTLHLPLEGKPVATNIGNPHCTFFVEDIKKYNLEKIGTTYENHRLFKKKTNVQIAQVLSPKSIR

SEQ ID NO: 154633 - protein, 81 aa, Unknown
  Bacterial polypetide isolated from the Sargasso Sea
MQKIEFTKMHGLGNDFVIIDRRSQDIEINDKLIQKLSDRRTGAGCDQVITINNAMNQNTDVSIDIFNPAGDKAEACGNGTR

SEQ ID NO: 154634 - protein, 127 aa, Unknown
  Bacterial polypetide isolated from the Sargasso Sea
MREKLKFHKMQSLGNDFMVVEAITREISLKPSQIKAWANRSRGVGFDQLLLIEPPTDPEVDFRYRIFNADGSEAEQCGNGSRCVALLVNKLGLSHKDTLQWQTTRGLTKTVLYLSNREVTVETHMQP

SEQ ID NO: 154635 - protein, 242 aa, Unknown
  Bacterial polypetide isolated from the Sargasso Sea
MQKIEFIKMHGLGNDFVIIDQRVDNINITKDLINKLSDRKTGAGCDQLITIKTSKNDNAEAEIEIFNPSGDRAEACGNGTRCVARLLFQEFSKEEININSDAGLLKAKKIDEKNISVNLGKISTDWQKIPLSQKVDTLNMPIEVDGFESGVAVNIGNPHIVFFGKDIDSVKLDNIGPNIENNYLFPNKTNLEIVEIINKQKIKMRVWERGVGITLACGSGACAAVYAGQIKKYLHNNVEVLL

SEQ ID NO: 154636 - protein, 227 aa, Unknown
  Bacterial polypetide isolated from the Sargasso Sea
MDGLGNDFVIIDQRQNQIKLTKDQIKKICDRNFIGCDQLIFIKKNLKIDASLEFYNSDGSTSGACGNGTRCVAYLLSREMKKNKITLETETGNLESKVLGEKLVETKIGTAKTKWNEIPLLKELNTNNLNYKIIDKNKKEYFGGTAVNVGNPHVVFFINNIEDFNLEKIGPEIENDKLFTEKCNVTLAKIINKNHIKVKVWERGAGLTKACGTAACATAYSAKINGK

SEQ ID NO: 154637 - protein, 252 aa, Unknown
  Bacterial polypetide isolated from the Sargasso Sea
MDGLGNDFVIIDNRQKVTELSKEQIIKICDRNFIGCDQLILIEKNNTSDASLKFFNSDGGESSACGNGTRCVADLISKEKDNRTIILTTLSGNLKSKILGNNIVTTEIGNAKIKWNEIPLSEELDTKNLNIKINDLNNREHFGGTAINVGNPHVIFFVDEIKNFDIEKIGPQIENHKIFPEKCNVTIAKVVNKNLIKVKVWERGAGLTKACGTAACATAFAGKINNLTDNNIDIEFETGKLSIFIDEKILFI

SEQ ID NO: 154638 - protein, 207 aa, Unknown
  Bacterial polypetide isolated from the Sargasso Sea
FNPNGDIAEACGNGTRCVAKLLFNEKKSKKLKIKSDAGILQAKIVDKNNISVNLGKLSVNWKKIPLAKKIDTLNVPINIKGFALGVAVNVGNPHIVFIGKNIDKVNLSSLGPKIENNRLFPNKTNVEIIEKKNKKKIKMRVWERGAGITLACGSGACAAVYAGILKKLLANKVEVKLEKGSLFIDIDKQNAIMTGPAELSYKGSIKL

SEQ ID NO: 154639 - protein, 274 aa, Unknown
  Bacterial polypetide isolated from the Sargasso Sea
MDIKAFKMDGLGNDFVIIDQRNTQINLSKDQIIRICDRDFIGCDQLILIKKNRKIDAGLEFYNSDGSASGACGNGTRCVASLLSKENNKKEITLWTSGGTLKSKILEDNLVETEIGVSKTNWKEIPLNKELDTKNLNIKILDNNNKEHIGGTAINVGNPHIIFFVNNLENYDLNKIGPEIENHKFFPEKCNVTLAKVNNENLIKVKVWERGAGLTKACGTAACATAVAGNINKLSGKKVDIEFSLGNLSIFIDDNNSIHMKGPVSDIKNIEIKL

SEQ ID NO: 154640 - protein, 102 aa, Unknown
  Bacterial polypetide isolated from the Sargasso Sea
MTEFLKMHGLGNDFIVFDARDPENAVPDQISPAAARRLADRHFGIGCDQILVIRSSTKADVFMEILNSDGSQATACGNGTRCVADFVMPAGGSSILIETAAG

SEQ ID NO: 154641 - protein, 186 aa, Unknown
  Bacterial polypetide isolated from the Sargasso Sea
LTTKHKISVSTKSGNLTLYIEKDGQVTVNMGHPNFEPSKIPLKASKRELTYIIRAEEHTVFSGAVSMGNPHCVLEVDDIATAQVDVLGPLLENHERFPQRANIGFMQVISQEHIKLRVWERGVNETLACGTGACAAMVIGHMQSKLSSAVQVDLPGGTLQIRWSGEGHPVRMTGPAEHVFDGQVAL

SEQ ID NO: 154642 - protein, 127 aa, Unknown
  Bacterial polypetide isolated from the Sargasso Sea
MQKIEFTKMHGLGNDFVIIDKRSNQVEINDNLIRKLSDRRTGAGCDQLITINEPKNNNADISIDIFNPAGDKAEACGNGTRCVAKILFNENNEKESLKILSDAGTLIAKKVGDQINVNMGTVTTDWE

SEQ ID NO: 154643 - protein, 250 aa, Unknown
  Bacterial polypetide isolated from the Sargasso Sea
MDIKAYKMDGLGNDFVIIDQRIKNIDLSKDQIVKICNRNFIGCDQLIIIKKNPNLDAKLEFYNSDGGKSGACGNGTRCVANFLSRENNQKKITVSTSSGVLKSNILDNNFVETEIGIPKLKWNEIPLSENLDTKNLKIKILNKNNIQYIFGTAINVGNPHIIFFVEDIENFDLKKIGPEIENHKLFPEKCNVTLAKVINKNLIKVKVWERGAGLTKACGTAACATAIAGNINGLVEKKTDIEFKLGKLAI

SEQ ID NO: 154644 - protein, 223 aa, Unknown
  Bacterial polypetide isolated from the Sargasso Sea
MIKKTKKNNIPFTKMHGLGNDFVIIDWRGQESSLHADHIKLLGSRNLGIGFDQLAIIRTGSRNDIAAHLDFWNSDGSVSSTCGNATRCVADLLMSERNCKELTVSTNHDEIKCKKVNGELISTNLGQPKTIWNEIPLSVKCDTLSLPLKGKPVATSMGNPHCTYFVKDLEAHSIQEIGSATEVNSLFPERTNVQIAEVIDSSSVRVKVWERGCGVTMASGSSA

SEQ ID NO: 154645 - protein, 234 aa, Unknown
  Bacterial polypetide isolated from the Sargasso Sea
MNTIITNNLPFIKMHGLGNDFVIIDARERDIQLTQKVISGIADRHFGVGFDQLAVISKGEFDAHLTFYNADGSESLACGNATRCIARYLMDEGSKEKLMLTTAHGQIPAIDLGNGITSVNMGQPELEWDKIPISKNISTLELPIEGSPTATGMGNPHCTFFVEDAEKINLEEKGQKFENHPLFPERTNVQFASISAPDKIRMRVWERGVGVTLASGSSSCATAVAANRRGLTGK

SEQ ID NO: 154646 - protein, 267 aa, Unknown
  Bacterial polypetide isolated from the Sargasso Sea
MDGLGNDFVIIDQRHNHIELTNDQIKKICSRNFIGCDQLIFIKKNEKTDASIEFYNSDGGTSGACGNGTRCVAYLLSKEMNKDKIILGTESGNLESKILGEKLVETKIGLAKTKWNEIPLLKELNTLNLNYKIIDKNNKEYFGGTAVNVGNPHVVFFINNIEDFNLEKIGPEIENDKLFPEKCNVTLAKIIDENHIKIKVWERGAGLTKACGTAACATAYAAKINGKIKNETEIEFELGNLSIYIDENENISMSGPVSNIDQINIKI

SEQ ID NO: 154647 - protein, 273 aa, Unknown
  Bacterial polypetide isolated from the Sargasso Sea
MEFKAFKMDGLGNDFVIIDERFDKINLRNKDIIKICNRKFIGCDQLIIIREADQNDAELVFYNSDGSLAGACGNGTRCVAYLLSKENNKNVITLKTLGGMLESKIYENQIVETKIGPGKLGWADIPLKEKMDTRNLNFNFEDIQVEMKNGTAINVGNPHVVFFVDELEKFNIEKIGPKIENHNFFPEKCNVTIAKKINENHIKLKVWERGAGLTKACGTAACATALAGKINNLIKSPVNLVFELGKLEINIDDNNFISMKGPVSKIQEIKINF

SEQ ID NO: 154648 - protein, 267 aa, Unknown
  Bacterial polypetide isolated from the Sargasso Sea
MDGLGNDFVIIDVRDNKINLSEQQIIKICDRNFLGCDQLILIDKNNEADAQLIFYNSDGSESGACGNGTRCVAYLISKEMNKKEVNLITKSGKLYSKILGKNLVETTIGKAKTDWREIPLSKNKNTKNLGIKIEDKNQNIFTGGTAVNVGNPHTIFFVDNINNFDLEKIGPKLETSSLYPERCNITLAKIENKKKISVKVWERGAGLTKACGSAACATAFAANLNGLVGSHVDICFDLGNLSIILEHNNYIKMKGSVSEIEKIKVEL

SEQ ID NO: 154649 - protein, 274 aa, Unknown
  Bacterial polypetide isolated from the Sargasso Sea
MTNFNFIKMNGLGNDFVIIDQRDEPFQLSENQIKTICDRKQGIGCDQLIYIRNSDQNELYLMKFFNSSGEEISACGNGTRCVANYLMTETNSNEIKINTIEKIVNCKKLEDNIISVEMGKPKFHWDEIPLSHDVKQDVPTFKLGEKLITNPFFVNIGNPHVIFFVNDINDYNIDKFGPLIECNELFPEKINVSFAKMINNNKILLNVWERGAGKTEACGTAACATVVAAVESGLSENKVLVTLPGGNLDIHYNEEKNIIMTGPTQLDYEGEFKI

SEQ ID NO: 154650 - protein, 183 aa, Unknown
  Bacterial polypetide isolated from the Sargasso Sea
GNPHAVVQVEDLGSLDFERLGPALEQHPAFPARTNVHFVQVHAPNQLQVKVWERGAGPTLACGTGACATVVATHLRGACARQVTVQLPGGPLQIDWDSNNHIQMAGPAVFVFEGVLPSAGGSDAVEVIDCASLCSEGCIRPEACPSAAAREQAMTFLDRLSLDDMVGLANSSLEERTRRRAGF

SEQ ID NO: 154651 - protein, 122 aa, Unknown
  Bacterial polypetide isolated from the Sargasso Sea
MSMGNPHAIIRVEDLTKTAVKDIGETLGSHPDFPKGVNVGFMEIYSRAEIGLRVFERGAGETLACGSGACAAVVAGRILQNLDTKVKVRLPGGQLEVCWKGLGDSVVMKGPTQTVYEGMIEL

SEQ ID NO: 154652 - protein, 269 aa, Unknown
  Bacterial polypetide isolated from the Sargasso Sea
MAKMLKFTKMHSLGNDFMLVDGLSQEAAFNVSEIKSWSNRNTGIGFDQLLVIEPPGSPDSDFFFRIYNADGSEAEQCGNGTRCAARFAIEKGLTKKEVIEWQSLGGNFVTSYHSNNEIQTQISLSESGCKTIEIENIGLEEIREVHSINIGNPHAVTFVNNIHNLDVDSIGAAISKSQEFPEGVNVGFCQVVDRGFLRLRVFERGVGETMACGTGACAASIVSASKELTNNKVKVSMPGGKLKLVNQPEKESILLTGPAAKVFDGKLEI

SEQ ID NO: 154653 - protein, 274 aa, Unknown
  Bacterial polypetide isolated from the Sargasso Sea
MEIKAFKMDGLGNDFVIIDQRKEKISLSNDQIIKICDRQFIGCDQLIFIKKNNDLDAELEFYNSDGSKSDACGNGTRCVAHLLSKENSKKEINLIVASQILKSKIFENNLVETSIGSPKMNWNEIPLSKEIDTKNLKIKLVDKENKEFFGGIAVNVGNPHVIFFIENIDKFNLEKIGPEIESHELFPEKCNVTLAKKISPSLIKVKVWERGAGLTKACGTAACATAVAANLENLSNSKTEIEFSMGKLLVSIDKNHNIKMMGPVSEIKEIKINI

SEQ ID NO: 154654 - protein, 276 aa, Unknown
  Bacterial polypetide isolated from the Sargasso Sea
MDSINTNNLPFIKMHGLGNDFVVIDARERDIQLSQSVISGIADRHFGVGFDQLAVISKGEFDAHLRFYNADGSESLACGNATRCIARHLMDEASKESLILTTMHGQIPAVDLGNGVTSVNMGQPELEWDKVPISKNIPTLELPIEGSPTATGMGNPHCTFFVEDAEKINLEEKGQKFENHPLFPERTNVQFASISAPDKIRMRVWERGVGVTLASGSSSCATAVAANRRGLTGKEVQIELDGGVLNISWREEGVWMTGPTMKVFAGSFSEEFLNSL

SEQ ID NO: 154655 - protein, 275 aa, Unknown
  Bacterial polypetide isolated from the Sargasso Sea
MEINLYIFSGLGNVIALVDLLREDFCFSSEQVSKIAELGEVEFDQLICILPPESPDVDLSAEIYNVDGSVAKNCINGARCLAKFVVDEELIAKKEFSVATLGGLWNLKAHQNGEYSVKFLNPNNLDLKNNLPPENENHKHIISIEGNEIEIGVIDLGNPHAVSFKEIADGMALNFIGDALQNSDWFPDGVNFGLGKIVSNNEIELRVYERGVGETLACGSGACAAALIAIEDKTIEAPVKVNFEKGSIFIDYNVENNEILAKGEAKFIKQINVTI

SEQ ID NO: 154656 - protein, 274 aa, Unknown
  Bacterial polypetide isolated from the Sargasso Sea
MNIKAFKMDGLGNDFVIIDNREKVTNLTKDQIIKICDRDFIGCDQLIFINKDQNYDASIEFFNSDGGVSGACGNGTRCVAELLGKEKNKNTITLTTLSGHLKSHILGEKLVSTEIGLGRTKWNEIPLSEELDTKNLNIKIVDSNNNEFFGGTAVNVGNPHIVFFVEDNEQFAIEKIGPEIENHKLFPEKCNVTVATIVNKELIKVKVWERGAGLTKACGTAACATAYAANQAGLVSNKVDIEFSTGRLTISIDENKSIHMKGPVSDIKEINIEI

SEQ ID NO: 154657 - protein, 272 aa, Unknown
  Bacterial polypetide isolated from the Sargasso Sea
MQKVDFIKMHGLGNDFVIIDKRSNNIMITEDIIKKLSDRRTGAGCDQLITINNTNNLSADAEIEIFNPGGDRAEACGNGTRCVAKILFDEDANKEVLKIQSDAGILESKKIDKNISVNMGLIKNTWDKIPLRKEVDTMNIQISIDGYSNGVAVNVGNPHVVFFGKSIYETNLESIGPKIENHELFPKKTNVEIVEVINSKLIQMRVWERGVGITLACGSGACAAVYAAWKKGLIENNAEVKLEKGSLYINIINDEAIMTGPAEISYQGTLEI

SEQ ID NO: 154658 - protein, 238 aa, Unknown
  Bacterial polypetide isolated from the Sargasso Sea
MKIPFTKMHGLGNDFVIIESDANSVSINKKLIKKICSRNYGVGCDQLLLINSYSKEEVDLTIFNNDGSEVGACGNGVRCVASMIMEKNNVNQIYVKTITDKLKCWKNGNSISVNMGKPRFKWNQIPLSKNINPNKLMIDGYKIHCVSFGNPHGVIFFNNKSEFENVNIRAIGPKLEKNIIFKEGANIEFATILDDGKIKMRVWERDVGITLACGSGACATLVLASVNNLSPKKKPVFI

SEQ ID NO: 154659 - protein, 238 aa, Unknown
  Bacterial polypetide isolated from the Sargasso Sea
MKNITFEKYQGNGNDFVVIDSRGNDLYKNYKTNKIFDIKQICNRQFGIGADGVIFIEEPNEDNYAKMIIFNSDGSEAQMCGNGIRCLVEYLHVNDSMNNKNIEYKIETKAGLKIAKYINDEITVKMGVPILESQNIPTTIEKKINSIPSHEFIEKNFNNIGYAVGMGNPHLIFFVKDIESIILSRLGPIFEKNELFPEKTNVHFCQILNRDNIKVKVWERGAGPTLACGTGACAIHVA

SEQ ID NO: 154660 - protein, 267 aa, Unknown
  Bacterial polypetide isolated from the Sargasso Sea
MDGLGNDFVIIDNREKVINLTKDQIIKICDRNFIGCDQLILINKDQNYDASIEFFNSDGGVSGACGNGTRCVAELLGKEKNKDTITLTTLYGHLKSHILGEKLVSTEIGLGRTKWNEIPLSEELETKNLNIKIVDSNNNEFFGGTAVNVGNPHIIFFVEDNEQFKIEKIGPEIENHKLFPEKCNVTIATIVNKELIKVKVWERGAGLTKACGTAACATAFAAKQAGLASDKVNIEFSTGRLTISIDENNSIHMKGPVSDIKEIDIEI

SEQ ID NO: 154661 - protein, 267 aa, Unknown
  Bacterial polypetide isolated from the Sargasso Sea
MDGLGNDFVIIDQRHNYIELTNDQVKKICNRNFIGCDQLIFIKKNEKIDADMKFYNSDGSASGACGNGTRCVAYLLSKEKNKNKIILGTESGNLESKILEEKLVETKLGPAKTNWNEIPLVEELNTINLKYKIIDNNNKEHFGGTAVNVGNPHIVFFVNNIEDFNLEKIGPEIENDKLFPEKCNVTLAKINNENHIKVKVWERGAGLTKACGTAACATAYAAKINGKIKNKTEIEFELGKLSIFIDERKNISMTGPVSNINQINIKI

SEQ ID NO: 154662 - protein, 267 aa, Unknown
  Bacterial polypetide isolated from the Sargasso Sea
MDGLGNDFVIIDQRINNLNLSNDQILKICDRDFIGCDQLIYIKKSQKADADVAFFNSDGSRSDACGNGTRCVAYLLSIEKNKKEIEILVSSKILKSKVLNNKDVETIIGTPNLEWNKIPLSKNLDTKNLSLGMIDIDGNKMNGGIAVNVGNPHVVYFCEDIEKINLKKYGPLIENHEVFPEKCNVTIAQKISEQHYKIKVWERGAGLTKACGTAACATAVAANLNQLQNSNSKIEFSTGILNIQIDNELNIKMRGPVSEIEKINIKI

SEQ ID NO: 154663 - protein, 272 aa, Unknown
  Bacterial polypetide isolated from the Sargasso Sea
MQKVDFIKMHGLGNDFVIIDKRSNNIAITEDIIKRLSDRRTGAGCDQLITINNTSNQSADAEIEIFNPGGDRAEACGNGTRCVAKILFDEDSNKEILKIQSDAGILESKKIDNNISVNMGSIKNTWDKIPLSKEVDTMNIPISIDGYSNGVAVNVGNPHVVFFGKSIKDTDLESIGPRIENHELFPKKTNVEIVEVINSNLIEMRVWERGVGITLACGSGACAAVYAAWKKGLIENNAEVKLEKGSLHINIINNESIMTGPAEISYRGSLEI

SEQ ID NO: 154664 - protein, 56 aa, Unknown
  Bacterial polypetide isolated from the Sargasso Sea
MQKIEFTKMHGLGNDFVIIDRRSKKIEINDDLIQKLSDRRTGAGCDPLITINNPKN

SEQ ID NO: 154665 - protein, 274 aa, Unknown
  Bacterial polypetide isolated from the Sargasso Sea
MDIKAFKMDGLGNDFVIIDNREKITNLTKDQIVKICDRNFIGCDQLIFIEPDSSADANLRFFNSDGGESGACGNGTRCVANLLSNEKNNKSIILNTPSGKLKSEILEKKIVTTEIGKAKLKWDEIPLSKEMDTKNLNIKIIDTNKNEHLGGTAINVGNPHIVFFVKKIEDFNIEKIGPEIENHEIFPEKCNVTIAQIFNKNLIKVKVWERGAGLTKACGTAACATAYAGKLNNLTENKTDIEFATGKLSISIDENDSIHMKGPVSNIKEINIKL

SEQ ID NO: 154666 - protein, 286 aa, Unknown
  Bacterial polypetide isolated from the Sargasso Sea
MKNISFEKYQGNGNDFVIIDSRGNELYKNYKTNKIFDIKKICNRQFGVGADGVIFIEEPNEDNYAKMIIFNSDGSEAQMCGNGIRCLVEYLHVNDSMNNKNIEYKIETKAGLKIAKYINDEITVKMGVPILECQNIPTTIEKKINSIPSHEFIEKDFNNMGYAVGMGNPHLIFFVKDIESIVLSRLGPIFEKNELFPEKTNVHFCQILNRDNIKVKVWERGAGPTLACGTGACAIHVAAYKLGLCNSQTIVTLPGGNLKIDWSKDDCEVMMTGNAKKVFSGSMLVN

SEQ ID NO: 154667 - protein, 194 aa, Unknown
  Bacterial polypetide isolated from the Sargasso Sea
MQKINFIKMHGLGNDFVIIDRRVNEINITKELISKLSDRKSGAGCDQLITINNSSKKDIDIDAEIKIYNPGGDQAEACGNGTRCVAKLLFEELNKNDIKILSDAGILVAKQKDNNISVNLGKLTTNWKKIPIIKDMDTMNVPIKINDFSNGVAVNIGNPHLVFFGQNINDVDLGIIGPGIENHKFFPNKSMLRL

SEQ ID NO: 154668 - protein, 274 aa, Unknown
  Bacterial polypetide isolated from the Sargasso Sea
MDIKAFKMDGLGNDFVIIDNRHKTTNLTKQQIIKICDRRFIGCDQLILINKNNTSDASLEFYNSDGGTSGACGNGTRCVADLLSKENNKSLIILTTQSGDLKSEILGDRLVSTEIGKGKTEWNEIPLSKKLDTNNLNIKISDLDNNNYTGGAAVNVGNPHVIFFVDNNENFEIKKIGPEIEHHPLFPERCNVTLATVVNKELIKVKVWERGAGLTKACGTAACATAFAAMKNGLSSNKVDIEFSTGKLSIFIDENNSIHMKGPVSDIKEINIKI

SEQ ID NO: 154669 - protein, 286 aa, Unknown
  Bacterial polypetide isolated from the Sargasso Sea
MKNITFEKYQGNGNDFVIIDSRRNELYKNYKTNKIFDIKKICNRQFGIGADGVIFIEEPNEDNYAKMIIFNSDGSEAEMCGNGIRCLVEYLHLNDSMNNKNIEYKIETKVGLKIAKYINDEITVKMGVPILECQNIPTTIEKKINSIPSHEFIEKDFNNMGYAVGMGNPHLIFFVKDIESIVLSRLGPIFEKNELFPEKTNVHFCQILNRDNIKVKVWERGAGPTLACGTGACAIHVAAYKLGLCNSQTIVTLPGGNLKIDWSKDDCEVMMTGNAKKVFSGSMLVN

SEQ ID NO: 154670 - protein, 263 aa, Unknown
  Bacterial polypetide isolated from the Sargasso Sea
MDGLGNDFVIIDQREKKYDLNNSQIKKICDRGNIGCDQLILINKSDKFDAFLTFKNSDGSDSAACGNGTRCVASLLSKESSKNFITVETSSGKLESKILKNNLIQTNIGKPKTNWDQIPLSEKIDTKKIKVMVGDIEFLGTAINVGNPHIIFFINELEKIEIKKVGPILENHELFPEKVNVTFAKEQSKNHFKVLHWERGAGLTKACGTAACATAVAGEINGISKFPTEIEFKLGKIKINKDEQGNVIMEGSVSEIEHININI

SEQ ID NO: 154671 - protein, 274 aa, Unknown
  Bacterial polypetide isolated from the Sargasso Sea
MEFNAYKMDGLGNDFIIIDQRDRNTILSNDQIIKICDRKFLGCDQLIYIKKDNDLDAELEFYNSDGSKSDACGNGTRCVAHLLSKENNKKEINLKVASKTLKSKIFENNLVETSIGSPKLNWKDIPLSKLSDTKNLKIKIIDEKDKEYFGGIAINVGNPHIIFFVDDIDNFNIEKIGPEIENHELFPEKCNVTLAKQINENLIRVKVWERGAGLTKACGTAACATAVAANLGNSSESKTEIEFSTGKLLIKIDEKKNIRMMGPVSQIEKIKINI

SEQ ID NO: 154672 - protein, 274 aa, Unknown
  Bacterial polypetide isolated from the Sargasso Sea
MEFEAFKMDGLGNDFVIIDQRINSLNLSNDQILKICDRDFIGCDQLIYINKSQKADADVAFFNSDGSRSDACGNGTRCVAYLLSIEKNKKEIEISVSSKILKSKVLNNKDVETIIGTPNLEWNKIPLSKNLDTKNLSLGMIDIDGNKMNGGIAVNVGNPHVVYFCEDIEKINLKKYGPLIENHEVFPEKCNVTVAQKISEQHYKIKVWERGAGLTKSCGTAACATAVAANLNRLQNSNSKIEFSTGILNIQIDNELNIKMRGPVSEIEKINIKI

SEQ ID NO: 154673 - protein, 274 aa, Unknown
  Bacterial polypetide isolated from the Sargasso Sea
MDIRAFKMDGLGNDFVIIDNRQKITNLTKDQIIKICDRNFIGCDQLIFIESSKSSDANLKFFNSDGGESGACGNGTRCVAKLISEETKSENIILSTSNGNLESKILDKNIVTTEIGKAKLQWNEIPLSEKLDTKNLNIKIIDSNNKEHSGGTAVNVGNPHIVFFVNEIENFNIEKIGPEIENHKIFPEKCNVTIATIINKNLIRVKVWERGAGLTKACGTAACATAFAGKLNDLTENKTDIEFQTGKLSILIDDKNSIHMKGPVSEIKEIEFKL

SEQ ID NO: 154674 - protein, 274 aa, Unknown
  Bacterial polypetide isolated from the Sargasso Sea
MEFKAYKMDGLGNDFVIIDQRQKNIELSKDQIVKICDRDFIGCDQLIYINNSNDADAELVFYNSDGSGSDACGNGTRCVAYLLSKEKNKKNINLRVASKQLNSNLLDDGQVETIIGVPKTNWKEIPLSENLDTKNLGISIRDNNNHEISGGIAVNVGNPHTIFFVNEIANFNIEKIGPEIENHELFPQKCNLTLAQKINRNYYKVKVWERGAGLTKACGTAACATAVAANLENLENTRTEIEFSLSKLVISIDENQQIHMKGPVSSIKEIDINI

SEQ ID NO: 154675 - protein, 274 aa, Unknown
  Bacterial polypetide isolated from the Sargasso Sea
MEFKAFKMDGLGNDFVIIDNRSNNVELTRDQIIRICDRKFIGCDQLIFINKSNKGDAEMEFYNSDGSISGACGNGTRCVAFLIFKETDKKVVDLFVGSNQLKSKILENSEVETIIGVPKTHWKDIPMSKNLDTKNLGIEISDKNNSSSKGGIAVNVGNPHVIFFVDNIDDFDLKKIGPMVENNSLFPEKCNFTLANKIGNNHYKVKVWERGAGLTKACGTAACATAVAANLEKLENSSTEIEFSLGKLIINIDQDKKIHMRGPVSEIKEIKINI

SEQ ID NO: 154676 - protein, 274 aa, Unknown
  Bacterial polypetide isolated from the Sargasso Sea
MEFKAYKMDGLGNDFVIIDRREDDVNLSKEQLIKIGNRNNVGFDQIIFIEKRVKDAFPIKIYNPDGIEVGACGNGSRCIAYLISKENNQKKIKLEADKRILEAEILGEKMVKINMGFTKFKGWKDIPLKEGLDPRKVSIDFVEKEYGLGYCVNVGNPHIVFFVKDCEKVDIEKIGPKIENHHYFPERVNVTFAEVADDFKNIKVNVWERGAGKTKACGTAACATVVVGYLNGLTERICNVHFKEGALEIFSDMGNCNVHMTGPVSDIKEIKLKI

SEQ ID NO: 154677 - protein, 274 aa, Unknown
  Bacterial polypetide isolated from the Sargasso Sea
MEFKAFKMDGLGNDFVIIDQRQDQIELSNDQIKKICNRNFIGCDQLIFIKKNEKIDADIEFYNSDGSFSSACGNGTRCVAYLLSQEMGKNKIILGTESGNLESKILDKQLVETKIGPAKTNWNEIPLVEKLDTINLNYKIVDNNNKEHFGGTVVNVGNPHIVFFVNNIEDFNLEKIGPEIENDKLFPEKCNVTLAKIINENHIKVKVWERGAGLTKACGTAACATAYAAKINGKIKNKTEIEFELGKLSIFIDESKNISMTGPVSNIDQIKIKI

SEQ ID NO: 154678 - protein, 274 aa, Unknown
  Bacterial polypetide isolated from the Sargasso Sea
MEFKAFKMDGLGNDFVIIDQRHNHIELTNDQIKKICNRNFIGCDQLIFIKKNEKTDAGIEFYNSDGGTSGACGNGTRCVAYLLSKEMNKDKIVLETESGNLESKILGEKLVETKIGLAKTKWNEIPLIKELNTNNLNYKIIDKNNKEHFGGTAVNVGNPHIVFFINNIEDFNLEKIGPEIENDKLFPKKCNVTLAKIIDENHIKVKVWERGAGLTKACGTAACATAYAAKINGKVNNKTQIEFELGKLSIYIDESENISMSGPVSSINQIKIKI

SEQ ID NO: 154679 - protein, 274 aa, Unknown
  Bacterial polypetide isolated from the Sargasso Sea
MEFKAFKMDGLGNDFVIIDNRSNNVELNKDQIIKICDRNFIGCDQLVYINNSDNADADLEFYNSDGSAADACGNGTRCVAFLLSKEKNTKNISVQVASKQLNSKLLDDGQVETIIGVPKTNWNEIPLSKKLNTKNLGIIIEDNNNQAVSGGIAINVGNPHAIFFVNDVENFNLEKIGPEIENHEFFPEKCNFTLAQKLNENHYKIKVWERGAGLTKACGTAACATAVAANLEKLENSRTEIEFSLGKLIISIDESQQIHMKGPVSSIREIDINI

SEQ ID NO: 154680 - protein, 274 aa, Unknown
  Bacterial polypetide isolated from the Sargasso Sea
MEFKAFKMDGLGNDFVIIDQRYDHIELTNDQIKKICNRNFIGCDQLIYIKKNEKIDADMKFYNSDGSVSGACGNGTRCVAYLLSKEISKNKIVLGTESGNLESKILEEKLVETKIGLAKTNWDEIPLAKELDTINLEYKIIDNNNKEHFGGTAVNVGNPHIIFFVNNIEDFNLEKIGPEIENDKLFPEKCNVTLAKIINENLIKVKVWERGAGLTKACGTAACATAFAAKINGKIKNKTEIEFELGKLSIFIDDNGNIFMTGPVSNIDQIQIKI

SEQ ID NO: 154681 - protein, 215 aa, Unknown
  Bacterial polypetide isolated from the Sargasso Sea
MARCLVTGHRGYIGSRLFKKLEELGHEVVGIDRFEGIDINSVSGLIEAEDGLFHPHWVNFKPEYVFHLACIPRVAYSIERPVMTMKNNVIAGSNALNFARKIGAKRFIYSSSSSINGNGNGPTNPYGLQKMVTEVETRLYSELYGLDTVSLRYFNVYSKDQKASGPYATAVSNWMQHIRDGKNPFITGDGEQRRDMLHLDDAVSANIFAMEYEDN

SEQ ID NO: 154682 - protein, 197 aa, Unknown
  Bacterial polypetide isolated from the Sargasso Sea
MARCLVTGHRGYIGSRLFKKLKQLGHKVQGIDLLDDEWRGQAGYGKNVITTLSEGSDGLFHPHYFNFKPEYVFHMACWPRVGYSVENPVKTAKNNILAGSVVLNFARKVGAQRVVYSSSSSVVGNGNGPASPYALQKYTTELECRMYPELYGMDTVSLRYFNVYSYDQEASGPYATAVCNWMKAVRENIDPFITGDG

SEQ ID NO: 154683 - protein, 259 aa, Unknown
  Bacterial polypetide isolated from the Sargasso Sea
MKSIVTGGCGFIGTHLVNRLVKLGHEVIVLDRVQPNDINPKVRYYLQDLSEKYSKYIHLFESVNNVFHLASEVSIPYCVEKPNESMANNVLSTMNVLECARIHNIDKFIFSSTSAVYGNTMFNPNYETNQVQCLNTYSISKYSGEQLCKMYYELYGLKTVIFRYFNVYGEGQHKTGQYAPVMSIFKRQKDNKEPLTVIEPGYQTRDFVHVSDVVYANILASQKDIDVYGEVFNIGTGTRTEIQEIADLMSNYQIKIPER

SEQ ID NO: 154684 - protein, 225 aa, Unknown
  Bacterial polypetide isolated from the Sargasso Sea
MLSDFKLAPSILSADFSDLRNALKICDEGGADWIHVDVMDNQFVPNLTIGPPVVKSLRSVTDKFIDVHMMVIDPEKLVEPFARAGADNITFHIEATDDPEGVIDLIRSTGKMVGISLKPSTPFEMIIPFLEKIDLILVMSVEPGFGGQGYIAQSTERIMQIRKYLSEQCLDRIQIEVDGGIKLHNAQEVISAGGDILVAGSEVFGSEDPQRIIKEFYSAAKTIIS

SEQ ID NO: 154685 - protein, 225 aa, Unknown
  Bacterial polypetide isolated from the Sargasso Sea
MLSDFKLAPSILSADFSDLRNALKICDEGGADWIHVDVMDNQFVPNLTIGPPVVKSLRSVTDKFIDVHMMVIDPEKLVEPFARAGADNITFHIEATDDPEGVIDLIRSTGKMVGISLKPSTPFETIIPFLEKIDLILVMSVEPGFGGQGYIAESTERIMQIRKYLSEQCLDRIQIEVDGGIKLHNAQEVISAGGDILVAGSEVFGSEDPKGVIKEFYSAAKTIIS

SEQ ID NO: 154686 - protein, 126 aa, Unknown
  Bacterial polypetide isolated from the Sargasso Sea
MSKKFKLAPSILSADFSNLQSALDICYNGGAHWIHIDVMDNQFVPNLTIGPPVVKSLRPKTKKFIDVHMMVIEPEKLVEPFARAGADNITFHIESVDNPKPIIDLIKSCGCKVGVSLKPRTPLSEI

SEQ ID NO: 154687 - protein, 108 aa, Unknown
  Bacterial polypetide isolated from the Sargasso Sea
MTQKSLVISPSILSADFSRLGEDVKAVDQAGADWIHVDVMDGRFVPNITIGPMIVEALRPVTTKPLDVHLMIIEPEKYVEDFAKAGADIISVQVEACTHLHRNLAQIR

SEQ ID NO: 154688 - protein, 55 aa, Unknown
  Bacterial polypetide isolated from the Sargasso Sea
MSDQKNIIAPSILASDFARLGEEVRNVLDAGADWVHFDVMDNHYVPNLTIGPMVC

SEQ ID NO: 154689 - protein, 67 aa, Unknown
  Bacterial polypetide isolated from the Sargasso Sea
MLASDLANLAAESKAVLAAGADELHIDVTDGHFVPNITFSTPVVASLRKNIPDAFFDCHMMVSKPSQ

SEQ ID NO: 154690 - protein, 68 aa, Unknown
  Bacterial polypetide isolated from the Sargasso Sea
MSDSKYIIAPSILASNFATLGEEVKNVLSAGADWVHFDVMDNHYVPNLTIGPMVCKSLRDYGITEFID

SEQ ID NO: 154691 - protein, 181 aa, Unknown
  Bacterial polypetide isolated from the Sargasso Sea
MRSGFKLAPSILSADFSDLRSALDICNAGGAHWIHVDVMDNQFVPNLTIGPPVVRSLRPVTQKFIDVHMMVIDPEELVEPFAKAGADNITFHIEATNDPEGIIDLIRSCGSKVGVSIKPKTPLEDIFPILDKVDVVLVMSVEPGFGGQGYLPGSNERIGRIRSYLEENCLDRVLIEVDGGI

SEQ ID NO: 154692 - protein, 286 aa, Unknown
  Bacterial polypetide isolated from the Sargasso Sea
CRIGASMLACDLASLASEAARVLAAGADYLHLDVMDGHFVPNLSWGMPVIKALRKHTSGHLDVHLMVAEPEKWVEQIKLAGADTFTFHLEACNSAAAVLSLIERCRHLGMKVGIAIKPGTQAEAIKPYLSLIDLALVMTVEPGFGGQPFLGEMCAKIEQVRAWAPPTLDVQVDGGLTPETATRAAKAGANVLVAGSSVFKGQPEEAIQAMRDAVATAVTPATEAAAATTAAAAGAGAAGAAGAAAEEESGLSSSEEALKRAAGYHSIDAHVRSGMAVGLGTGSTAY

SEQ ID NO: 154693 - protein, 150 aa, Unknown
  Bacterial polypetide isolated from the Sargasso Sea
MSDVLIAPSILSSNFSCLADEIKAIDKAGADWIHLDVMDGHFVPNLTFGPPIIKSIRDYSKKPFDAHLMVTNPDDLLEEYVNAGVDMITVHKEVTPHLDRTLNRIRELGCKAGVSINPATSISGLEFLLDKLDLILVMTVNPGFGGQVFI

SEQ ID NO: 154694 - protein, 90 aa, Unknown
  Bacterial polypetide isolated from the Sargasso Sea
MIKIAPSILAADLLNIKHEISSVDKAGAEYIHIDVMDGHFVPNLSFGHNMVRSLRPITKKILDVHLMISPVKPYIEDFIKAGADIISFHP

SEQ ID NO: 154695 - protein, 218 aa, Unknown
  Bacterial polypetide isolated from the Sargasso Sea
MTEDLIVAPSILAADFSRIGDEVKAVDVAGADWIHLDVMDGHFVPNLTFGPPLIRALRPHSKKTFDTHLMVSNPDALLDEYASAGSDIITVHAEACPHLDRTLSHIRELGCKAGVSLNPHTPIDALQHVLDRLDLILVMTVNPGFGGQSFINKMLDKITKIRSLIGDRPIVIEVDGGVTADNAGKIVASGAKALVAGSSIFRGPSYADNIAAIRAATA

SEQ ID NO: 154696 - protein, 140 aa, Unknown
  Bacterial polypetide isolated from the Sargasso Sea
MQKVQIAPSILSADFSNLESEIRTIDKAGADMLHIDVMDGHFVNNITFGPALVKSIRNKTNLPFDVHLMIDPVIKYITEFADAGADIITVHLEAKDDTRGAIELVRSLGKKAGIAINPETKIDTIIPFLDVIDQVIVMSV

SEQ ID NO: 154697 - protein, 142 aa, Unknown
  Bacterial polypetide isolated from the Sargasso Sea
MKKNKQSNFIAPSILSANFLSLGEEIAALEKAGADYIHFDVMDNHFVPNLTFGPLICRAVRSIVKVPIDVHLMASPVDKLIEDFIDAGASIITFHPEASNHIDRSLSIARANGCKTGLVLNPATSIECLDWVLPKLDIILIM

SEQ ID NO: 154698 - protein, 224 aa, Unknown
  Bacterial polypetide isolated from the Sargasso Sea
MDIWISPSILAADFSRLGQEVEDVLNAGANSIHFDVMDNHYVPNLTIGPPVLSALRQFGISATIDAHLMVSPADRLIGDFIEAGADYVSIHPGTTENLEASLLRIKSEGAKAGIVFNPDEELDLPDSLTEIVDLILIMSVYPGFGGQSFIDASLDKVEAARKVINRCERSIRLQVDGGIKSSNISEVAKAGADTFVAGTAIFGTSDYAATIKELKQKVAEVNDA

SEQ ID NO: 154699 - protein, 83 aa, Unknown
  Bacterial polypetide isolated from the Sargasso Sea
MTSEFKLSPSILSADFSNLQQALDQCRDGGAPWIHVDVMDNQFVPNLTIGPPVVKSLRSKTEKILDVHMMVVEPEKLVEPFAK

SEQ ID NO: 154700 - protein, 215 aa, Unknown
  Bacterial polypetide isolated from the Sargasso Sea
MIAPSILSANFSYLAQEIQSIDKAGADWIHLDVMDGHFVPNLTFGPPIIKSIRPYSKKPFDAHLMVTNPDDLLEEYVASGVNRITVHKEVTPHLDRTLTRIRELGCKAGVSINPGTPISGLEFLLDKLDLILIMTVNPGFGGQSFINTSIDKIKLVSELVGIRPINIQVDGGINKEIVPKVVKAGANVLVAGSAVFKGGNIKSYEKNIKALRFKS

SEQ ID NO: 154701 - protein, 151 aa, Unknown
  Bacterial polypetide isolated from the Sargasso Sea
MNNFISASIIAADFWNLEREYKELNKTKVEWIHYDIMDGHFVPNITIGSCELDSLVNKSNIAIDIHFMVSNPDYIVPYFVEKYKGTIVKNITVHSEVCINVKKLSEIVRKNGINFGLAIKPKTSINRIVENIGFIDLALVMTVEPGFAGHH

SEQ ID NO: 154702 - protein, 104 aa, Unknown
  Bacterial polypetide isolated from the Sargasso Sea
CIKDITYLLSKSCKALREYGIKEFIDVHLMIDPVDELAQSFIDAGADLISFHPEATKHIHRSIHAIKDKGCKAGLVYNPATPLHTLESVLEDLDLVLIMSVNPG

SEQ ID NO: 154703 - protein, 222 aa, Unknown
  Bacterial polypetide isolated from the Sargasso Sea
MRRSVWLAPSILSANFAYLAQDVQAVLAAGADVIHFDVMDNHFVPNLTIGPMVCRSLRDAGIKAPIDVHLMVQPVDDMIDAFAKAGASMISFHPQASCDCHKSLALIKKLGCQAGLALNPGHSIDDLLPYLDMLDLVLLMSVEPGFGGQKLIPSIYDSLVEARGLLDDAGSKARLSVDGGVTLENVGRLVANGADMIVAGSAIFSSDDYLARCAAFREAWSE

SEQ ID NO: 154704 - protein, 104 aa, Unknown
  Bacterial polypetide isolated from the Sargasso Sea
MSDQKYIIAPSILASDFARLGDEVRNVLDAGADWVHFDVMDNHYVPNLTIGPMVCKALREYGIKEFIDVHLMIDPVDELAQRFIEAGADLISFHPEASTQFIDQ

SEQ ID NO: 154705 - protein, 60 aa, Unknown
  Bacterial polypetide isolated from the Sargasso Sea
MSDQNYIIAPSILASDFARLGEEVRNVLDAGADWVHFDVMDNHYVPNLTIGPMVCEALRK

SEQ ID NO: 154706 - protein, 215 aa, Unknown
  Bacterial polypetide isolated from the Sargasso Sea
LAADFSRLGQEVEDVLDAGADSIHFDVMDNHYVPNLTIGPPVLSALRKFGISATIDAHLMVSPADRLIGDFIEAGADYVSIHPGTTENLEVSLLRIKSEGAKAGIVFNPDEELDLPDSITEIVDLILIMSVYPGFGGQSFIDASLDKVEAARTVIDRCERPIRLQVDGGIKSSNIGEVAKAGADTFVAGTAIFGTSDYVATIKELKQKVAEVNDA

SEQ ID NO: 154707 - protein, 147 aa, Unknown
  Bacterial polypetide isolated from the Sargasso Sea
MTSEFKLSPSILSADFSNLQSALDQCAKGGAPWIHVDVMDNQFVPNLTIGPPVVKSLRSKTNKFLDVHMMVIEPEKLVEPFAKAGADMITFHIEATDNPQSVIDLIRSTGKQVGISLKPSTPVSEVEPFFEHIDLILVMSVEPGFWR

SEQ ID NO: 154708 - protein, 171 aa, Unknown
  Bacterial polypetide isolated from the Sargasso Sea
MSNIVAPSILSADFGNLANDISMLNSSKADWIHIDVMDGHYVPNISFGMPIIDSINAISNKPLDIHLMISKPERYIEKFLKYNIKVLTIHLEASRHLHRTIQEIKSKGVMAGVAINPHTDVNHLSEIINDIDIVCVMSVNPGFSGQNFIENSYNKVKKLKKIILEKKSNCK

SEQ ID NO: 154709 - protein, 181 aa, Unknown
  Bacterial polypetide isolated from the Sargasso Sea
DGHFVPNITIGSSVIKKLRPFTKKTFDVHLMIAPVDKYIEPFSNAGADIITFHPEATNNISGTIDLIKKNKKKVGISLKPNSSIDLILDYLNNIDLVLIMSVEPGFGGQKFIPEVLDKVKKIKKIITEKKLNIDIEIDGGINFKNSQLVKNAGANILVSGSTIFNENNGDLKKNIGLLRSN

SEQ ID NO: 154710 - protein, 53 aa, Unknown
  Bacterial polypetide isolated from the Sargasso Sea
MKEVLIAPSILSADFGSLANEVKLIDEAGADWIHLDIMDGHFVPNLTFGPPII

SEQ ID NO: 154711 - protein, 198 aa, Unknown
  Bacterial polypetide isolated from the Sargasso Sea
SGADWIHVDVMDGRFVPNITIGPLIVEALRPVTQKPLDVHLMIVEPEKYVPDFAKAGADIISVQVEACPHLHRNLAQIKDLGKMAGAVLNPSTPLDTLEYCLELCDLVLIMSVNPGFGGQSFIENQVQKIRDLRRMCDERGLDPWIEVDGGVKAGNAWKVIEAGANAIVSGSGVFNQPDYAEAIKAIRNSSSKEAVLV

SEQ ID NO: 154712 - protein, 167 aa, Unknown
  Bacterial polypetide isolated from the Sargasso Sea
RDYGIKAPIDTHLMVKPVDKLIESFAEAGSTYITFHPEASDHVDRSIELIKSLKCKAGLVLNPASPVSLLEESIEKLDMVLLMSVNPGFGGQKFIDSVLNKVTKVRSLIDRHNLNIRLEVDGGINLDNISKVASAGADTFVAGSAIFNQADYIDSIKQMRASLKSVG

SEQ ID NO: 154713 - protein, 141 aa, Unknown
  Bacterial polypetide isolated from the Sargasso Sea
RWRQLHHFHPEASEHVDRSLQLIKPGGAKAGLVFNPATPLDVLKYVMDKVDMILLMSVNPGFGGQKFIPGTLDKLREARALIDASGREIRLEIDGGVNVQNIREIAEAGADTFVAGSAIFNQPDYRAVIDAMRAELAQVRG

SEQ ID NO: 154714 - protein, 98 aa, Unknown
  Bacterial polypetide isolated from the Sargasso Sea
MSDQKNIIAPSILASDFARLGEEVRNVLDAGADWVHFDVMDNHYVPNLTIGPMVCKALREYGIKEFIDVHLMIDPVDELAQSFIDAGADLISFHPEAT

SEQ ID NO: 154715 - protein, 205 aa, Unknown
  Bacterial polypetide isolated from the Sargasso Sea
WIHLDVMDGNFVPNITFGAVAMESFSKPEGCVFDTHLMVVNPEKHIPSFIKAGADVISIHAEATEHLQYGLKMIRDHGAKASVALNPATPLEAIDWVYPDLDMVLLMSVNPGWGGQSFIAQVFDKISNLRQRLQDRGIDIPIQVDGGINLKTIAHASLAGTTHFVAGTAVFTVKAGDGLDEKDRLETYRKNINGLIEEATKDQSV

SEQ ID NO: 154716 - protein, 126 aa, Unknown
  Bacterial polypetide isolated from the Sargasso Sea
MRSGFKLAPSILSADFSDLRSALDICNAGGAHWIHVDVMDNQFVPNLTIGPPVVRSLRPVTQKFIDVHMMVIDPEELVEPFAKAGADNITFHIEATNDPEGIIDLIRSCGSKVGVSIKPKTPLEDI

SEQ ID NO: 154717 - protein, 183 aa, Unknown
  Bacterial polypetide isolated from the Sargasso Sea
LDVMDGHFVPNLTFGPPLIRSIRGLTKLVFDVHLMVSNPDFLLDEYIDAGGDIITVHIEACNHLDRTLNYIKSKGCKAGVALNPHSDINFLENVLDEIDLILIMTVNPGFGGQKFIKSMLKKIALTKTLIDNRDILLEVDGGISPLNSKDVINAGANVLVAGSSIFASNRSADYSKNIAALRS

SEQ ID NO: 154718 - protein, 179 aa, Unknown
  Bacterial polypetide isolated from the Sargasso Sea
HFVPNLTIGPPVIKSLRKHSSLKFDVHLMISPVHKYIEAYANAGADIITIHPEATQNLADSIKAIKNLNKKVGVSLNPESKIELIAEFLDQIDLVLIMSVNPGFGGQKFMPEVLDKIKELKKIQQEKNLNFDIEIDGGINFENCKIAIDAGANILVSGTTIFKSNDGDIKKNINLLKLK

SEQ ID NO: 154719 - protein, 227 aa, Unknown
  Bacterial polypetide isolated from the Sargasso Sea
MTDASNKKDFWICPSILSADFAHLADDINAVLAAGADRIHVDVMDNHYVPNLTFGPLICNAIRKAGIAAPMDVHLMIEPVDDLIPKFIEAGADCIVFHPEASKHVDRSLRLIKESGVKAGLAINPATSEHVLDNVLDLVDRVLVMTVNPGFGGQKFIKNTIPKIKRIKSIIDTCPHEIRLEVDGGVNVDNIRSLADIGVDTFVAGSAIFNQPDYAKVISQMRDNLAG

SEQ ID NO: 154720 - protein, 185 aa, Unknown
  Bacterial polypetide isolated from the Sargasso Sea
MSIKNIKLAPSILSADFSKLGEEVALATESGADMIHIDIMDGKFVPNITFGASMVSAIRRWTNLPLDIHMMVTEPEKQIPLFIDAGADIINVHIETCTHLHRIIQMIKSNNIRAGIALNPGTAITTLSEVIEELDQIVIMSVNPGFPGQNFIPKTLNKVSDLRNQINKDGLNTDIEIDGGINKSS

SEQ ID NO: 154721 - protein, 117 aa, Unknown
  Bacterial polypetide isolated from the Sargasso Sea
MKNRNISPSLLSADFSKLKEEIDVVLNAGASRLHLDVMDGHFVPNFTFGPFIVKAIRKLTSAHLETHLMISNPHKYIPEFIDAGADTLIFHYEASTDIDRDINMIKDSNIDVGIALN

SEQ ID NO: 154722 - protein, 106 aa, Unknown
  Bacterial polypetide isolated from the Sargasso Sea
MTDVLIAPSILSSNFSCLADEIKAIDKAGADWIHLDVMDGHFVPNLTFGPPIIKAIRDLSKKPFDAHLMVTNPDDLLEECVNAGVDMITVHKEVTPHLDRTLNRIR

SEQ ID NO: 154723 - protein, 221 aa, Unknown
  Bacterial polypetide isolated from the Sargasso Sea
MSDVLIAPSILSSNFSCLADEIKAIDKAGADWIHLDVMDGHFVPNLTFGPPIIKSIRDYSKKPFDAHLMVTNPDDLLEEYVNAGVDMITVHKEVTPHLDRTLSRIRELGCKAGVSINPATSISGLEFLLDKLDLILVMTVNPGFGSQVFIESSLNKIKLIKELINDKPIKIQVDGGINKVVAPRVIEAGANVVVAGSAVFNGDGIESYSKNIEALRYKIKK

SEQ ID NO: 154724 - protein, 51 aa, Unknown
  Bacterial polypetide isolated from the Sargasso Sea
MMMKPNYRIAPSILSADFACLGQEVQDVLDAGADVVHFDVMDNHYVPNLTI

SEQ ID NO: 154725 - protein, 218 aa, Unknown
  Bacterial polypetide isolated from the Sargasso Sea
MVKIAPSILAADLLDIKNEVINVDDAGAEFIHIDVMDGHFVPNLSFGYNMVKTLRPITKKILDVHLMISPVEPFIKEFINAGSDIISFHPEADKNTKEIISIIKKSNCKVGIAVHPNIKIEEIKEFLNDVDLVIIMTVIPGFGGQKFLEEQVQKISELKEIRKNINANYEIEIDGGINYQTSKICIDKGADILVAGSYVYGAPKEEYKDKINSIRHLT

SEQ ID NO: 154726 - protein, 219 aa, Unknown
  Bacterial polypetide isolated from the Sargasso Sea
MKNLIAPSILSANFAELGKEVHAVIDAGADIIHFDVMDNHYVPNLTIGPMVCKSLIEYGISKPIDVHLMTEPVDDLINNFAKAGASWISFHPEASKHIDRSLSLIKEHNCKAGLALNPATPISCLEHVIEKIDFVLLMTVNPGFGGQKFIKGMLQKIKECKELISSTSNEVQIEVDGGIDLKNIKEVSEAGANIFVSGSTIFNSSDYSSTIKEMKSLVS

SEQ ID NO: 154727 - protein, 222 aa, Unknown
  Bacterial polypetide isolated from the Sargasso Sea
MRSGFKLAPSILSADFSDLRSALDICNAGGAHWIHVDVMDNQFVPNLTIGPPVVRSLRPITKKFLDVHMMVVDPEKLVEPFAKAGADNITFHIEATSDPDGIIDLIRACGSKVGVSIKPKTPLEHIFPILDKVDVVLVMSVEPGFGGQGYLPGSNERIKQIRSFLIENCLDRVLIEVDGGIKLHNAKQVIDAGADVLVAGSEVFKSDSPIDIIKDFYQLSSQ

SEQ ID NO: 154728 - protein, 88 aa, Unknown
  Bacterial polypetide isolated from the Sargasso Sea
MKESIIAPSILSSNFGRLTEEVNSVIDAGADWIHFDVMDNHYVPNLTIGPMVCESLRKDGIKDFIDVHLMIEPVDKLAESFIKAGADL

SEQ ID NO: 154729 - protein, 110 aa, Unknown
  Bacterial polypetide isolated from the Sargasso Sea
MAKEFKIAPSILSADFARLGEEVESVIAAGADFVHFDVMDNHYVPNLTFGSVICKSLRDFGIEAPIDVHLMVQPVDRLIADFAEAGATYISFHPEASEDIGATIDLIRSN

SEQ ID NO: 154730 - protein, 228 aa, Unknown
  Bacterial polypetide isolated from the Sargasso Sea
MKFGNRAIISPSLLSCDFARMADESRKVIECGADWLHLDVMDGHFVPNLTFGAPVLASLRPHVPEAYFDVHLMVSNPRDYVEPMAKVKTNMFTFHVEACAGEADVETLCAEVRKAGMEVGVAIKPGTSAESVCAFVEKGLVDMVLVMTVEPGFGGQKFNPECAKKAATLRAKFPDLKIQVDGGLAPSTIEVAAEAGANVIVAGSSVFGSEDWTRAIDTLRAGVKKFNE

SEQ ID NO: 154731 - protein, 173 aa, Unknown
  Bacterial polypetide isolated from the Sargasso Sea
IGPMVCSALREYGIKAPIDVHLMVQPVDRLIDDFVEAGATYITFHPEASQHIDRSLQIIKSGGCKSGLVLNPASPINLIEDCLESLDMILLMSVNPGFGGQKFIPSVLNKLRKLRKIIDDNNLDIRLEIDGGVKLENISEISEAGADTFVAGSAIFSQNNYEKVISEMRSSIK

SEQ ID NO: 154732 - protein, 123 aa, Unknown
  Bacterial polypetide isolated from the Sargasso Sea
MGLSCLFSANTKTTGSAEAHVADGIIIAPSILASDFSRLADEVSAVDRAGADWIHLDVMDGHFVPNLTFGPPVIKALRHVTEKLFDAHLMVSNPDALLDAYADAGAEIITVHAEACPHLGPHV

SEQ ID NO: 154733 - protein, 54 aa, Unknown
  Bacterial polypetide isolated from the Sargasso Sea
MTSEFKLSPSILSADFFNLQSALDQCAKGGAPWIHVDVMDNQFVPNLTIGPHGS

SEQ ID NO: 154734 - protein, 222 aa, Unknown
  Bacterial polypetide isolated from the Sargasso Sea
MKKNNTLISPSILAADFSMLGQEVANIDNAGADWIHLDIMDGHFVPNLTIGPDVVSNLRKYTKKLFDVHLMTKPADNWIKPFSEAGADIITIHLEAEENIKKTLKTIRDMGLKAGISIKPSTSENELEPYLAFCDLVLVMTVNPGFGGQKFMPSQLKKISNINKLINNKKLNTLIEVDGGINLETSKLCIEAGADILVAGSAIFSEEKSNYSQIIQSLRNES

SEQ ID NO: 154735 - protein, 220 aa, Unknown
  Bacterial polypetide isolated from the Sargasso Sea
MTSEFKLAPSILSADFSDLKLALSQCEAGGAHWIHVDVMDNQFVPNLTIGPPVVKSLRPKTNKFLDVHMMVIEPENLVEPFAKAGADQITFHIEATDNPQSVIDLIKSTGSRVGISIKPSTPLSEIEPFYDQIDLILVMSVEPGFGGQGYIEGSTERIKNIKQKLTEECLQDRVLIEVDGGIKLHNAKEVIDAGADVLVAGSAIFKTDDPVQTIKDFYSL

SEQ ID NO: 154736 - protein, 178 aa, Unknown
  Bacterial polypetide isolated from the Sargasso Sea
FVPNLTIGPPVIKALRKHCSLKFDVHLMISPVHKYIKDFSDAGADIITFHPEATENMRETISLIKSLDKKVGVSLNPDTKIKTISDYYDNIDLVLIMSVFPGFGGQKFIPEVLDKIKSLKEIKDKNNYNFDIEVDGGVNFSNSKDILNAGANILVSGTTIFKENRGDIKKNIETLRLV

SEQ ID NO: 154737 - protein, 222 aa, Unknown
  Bacterial polypetide isolated from the Sargasso Sea
MKKNILISPSVLAADFSKLGEEIQLVSEEGADLIHLDVMDGHFVPNLSFGADIIKGIRGFSNLPFDVHLMIENPEHYVDAYVEAGANFITVHPEATPHIHSVLQKIHKAGVKTGIALNPGTPIEALENVIDIIDLIIVMTVNPGFGGQSFLSSQLPKISKIRTIIDDGGHSIDLSVDGGINPITAKLAIDAGANILVAGTSIFKAGDETYSKSIKRLRNLNP

SEQ ID NO: 154738 - protein, 222 aa, Unknown
  Bacterial polypetide isolated from the Sargasso Sea
MVDKNYIIAPSILASDFARLGDEVRNVLDAGADWVHFDVMDNHYVPNLTIGPMVCKALRDFGIKEFIDVHLMIDPVDELAQSFIEAGADLISFHPEASKHIHRSIHAIKEKNCKAGLVFNPATPLQTLESVIEDIDLVLIMSVNPGFGGQKFIHSSIDKISKVRKMIDDSGRDIRLEVDGGINSETIGLASEAGADTFVAGSAIFNTENYEQTISELRSKIV

SEQ ID NO: 154739 - protein, 78 aa, Unknown
  Bacterial polypetide isolated from the Sargasso Sea
MTNSIKISPSILSADFSKLGSEVISLERAGADYIHIDVMDGHFVPNLTIGPEVIKKLRPLTEKTFDVHLMISPVDKFI

SEQ ID NO: 154740 - protein, 119 aa, Unknown
  Bacterial polypetide isolated from the Sargasso Sea
MKKIQISPSILAADFSQLDKEIKKLEEGGADMIHIDVMDGHFVPNLTIGPPVIKALRNCTKIPFDVHLMISPVHKYIKNFSEAGSDIITIHPEATENLSETIKLIKKLNKKVGVSLNPR

SEQ ID NO: 154741 - protein, 187 aa, Unknown
  Bacterial polypetide isolated from the Sargasso Sea
IHVDVMDGHFVPNLTIGPPVIKNLRKYTKLPFDVHLMISPVHEFIESYADAGADIITIHPEATENLKESINLIKKFGKKVGVSLNPKTEIDTLIDEIENIDLVLVMSVNPGFGGQKFMPEILYKIKELKKIKDKSKYRFDIEVDGGINFSNSKIVLEAGADILVSGTTVFKENDGNIKTNIEKLKSM

SEQ ID NO: 154742 - protein, 53 aa, Unknown
  Bacterial polypetide isolated from the Sargasso Sea
MKKIQISPSILSADFSQLGNEIKRLEKGGADLIHVDVMDGHFVPNLTIGPPSN

SEQ ID NO: 154743 - protein, 185 aa, Unknown
  Bacterial polypetide isolated from the Sargasso Sea
MKLDPVIAPSILSANFARLGQDVADVIQAGADWIHFDVMDNHYVPNLTIGPMVLEALIKDGVTCPVDVHLMVSPVDRLIDEFAAAGASVITFHPEASQHIDRNLQQIRDAGCQAGLVFNPAAPLDAMNYVMDKLDIVLLMSVNPGFGGQAFIPSVLEKLSEARQRIDNSGLPIRLEIDGGVKVDN

SEQ ID NO: 154744 - protein, 219 aa, Unknown
  Bacterial polypetide isolated from the Sargasso Sea
MKKIQISPSILSADFSQLGNEIKRLEDGGADMIHVDVMDGHFVPNLTIGPPVIKALRNYTKLPFDVHLMISPVHKYIKNYAEAGADIITIHPEATNNLKESINHIKKLGKKVGVSLNPDTKINKIKELLSQINLVLIMSVHPGFGGQKFIPDVLEKVKELKKIKDQKNLNFDIEVDGGINFDNSKLAIEAGANILVSGTTIFKNNNGNIKKNIDTLKAS

SEQ ID NO: 154745 - protein, 154 aa, Unknown
  Bacterial polypetide isolated from the Sargasso Sea
VHLMIDPVDELAQSFIDAGADLISFHPEATKHIHRSIHAIKDKGCKAGLVYNPATPLHTLESVLEDLDLVLIMSVNPGFGGQSFIHSSLEKITQVRKMIDESGKDVRLEVDGGINKDTIGLASEAGADTFVAGSAIFNTENYEQTISELRSKIV

SEQ ID NO: 154746 - protein, 220 aa, Unknown
  Bacterial polypetide isolated from the Sargasso Sea
MTDHKYIIAPSILASDFARLGDEVRNVLDAGADWVHFDVMDNHYVPNLTIGPMVCKALRDFGIKEFIDVHLMIDPVDELAQSFIEAGADLISFHPEASKHIHRSIHAIKDKGCKAGLVFNPATSLSALENVLDDIDLVLIMSVNPGFGGQSFIHSSLDKITQVRKMIDSSGKDIRLEVDGGINKETIGLASEAGADTFVAGSAIFNTENYEQTISELRSK

SEQ ID NO: 154747 - protein, 60 aa, Unknown
  Bacterial polypetide isolated from the Sargasso Sea
MSSKDYIIAPSILSADFARLGEESKNVLDAGADWIHFDVMDNHYVPNLTIGPMVCKALRD

SEQ ID NO: 154748 - protein, 219 aa, Unknown
  Bacterial polypetide isolated from the Sargasso Sea
MKKIQISPSILSADFSQLGKEIKRLEESGADLIHVDVMDGHFVPNITIGPPVIKTLRKYTNLPFDVHLMISPVHKYIKNFADAGSDIITIHPEATENLVDSIKLIKHLKKKVGVSLNPDTEIDIIEKYLGEIDLILIMSVYPGFGGQKFIPKIIEKIKKIYQIKKKNDLTFDIEVDGGINFSNSKEVISAGANILVSGTTIFKENNGNIKKNIETLRSM

SEQ ID NO: 154749 - protein, 97 aa, Unknown
  Bacterial polypetide isolated from the Sargasso Sea
MKQYLIAPSILSADFARLGEDTAKALAAGGDVVHFDVMDNHYVPNLTMGPMVLKSLRKYGITAPIDVHLMVKPVDRIIPDFAAAGASIITFHPEASE

SEQ ID NO: 154750 - protein, 193 aa, Unknown
  Bacterial polypetide isolated from the Sargasso Sea
DGGADLIHVDVMDGHFVPNITIGPPVIKTLRKYTKLPFDVHLMISPVHKYIKNFAEAGSDIITIHPEATDNLIESIHLIKQLKKKVGISLNPNTEIDVIKKNLKEIDLVLIMSVYPGFGGQKFIPEVIEKIKRLYQIKKDNNLKFDIEVDGGINFSNSKDVISAGANILVSGTTIFKENDGNIKKNIETLKSM

SEQ ID NO: 154751 - protein, 89 aa, Unknown
  Bacterial polypetide isolated from the Sargasso Sea
MNTSIKISPSILSSDFSKLGEEVKALEKAGADYIHVDVMDGHFVPNLTIGPEVIKNIRPFSKKIFDVHLMISPVNKYIEKFADAGADII

SEQ ID NO: 154752 - protein, 196 aa, Unknown
  Bacterial polypetide isolated from the Sargasso Sea
VLEAGADWVHFDVMDNHYVPNLTIGPMVCKSLRDFGIDAFIDVHLMIDPVDRLAQDFIDAGASLVSFHPEATKHVHRSVSAIKDRGCKAGLVLNPATQVNVLEDVLEDLDLVLIMSVNPGFGGQSFIESSLKKVEKVRKMIDSSGKDIKLEIDGGINKDTIASAYSAGADTFVAGSAIFNSNNYEETISLFRKLAS

SEQ ID NO: 154753 - protein, 124 aa, Unknown
  Bacterial polypetide isolated from the Sargasso Sea
MDNWIAPSILSADFSRLGEEVNSVLAAGADIIHFDVMDNHYVPNLTIGPLVLASLRQSGIDAMMYVHLMVKPVDRIIPDFIDAGADIISIHPESTEHLHRTLQLIRDGGAKPGIVFNPTTPLTY

SEQ ID NO: 154754 - protein, 219 aa, Unknown
  Bacterial polypetide isolated from the Sargasso Sea
MKNIQISPSILSADFSQLGEEIKRLEDGGADLIHVDVMDGHFVPNITIGPPVIKTLRNYTKLPFDVHLMISPVHKYIKNFAEAGSDIITIHPEATDNLIESIQLIKQLKKKVGVSLNPNTEINIIEKLLKDIDLVLIMSVHPGFGGQKFMPEVIEKIKKLFQIKKDNKLNFDIEVDGGINFSNSKEVISAGANILVSGTTIFHENNGDIKKNIETLRSM

SEQ ID NO: 154755 - protein, 67 aa, Unknown
  Bacterial polypetide isolated from the Sargasso Sea
MKNIQISPSILSADFSQLGNEIKRLEEGGADMIHVDVMDGHFVPNLTIGPPVIKALRKHCSLKFDVH

SEQ ID NO: 154756 - protein, 222 aa, Unknown
  Bacterial polypetide isolated from the Sargasso Sea
MSDQQYIIAPSILASDFARLGDEVRNVLDAGADWIHFDVMDNHYVPNLTIGPMVCKALREYGIKEFIDVHLMIDPVDDLAQSFIKAGADLISFHPEASSHIHRSIHAIKDKDCKAGLVYNPATPLNTLENVLDDLDLVLIMSVNPGFGGQSFIHSSIDKISQVRKMIDDSGKDIRLEVDGGINNDTIGLASAAGADTFVAGSAIFNTENYEQTISELRSKIV

SEQ ID NO: 154757 - protein, 79 aa, Unknown
  Bacterial polypetide isolated from the Sargasso Sea
MSVKVSPSILASNFSSLGDEVQSITKAGADYIHVDVMDGHFVPNLTIGPDVVKSIRDKSDIPFDVHLMIDPVQPYIEGF

SEQ ID NO: 154758 - protein, 100 aa, Unknown
  Bacterial polypetide isolated from the Sargasso Sea
MSGLIKISPSILSADFSKLGEEVIALEKAGADYIHIDVMDGHFVPNLTIGPEVIKKLRPLTKKVFDVHLMISPVDNFIKDFSKAGADIIIFIRKLLRDIS

SEQ ID NO: 154759 - protein, 198 aa, Unknown
  Bacterial polypetide isolated from the Sargasso Sea
MTDHKYIIAPSILASDFARLGDEVRNVLDAGADWVHFDVMDNHYVPNLTIGPMVCKALRDFGIKEFIDVHLMIDPVDELAQSFIEAGADLISFHPEASKHIHRSIHAIKDKGCKAGLVFNPATSLSALENVLDDIDLVLIMSVNPGFGGQSFIHSSLDKIAQVRKMIDDSGNDIRLEVDGGINKETIGLASEAGADTL

SEQ ID NO: 154760 - protein, 193 aa, Unknown
  Bacterial polypetide isolated from the Sargasso Sea
KSGADLIHVDVMDGHFVPNLTIGPPVIKNLRKFTKLPFDVHLMISPVHQYIESYSNAGADIITIHPEATPNLKDTIKLIKSFGKKAGVSLNPKTGIGTLINEIENIDLILVMSVNPGFGGQKFLPEVLDKIKELKKIKDKNHYNYDIEVDGGINFTNSKIVLEAGANILVSGTTIFKENNGNIKSNIEKLKSM

SEQ ID NO: 154761 - protein, 111 aa, Unknown
  Bacterial polypetide isolated from the Sargasso Sea
MKKIQISPSILSGDFSQLGNEIKRLELAGADMIHVDVMDGHFVPNLTIGPPVIRALRNYTKIPFDVHLMIKPVHKYIKDYGEAGADIITIHPEATNNLKDSINHIKDLGKK

SEQ ID NO: 154762 - protein, 219 aa, Unknown
  Bacterial polypetide isolated from the Sargasso Sea
MKKIKISPSILSADFSQLGKEINNLEKGGADLIHVDVMDGHFVPNLTIGPPVIKALRKYTKIPFDVHLMISPVHKYIKDFANAGSDIITIHPEATKDLKESISLIKDLNKKVGVSLNPNTKINVIESYLKYIDLVLIMSVFPGFGGQKFIPETINKIKDLKKIKDKNNYSFDIEVDGGINFSNSRDIINAGANILVSGTTIFSENNGDIKKNIETLKSV

SEQ ID NO: 154763 - protein, 74 aa, Unknown
  Bacterial polypetide isolated from the Sargasso Sea
MKKIQISPSILSADFSQLANEIKRLEEGGADMIHVDVMDGHFVPNLTIGPPVIKALRKHCSLKFDVHLMISLSA

SEQ ID NO: 154764 - protein, 81 aa, Unknown
  Bacterial polypetide isolated from the Sargasso Sea
MKKIQISPSILSADFSQLGDEIKRLEEGGADMIHVDVMDGHFVPNLTIGPPVIKRLRNCTKLPFDVHLMISPVHKYIEDYS

SEQ ID NO: 154765 - protein, 127 aa, Unknown
  Bacterial polypetide isolated from the Sargasso Sea
MKKIQVSPSILSADFSQLGNEIKRLEEGGADMIHVDVMDGHFVPNLTMGPPIIKDLRKFTKLPFDVHLMISPVHKYIKDYADAGADIITIHPEATENLKDSIKCIKKLGKKAGVSLNPETKTDIVME

SEQ ID NO: 154766 - protein, 223 aa, Unknown
  Bacterial polypetide isolated from the Sargasso Sea
MKDYKIAPSILSADFSRLGEDVPNVITAGADMVHFDVMDNHYVPNLTFGPMICSALRDYGITSPIDVHLMIKPVDRIIPDFARAGASYITFHPEASDHVDRTIDLIKENGCKAGIVLNPATPISHLDYCLDNLDMVLLMSVNPGFPGQKFIEGTLEKITKVRDLIDKEEKDIRLEIDGGVNLQNLQKIANAGADTFVAGSAIFKSENYKSTINSMRDILAKNN

SEQ ID NO: 154767 - protein, 157 aa, Unknown
  Bacterial polypetide isolated from the Sargasso Sea
MSVKISPSILASDFSSLGEEVVNITKAGADYIHVDVMDGHFVPNLTIGPDIVKSIRDKSSLPFDVHLMIDPVQPYIEKFVEAGADIVSVHPEANDDTQACIDKIKSLNVKAGLAINPDTEWEVVKPFMDQLDLILVMSVHPGFGGQKFIPTALNKLE

SEQ ID NO: 154768 - protein, 194 aa, Unknown
  Bacterial polypetide isolated from the Sargasso Sea
GVDYIHVDVMDGHFVPNITIGPLVVKALRSITKLPLDVHLMIENPEFYIEDFSKAGANIITVHQEATPHLHRTIQQIQNLGIKAGVSINPSTSVKTLDEIICDVDLILVMSVNPGFGGQSYIHSCTNKIRKVREMLDERGVSADLEVDGGVNVDTVCEVISAGANAFVAGSAIFNDKNSVAENVSALREKIKTS

SEQ ID NO: 154769 - protein, 203 aa, Unknown
  Bacterial polypetide isolated from the Sargasso Sea
SQLGKEIKRLEEAGADMIHVDVMDGHFVPNLTIGPPVIGALRKYTKLPFDVHLMISPVHKYIKSYAENGADIITIHPEATESLEKSINEIKSFRKKVGLSLNPESKIDLISDYLHEIDLVLVMSVHPGFGGQKFIPKTLEKIKTLRDLKEEKKLDFEIEVDGGVNFSNFKSILNAGANILVSGTTIFKENNGNVKKNINFFKT

SEQ ID NO: 154770 - protein, 219 aa, Unknown
  Bacterial polypetide isolated from the Sargasso Sea
MKKIQISPSILSADFSQLGNEIKRLEEGGADMIHVDVMDGHFVPNLTIGPPVIKRLRNCTKLPFDVHLMISPVHKYIEDFSKAGADIITIHPEATDNLIESINLIRKLNKKIGVSLNPNTKLSVIENILDQIDLVLIMSVYPGFGGQKFMPEVIEKIKNLKKIKEEKKLNFDIEVDGGINFENSKIVIEAGANILVSGTTIFKENNGNVKKNIDSLKLV

SEQ ID NO: 154771 - protein, 207 aa, Unknown
  Bacterial polypetide isolated from the Sargasso Sea
MKKIQISPSILSADFSQLGKEIKKLEDGGADLIHVDVMDGHFVPNLTIGPPVIKSLRKYTKLPFDVHLMISPVHKYIKNFADAGSDIITIHPEATKNLKESVSHIKELNKKAGVSLNPNTEISIIEPQLDNLDLVLVMSVFPGFGGQKFIPETVKKIKHLKEIKDKNNYSFDIEVDGGINFSNSREVINAGANILVSGTTIFKENRG

SEQ ID NO: 154772 - protein, 58 aa, Unknown
  Bacterial polypetide isolated from the Sargasso Sea
MKKIQISPSILSADFSQLGSEIKKLEEGGADLIHVDVMDGHFVPNLTIGPPVIKNLRK

SEQ ID NO: 154773 - protein, 173 aa, Unknown
  Bacterial polypetide isolated from the Sargasso Sea
MKKIKISPSILAGDFSQLGNEIKKLEKGGADMIHVDVMDGHFVPNLTIGPTVIKALRSHTKIPFDVHLMISPVHKYIGAYADAGADIITIHPESTDNLIDSINHIKKFKKKVGVSLNPDTNINVILDQLDKIDLVLIMSVFPGFGGQKFIPEVISKIVELNRIKTEKKLNFDI

SEQ ID NO: 154774 - protein, 140 aa, Unknown
  Bacterial polypetide isolated from the Sargasso Sea
MKKIQISPSILSADFSNLGEEIRKLEKAGADMIHVDVMDGHFVPNLTIGPPVIKALKKYTSLIFDVHLMISPVHKYIEAYSDSGADIITIHPEATDDLSASILKIKELKKKVGVSLNPETKIDTILKHLSKIDLVLIMSV

SEQ ID NO: 154775 - protein, 82 aa, Unknown
  Bacterial polypetide isolated from the Sargasso Sea
MSRSIKISPSILSCDFSKIGKEVEALEKAGADYIHVDVMDGHFVPNLTIGPDVIKNIRPFSKKIFDVHLMISPVDKYIKQFC

SEQ ID NO: 154776 - protein, 219 aa, Unknown
  Bacterial polypetide isolated from the Sargasso Sea
MKKIKISPSILSADFGQLGNEIKRLEDGGADLIHVDVMDGHFVPNLTIGPPVIKRLRKYTKLPFDVHLMISPVHKYIEDYAEAGADIITIHPEATENLKESINLIKKLNKKVGVSLNPDTKIDIIKEHISEIELILVMSVYPGFGGQKFISEVISKIKVLKQIKEANKFTFDIEVDGGINFSNSKEVIKAGANILVSGTTIFKENNGDIKKNIEILKAV

SEQ ID NO: 154777 - protein, 127 aa, Unknown
  Bacterial polypetide isolated from the Sargasso Sea
MKKIQISPSILAADFSQLGNEVNRLERAGADMIHVDVMDGHFVPNLTIGPPVIKALRNYTKLPFDVHLMISPVHKYIKNFAEAGSNIITIHPETTDNVEDSIKLIKSLNNQVGLSINPDIPLDSIKK

SEQ ID NO: 154778 - protein, 49 aa, Unknown
  Bacterial polypetide isolated from the Sargasso Sea
MKKIQISPSILSADFSQLGIEIKRLEDAGADMIHVDVMDGHFVPNLTIG

SEQ ID NO: 154779 - protein, 83 aa, Unknown
  Bacterial polypetide isolated from the Sargasso Sea
MTKVKISPSILSADFSKLGNEIQSLEKAGADLIHIDVMDGHFVPNITIGPEVISKLRKHTALPFDVHLMISPVDNFIKNFADA

SEQ ID NO: 154780 - protein, 231 aa, Unknown
  Bacterial polypetide isolated from the Sargasso Sea
MVNSLSPRIAPSILAADFANLGKEITAIDIAGADWVHIDVMDGHFVPNITIGPAVIKSLRHYTELPFDVHLMISPVDPMIEAFAEAGADTISVHPESGPNLHRTLQTIRNLKKRAGIVLNPATPINNIDQVIDIVDLILVMTVNPGFGGQKFISSQLNKIRSIRKIIDQHVSKGGASIDLEVDGGIDAKTSKLAIQAGADALVAGTAVFSGGPDCYAENINSLRGNSAKYQ

SEQ ID NO: 154781 - protein, 204 aa, Unknown
  Bacterial polypetide isolated from the Sargasso Sea
SKLGEEVIALEKAGADYIHIDVMDGHFVPNLTIGPEVIKKLRPLTKKIFDVHLMISPVDNFIKDFSKAGADIITFHPEATPNILNTINLIKKEGKKVGISLKPKSKIELIEKYIDQVDLVLIMSVEPGFGGQKFMPEVLDKTKKIKELVDKKNLKTEIEIDGGINFENCTQAKKAGANVLVSGSTIFKENKGDLKKNIGILRTN

SEQ ID NO: 154782 - protein, 117 aa, Unknown
  Bacterial polypetide isolated from the Sargasso Sea
MDSIIKISPSILSANFSKLGDEILSLEKAGADYIHIDVMDGHFVPNITIGPEVIKKLRPITKKTFDVHLMISPVNNFIKDFAEAGADIITFHPEATENISETIKLIKKYKKKVGISL

SEQ ID NO: 154783 - protein, 198 aa, Unknown
  Bacterial polypetide isolated from the Sargasso Sea
IKKLEEGGADLIHVDVMDGHFVPNLTIGPPVIKALRNYTKLPFDVHLMISPVHKYIKDYADAGADIITIHPEATENLKNSIEQIKKLKKKVGISLNPNTEISVLDENISDIDLILIMSVFPGFGGQKFIPEVIEKIKKLKKIKDEKKYNFDIEVDGGINFSNSKDVLNAGANILVSGTTIFKENNGDIKKNIEKLKSL

SEQ ID NO: 154784 - protein, 79 aa, Unknown
  Bacterial polypetide isolated from the Sargasso Sea
MKPFLIAPSILSADFARLGEDVEKVLEAGADVVHFDVMDNHYVPNLTFGPMICEALRNYGITAPIDVHLMVKPVDDLIE

SEQ ID NO: 154785 - protein, 130 aa, Unknown
  Bacterial polypetide isolated from the Sargasso Sea
MSVKISPSILASDFSSLGDEVVNITQAGADYIHVDVMDGHFVPNLTIGPDVVKSIRDKSSLPFDVHLMIDPVQPYIEKFVEAGADIVSVHPEANDDTEACLNKIKSLNAKAGLAINPDTEWEAVKPFMDK

SEQ ID NO: 154786 - protein, 211 aa, Unknown
  Bacterial polypetide isolated from the Sargasso Sea
MSSSIKISPSILSSDFSKLGEEVVSLDKAGADYIHVDVMDGHFVPNITIGPAIIKKIRPLTKKIFDVHLMISPVDKYIDEFAKAGSDIITFHPEATSDINKTIGLIKKNSKKVGVSLKPNTKIDTIIDHLKNIDLILIMSVEPGFGGQKFMPEVLKKLEQLKKIIDEKKLNIDLEIDGGINFENCKLAKKAGANILVSGSTIFAENNGNLK

SEQ ID NO: 154787 - protein, 78 aa, Unknown
  Bacterial polypetide isolated from the Sargasso Sea
MSVKISPSILASDFSSLGDEVVNITQAGADYIHVDVMDGHFVPNLTIGPDVVKSIRDKSSLPFDVHLMIDPVRPYMKS

SEQ ID NO: 154788 - protein, 219 aa, Unknown
  Bacterial polypetide isolated from the Sargasso Sea
MKKIQISPSILSADFSNLEKDIKKLEIAGADMIHVDVMDGHFVPNITIGPPVIKALRSKTSLPFDVHLMISPVHKYIKDFANAGADIITIHPEATSNLQESIDEIKSFKKKVGISLNPDTKIDIVEDYLDKVDLILIMSVYPGFGGQKFITDVLEKIKSLKNLKDKKKFNFDIEVDGGINFSNFKSVIDAGANVLVSGTTIFKENNGDIKKNIDFLKSI

SEQ ID NO: 154789 - protein, 123 aa, Unknown
  Bacterial polypetide isolated from the Sargasso Sea
MKKIQISPSILSADFGQLGVEINRLKDAGADMIHVDVMDGHFVPNLTIGPPVIKALKKQSSMIFDVHLMISPVHKYIEAYADAGADIITIHPEATDDLNSSILKIKELNKKVGLSLNPKTKMI

SEQ ID NO: 154790 - protein, 204 aa, Unknown
  Bacterial polypetide isolated from the Sargasso Sea
MKKIQISPSILAGDFSKLGSEIKKLEDGGADMIHVDVMDGHFVPNLTIGPPVIKSLRKYTNLPFDVHLMISPVHKYIKNFSDAGADIITIHPETTKNLKESIELIKSLGKKVGLSLNPETSIETIEKYLQEINLVLVMTVHPGFGGQKFISKVLDKIKNLKKIKDEKKINFEIEVDGGINFDNNKLVIQAGANILVSGTTIFKN

SEQ ID NO: 154791 - protein, 207 aa, Unknown
  Bacterial polypetide isolated from the Sargasso Sea
ADFSQLGNEIKRLEDAGADMIHVDVMDGHFVPNLTIGPPVIKALRKYSELTFDVHLMISPVHKYIKDFADAGADIITIHPEATDNLKESIKHIKSFKKKVGISLNPNTEVNIIKNELENVDLVLVMSVHPGFGGQKFIPDVIKKIELLKKLKDNKNYKYDIEVDGGINFSNSKDVIYAGANILVSGTTIFKENNGNIKKNIETLKEV

SEQ ID NO: 154792 - protein, 157 aa, Unknown
  Bacterial polypetide isolated from the Sargasso Sea
MKKIQISPSILSADFGQLGNEVKRLEDAGADMIHVDVMDGHFVPNLTIGPPVIKTLRKYSELTFDVHLMISPVHKYIKDFADAGADIITIHPEATDNLAKSIKHIKSFKKKVGISLNPNTEVKIIEDELKNVDLILVMSVYPGFGGQKFIPDIIKKI

SEQ ID NO: 154793 - protein, 116 aa, Unknown
  Bacterial polypetide isolated from the Sargasso Sea
MKKIQISPSILSADFSQLGNEIKKLEEGGADMIHVDVMDGHFVPNLTIGPPVIKRLRNCTKLPFDVHLMISPVHKYIEDYSKAGADIITIHPEATDNLIDSIDHIRKLNKKIGVSL

SEQ ID NO: 154794 - protein, 220 aa, Unknown
  Bacterial polypetide isolated from the Sargasso Sea
MSSIIKISPSILSANFAKLGEEIVALDKAGADYIHVDVMDGHFVPNITIGPEVVKKLRPFSKKIFDVHLMISPVNNYIRQFAEAGADIITFHPEATDNIKETINLIKKYGKKVGISLKPKSEIKLIENYLDDIDLVLIMSVEPGFGGQKFMPEVIEKLKNIKRLADEKKLKIDIEIDGGINFENSKSVIEAGANVLVSGSTIFRENKGDLKKNIGLLKSN

SEQ ID NO: 154795 - protein, 114 aa, Unknown
  Bacterial polypetide isolated from the Sargasso Sea
MKKIQISPSILSADFSQLGNEIAKLANAGADMIHVDVMDGHFVPNLTIGPPVIKALKKNTSIPFDVHLMISPVHKYIEAYAEAGADIITIHPEATDDLEESINKIKKLEKKSRC

SEQ ID NO: 154796 - protein, 107 aa, Unknown
  Bacterial polypetide isolated from the Sargasso Sea
MSKQSNVIAPSILSADFARLGEEVKDVLRAGADWIHFDVMDNHFVPNLTVGPMVCESLRKNDINCPIDVHLMVEPVDDLIKMFADSGATSITFHPEASKNPEKSLEL

SEQ ID NO: 154797 - protein, 152 aa, Unknown
  Bacterial polypetide isolated from the Sargasso Sea
MNTSIKISPSILACDFSKIGKEVEALEKAGADYIHVDVMDGHFVPNLTIGPDVIKKIRPFSKKIFDVHLMISPVDNYIEQFANAGADIITFHPEATKDTGATIELIKKFKKKVGISLKPKSEIDLIKDYMHKIDLILILSVEPGFGGQKFMP

SEQ ID NO: 154798 - protein, 139 aa, Unknown
  Bacterial polypetide isolated from the Sargasso Sea
IDAGADLISFHPEATKHIHRSIHAIKDKGCKAGLVYNPATPLHTLESVLEDLDLVLIMSVNPGFGGQSFIHSSLEKIAQVRKMIDESGKDVRLEVDGGINKDTIGLASEAGADTFVAGSAIFNTENYEQTISELRSKIV

SEQ ID NO: 154799 - protein, 198 aa, Unknown
  Bacterial polypetide isolated from the Sargasso Sea
ITSLDKAGADYIHVDVMDGHFVPNLTIGPEVIKKLRPFTKKVFDVHLMISPVDQYIEAYSKAGADIITFHPEATEDTSKTINLIKKLKKKVGISLKPESSIDLIKDHLSKIDLILIMSVEPGFGGQKFMPKVLDKLKNIAKIVSEKKLNIDIEIDGGINFENCRLAKEAGANVLVSGSTIFKENKGDLKKNIGILRSN

SEQ ID NO: 154800 - protein, 116 aa, Unknown
  Bacterial polypetide isolated from the Sargasso Sea
MKKKIQISPSILSADFGQLGVEINRLKDAGADMIHVDVMDGHFVPNLTIGPPVIKALKKQSSMIFDVHLMISPVHKYIEAYADAGADIITIHPEATDDLNSSILKIKELNKKVGVS

SEQ ID NO: 154801 - protein, 135 aa, Unknown
  Bacterial polypetide isolated from the Sargasso Sea
MSKFVKISPSILSADSSKLGEEVISLDKAGADYIHVDVMDGHFVPNITIGPGVIKKIRPFTKKIFDVHLMISNVDKYIEKFAEAGSDIITFHPEATSNTSKTIDLIKKQKKKVGISLKPNSNINLIIDHLNNIDL

SEQ ID NO: 154802 - protein, 111 aa, Unknown
  Bacterial polypetide isolated from the Sargasso Sea
MKKIKISPSILSADFSQLGNEIKRLEDAGADMIHVDVMDGHFVPNLTIGPPVIKTLRKHSELTFDVHLMISPVHKYIKDFADAGADIITIHPEATDNLTESIKHIKNLKKK

SEQ ID NO: 154803 - protein, 87 aa, Unknown
  Bacterial polypetide isolated from the Sargasso Sea
MKNIQISPSILSADFSQLGKEIKRLEDGGADLIHVDVMDGHFVPNITIGPPVIKTLRNYTKLPFDVHLMISPVHKYIKNFAEAGFLI

SEQ ID NO: 154804 - protein, 69 aa, Unknown
  Bacterial polypetide isolated from the Sargasso Sea
MDTSIKISPSILSSDFSKLGEEVKALEKAGADYIHVDVMDGHFVPNLTIGPDVIKKIRPLTKKIFDVHL

SEQ ID NO: 154805 - protein, 217 aa, Unknown
  Bacterial polypetide isolated from the Sargasso Sea
KIQISPSILSADFSQLGNEIEKLEKGGADLIHVDVMDGHFVPNLTIGPPVIKTLRNYTKLPFDVHLMISPVHKYIKNFAEAGSDIITIHPEATENLNESISLIKKLNKKVGVSLNPNTEINIIESQLKNIDLVLIMSVFPGFGGQKFIPDTIKKIKALKKIKDNNNYIFDIEVDGGINFSNSKEVINAGANILVSGTTIFKENNGNIKKNIETLKTV

SEQ ID NO: 154806 - protein, 181 aa, Unknown
  Bacterial polypetide isolated from the Sargasso Sea
MSEIIIAPSILSADFARLGEEVEHVLEAGADWVHFDVMDNHYVPNLTIGPMVCKSLREHGIEAFIDVHLMIEPVDALAADFAKAGASLISFHPEASNHVHRSIHAIKDAGCQVGLVLNPATNVNVLDSVLEDIDLVLIMSVNPGFGGQSFIHSSLEKIAAVRSLIDQSGKSIRWRSMGESI

SEQ ID NO: 154807 - protein, 154 aa, Unknown
  Bacterial polypetide isolated from the Sargasso Sea
MKKIQISPSILSADFGQLENEIIKLEKGGADLIHVDVMDGHFVPNLTIGPPVIKALRKCTSLPFDVHLMISPVHKYIKDFSDAGADIITIHPEATENLEDSIKLIKTLKKKVGVSLNPNTQINVIEKNFDKIDLVLVMSVFPRIWRSKIYTRNN

SEQ ID NO: 154808 - protein, 94 aa, Unknown
  Bacterial polypetide isolated from the Sargasso Sea
MNQIKICPSILSADFTRLAEQVREAEDAGVDYIHVDVMDGHFVPNITIGPLIVKALRPVTQLPLDIHLMIDNPELYIEDFSKAGADIITVHQEA

SEQ ID NO: 154809 - protein, 50 aa, Unknown
  Bacterial polypetide isolated from the Sargasso Sea
MKKIQISPSILSADFSNLEKDIKKLETAGADMIHVDVMDGHFVPNITIGP

SEQ ID NO: 154810 - protein, 62 aa, Unknown
  Bacterial polypetide isolated from the Sargasso Sea
MSSKDYIIAPSILSADFARLGEESKNVLDSGADWIHFDVMDNHYVPNLTIGPMVCKALRDYG

SEQ ID NO: 154811 - protein, 162 aa, Unknown
  Bacterial polypetide isolated from the Sargasso Sea
MNDYIIAPSILSADFANLGKDVSEVIDAGADFIHFDVMDNHYVPNLTVGPMVCKSLRDYGINATIDVHLMISPVDEIIPDFAKAGANYITFHPEATKHVDRTIKLIKDHGCQPGVVLNPATNASILEYCLDQIDMVLLMSVNPGFAGQKFIESTYDKIIEGE

SEQ ID NO: 154812 - protein, 110 aa, Unknown
  Bacterial polypetide isolated from the Sargasso Sea
MKNIQISPSILSANFSQLGNEIKRLEDGGADLIHVDVMDGHFVPNITIGPPVIKTLRNYTKLPFDVHLMISPVHKYIKNFAEAGSDIITIHPEATNNLIESIQLIKQLKK

SEQ ID NO: 154813 - protein, 182 aa, Unknown
  Bacterial polypetide isolated from the Sargasso Sea
MSEKNYIIAPSILASDFARLGDEVKDVLNAGADWVHFDVMDNHYVPNLTIGPMVCKALRDYGIKEFIDVHLMIDPVDELAQSFIKAGADLISFHPEASKHIHRSIHAIKDKECKVGLVYNPATPLHTLENVINDIDLVLIMSVNPGFGGQSFIHSSLEKISQVRKMIDDSGKDIRLEVDGGI

SEQ ID NO: 154814 - protein, 146 aa, Unknown
  Bacterial polypetide isolated from the Sargasso Sea
DELAQSFIDAGADLISFHPEATKHIHRSIHAIKDKGCKAGLVYNPATPLHTLESVLEDLDLVLIMSVNPGFGGQSFIHSSLEKIAQVRKMIDESGKDVRLEVDGGINKDTIGLASEAGADTFVAGSAIFKTENYEQTISELRSKIV

SEQ ID NO: 154815 - protein, 199 aa, Unknown
  Bacterial polypetide isolated from the Sargasso Sea
EIKRLEDGGADLIHVDVMDGHFVPNLTIGPPVIKNLRKYTNLPFDVHLMISPVHKYLKDYADAGADIITIHPEATDNLKDSINLIKNLNKKVGVSLNPNTNLDVLMSEIKNIDLILIMSVFPGFGGQKFIPKVIEKIKKLKKIKEEEKISFDIEVDGGINFSNFREVLDAGADILVSGTTIFKENDGNIKRNIETLKSI

SEQ ID NO: 154816 - protein, 110 aa, Unknown
  Bacterial polypetide isolated from the Sargasso Sea
MANIKISPSILSADFSKLGNEIQDLEKAGADFIHIDVMDGHFVPNITIGPEVINKLRKHTSLPFDVHLMISPVHDFIKNFAEAGADIITIHPEATKNLPDSIKKIRSYNK

SEQ ID NO: 154817 - protein, 190 aa, Unknown
  Bacterial polypetide isolated from the Sargasso Sea
ADMIHVDVMDGHFVPNLTIGPPVIKSLRSHTSLPFDVHLMISPVHKYIKNFSDAGADIITIHPEATDNLIDSINHIKNLKKKAGVSLNPDTKISVVEKYLDKIDLILIMSVYPGFGGQKFIPEVVSKIKTLSEIKKNKNLNFDIEVDGGINFENSKFVVEAGANILVSGTTIFKENSGNVKKNIETLKSI

SEQ ID NO: 154818 - protein, 188 aa, Unknown
  Bacterial polypetide isolated from the Sargasso Sea
MIHVDVMDGHFVPNLTIGPPVIKSLRKYTKLPFDVHLMIDPVHKYIKDYSDAGADIITFHPEATENILETIDLIKSLDKKVGISLNPDTEITAAEEHLDKIDLVLIMSVYPGFGGQTFINKVVKKVEDLDQIRKERKLNFKIEIDGGINFETSKIAVEAGVDILVSGTTVFKENNGDLKKNIKTLKQI

SEQ ID NO: 154819 - protein, 131 aa, Unknown
  Bacterial polypetide isolated from the Sargasso Sea
MKNIQISPSILSADFSQLGTEIKRLEEGGADMIHVDVMDGHFVPNLTIGPPVIKALRKHCSLKFDVHLMISPVHKYIEAYANAGADIITIHPEATDNLENSIKKIKEKNKKVGVSLNPETKINLILNFLDQ

SEQ ID NO: 154820 - protein, 179 aa, Unknown
  Bacterial polypetide isolated from the Sargasso Sea
MNRVKISPSILSADFSKLAEEVRAVDKAGADYIHIDVMDGHFVPNISFGTPIIKDIRPHTKKVFDVHLMIEPATPYLESFANSGADIITVHAEADKHLDRNLECIKSLGKKAGVSLNPSTPPTAIEQVIDKLDLILVMTVNPGFSGQKFISSQLQKIAMIKELIGERRIELSVDGGVNA

SEQ ID NO: 154821 - protein, 200 aa, Unknown
  Bacterial polypetide isolated from the Sargasso Sea
NEIRKLELGGADLIHVDVMDGHFVPNLTIGPPVIKNLRKYTKLPFDVHLMISPVHDYIENYANAGSDIITIHPEATKNLKESINLIKKFGKKVGVSLNPKTEIKTLIGEIHNIDLVLVMSVNPGFGGQKFMPEVLDKIKELKKIKDENQFHFDIEVDGGINFSNYKIVLEAGADILVSGTTVFKENNGDIKTNIEKLKSM

SEQ ID NO: 154822 - protein, 68 aa, Unknown
  Bacterial polypetide isolated from the Sargasso Sea
MKKIQISPSILSADFSQLGNEITRLEKSGADMIHVDVMDGHFVPNLTIGPPVIKNLRNYTKLPFDVHL

SEQ ID NO: 154823 - protein, 200 aa, Unknown
  Bacterial polypetide isolated from the Sargasso Sea
MSRSIKISPSILSCDFSKIGKEVEALEKAGADYIHVDVMDGHFVPNLTIGPDVIKNIRPFSKKIFDVHLMISPVDKYIKQFADAGSDIITFHPEATDNMGKTIDLIKKCKKKVGVSLKPKSKIELIKDYLKQIDLVLIMSVEPGFGGQKFMPEVLPKLKELKKIIEKEKLNIDLEIDGGINFENSKIAKEAGANILVSGS

SEQ ID NO: 154824 - protein, 222 aa, Unknown
  Bacterial polypetide isolated from the Sargasso Sea
LVMDSSIKISPSILACDFSKLGDEVKALEEAGADYIHVDVMDGHFVPNLTIGPDVIKKIRPLSKKIFDVHLMISPVDKYIEQFANAGADIITFHPEATEDTEKTIELIKKFNKKVGVSLKPKSNISLIKNYLDKIDLVLIMSVEPGFGGQKFMPEVLPKLKELRKIIDEKKYKLDLEIDGGINFKNSKDVKEAGANILVSGSTIFKENKGDLKKNITLLRKN

SEQ ID NO: 154825 - protein, 222 aa, Unknown
  Bacterial polypetide isolated from the Sargasso Sea
MSDQKNIIAPSILASDFARLGEEVRNVLDAGADWVHFDVMDNHYVPNLTIGPMVCKALREYGIKEFIDVHLMIDPVDELAQSFIDAGADLISFHPEATKHIHRSIHAIKDKGCKTGLVYNPATPLHTLESVLEDLDLVLIMSVNPGFGGQSFIHSSLEKIAKVRKMIDESGKDVRLEVDGGINKDTIGPASEAGADTFVAGSAIFNTENYEQTISELRSKIV

SEQ ID NO: 154826 - protein, 184 aa, Unknown
  Bacterial polypetide isolated from the Sargasso Sea
MTSVKISPSILSCDFSKIGSEVEALEKAGADYIHVDVMDGHFVPNLTIGPDVIKKIRPYSKKIFDVHLMISPVDKYIEQFANAGSDIITFHPEATENIDHTISLIKKFNKKVGISLKPKSEISLIKNFLKKVDLVLIMSVEPGFGGQKFMPEVLPKLEELKKIIDNEKYKIDLEIDGGINFKNS

SEQ ID NO: 154827 - protein, 223 aa, Unknown
  Bacterial polypetide isolated from the Sargasso Sea
MKDYKIAPSILSADFSRLGEDVSNVVKAGADIIHFDVMDNHYVPNLTFGPMICSALRDYGIAAPIDVHLMIKPVDRIIPDFAKAGANYITFHPEATDHIDRTIGLIKEHDCKAGIVLNPATPLSFLEHCLENLDMVLLMSVNPGFPGQKFIDGTYNKISLVRELIDKANKNVRLEVDGGINLDNIAKVASAGADTFVAGSAIFNSKDYKNTLNSMRDLLSQIK

SEQ ID NO: 154828 - protein, 137 aa, Unknown
  Bacterial polypetide isolated from the Sargasso Sea
MKTIKISPSILSADFSNLGSEIQNLEKGGADLIHIDVMDGHFVPNITIGPGVIKKLRNYTSLPFDVHLMISPVDNFIKNFADAGADIITIHPEATDNLNNSINKIKSFNKKVGISLNPETSIEKVIPVLNVIDLVLI

SEQ ID NO: 154829 - protein, 221 aa, Unknown
  Bacterial polypetide isolated from the Sargasso Sea
MDRNVKIAPSILSADFAELGKEIQNIDAAGADYIHIDVMDGHFVPNITIGPGVVKALRPHSNKPFDVHLMVAPVDPYISAFAEAGADIITVHAEAGPHTHRTIQGIKNLGKKAGLSLNPATPVNVIDNLIDQLDLILVMTVNPGFGGQKFIENQIEKIYEIRRRIDESGFSIDLEVDGGIDLLTAKRVIAAGADVLVAGTASFRGGVNCYKDNISQLRASN

SEQ ID NO: 154830 - protein, 198 aa, Unknown
  Bacterial polypetide isolated from the Sargasso Sea
MKKIKISPSILSADFSQLGKEISNLEKGGADLIHVDVMDGHFVPNLTIGPPVIKALRKNTKLPFDVHLMISPVHKYIKDFADAGSDIITIHPEATNDLKESISHIKELNKKVGVSLNPNTKIEIIESHLNNIDLVLVMSVFPGFGGQKFIPETMKKIINLKKIKDEKNYSFDIEVDGGVNFSNSKDIINAGANILVSG

SEQ ID NO: 154831 - protein, 77 aa, Unknown
  Bacterial polypetide isolated from the Sargasso Sea
MKPFLIAPSILSADFARLGEDVEKVLEAGADVVHFDVMDNHYVPNLTFGPMICEALRNYGITAPIDVHLMVKPVDDL

SEQ ID NO: 154832 - protein, 176 aa, Unknown
  Bacterial polypetide isolated from the Sargasso Sea
MNLSPVIAPSILSADFGNVSREIERIHQAGASWVHLDVMDGNFVPNITFGAVAMESFSKPEGCVFDTHLMVVNPEKHIPAFIKSGADVISIHAEATEHLQYGLKMIRDHGAKASVALNPATPLEALDWVYPDLDMVLLMSVNPGWGGQSFIAPVFDKIRSLRQRLKDRGIDIPIQV

SEQ ID NO: 154833 - protein, 123 aa, Unknown
  Bacterial polypetide isolated from the Sargasso Sea
MKKIQISPSILSADFSQLGNEIKRLEDAGADMIHVDVMDGHFVPNLTIGPPVIKTLRKHSELTFDVHLMISPVHKYIKDFADAGADIITIHPEATDNLAESIKHIKSFKKKGWYFSKSKYRDN

SEQ ID NO: 154834 - protein, 98 aa, Unknown
  Bacterial polypetide isolated from the Sargasso Sea
VRNVLDAGAEWVHFDVMDNHYVPNLTIGPMVCKALRDFGIKEFIDVHLMIDPVDELAQSFIEAGADLISFHPEASKHIHRSIHAIKDKGCKAGLVFNP

SEQ ID NO: 154835 - protein, 73 aa, Unknown
  Bacterial polypetide isolated from the Sargasso Sea
MSSIKISPSILSADFSKLGSEIQDLEKAKADLIHIDVMDGHFVPNITIGPEVIKKLRKYTSLPFDVHLNDSPV

SEQ ID NO: 154836 - protein, 142 aa, Unknown
  Bacterial polypetide isolated from the Sargasso Sea
PSFIDAGADLISFHPEATKHIHRSIHAIKDKGCKAGLVYNPATPLHTLESVLEDLDLVLIMSVNPGFGGQSFIHNSLEKIAQVRKMIDEFGKDVRLEVDGGINKDTIGLASEAGADTFVAGSAIFNTENYEQTISELRSKIV

SEQ ID NO: 154837 - protein, 219 aa, Unknown
  Bacterial polypetide isolated from the Sargasso Sea
KKKLLIAPSILSSNFSRLGEEIKDIPEAGADLIHIDVMDGHFVPNLTIGPSIIKSTREHTDLEFDVHLMIENVDRYIPSYAKAGADIITIHSEVSKDISKSIEIIKDHGKKAGLAFNPKSSINMLSQFINKLDLVLIMTVNPGFGGQTFIESQIEKIKATKKIIDMSKRSVLLEVDGGINERNIKNVVDSGANLIVAGSAIFNGKKNEYKLNIEKLRIH

SEQ ID NO: 154838 - protein, 62 aa, Unknown
  Bacterial polypetide isolated from the Sargasso Sea
MNRMIKIAPSILSADFANLGAEVESIDAAGCDYVHIDVMDGHFVPNLTFGPPVIECIRPCTT

SEQ ID NO: 154839 - protein, 87 aa, Unknown
  Bacterial polypetide isolated from the Sargasso Sea
MATSIKISPSILSCDFSKLGEEIQSLEKAGADYIHVDVMDGHFVPNLTIGPDVIKKIRPFSKKIFDVHLMISPVNNYIEQFAKAGAD

SEQ ID NO: 154840 - protein, 219 aa, Unknown
  Bacterial polypetide isolated from the Sargasso Sea
MKKIQISPSILSADFSELGNEIKKLEKGGADMIHVDVMDGHFVPNLTIGPPVIKSLRKFTSIPFDVHLMISPVHKYIKDFAEAGADIITIHPEATENLNDSIKEIRNFNKKVGVSLNPDTEINLIESNLENIDLVLIMSVYPGFGGQKFISSVIEKIKKLDVIKKKLNLTFDIEVDGGINFSNAETVINAGANILVSGTTIFKENNGNVKKNIELLRKF

SEQ ID NO: 154841 - protein, 216 aa, Unknown
  Bacterial polypetide isolated from the Sargasso Sea
MKKIQISPSILSANFGELGDEIKRLEAGGADMIHVDVMDGHFVPNLTIGPPVIKSLRNFTKLPFDVHLMIDPVHKYIKDYAEAGANIITIHPEATENLEESINYIKELGKKIGVSLNPNTPIKVIENLLDKINLVLVMSVYPGFGGQKFIPEVIDKIKDLKTIKDKRKLNFDIEVDGGINFLNSKTVIEAGANILVSGTTIFKSNKGDIKKNIETL

SEQ ID NO: 154842 - protein, 237 aa, Unknown
  Bacterial polypetide isolated from the Sargasso Sea
MNLSPVIAPSILSADFGNVSREIERIHQAGATWIHLDVMDGNFVPNITFGAVAMESFSKPEGCVFDTHLMVVNPEKHIPAFIKAGADVISIHAEATEHLQYGLKMIRDHGAKASVALNPATPLEALDWVYPDLDMVLLMSVNPGWGGQSFISPVFDKISSLRQRLQDRGIDIPIQVDGGINLKTIARASLAGTTHFVAGSAVFNVKAGEALDEKDRLETYRKNINGLIEEATKDQLV

SEQ ID NO: 154843 - protein, 78 aa, Unknown
  Bacterial polypetide isolated from the Sargasso Sea
MKKIQISPSILSADFSQLANEIKRLEEGGADMIHVDVMDGHFVPNLTIGPPVIKALRKHCSLKFDVHLMISPVHKYIK

SEQ ID NO: 154844 - protein, 219 aa, Unknown
  Bacterial polypetide isolated from the Sargasso Sea
MKKIQISPSILSADFSQLGNEIKRLEEGGADMIHVDVMDGHFVPNLTIGPPVIKALRKYTKLPFDVHLMISPVHKYIEDYAKAGANIITIHPEATNNLKESIDLIKKLNVKVGVSLNPDTKIDVIENILDQVDLVLVMSVYPGFGGQKFIPDVVRKIENLGKLKKDKNLNFDIEVDGGINFENNKIVIKAGANILVSGTTIFKENNGNIKKNIDFLKLD

SEQ ID NO: 154845 - protein, 127 aa, Unknown
  Bacterial polypetide isolated from the Sargasso Sea
MKNIQISPSILSADFSQLGAEIKRLEEGGADMIHVDVMDGHFVPNLTIGPPVIKALRKHCSLKFDVHLMISPVHKYIDAYADAGADIITIHPEATDNLENSLKKIKGKNKKVGVSLNPKSKIDLILN

SEQ ID NO: 154846 - protein, 193 aa, Unknown
  Bacterial polypetide isolated from the Sargasso Sea
MSVKISPSILASDFSSLGEEVVNITKAGADYIHVDVMDGHFVPNLTIGPDIVKSIRDKSSLPFDVHLMIDPVQPYIEKFVEAGADIVSVHPEANDDTQACIDKIKSLNVKAGLAINPDTEWEVVKPFMDQLDLILVMSVHPGFGGQKFIPTALDKLEKLRKEIDQSGREIDLEIDGGINFENIQSVIDAGANM

SEQ ID NO: 154847 - protein, 114 aa, Unknown
  Bacterial polypetide isolated from the Sargasso Sea
MSEIIIAPSILSADFARLGDEVKDVLEAGADWVHFDVMDNHYVPNLTIGPMVCKSLRDFGIDAFIDVHLMIDPVDRLAQDFIDAGASLVSFHPEASKHVHRSVSAIKDRGCKAG

SEQ ID NO: 154848 - protein, 207 aa, Unknown
  Bacterial polypetide isolated from the Sargasso Sea
ADFSRLGDEIKRLEDNGADMIHVDVMDGHFVPNLTIGPPVIKTLRKYTSLPFDVHLMIDPVHKYIKDYSDAGADIITFHPEATENISETINLIKSLNKKVGISLNPNTEIKAAEDHLDKVYLILIMSVYPGFGGQKFISDVVQKIKDLDQIRNERKLNFKIEIDGGINFETSKVAIEAGVDILVSGTTVFKENNGDLKKNIKILKQI

SEQ ID NO: 154849 - protein, 90 aa, Unknown
  Bacterial polypetide isolated from the Sargasso Sea
MDSSIKISPSILACDFSKLGKEVEALEKAGADYIHVDVMDGHFVPNLTIGPDVIKKIRPLSKKIFDVHLMISPVDKYIEQFANAGADIIT

SEQ ID NO: 154850 - protein, 188 aa, Unknown
  Bacterial polypetide isolated from the Sargasso Sea
MIHVDVMDGHFVPNLTIGPTVIKALRKYSSIMFDVHLMISPVHKYIEDYSNAGADIITVHPEATENLETSILKIKELKKKVGVSLNPETKIDLILNQLSKIDLILIMSVNPGFGGQKFMPEVLEKIKKLKEIREKENLNFDIEIDGGINFENSKLAIEAGANILVSGTTIFKSNNGDIKKNIELLKSK

SEQ ID NO: 154851 - protein, 182 aa, Unknown
  Bacterial polypetide isolated from the Sargasso Sea
MDKKVKVAPSILSADFSQLGNEIEELDNTNCDYIHIDVMDGHFVPNLTIGPDIVRSIRKYTKKLFDVHLMIDPVNKYIPEFAKAGADIITIHEEISEEVLESLSLIKKYKKKAGISLKPSTPAKNIEKYIDHVDLILVMTVEPGFGGQNFLNDQLKKIRVIKEMIGTKKVDIEVDGGINLST

SEQ ID NO: 154852 - protein, 178 aa, Unknown
  Bacterial polypetide isolated from the Sargasso Sea
MKNIQISPSILSADFSQLGNEIKRLEDGGADLIHVDVMDGHFVPNITIGPPVIKTLRNYTKLPFDVHLMISPVHKYIKNFAEAGSDIITIHPEATNNLIESIQLIKQLKKKVGISLNPNTEINIIEKLLKDIDLVLIMSVHPGFGGQKFMPEVIEKIKKLYQIKKDNKLNFDIEVDGG

SEQ ID NO: 154853 - protein, 234 aa, Unknown
  Bacterial polypetide isolated from the Sargasso Sea
MKKNKHSSFIAPSILSADFLSLGEEINAVENAGADYIHFDVMDNHYVPNLTFGPMVCRSVRSKIKIPIDVHLMASPVDSLIEDFVDAGANIITFHPEASKHVDRSLTLVREKGCKTGLVLNPSTPIEYLDWVMPKLDMILIMSVNPGFSGQKFINNIYSKIRAVRSKIDEFCLSGGQPIRLEVDGGIKVENIKSIKEAGADTFVIGSGIFGHPDSSNHKSYTKIMQAYRRELEF

SEQ ID NO: 154854 - protein, 140 aa, Unknown
  Bacterial polypetide isolated from the Sargasso Sea
MTQFRIAPSILSADFARLGEEVRNVVAAGADWIHFDVMDNHYVPNLTIGPLVCEAIRPHVDVPIDVHLMVRPVDRIVPDFAKAGANLISFHPEGSDHIDRTLSLIRDHGCKAGLVFNPATSLNHLDYVMDKVDLVLIMSV

SEQ ID NO: 154855 - protein, 214 aa, Unknown
  Bacterial polypetide isolated from the Sargasso Sea
MSVKISPSILASDFSSLGDEVVNITQAGADYIHVDVMDGHFVPNLTIGPDIVKSIRDKSSLPFDVHLMIDPVQPYIEKFVEAGADIVSIHPEANDDTEACLNKIKSLNVKAGLAINPDTEWEVVKPFINKLDLILVMSVHPGFGGQKFIPTALDKLSNLREEINKSGREIYLEVDGGINFENVQSVIDAGADMIVAGTTTFKGGPSEYANNIEK

SEQ ID NO: 154856 - protein, 219 aa, Unknown
  Bacterial polypetide isolated from the Sargasso Sea
MKNIQISPSILSADFSQLGEEIKRLEDGGADLIHVDVMDGHFVPNITIGPPVIKTLRNYTKLPFDVHLMISPVHKYIKNFAEAGSDIITIHPEATDNLIESIKLIKQLNKKVGISLNPNTEVSVIEKLLKEIDLVLIMSVYPGFGGQKFIPEVIEKIKKLYQIKKDSKLKFDIEVDGGINFSNSKEVISAGANILVSGTTIFKENNGDIKKNIETLKSM

SEQ ID NO: 154857 - protein, 218 aa, Unknown
  Bacterial polypetide isolated from the Sargasso Sea
MKKIQISPSILAGDFSQLGSEIKKLEIGGADMIHVDVMDGHFVPNLTIGPPVIKALRKYTKLPFDVHLMISPVHKYIKNFSDAGSDIITIHPEATENLKDSIDLIKNLGKKVGISLNPDTPIDKIVKYLNEINLVLVMTVYPGFGGQKFISKILDKIKNLKKIKDEKNFDFKIEVDGGINFENNKLVIAAGADILVSGTTIFRDNNGDIKKNIELLRT

SEQ ID NO: 154858 - protein, 128 aa, Unknown
  Bacterial polypetide isolated from the Sargasso Sea
MVDKNYIIAPSILASDFARLGDEVRNVLDAGADWVHFDVMDNHYVPNLTIGPMVCKALRDFGIKEFIDVHLMIDPVDELAQSFIEAGADLISFHPEASKHIHRSIHAIKEKNCKAGLVFNPATPLQTL

SEQ ID NO: 154859 - protein, 215 aa, Unknown
  Bacterial polypetide isolated from the Sargasso Sea
MRNISPSILSADFTIIQSQIKEVEDAGADRLHIDVMDGHFVPNLTFGPFIIKQLRKISNIHFETHLMIEQPDKYLQDYIDAGSDTVIFHYEASSNINRDIKIIKKNNKLAGIAINPDTNPNVLKKYINDIDYILVMSVFPGFGGQSFIENTLESMKRLDDLRGDRNILIGVDGGVNLKTISRVYDTGVDVTIVGSGLYKAPDIKERFDELMTIGK

SEQ ID NO: 154860 - protein, 224 aa, Unknown
  Bacterial polypetide isolated from the Sargasso Sea
MHSPVIAASILSADMSKLGEDTRTVLEAGADFIHVDVMDNHYVPNLTFGPIVVKALRDFGITSTLDVHLMIKPVDRIIPEFAKAGADYITFHPEASENVENTLNLIRECKCKPGLVFNPTTSLDILEHTLDKIDIVLLMSVNPGFGGQSFIGSVFDKLKIARKIIDESKYDIRLEIDGGVKVDNIRKIAEAGADTFVAGSAIFGAEDYKSTIKMMREQIALAKN

SEQ ID NO: 154861 - protein, 189 aa, Unknown
  Bacterial polypetide isolated from the Sargasso Sea
MKKIQISPSILSADFSQLGNEIKRLEEGGADMIHVDVMDGHFVPNLTIGPPVIKRLRNCTKLPFDVHLMISPVHKYIEDFSNAGADIITIHPEATDNLTESINLIRKLNKKIGVSLNPDTKLSVIENILDQIDLVLIMSVFPGFGGQKFMPEIVTKIKNLKKIKEEKKFNFDIEVDGGINFNNNKIVIE

SEQ ID NO: 154862 - protein, 219 aa, Unknown
  Bacterial polypetide isolated from the Sargasso Sea
MKKIQISPSILSADFGQLASEIKRLEDGGADMIHVDVMDGHFVPNLTIGPPVINRLRNCTKLPFDVHLMITPVHKYIKDYAAAGADIITIHPEATNNLKDSIEHIKSFKKKVGVSLNPDTKIDIIEEVISEVDLVLVMSVFPGFGGQKFMPEVVDKIKNLKKEKDKKNLNFDIEVDGGINFQNNKIVIEAGANILVSGTTIFKENNGNIKKNIDALKLI

SEQ ID NO: 154863 - protein, 219 aa, Unknown
  Bacterial polypetide isolated from the Sargasso Sea
MKNIKISPSILAADFSQLGKEINNLERGGADLIHVDVMDGHFVPNLTIGPPVIKALRKYTKLPFDVHLMISPVHKYIKDFANAGSDIITIHPEATENLEKSIFHIKELNKKVGVSLNPDTKINVIESHLNNIDLVLIMSVFPGFGGQKFIPETIKKIKDLKEIKDKNNYNFDIEVDGGVNFLNSKDIINAGANILVSGTTIFKENNGDIKKNIETLKSV

SEQ ID NO: 154864 - protein, 187 aa, Unknown
  Bacterial polypetide isolated from the Sargasso Sea
HIDVMDGHFVPNLTIGPDIIKSIRAYTQLEFDVHLMIENVDRYIPDYAKAGADIITIHSEVSKDIIKTIDIIRHHGKKVGLAFNPSSPITILNQIIEKLDLVLIMTVNPGFGGQVFMEDQIEKIISTKKIIDMSQKEVLLEVDGGINENNIKIVAESGASIIVAGSAIFKGNKDNYKLNIEKLRNYN

SEQ ID NO: 154865 - protein, 221 aa, Unknown
  Bacterial polypetide isolated from the Sargasso Sea
MDKKIKIAPSILAADFSKLGEEISAITVAGADYVHVDVMDGHYVPNLTIGPEVIKDIRKCTEIPFDVHLMITPVNPLLEDFAKSGSDIITFHPEAEDDPNQTIQMIKSFGCKVGISLNPATKINVLDNIIDDIDLVLVMTVVPGFGGQSFMHDQLEKIENIRKLIDATGKDIELEVDGGINFETSQLAINAGADVLVAGTSTFNGGQDNYANNISKLRLRN

SEQ ID NO: 154866 - protein, 166 aa, Unknown
  Bacterial polypetide isolated from the Sargasso Sea
MKKIKISPSILSADFSQLGNEIKRLEEAGADMIHVDVMDGHFVPNLTIGPPVIKSLRKYTNLIFDVHLMISPVHKYIKDFADAGANIITIHPEATENLKESINLIRSLNKKVGVSLNPGSKIDLIKDILEDIDLVLIMSVHPGFGGQKFIPDVIKKIEKLKLIKNE

SEQ ID NO: 154867 - protein, 220 aa, Unknown
  Bacterial polypetide isolated from the Sargasso Sea
MSNKIKVSPSILASNFSMLGEEVEHISKAGADYIHVDVMDGHFVPNLTIGPDVVKSIRDKTAVPFDVHLMIDPIEPYIDGFVNAGADIISIHPEANDDTKKCLDKIKSLNVKAGLAINPDTDWEVVKPYMNVLDLILVMSVHPGFGGQKFISSAIDKLKSLRKEIDQSGREIELEVDGGINFENIQSVIDAGANVIVAGTTTFKGGQSEYRNNIEKLRGH

SEQ ID NO: 154868 - protein, 219 aa, Unknown
  Bacterial polypetide isolated from the Sargasso Sea
MKKIKISPSILSADFSQLGKEIKRLEEAGADMIHVDVMDGHFVPNLTIGPPVIKSLRKYTSLIFDVHLMISPVHKYIKDFADAGANLITIHPEATENLKESLDLIKSLNKKVGVSLNPDSKIELIEENLKDIDLVLVMSVHPGFGGQKFIPEVVDKIKKLREIKDKENLKFDIEVDGGINFENSKTVIDAGANILVSGTTIFKSNNGDIKKNIDTLKSS

SEQ ID NO: 154869 - protein, 224 aa, Unknown
  Bacterial polypetide isolated from the Sargasso Sea
MNNYKIAPSILSADFSRLGEDVSNVIKAGADLIHFDVMDNHYVPNLTFGPIICSSLKSYGITVPVDVHLMIKPVDRIIPDFAEAGADYITFHPEASEHIDRTINLIKQLGCKPGIVLNPATSVHCLENCIDDVDMILLMSVNPGFAGQSFIEGTYKKIEQVRKLIDSVGKEIRLEVDGGITIDNIAKIANAGADTFVAGSSIFKSNDYAATIKAMKGQLAQIKK

SEQ ID NO: 154870 - protein, 117 aa, Unknown
  Bacterial polypetide isolated from the Sargasso Sea
MKPYIAPSILSADFSRLGEEVDSVIQAGADIIHFDVMDNHFVPNLTIGPLVCESLRKYGIKAPIDVHLMTEPVDSLIKDFATAGATYITFHPEASTHIHRSLELIRSLGCKSGLVFS

SEQ ID NO: 154871 - protein, 219 aa, Unknown
  Bacterial polypetide isolated from the Sargasso Sea
MKKIKISPSILSADFSQLSSEIKKLEKGGADMIHVDVMDGHFVPNLTIGPPVIQSLRSHTKLPFDVHLMISPVHKYIKNFSDAGADIITIHPEATDNLNDSINLIKNLKKKVGVSLNPNTEISIVEKILDNIDLVLIMSVYPGFGGQKFIPDVVSKIKKLNEIKKNNNLKFDIEVDGGINFSNSKSVIQAGANILVSGTTIFKENSGDIKKNIEILRSI

SEQ ID NO: 154872 - protein, 226 aa, Unknown
  Bacterial polypetide isolated from the Sargasso Sea
MTKEFKIAPSILSADFARLGEEVESVIAAGADFVHFDVMDNHYVPNLTFGPVICKSLRDYGIEAPIDVHLMVQPVDRLIADFAKAGATYITFHPEASDDIGGTLDLIRSNDCLPGLAINPPTPLSYVEEYLDQIDIITMMSVNPGFAGQSFIPEVLDKLTETRAMIEKSGREVFLEIDGGVKANNIGDIASYGADVFVSGSGIFGTDDYRDTIDEMRQNLAPHLNQ

SEQ ID NO: 154873 - protein, 218 aa, Unknown
  Bacterial polypetide isolated from the Sargasso Sea
MSVKISPSILASDFSSLGDEVVNITQAGADYIHVDVMDGHFVPNLTIGPDVVKSIRDKSSLPFDVHLMIDPVQPYIEKFVEAGADIVSVHPEAKDDTEACLNKIKSLNVKAGLAINPDTEWEVVKPFMDKLDLILVMSVHPGFGGQKFIPTALDKLSNLREEINKSGREIHLEVDGGINFENVQSVIDAGADMIVAGTTTFKGGPSEYANNIEKLRGH

SEQ ID NO: 154874 - protein, 222 aa, Unknown
  Bacterial polypetide isolated from the Sargasso Sea
MVDKNYIIAPSILASDFARLGDEVRNVLDAGADWVHFDVMDNHYVPNLTIGPMVCKALRDFGIKEFIDVHLMIDPVDELAQSFIEAGADLISFHPEASKHIHRSIHAIKEKNCKAGLVFNPATPLQTLESVIEDIDLVLIMSVNPGFGGQKFIHSSIDKISKVRKMIDDSGRDIRLEVDGGINSETISLASEAGADTFVAGSAIFNTENYEQTISELRSKIV

SEQ ID NO: 154875 - protein, 222 aa, Unknown
  Bacterial polypetide isolated from the Sargasso Sea
MKDYKIAPSILSADFANLGKDVSDVVEAGADFIHFDVMDNHYVPNLTIGPLVCEALRNYGIKSIIDVHLMISPVDEIIPDFARAGANYITFHPEASKHVDRTIKLIKDNGSMPGIVLNPATNVSILEYCLDQIDMVLLMSVNPGFAGQKFIESTYDKIIEVKEMIDAVNPNIRLEVDGGINLKNIGKVAECGANTFVAGSAIFNSDNYKKTISQMREIISKS

SEQ ID NO: 154876 - protein, 219 aa, Unknown
  Bacterial polypetide isolated from the Sargasso Sea
MKKILISPSILSADFSQLGIEIKRLEQNGADMIHVDVMDGHFVPNLTIGPPVIKALRNHTSLPFDVHLMISPVHKYIKDFAEAGADIITIHPEATDDLDKSIKLIKHFKKKVGISLNPDTKIEIIKDYLSEIDLVLVMSVYPGFGGQKFIPEILKKIENLKKIKDDKNLNFNIEVDGGVNFDNSKSIINAGANILVSGTTIFKDNNGDIKKNIDTLKTM

SEQ ID NO: 154877 - protein, 221 aa, Unknown
  Bacterial polypetide isolated from the Sargasso Sea
MENQSLIAPSILSANFARLGEEVNSVMHAGADWIHFDVMDNHYVPNLTIGPMVCKSLRDDGIKNFIDVHLMVEPVDEIAKSFANAGADLISFHPEATKHVARTIDLIKSLGCKVGIALNPATSVSVLDNIIQDIDLVLLMSVNPGFGGQKFIPSTLKKIQDVKAMIDLQDKLIYLEVDGGINLDTIASVSEAGANVFVAGSAIFGSPDYEETIQSFRQKIS

SEQ ID NO: 154878 - protein, 53 aa, Unknown
  Bacterial polypetide isolated from the Sargasso Sea
MKNIQISPSILSADFSQLGTEIKRLEEGGADMIHVDVMDGHFVPNLTIGSPSY

SEQ ID NO: 154879 - protein, 219 aa, Unknown
  Bacterial polypetide isolated from the Sargasso Sea
MKKIKISPSILSADFSQLGSEIKRLEEGGADMIHVDVMDGHFVPNLTIGPPVIKNLRKYTNIPFDVHLMISPVHKYIKDYADAGADIITIHPEATDSLEDSIKEIRNYKKKVGVSLNPDTKLEVIEKNLDKIDLVLIMSVHPGFGGQKFISDVLNKIKKLSNIKKERKLEFDIEVDGGINFSNSKDVINAGANILVSGTTVFRENNGDLKKNIKTLKLF

SEQ ID NO: 154880 - protein, 220 aa, Unknown
  Bacterial polypetide isolated from the Sargasso Sea
MDNDIIIAPSILSADFSNLGQEISDIDEAGADWMHLDVMDGHYVPNLTFGPPIISKIRKFTKKIFDTHLMVSNPDDLLESYKDAGSDSITVHKEVCDDLDKTLSRIRQLGCKAGVSINPETSFSGLEKFLDKLDLILVMSVNPGFGGQKFIPSSIEKIKNIKSLIGNRQILLEVDGGVNDTNAPKLVKAGADILVAGSFVFNGNNISDYKKNISLLRNSF

SEQ ID NO: 154881 - protein, 226 aa, Unknown
  Bacterial polypetide isolated from the Sargasso Sea
MTKEFKIAPSILSADFARLGEEVESVIAAGADFVHFDVMDNHYVPNLTFGSVICKSLRDFGIKAPIDVHLMVQPVDRLIADFAEAGATYISFHPEASEDIDATLDLIRSNDCLPGLAINPATPLSYIEEYLDQIEIITMMSVNPGFAGQSFIPEVLDKLTETRAMIEKSGRKVLLEIDGGVKANNIGDIASYGADVFVSGSGIFGTDNYRDTIDEMRQNLAPHLNQ

SEQ ID NO: 154882 - protein, 258 aa, Unknown
  Bacterial polypetide isolated from the Sargasso Sea
MPQWISTPERGSLYQWLPRSLKSPRIPRSFSMSTKPLVISPSILSADFSRLGDEVKAVDEAGADWIHVDVMDGRFVPNITIGPLIVEALRPVTQKPLDVHLMIVEPEKYVPDFAKAGADIISVQVEACPHLHRNLAQIKDLGKMAGAVLNPSTPLDTLEYCLELCDLVLIMSVNPGFGGQSFIENQVQKIRDLRRMCDERGLDPWIEVDGGVKAGNAWKVIEAGANAIVSGSGVFNQPDYAEAIKGIRNSSSKEAVLV

SEQ ID NO: 154883 - protein, 219 aa, Unknown
  Bacterial polypetide isolated from the Sargasso Sea
MKNIQISPSILSADFSELGKEIKRLEDGGADLIHVDVMDGHFVPNITIGPPVIKTLRSYTKLPFDVHLMISPVHKYIKNFAEAGSDIITIHPEATDNLIESIHLIKQLKKKVGISLNPNTEINVIEKILNKIDLVLIMSVYPGFGGQKFIPEVIEKIKRLYQIKKDNNLKFDIEVDGGINFSNSKEVISAGANILVSGTTIFKENEGNIKKNIETLKSM

SEQ ID NO: 154884 - protein, 192 aa, Unknown
  Bacterial polypetide isolated from the Sargasso Sea
MSVKISPSILASDFSSLGEEVVNITKAGADYIHVDVMDGHFVPNLTIGPDIVKSIRDKSSLPFDVHLMIDPVQPYIEKFVEAGADIVSVHPEANDDTQACIDKIKSLNVKAGLAINPDTEWEVVKPFMDQLDLILVMSVHPGFGGQKFIPTALNKLEKLRKEIDQSGREIDLEIDGGINLKIFNQSLMLGQT

SEQ ID NO: 154885 - protein, 62 aa, Unknown
  Bacterial polypetide isolated from the Sargasso Sea
MSSKDYIIAPSILSADFARLGEESKNVLDAGADWIHFDVMDNHYVPNLTIGPMVCKALRDYG

SEQ ID NO: 154886 - protein, 137 aa, Unknown
  Bacterial polypetide isolated from the Sargasso Sea
MKKIKISPSILSADFSQLGKEINNLEKGGADLIHVDVMDGHFVPNLTIGPPVIKALRKYTKLPFDVHLMIKPVHKYIKDFANAGSDIITIHPEATNNLKESIFHIKELNKKVGVSLNPDTKINVIESHLSNIDLVLV

SEQ ID NO: 154887 - protein, 237 aa, Unknown
  Bacterial polypetide isolated from the Sargasso Sea
MNLLPVIAPSILSADFGNVSREIERIHQAGATWIHLDVMDGNFVPNITFGAVAMESFSKPEGCVFDTHLMVLNPEKHIPGFIKAGADVISIHAEATEHLQYGLKMIRDHGAKASVALNPATPLEALDWVYPDLDMVLLMSVNPGWGGQSFIAPVFDKIRSLRQRLQDRGIDIPIQVDGGINLKTIARASLAGTTHFVAGSAVFTVKAGDALDEKDRLETYRKNINGLIEEAIKDQMV

SEQ ID NO: 154888 - protein, 219 aa, Unknown
  Bacterial polypetide isolated from the Sargasso Sea
MKKIQISPSILSADFSQLGNEIKRLEQGGADMIHVDVMDNHFVPNLTIGPPVIKSLRKHTKLPFDVHLMIDPVHKYIKNFAEAGSDIITIHPEATKSLEESINLIKSFKKKVGVSLNPDTKIDVIKDVLSQIDLVLIMSVYPGFGGQKFMPEVIEKITNLKRIKDDMKLNFDIEVDGGVNFDNNQMIIEAGANILVSGTTIFKENNGDVKKNIDLLKIK

SEQ ID NO: 154889 - protein, 219 aa, Unknown
  Bacterial polypetide isolated from the Sargasso Sea
MKKIQISPSILSADFSQLGNEIKRLEEGGADMIHVDVMDGHFVPNLTIGPPVIKRLRNCTKLPFDVHLMISPVHKYIEDYSKAGADIITIHPEATNNLIDSIDHIRKLNKKVGVSLNPDTKLNVIDNVLNKIDLVLIMSVFPGFGGQKFMPEVVEKIKNLKKLKEEKKLNFDIEVDGGINFENNKIVIEAGANILVSGTTIFKENNGNIKKNIDSLKLV

SEQ ID NO: 154890 - protein, 219 aa, Unknown
  Bacterial polypetide isolated from the Sargasso Sea
MKKIQISPSILSADFSQLGNEIKRLEESGADMIHVDVMDGHFVPNLTIGPPVIKRLRNCTKLPFDVHLMISPVHKYIEDFANAGADIITIHPEATDNLIESINLVKKLKKKIGVSLNPDTKLSIIENILDQIDLVLIMSVFPGFGGQKFMPEVIEKIKNLKKIKEGKKFNFDIEVDGGINFDNNKIVIEAGANILVSGTTIFKENNGNIKKNIDFLKLI

SEQ ID NO: 154891 - protein, 221 aa, Unknown
  Bacterial polypetide isolated from the Sargasso Sea
MDKKIKIAPSILAADFSKLGEEISAITIAGADYVHVDVMDGHYVPNLTIGPEVIKDIRKCTKIPFDVHLMITPVNPLLEDFAKSGSDIITFHPEAEDNPKGTIEIIKSLGCKVGISLNPSTEINVLDKIIEDIDLILVMTVVPGFGGQSFMHDQLEKIENIRKLIDATGKDIELEVDGGINFETSQLAINAGADVLVAGTSTFQGGQDNYANNISKLRSRS

SEQ ID NO: 154892 - protein, 143 aa, Unknown
  Bacterial polypetide isolated from the Sargasso Sea
MTDHKYIIAPSILASDFARLGDEVRNVLDAGADWVHFDVMDNHYVPNLTIGPMVCKALRDFGIKEFIDVHLMIDPVDELAKSFIEAGADLISFHPEASKHIHRSIHAIKDKGCKAGLVFNPATSLSALENVLDDIDLVLIMSV

SEQ ID NO: 154893 - protein, 153 aa, Unknown
  Bacterial polypetide isolated from the Sargasso Sea
MKDFKIAPSILSADFSKLGEDIDNVLDAGADIIHFDVMDNHYVPNLTFGPLICESLRNYGIKAPIDVHLMIKPVDRIIPDFAKAGANYITFHPEASDHIDRTINLIRENGCKPGVVLNPATPVSCLEQVLDNLDMILLMSVNPGFAGQKFMKK

SEQ ID NO: 154894 - protein, 218 aa, Unknown
  Bacterial polypetide isolated from the Sargasso Sea
MKKILISPSILAGDFSQLGKDIQKLENAGADMIHVDVMDGHFVPNITIGPPVIKSLRKYTDLPFDVHLMISPVHKYIEDFSKAGSDIITIHPEATENVKDSIDLIKSLGKKVGLSLNPDTPIDKIEKYLDQIDLVLVMTVYPGFGGQKFISKVLNKIKNLKNIKDENKFSFDIEVDGGVNFENNKLAIEAGANILVSGTTIFKNNDGDIKKNIDLLRT

SEQ ID NO: 154895 - protein, 227 aa, Unknown
  Bacterial polypetide isolated from the Sargasso Sea
MSQKSLVISPSILSADFSKLGEDVRAVDQAGADWIHVDVMDGRFVPNITIGPMIVKALRPVTSKPLDVHLMIVEPERYVEDFAKAGADIISVQVEACTHLHRNLAQIKDLGKKAGAVLNPGTPIDTLEYCLELCDLVLVMSVNPGFGGQSFIENQVDKIRNLRRMCDERGLDPWIEVDGGIKAANAWKVIEAGANAIVSGSGVFNQPNYADAIQGIRDSKRPELAAA

SEQ ID NO: 154896 - protein, 134 aa, Unknown
  Bacterial polypetide isolated from the Sargasso Sea
MKKIKISPSILSADFSQLGNEIKRLEEGGADMIHVDVMDGHFVPNLTIGPPVIKSLRHFTKLPFDVHLMISPVHKYIKDYSNAGADIITIHPEATESLIDSINLIKKLNRKVGVSLNPDTNLNIINNVLNKIDL

SEQ ID NO: 154897 - protein, 92 aa, Unknown
  Bacterial polypetide isolated from the Sargasso Sea
MKNIQISPSILSADFSQLGKEIKRLEEGGADMIHVDVMDGHFVPNLTIGPPVIKALRKHCSLKFDVHLMISPVHKYIEAYADAGADIITIHP

SEQ ID NO: 154898 - protein, 183 aa, Unknown
  Bacterial polypetide isolated from the Sargasso Sea
MNLSPVIAPSILSADFGNVSREIERIHQAGATWIHLDVMDGNFVPNITFGAVAMESFSKPEGCVFDTHLMVVNPEKHIPAFIKAGADVISIHAEATEHLQYGLKMIRDHGAKASVALNPATPLEALDWVYPDLDMVLLMSVNPGWGGQSFISPVFDKIRSLRQRLQDRGIEIPIQVDGGINLK

SEQ ID NO: 154899 - protein, 63 aa, Unknown
  Bacterial polypetide isolated from the Sargasso Sea
MTSIKISPSILSADFSKLGDEIKNLEKAKADLIHIDVMDGHFVPNITIGPDVISKLRKYTSLP

SEQ ID NO: 154900 - protein, 101 aa, Unknown
  Bacterial polypetide isolated from the Sargasso Sea
MSVKISPSILASDFSSLGEEVVNITKAGADYIHVDVMDGHFVPNLTIGPDIVKSIRDKSSLPFDVHLMIDPVQPYIEKFVEAGADIVSVHPEANDDTQACI

SEQ ID NO: 154901 - protein, 219 aa, Unknown
  Bacterial polypetide isolated from the Sargasso Sea
MKKIKISPSILSADFSQLGEEIKKLEVGGADMIHVDVMDGHFVPNLTIGPPVIKALRKYTSLPFDVHLMINPVHKYIKDYANSGADIITIHPESCESVSDSISEIKKFKKKVGLSLNPDTEIDVIKDHLGEIDMVLIMSVFPGFGGQKFINDVLEKIRNLSLIKKNLNLKFDIEVDGGINFSNFKDVLNAGANILVSGTTIFKENNGDIKKNIDFLKSI

SEQ ID NO: 154902 - protein, 219 aa, Unknown
  Bacterial polypetide isolated from the Sargasso Sea
MKKIQISPSILSADFSKLGDEIVKLENGGADMIHVDVMDGHFVPNLTIGPPIIKSLRKYTKLPFDVHLMISPVHKYIKNYADAGADIITIHPEATDDLSESIELIKSLNKKIGVSLNPDTPIDKIKNILSKVDLILIMSVYPGFGGQKFMPEVLDKIKTLNKLKINNKFNFNIEVDGGINFENSKFVIDAGADILVSGTTIFKENEGNIKKNIETLRIS

SEQ ID NO: 154903 - protein, 219 aa, Unknown
  Bacterial polypetide isolated from the Sargasso Sea
MKKIKISPSILSANFSELGNEIKRLEQGGADMIHVDVMDGHFVPNLTIGPPVIKNLREITKLPFDVHLMIDPVHKYIKDYADAGADIITIHPEATENLSESINHIKSFKKKVGVSLNPNTELNLVLDYLDKIDLILIMSVYPGFGGQKFMPEIIKKIKDLDNIKKDKNLNFDIEVDGGINFSNAKKVLDAGANILVSGTTIFKENNGDIEKNIKTLRTA

SEQ ID NO: 154904 - protein, 180 aa, Unknown
  Bacterial polypetide isolated from the Sargasso Sea
MKKIQISPSILSADFSQLGNEIKRLEEGGADMIHVDVMDGHFVPNLTIGPPVIKRLRNCTKLPFDVHLMISPVHKYIEDFSNAGADIITIHPEATDNLIESINLIRKLNKKIGVSLNPDTKLNIIENILDQIDLVLIMSVYPGFGGQKFMPEVVEKIKNLKKIKEEKKFNFDIEVDGGIN

SEQ ID NO: 154905 - protein, 218 aa, Unknown
  Bacterial polypetide isolated from the Sargasso Sea
MSVKISPSILASDFSSLGDEVVNITQAGADYIHVDVMDGHFVPNLTIGPDVVKSIRDKSSLPFDVHLMIDPVQPYIEKFVEAGADIVSVHPEANDDTEACLNKIKSLNVKAGLAINPDTKWEVVKPFMDKLDLILVMSVHPGFGGQQFIPTALDKLSNLREEINKSGRDIHLEVDGGINFDNVQSVIDAGADMIVAGTTTFKGGPSEYANNIEKLRGH

SEQ ID NO: 154906 - protein, 208 aa, Unknown
  Bacterial polypetide isolated from the Sargasso Sea
SADFSQLGNEIKRLENAGADMIHVDVMDGHFVPNLTIGPPVIKNLRKHSELTFDVHLMISPVHKYIKDFADAGADIITIHPEATDNLSESIKHIKSFKKKVGISLNPNTEINIIENELKNVDLILVMSVYPGFGGQKFIPDVIKKIELLKKIKDDKNYEYDIEVDGGINFSNSKDVINAGANILVSGTTIFKENNGNIKKNIETLKEV

SEQ ID NO: 154907 - protein, 220 aa, Unknown
  Bacterial polypetide isolated from the Sargasso Sea
MQKPVRIAPSILSADFSCLGNEISAVSEAGADWIHIDVMDGHFVPNITIGPQVINAIREVSPLPFDVHLMIAPVDPYIQQFADAGADIITAHIEACEHIHRTIQFIKGLGKRAGISLNPSTPASSILHLIDIVDLVLVMTVNPGFGGQSFIENQLSKIQEIRTMIDRSGRDIDLEVDGGINTHTAQKTIEAGADVLVAGTAVFKERLGGYRENITKLRGI

SEQ ID NO: 154908 - protein, 222 aa, Unknown; identical to SEQ ID NO: 154825
  Bacterial polypetide isolated from the Sargasso Sea

SEQ ID NO: 154909 - protein, 222 aa, Unknown
  Bacterial polypetide isolated from the Sargasso Sea
MSEKNYIIAPSILASDFARLGDEVKDVLNAGADWVHFDVMDNHYVPNLTIGPMVCKALRDYGIKEFIDVHLMIDPVDELAQSFIKAGADLISFHPEASKHIHRSIHAIKDKECKVGLVYNPATPLHTLENVIDDIDLVLIMSVNPGFGGQSFIHSSLEKISQVRKMIDDSGKDIRLEVDGGINKDTIGLASKAGADTFVAGSAIFNTENYEQTISELRSKIN

SEQ ID NO: 154910 - protein, 48 aa, Unknown
  Bacterial polypetide isolated from the Sargasso Sea
MKKIQISPSILSADFSQLGKEIKKLEDGGADLIHVDVMDGHFVPNLTI

SEQ ID NO: 154911 - protein, 75 aa, Unknown
  Bacterial polypetide isolated from the Sargasso Sea
MTTKEYIIAPSILSADFARLGEESKSVLNSGADWIHFDVMDNHYVPNLTIGPMVCKALRDYGIKAPIDTHLMVKP

SEQ ID NO: 154912 - protein, 198 aa, Unknown
  Bacterial polypetide isolated from the Sargasso Sea
MSKPSIKIAPSILSADFANFGNEIQAIESQGCDWVHIDVMDGHFVPNITFGPQTCKAIRPHIKTFMDVHLMISPVDQYLEAFAESGADMITAHVEATPHIHRTLQAIKSLSVKAGLAINPGTSIDRVEHLLDHIDLVCVMTVNPGFGGQKFIHSQLEKIEKLSELRKKKDFLIEVDGGVTEETAPVGCQGWSKCFSSR

SEQ ID NO: 154913 - protein, 90 aa, Unknown
  Bacterial polypetide isolated from the Sargasso Sea
MKKIQISPSILSADFSKLGDDIKRLEDNGADMIHVDVMDGHFVPNLTIGPPVIKSLRKYTSLPFDVHLMIDPVHKYIKDYSDAGADIITF

SEQ ID NO: 154914 - protein, 210 aa, Unknown
  Bacterial polypetide isolated from the Sargasso Sea
MKKIKISPSILSADFSILGNEIKRLQKAKADLIHVDVMDGHFVPNLTIGPPVIKELKKHSKIPFDVHLMISPVHRYIKDYALAGADIITIHPEATKNVGSSINLIKKLKKKVGLSLNPNSKIEIISKYLANIDLVLIMSVHPGFGGQKFIPKVLEKIKKLKKLKDKRKLRFDIEVDGGINFSNSKIVKDAGANILVSGTTVFKENNGNLK

SEQ ID NO: 154915 - protein, 121 aa, Unknown
  Bacterial polypetide isolated from the Sargasso Sea
MKKIKISPSILSADFSQLGKEINNLEKGGADLIHVDVMDGHFVPNLTIGPPVIKALRKYTKLPFDVHLMISPVHKYIKDFANAGSDIITIHPEATKNLEESIFHKKKLNKKVGVSLNPDTK

SEQ ID NO: 154916 - protein, 219 aa, Unknown
  Bacterial polypetide isolated from the Sargasso Sea
MKKIKISPSILSADFSQLGKEINNLEKGGADLIHVDVMDGHFVPNLTIGPPVIKALRKYTKLPFDVHLMIKPVHKYIKDFANAGSDIITIHPEATNNLEESIFHIKELKKKVGVSLNPDTKINVIESHLSNIDLVLVMSVFPGFGGQKFIPETINKIKDLKEIKDRNNFSFDIEVDGGINFSNSKDVISAGANILVSGTTIFKENNGDIQKNIETLKSV

SEQ ID NO: 154917 - protein, 219 aa, Unknown
  Bacterial polypetide isolated from the Sargasso Sea
MKKIQISPSILSADFSQLGKEIKKLEEGGADLIHVDVMDGHFVPNLTIGPPVIKTLREHTKLPFDVHLMISPVHKYIKNFAEAGSDIITIHPEATENLKESITLIREFNKKVGVSLNPNTEINLIESQLDNIDLVLIMSVYPGFGGQKFIPETIKKIKDLKKIKDDNNYSFDIEVDGGVNFSNSKDIINAGANILVSGTTIFKENNGDIKKNIEILKSV

SEQ ID NO: 154918 - protein, 122 aa, Unknown
  Bacterial polypetide isolated from the Sargasso Sea
MKKTDFIAASILSANFARLGEEVEEAISAGVDMVHFDVMDNHYVPNLTIGPMVCQALRDHGVKALIDVHLMVSPVDRLIKDFAKAGASYITFHPEATDHIDRSLQSIRELGCKPRASCLILQ

SEQ ID NO: 154919 - protein, 227 aa, Unknown
  Bacterial polypetide isolated from the Sargasso Sea
MGFDRSIKIAPSILSADFANFGQEIEAVESQGADWIHVDVMDGHFVPNITFGPPLCSAIRSHITKIMDVHLMISNVDDYITTFAKTGADIITAHIEAGNHSHRTMQAIRSSGCKAGIALNPSTPAESIEYLLDEIDLVCVMTVQPGFGGQKFINSQLTKIKTLREMIADRPIHLEVDGGITTETAPLSAQAGANILVAGSAVFKNGSVLNPDPYGENLKSIRAACEV

SEQ ID NO: 154920 - protein, 219 aa, Unknown
  Bacterial polypetide isolated from the Sargasso Sea
MKKIQISPSILSADFSQLKNEIKKLEQAGADMIHVDVMDGHFVPNLTIGPPVIKSLRGHTNLPFDVHLMISPVHKYIKDYADAGANIITIHPEATNDLKESIKHIRDLGKKVGVSLNPETPLEIIENFLQDIDLVLIMSVHPGFGGQKFMPEVLEKVKKLRNIIIEKKLKLDIEIDGGIDFDNNKMVIEAGANILVSGTTVFKKNNGDIKKNIDILKTM

SEQ ID NO: 154921 - protein, 226 aa, Unknown
  Bacterial polypetide isolated from the Sargasso Sea
MSRTFRIAPSILSADFARLGEEVRNVIAAGADWIHFDVMDNHYVPNLTFGPMVCQALKPHAKTPAGAAVPIDVHLMIQPVDALAAAFADAGADYISFHPDASGHVHRSIQAIRSKGVKPGLVFNPAEPLDVLDWVIDDIDLILIMSVNPGFGGQSFIDSALRKIEAVRKRIDASGKDIRLEVDGGIKTDNIRRVADAGADTFVAGSAIFGKPDYRGVIDAMRVALG

SEQ ID NO: 154922 - protein, 133 aa, Unknown
  Bacterial polypetide isolated from the Sargasso Sea
MKKKKILVVFGTRPEAIKLAPLILLIKRQKNVSLKVCITAQHREMLDQVLKFFSIKPDYDLNIMSKNQSINRVVSRISNKLDNILSKFMPDLVLVHGDTTTTFAASFSSFNLGIDIGHIEAGLRTGNILSPLA

SEQ ID NO: 154923 - protein, 275 aa, Unknown
  Bacterial polypetide isolated from the Sargasso Sea
MTPNQSLNQLSGKILDSLKSVLDKEKPDYVFVHGDTTTTAFASIASFYNQIKICHIEAGLRTFNKYSPFPEEINRSITGRLADIHFAPTEKAANNLLLENIDKNSIVVTGNTVIDALLDGIEIIKNYKDEEIDKLKKIVDNTKKTILITGHRRENFGKGFENICNAILELSKNDNINLIYPVHLNPNVKDIVYKTLSNKENIHLINPLSYPAFIWLMNKSHIILTDSGGVQEEAPSLGIPVLVMRDNTERPEGVAAKTAILVGTKKEKIISNVNN

SEQ ID NO: 154924 - protein, 56 aa, Unknown
  Bacterial polypetide isolated from the Sargasso Sea
MAVKVFVVFGTRPEAIKMATLCHALIENPKYFDVTICVTAQHREMLDQVLNIFALT

SEQ ID NO: 154925 - protein, 165 aa, Unknown
  Bacterial polypetide isolated from the Sargasso Sea
GHRRESFGRGFEQICHALAEIAASNPDVQIVYPVHLNPNVSEPVNRILGHIDNVMLIEPQDYLPFVWLMDRAWLILTDSGGIQEEAPSLGKPVLVMREMTERPEAIAAGTVRLVGTDSQRIVAEVTHLLQDDAAYQAMSRAHNPYGDGQACRRILSALKNNQVTL

SEQ ID NO: 154926 - protein, 292 aa, Unknown
  Bacterial polypetide isolated from the Sargasso Sea
YNPDIVLVHGDTTTSLSTSIACFYAGIKVGHVEAGLRTNNIYSPFPEEFNRQITSKITKWHFVPTETSRSNLIAENVQYDDITITGNTVIDSLYWILNRIKKNADVFTRVKNSLDQILPFDWESNKFILITGHRRENFGKGFLNICEALKELAMKFNQIKFVYPVHLNPNIQIPVYNLLANIPNIYLIKPLNYEPFVYLLKYSYFVLTDSGGIQEEAPSLGKPVLVMRDVTERPEAVAAGTVELVGTSKNCIINKVSELLQNQALYSKMSKAYNPYGDGKACDRILKVLKNV

SEQ ID NO: 154927 - protein, 203 aa, Unknown
  Bacterial polypetide isolated from the Sargasso Sea
VIDALFLVLEKIEKNSSLKNRILGTISNQYELDDDRKIILVTGHRRENFGHGFRNICNALKTIAENNPDFDIVYPVHFNPNVQKPVKEILSNCKNIHLIDPLSYECFIYLMNRAFFIITDSGGIQEEAPSLGKPVLVMRESSERPEAIQAGTVKLVGTDYLQIIEESQKLIDDKNEYNKMSKAYNPYGDGKASSKVLNFIKSI

SEQ ID NO: 154928 - protein, 192 aa, Unknown
  Bacterial polypetide isolated from the Sargasso Sea
NFWRELSFLTSKRDNSPRIILVTGHRRENFGYNFEQICHALYEIAQQHKDIQIIYPVHLNPNVRDPVKKILSNSKNINLIEPLDYLSFIKLMDSAYLILTDSGGIQEEAPSLGKPVLVMRETTERPEAVLAGTVMIVGTDKKNIVNKVNKLISEKNFYQGMSKALNPYGDGKASKRIYKIIKDFDLDGFDKK

SEQ ID NO: 154929 - protein, 241 aa, Unknown
  Bacterial polypetide isolated from the Sargasso Sea
PEEINRQITSRICDYHFAPTETSKKNLLKENIFDSSILVTGNTVIDALIKSVEKVYKNPSQLIKDLSKKIGNQELVLVTGHRRENHGGGFEKICKALKRIAEDDTNRLIIYPVHLNPMVQEPVKRILLGVNNIILIDPLAYQDFIWLMDRSKIIITDSGGVQEEAPSLGKPVLVMRDTTERPEAVEAGTVLLVGTNEDLIVSKALDLLNNQDNFVKMSKLHNPYGDGLASKRIVDFIKNIK

SEQ ID NO: 154930 - protein, 176 aa, Unknown
  Bacterial polypetide isolated from the Sargasso Sea
ILVTGHRRENFGQGFENICQTLLKISRRDDVEVVYPVHLNPNVQEPVNRILGAQSNVHLIEPLDYIPFVYLMKRAYLILTDSGGIQEEAPTLGVPVLVLRETTERPEAVEAGTVKLVGINPNEIYQSVCSLLDSSELYQNMSRAHNPYGDGLSSQRVCDFIQKDPAFSSLKSEVVN

SEQ ID NO: 154931 - protein, 250 aa, Unknown
  Bacterial polypetide isolated from the Sargasso Sea
MRILFIFGTRPEAIKLSPLILRLKKNSRFKVGVCITAQHREMLDSVLSFFEIQPDFDLDIMKTNQDLTTVSSRVIKKLDKVYKDFKPDLNIVHGDTITTSMASISSFLNKIKIAHVEAGLRTDNLLSPWPEEANRRITSVLADFNFCPTSESKQNLLKENISDDKIFITGNTVIDSLFQTVDKFNSDNNIDQNYMQYFSFLDFSKKIILVTGHRRENFGEGFSNICEAIKKLAIDKPEIQIVYPVHLNPN

SEQ ID NO: 154932 - protein, 365 aa, Unknown
  Bacterial polypetide isolated from the Sargasso Sea
MSIKKILFVFGTRPEAIKVAPLIKEFKNNKNFNVCVVSTGQHKEMLNQVIDFFNIQVDYELNLMTPNQSLNQLSGKILDSLKGILDKEKPDYVFVHGDTTTTAFASIASFYNQIKICHIEAGLRTFNKYSPFPEEINRSITGRLADIHFAPTEKAANNLLLENIDKNSIIVTGNTVIDALLDGVEIIKNYKDEEIDKLKKIIDNKKKTILITGHRRENFGKGFENICSAILELSNNDSVNLIYPVHLNPNVKDIVYKMLSNKKNIHLINPLSYPAFIWLMSKSHIILTDSGGIQEEAPSLGVPVLVMRDNTERPEGVAAKTAILVGTKKEKIVSNVNNLLNNELEYEKISMKKNPYGNGNASKTI

SEQ ID NO: 154933 - protein, 353 aa, Unknown
  Bacterial polypetide isolated from the Sargasso Sea
MIFGTRPEAIKMCNLFLYLKKDNSFNSKLCVSGQHRSMLDQVLNSFDLEPDIDLNIMKSNQDLFDVTSNTLTALKEVIKKEKPNLIIVHGDTTTALSAAMAAFYNNVPVAHVEAGLRTYNINRPYPEEFNRQIIGKIASIHFAPTESAKLNLINEKVNKENIHVTGNTVIDALFYMLDHIESSDSELNEINNLLTTNLGFDWIEKEFILITGHRRENFGEGFLNICEAIKTLAQDHPEMNFIYPVHLNPNVKDPVLRILSNESNIYLIEPLDYKPFIFLLKHCFLVLTDSGGIQEEAPSLGKPVLVMRDETERPEAVDAGTVKLVGASKKEIISSVSELIKNKKSYEVMSESI

SEQ ID NO: 154934 - protein, 320 aa, Unknown
  Bacterial polypetide isolated from the Sargasso Sea
SPLYDLNIMMKGQDLTHITTSVLKGLVDVLKEVQPDRVLVHGDTTTTLAASLASFYAHVPVGHVEAGLRTGNKLSPWPEEMNRRLADNICDILFAPTNSAKNNLLMEGVPENRIFVTGNTVIDSLIQISELLENKPDIANEANKQLPTLDNEKNLIVVTGHRRENFGTGLEKICDSISELSKRRDVEIVYPLHLNPNVRDFVKKRLKTLKNVYLIDPLEYLSFVHLMKKARMILTDSGGIQEEAPSLGVPVLVMREETERPEAVSAGTVKLVGTNSEKIYGECCNLLDDESAFLAMSKAHNPYGDGKASSRIVKELMNVK

SEQ ID NO: 154935 - protein, 279 aa, Unknown
  Bacterial polypetide isolated from the Sargasso Sea
MVRALAADTQIDSRVCITAQHREMLDQVLNLFGIQSNHDLNIMRPSQDLSHITQAVLTGMGAVLDREKPDRLLVHGDTTTTLAATLAAYYRQIPVGHVEAGLRTGDPYAPFPEEMNRKLTDCIADVYFAPTDGAAENLRREGVDGSRIAITGNTVIDALLQVVGDLHSDDKRRNAAASYFQNIPNDRRLILVTGHRRENFGDGFRRICHALRALAERGDVEIAYPVHLNPNVQSPVHSILSDCPHVHLMAPQDYLPFVYLMDRCHLVITDSGGIQEEAP

SEQ ID NO: 154936 - protein, 154 aa, Unknown
  Bacterial polypetide isolated from the Sargasso Sea
LASEKNIESRVCVTAQHREMLDQVLALFDIVPDYDLNVMKPGQDLYTVTASILEGMKPVLEDFKPDVVLVHGDTTTTFSASLAAFYQQIDIGHVEAGLRTGNLYSPWPEEANRKLTGSLTRYHFAPTALSRDNLLAETVSEDKIVVTGNTVIDA

SEQ ID NO: 154937 - protein, 157 aa, Unknown
  Bacterial polypetide isolated from the Sargasso Sea
MGKILTVFGTRPEAIKMAPLVQALQAEAGFASAVCVSAQHRQMLDQVLELFGIVPEFDLNLMRPGQTLSDITSNVLSGIDGVLDAYKPDAVLVHGDTTTTLAASLAAFYRRIPVGHVEAGLRTGNIWSPWPEELNRRVTDSVTTWHFAPTAESRQNL

SEQ ID NO: 154938 - protein, 166 aa, Unknown
  Bacterial polypetide isolated from the Sargasso Sea
MSDKLSTKKILLVFGTRPEAIKMVPIIKALKRDKNFDAKVCVTAQHREMLDQVLQIFDVLPDYDLNIMNPMQDLFDVTSNVILGMRKVLSDFKPNIVLVHGDTTTTSASALAAFYHKIKVGHIEAGLRTNNIYSPWPEEANRQITSVIANFHFAPTRTSQNNLLKE

SEQ ID NO: 154939 - protein, 293 aa, Unknown
  Bacterial polypetide isolated from the Sargasso Sea
QEKPDRLLVHGDTTTTFAATLAAYYRQIPVGHVEAGLRTGDPYAPFPEEMNRKLTDCIADVYFAPTDGAAENLRREGVDSSRIAITGNTVIDALLQVVGDLNTDTDRRNAVASCFQDIPNDRRLILVTGHRRENFGDGFQRICHALRTLAKRSDVEIVYPVHLNPNVQSPVNAILSDCPNVHLMAPQDYLPFVYLMDRCHLVITDSGGIQEEAPALGKPVLVMRDVTERPEAVNAGTVKLVGTDTDAIVSETALLLDDEAVYNNMSHAHNPYGDGKASERIVREIRRVHELDA

SEQ ID NO: 154940 - protein, 226 aa, Unknown
  Bacterial polypetide isolated from the Sargasso Sea
MNLLVIFGTRPEAIKLAPLILKLRQQFKVKICVTGQHREMLDQVLSVFKINSDFDLNLMKPNQNLTSLTSGVLESVQGVMEKEHVDWVIVQGDTTTSMAAAVAAFYKKINIAHVEAGLRTSEKFSPFPEEINRQLTSRLADIHFAPTEKNRDSLIKENIPPEKIFVTGNTVIDALKWVLKNIPEPAWDLPFHPSEKRMILVTGHRRENFGEGFQNICKAIKTLAVK

SEQ ID NO: 154941 - protein, 282 aa, Unknown
  Bacterial polypetide isolated from the Sargasso Sea
APLFHELNKHKSNFKVSVCVTGQHKEMLDQVLSTFQIIPDFDLNLMKDGQDLFDLSSSTLLAMRDVIKKENPQLILVHGDTTTSNIAATSSFYLDIPIGHVEAGLRTCDLKSPFPEEFNRQLISMIADFHFAPTEKSRTNLEKEGIKANSIFVTGNTVIDALFWILNKISNDKKLEQDITNNINKYLNFDWLNDNFILITGHRRESFGEGFENICKAIKELSEKYKNIKFVYPVHLNPNVQKPVKKILSNLENVYLIDPLEYESFVYLMKASYLILTDSGGI

SEQ ID NO: 154942 - protein, 296 aa, Unknown
  Bacterial polypetide isolated from the Sargasso Sea
FKLLKDIKPDLIFVQGDTTTTFSASLASFYNRIPVAHIEAGLRTNNMYSPFPEEINRRLTSIIAKYHFPPTIEAKNYLIKENVDKKLVQVTGNTVIDALLSVSSIIDSKSDFFVHHFIDNYKIDFNNKKTILVTGHRRESFGDGFNNICNALKIIAKKKNIQIVYPVHLNPNVQEPVKKILKNCSNVHLIPPQDYVPFIFLMKKSYLILTDSGGVQEEAPSLGKPVLVMRNTTERIEGVKAGTASLVGTDINKIVSTVDLLLNNTIEYNRMAKAANPYGEGNAAKKIHNFILKKHQ

SEQ ID NO: 154943 - protein, 241 aa, Unknown
  Bacterial polypetide isolated from the Sargasso Sea
AEPDVFDVKVCVTAQHREMLDQVLEIFAIQPNIDLNLMKEGQDLTDVTSSVLLGMRGVFAKHRPEVVLVHGDTTTTLASAMAGFYDGVPVGHVEAGLRTHDVYAPFPEEFNRQVASKVTRWHFAPTELSRDNILAEGVPASAITVTGNTVIDALHWILARIDADTSRQAALTEALQSVLPFAWQRKRFVLITGHRRENFGDGFVQICEALRILALRFIDVHFVYPVHLNPNVQQPVLSLLA

SEQ ID NO: 154944 - protein, 204 aa, Unknown
  Bacterial polypetide isolated from the Sargasso Sea
ISITGNTVIDALFWVLEHSKPLDEALPFDIQNSRIILVTGHRRENFGDGLRQICKALKKIALQLPDVQIVYPVHLNPNVREPVNRILSNLPNINLLEPLEYTQFVHLMNQSTLILTDSGGVQEEAPSLGKPVLVMRDKTERPEAVVAGTVKLVGTNLQSIFEETLRLLSDSKAYREMAFAHNPYGDGTACSKIMDALINFRKLS

SEQ ID NO: 154945 - protein, 125 aa, Unknown
  Bacterial polypetide isolated from the Sargasso Sea
MAIKVLSIFGTRPEAIKMAPLVKALNAAEGIDAKVCVTAQHREMLDQVLELFEIVPDYDLNIMKPGQSLYDVTTNILLGLKPILEEFKPDLVLVHGDTSTTLSASLAAFYQQIPVGHVEAGLRTG

SEQ ID NO: 154946 - protein, 395 aa, Unknown
  Bacterial polypetide isolated from the Sargasso Sea
MRILSIFGTRPEAIKMAPLVKQLEADAGIESIVCVTGQHQQMLDQVLELFQIKPHHNLALMTGNQTLNGLASRLIASLDEVLAAVQPDRVLVHGDTTTACAAALASFHRRIPIGHVEAGLRTGNLMQPWPEEMNRRVVDVMSDLMFAPTASSKANLAHETLHGKIIVTGNTVIDALNLTTARIDQDAALRAELDARLPFLDGALPVLLVTGHRRESFGAGFANICAALAELAKTNTVQIVYPVHLNPNVRGPVQETLGTARNVHLIEPLDYLGFVRLMQRASIILTDSGGVQEEAPALGKPVLVMRDVTERPEAVAAGTVRLVGTEREAIVRAVTGLLANAGERDDFAHRVNPYGDGHASQRIVAALSGRPFDEFVSGAAGSTAQLAGALAVHAL

SEQ ID NO: 154947 - protein, 304 aa, Unknown
  Bacterial polypetide isolated from the Sargasso Sea
RFQVIILDNLKTGSKKLVNKKSIFIKGDINNQKLLKKIFDKYDISTIIHLAGLIDVIESHKNKKKYYRNNVLGTLNLLKSIKVSSVKNFIFSSSAGVYGNINKSAKETMKTKPINNYASMKLKSEKLIKKYSQNYNFNYAILRYFNVAGASSSGKVGILNRKNNSFFNVLAKQSLKKKPIINIFGNNYKTYDGTCIRDFIHVTDLATIHLKVLENLTLKKKSFVINCGYGKGYSILKIAKLFKKYINKSTDIKFKPSRKGDIAISYSNTSNLKKKIIWKPKYNNIRKILITAINWEKKISKLNA

SEQ ID NO: 154948 - protein, 226 aa, Unknown
  Bacterial polypetide isolated from the Sargasso Sea
MRNKKEYILITGGLGFIGSHTAIELLKLKKKNLILVDNLVNSSISVKKKIEKISKKKLLFFKADLRKNKIYEIFKKYNISSVIHFAGLKSVRESQLKSKKYFSFNVGGTKNLLKAMVLNNCFNIIFSSSACVYNEKNKSPIKENSSLKPKSVYGKTKLTIEKILKKFNKLNKRSSVIILRYFNPIGAHPSGILSENPKKAENIVPNILKSIKQKKTFKIYGNNYKT

SEQ ID NO: 154949 - protein, 130 aa, Unknown
  Bacterial polypetide isolated from the Sargasso Sea
NTKNSKILFDTCIKNNLKNIIFFSTAAAYGNPVNSEPIKESTDLKPINPYGESKIQSELHLKENSQCNFIILRYFNVAGADPKMRSGLISKKATHLIKIASEVAVGKRKDKKKFGFDFPSPVGSAVRGCL

SEQ ID NO: 154950 - protein, 269 aa, Unknown
  Bacterial polypetide isolated from the Sargasso Sea
PEQVRAAMRGIRSVIHLAALKAAGDSMLEPERYALHNLNGTVNLLHAAGTEGVRHFVFSSSAAVYGEPQYLPLDENHPTEPANFYGQTKLQIEMLLSWFSRLRNMRYAGLRYFNAAGYDPDGEVRGLEKEPNNLLPLVLETLLGWRENLEVYGTDYDTEDGSCIRDYIHVSDLADAHLRALNFLEEQDEDLVVNLGTSKGISVLEILNVAKKVSGMDLPVILSDRRPGDPAVVLASAEKAERILEWSPAFSDVETILKTMLAAYRSHHR

SEQ ID NO: 154951 - protein, 224 aa, Unknown
  Bacterial polypetide isolated from the Sargasso Sea
MNTSTPDILVVGGAGYIGSHVVKALRDAGRQPVVFDNLSTGLRENLFPEIPFIHGDLLIPKQVCNAMRGIRSVIHLAALKAAGDSMLEPERYALHNLNGTVNLLHAAGTAGVRHFVFSSSAAVYGEPQYLPLDENHPTEPANFYGQTKLQIEILLSWFSRLRNMRYAGLRYFNAAGYDPDGEVRGLEKEPNNLLPLVLETLLGWRENLEVYGTDYDTEDGSCIR

SEQ ID NO: 154952 - protein, 144 aa, Unknown
  Bacterial polypetide isolated from the Sargasso Sea
SGAPNNLMPFVAQVAVGKRAELNVFGADYSTKDGTGVRDYIHVTDLAKGHLTALNFVCSGKGLDCFNLGTGVGYSVLEIVHAFEAVNQVKIPFRVVERRPGDIAECFSDTSKSASVLGWRAEKTLNDMVRDSWNWQKNNPNGYR

SEQ ID NO: 154953 - protein, 290 aa, Unknown
  Bacterial polypetide isolated from the Sargasso Sea
MGVYVIDDLSTGNKNLIPENIKLLNCNINDEEQISNLLQSESFDILFHFAGFIKVEESVKNPDKYFVNNTYNAIKLFETCYKNGLNNIIFSSTGAAYGNPINNNSIKEDEILKPLNPYGESKIKTEKFLIENSNRFNSIILRYFNVAGADPDLRSGLISKKPTHLIKILSEVAVGKRDKIFIYGDDYKTMDGTAIRDYIHISDLADIHIEVAKYLMHKKVSNIFNCGYGKGYSVLEVINAANKITSNKIKFEYDKRRPGDAEKLVSNVNKLHQNINWKPKFDDLDFIIQT

SEQ ID NO: 154954 - protein, 229 aa, Unknown
  Bacterial polypetide isolated from the Sargasso Sea
MDNFSCKKIVFSSSATIYGRGNEFNLYEDTPIKPINPYGKTKATIEDFLTDIFNNPEAKWAIANLRYFNPIGAHPSGLIGENPMGIPNNIFPFITQVALGKLKELSIFGNDWSTPDGTGIRDYIHVMDLAEGHICAMEKLNNFESKIFNINLGTGQGTSVLELVEIFENINKVKVPYVFTNRRKGDYPIVVANNELAKKELNWLPKRNIEDMCKDGWNWQIKNPNGFDF

SEQ ID NO: 154955 - protein, 199 aa, Unknown
  Bacterial polypetide isolated from the Sargasso Sea
GRSIPTGTSKLMTEWMLRDLANAGGPSYAALRYFNVAGCEPGGSIGQSTPKATLLVKVACEAAVGTRSHVSVFGTDYPTPDGTGIRDYIHVEDLAAAHLDALDYLRKGGDSTILNCGYGHGYSVRQVLDAVERANESKLKIVDEPRRAGDPPELVAIANRVRDVLGWEPRYDDLDTIVSTSLAWERRIAGQDPGAYWAV

SEQ ID NO: 154956 - protein, 174 aa, Unknown
  Bacterial polypetide isolated from the Sargasso Sea
MSWFSRLRNMRYAGLRYFNAAGYDPDGEVRGLEKEPNNLLPLVLETLLGWRENLEIYGTDYDTEDGSCIRDYIHVSDLAYAHLRALNFLEEHNGDLVVNLGTSKGISVLDILDAARKVSGMDLPVILSDRRPGDPAVVLASVEKAERLLEWRPAFSDVETILKTMLAAYRSHHR

SEQ ID NO: 154957 - protein, 231 aa, Unknown
  Bacterial polypetide isolated from the Sargasso Sea
LFFSSTAAIFGIPDSKYLPLKADAPKGPINPYGMSKLMVEQALPDFDHAHGIKYACLRYFNVSGVDSDLRIIPKENTEPTHLIPLVLQAASGRRENIKVFGTDYETRDGTCIRDYIHVHDLCSAHLLALQNLLNGVESFKINLGYGLGFSVKEVIEKSREITGCAINAIDTPRREGDPAELIASSEEAKSLGWQPKYDNLELILKHAWEAEKRKANYEEGRSDDRENGSTK

SEQ ID NO: 154958 - protein, 183 aa, Unknown
  Bacterial polypetide isolated from the Sargasso Sea
MDEQKVLVTGGAGYIGSHACKALQQSGFTPVTFDNLVTGWRDAVKFGPLEQGDLLNKGDLDRVFKKHSPVAVMHFAALSLVGESMQKPGLYWQNNVLGSLNLIQAAVDHGCMNLVFSSTCAIYGDQDSVVLDENSKQNPINAYGASKRAIENILADYQVTYGLNQVIFQYFNVAGADPEAEIG

SEQ ID NO: 154959 - protein, 301 aa, Unknown
  Bacterial polypetide isolated from the Sargasso Sea
SLIDKGHSVTVIDNLITGNKTLIPTKAKHFNFDIADENSIQKILKENKFDLVMHFAGLTRVDESVKYPEKYELHNFEKSKIFFSLCIKNNLKKIIFSSSAGVYGNNNSNNLIEESELKPINPYAESKYKIENFLISKKDKIDYTILRYFNVAGADKSKRSGFIAKSSSNLIKVLCEVAVNKRKKIIINGDDYETKDGTAIRDFIHVSDIADMHVLAANNLLKNRSSNIYNCGYGSGYSVKEVITEMENILKNKLQVEIGPRRPKDIAVSVANSDKFKKEFNWKPSFNNLNIILSSALSWEK

SEQ ID NO: 154960 - protein, 183 aa, Unknown
  Bacterial polypetide isolated from the Sargasso Sea
VYGLTKLKCEKLIKKNFKKNYAILRYFNVVGSSPSKKIGQINKNGQLFKNLSLAVKKKNPIFNIYGDDYKTFDGSCIRDYIHVCDLAEIHIKTLLKINLKNKSVILNCGYGNGFSVFEVVKEFSKLSKNKVTINVKERRRGDMTKIIARVNKLNKFLKFKPKFHSLKKMVKSSVDWEKKLNNN

SEQ ID NO: 154961 - protein, 215 aa, Unknown
  Bacterial polypetide isolated from the Sargasso Sea
MKNILFSSTAGIYGNTSNTQVKETDELKPINPYAESKFNIEKFLIESSKNKKINYTILRYFNVAGADIKKRSGLISDSSTNLIKVLCEAATKKRDKIIINGEDHKTKDGTPIRDFIHVSDIAEIHILAAKYIHENSESDIFNCGYGKGYSVKEVIKEMEHIIGGKLKVEIGSRREKDISISIANSDKFRKKFNWKPKFNNLNYILKTALEWEKIN

SEQ ID NO: 154962 - protein, 298 aa, Unknown
  Bacterial polypetide isolated from the Sargasso Sea
SFKRVEALTNKKLKFVEGDICKFGFLEQSICEFQPDIVLHFAGLKAVGESVIDPLRYYEVNLKGSLNILSAMSLTACNKIVFSSSATVYGNKNAPPYKETDQLQPVSPYGRTKLIFEQILQDWVKSDRKHRAIVLRYFNPVGAHGSAMIGENPQDKPDNLMPFLAQVASQKRQYLSIFGSDYPTKDGTGVRDFIHVVDLASGHAKAIDKIERLKRFHILNLGTGKGTTVLELIKSFEISTGIKVPLRFVDRRAGDVAISLADPTEAENLLNFKCEKTIQDMCVDEWNWQTKNPKGYEF

SEQ ID NO: 154963 - protein, 308 aa, Unknown
  Bacterial polypetide isolated from the Sargasso Sea
LIDKNYKVTVIDNLETGNKFLIPKRAKFELCDIGNTKKIEQILKKENFDIIMHFAGLIRVDESVKKPKKYILYNYEKSKKFLEICFKHGLNKVIFSSTAAVYGNLKNKKAKETDKLSPLNPYALSKMKLENYLIKKSKIDKINYVILRYFNVAGAEKKLRTGLVSKHASHLIKIICEVATNKRKLLTINGENYNTKDGTPIRDYIHISDLSDAHLISAEYLLNKGNSQIFNCGYSKGYSVKQVIFEMEKILKRKLPSKIGKRRKGDSERVVANISKFKKYFSWQPKYNNLNLILKSALAWEKKLKKYE

SEQ ID NO: 154964 - protein, 263 aa, Unknown
  Bacterial polypetide isolated from the Sargasso Sea
KIENVIHLAASVKVDESTINPIKYYSNNTAKTLKFIGSCSNTNIKNFIFSSTASVYGSKGSDPIKENEELNPESVYGHSKLMSEIMLKDITSTSPMKYGILRYFNVAGADPKLRVGQCDEDATHLINVASLAAIGKRDCINIYGTDYNTKDGSCIRDYVHVSDIAEIHYLTIKYLVSGGESITMNCGYEKGYSVLEVVKYLKEISKRKIVVNYKERRKGDPSSVIADAKLCKNLLNWKPKFNDIYTIIEHSIKWQEKHFKITN

SEQ ID NO: 154965 - protein, 262 aa, Unknown
  Bacterial polypetide isolated from the Sargasso Sea
MRGIRSVIHLAALKAAGDSMLEPERYALHNLNGTVNLLHAAGTAGVRQFVFSSSAAVYGEPQYLPLDENHPTEPTNFYGQTKLQIEMLLSWFSRLRNMRYAGLRYFNAAGYDPDGEVRGLEKEPNNLLPLVLETLLGWRENLEVYGTDYDTEDGSCIRDYIHVSDLADAHLRALNFLEVHDEDLVLNLGTSKGISVLEILDAARKVSEMDLQVILSDRRPGDPAVVLASAEKAERLLEWSPAFSDVETILKTMLAAYRTHHR

SEQ ID NO: 154966 - protein, 254 aa, Unknown
  Bacterial polypetide isolated from the Sargasso Sea
MRGIRSVVHLAALKAAGDSMLEPERYALHNLNGTVNLLHAAGTEGVRHFVFSSSAAVYGEPQYLPLDENHPTEPANFYGQTKLQIEMLLSWFSRLRDMRYAGLRYFNAAGYDPDGEVRGLEKEPNNLLPLVLETLLGWRENLEVYGTDYDTEDGSCIRDYIHVSDLADAHLRALNFLEEHDEDLVVNLGTSRGISVLEILDAARKVSGVDLPVIHSDRRQGDPAVVLASAEKAERLLEWSPAFSDVETILKTML

SEQ ID NO: 154967 - protein, 166 aa, Unknown
  Bacterial polypetide isolated from the Sargasso Sea
MRYFNPVGAHPSGLVGENPLGHPNNLMPFIQQVAVGRRPELTVFGNDYDTPDGTGVRDYLHVDDLAAGHLAALSYIQKTEGCHVHNLGTGRGYSVLEMIEAFEKCSGVKIPYKIGPRRPGDLSTVVADSSKAMRELGWSATRGLEDIMASAWKWQKNNPEGYPKEE

SEQ ID NO: 154968 - protein, 219 aa, Unknown
  Bacterial polypetide isolated from the Sargasso Sea
MAKKIVLTGGAGYIGSHIFISLVEKGYEPIIIDNFTNSNEAVIQKIELITNKKINFYKCDVTNNMDELFKNENVFGVIHLAAYKSIPNSLSSPLEYFYNNVNGLISILQAMKNNQCDRIIFSSSCSIYNNNSNTPVTEECQIKGNNPYSLSKIMCEEILNQTAFSDPNFRYMSLRYFNPVGAHKSGLIGENVDSEESNLMNEICKVAIKKKKKLSIFGN

SEQ ID NO: 154969 - protein, 159 aa, Unknown
  Bacterial polypetide isolated from the Sargasso Sea
VNLRYFNVAGCDKDGEIGEDHNPETHLIPRIIKSAQTKEKVIEIYGNDYDTKDGTCVRDYIHVEDLAMAHVNAMDYLKKNESDSFNIGIGNGYSILEVIECIENIMNLKFNKVIKAKREGDPPVLFSDNTKSLTKLDWTPQYYNLKDIINSSINWINNN

SEQ ID NO: 154970 - protein, 214 aa, Unknown
  Bacterial polypetide isolated from the Sargasso Sea
KFFIFSSAAVYKDGLYKVNESSKLKPKSVYGKTKLKAENLIKKRCKEKKINYGILRYFNVVGASPSGKIGLINKGGHLFKNFSAEILKKKPIFKIFGKNYKTPDKTTIRDYIHVYDLAEVHIKVLREISIKNTSIILNCGYGKGISVLSVLNEFKKQLQKNIKISILKRRKGDMEKIIADNKKLLRFIKWKPKFNKLNILVKSSIQWEKKLSRL

SEQ ID NO: 154971 - protein, 275 aa, Unknown
  Bacterial polypetide isolated from the Sargasso Sea
KPIIQINGDIRDRAALSDVFSKYPIKAVIHFAALKAVGESVQNPLSYYEVNVAGTVTLCQVMGEFNVKRLVFSSSATVYGASEFVPIPEAASRSATNPYGQTKLMIEHVLADLYQSDKDWDIAVLRYFNPVGADESGLIGEDPNGIPNNLMPFITQVAVGKREVLNVFGADYDTHDGTGVRDFIHVVDLASGHLAALKYLYRKPGIGYFNLGTGIGYSVLDIVKSFSKVNQINIPYVITQRRPGDIGCCYADPKQALEILGWKTEKTLEDMVRDS

SEQ ID NO: 154972 - protein, 162 aa, Unknown
  Bacterial polypetide isolated from the Sargasso Sea
MHILVTGGAGYIGSHTCISLVEASHSVVVIDDFSNSHAEALKRVEGICNTEIPHYEGDVGDEELLRRVFSEHTFDGVIHFAGSKAVGESVEKPMLYYRNNVTASQTLIETMHQAGVHTLVFSSSATVYGDPQTVPIVEDFPVGATNPYGRSKLMVEQIIQDF

SEQ ID NO: 154973 - protein, 115 aa, Unknown
  Bacterial polypetide isolated from the Sargasso Sea
DTPDGTGVRDYIHVVDLARGHLAALDALVRRDASFVVNLGTGQGYSVIDVVKAFEKAAGRPVPYEIVARRPGDVASCFADPTAALEVIGWRAEYGIERMCADHWRWQSTNPHGFA

SEQ ID NO: 154974 - protein, 181 aa, Unknown
  Bacterial polypetide isolated from the Sargasso Sea
MIYPQKKTNDNWKIGILRYFNPVGAHQSGMIGENPKGKPNNVFPLINKVAIKELKKLTIFGKDYSTKDGTPIRDYIHVMDLAQGHVQMLKFLGENDSQLLTLNLGTGFGTSVLELVNTFCSVNKVKVNYSFGERRLGDSECSVANSELSNSILGWKAEKTLNDMCIDSWRWQKNLSSQKEN

SEQ ID NO: 154975 - protein, 198 aa, Unknown
  Bacterial polypetide isolated from the Sargasso Sea
YLPIDENHSLDPINFYGYTKLVIEDFIKWYGKLEKINYVIFRFFNAAGYDINGRVKCIEQNPTNLLPIIMETANRTRKKMKVYGNTYDTHDGTGVRDYIHVSDLALAHEKAIDYLSKNNSDLITNLATGEGYSVLEIINRFEDLISIKINYDIVNKRKGDLAMMVALSKIAYDKLGWEPCFSDIDTILNSMWNIYKEF

SEQ ID NO: 154976 - protein, 94 aa, Unknown
  Bacterial polypetide isolated from the Sargasso Sea
CRLEKLAGIQGVHIYNLGAGIGSSVLDVVHAFSKACGKPVNYHFAPRREGDLPAYWADASKADRELNWRVTRTLDEMAQDTWHWQSRHPQGYSD

SEQ ID NO: 154977 - protein, 295 aa, Unknown
  Bacterial polypetide isolated from the Sargasso Sea
NLVTGWEDAVKFGPFEKGDLLDRARIDEVLPKYAPIAVMHFAALSQVGESMQVPGKYWRNNVVGSLNLIEAAVAANCHNFVFSSTCATYGDQDNVVLDENSAQHPINAYGASKRAIEDILRDFEASNGLNHVIFRYFNVAGADPEAEVGEHHQPETHLIPLMLDAIDGKRDALTIFGTDYETPDGTCIRDYVHVCDLVDAHVLGLKWLEKDKGSRVFNLGTGSGFSVREVIDHSRAVTNRAVPFNEGARRPGDCTKLVSGSTRAKQELGWTPTRSTLQTMIADAWKWHQTGHYDK

SEQ ID NO: 154978 - protein, 143 aa, Unknown
  Bacterial polypetide isolated from the Sargasso Sea
MNRQIIVTGGLGYIGSHTIVELKNDFDEFIVIDDLSNSNLTVINRLEQLTGKKIIHFSSSVTDHESLKNIFEEYNPINVIHFAGLKSVQESEEYPEKYFFTNVTGTETLLNVIKEFNCKNFIFSSSATVYGNPEYLPYDENHP

SEQ ID NO: 154979 - protein, 153 aa, Unknown
  Bacterial polypetide isolated from the Sargasso Sea
GSGLIGEDPFETPNNLMPYITQVALGRLEKLKIYGNDYKTNDGTGVRDYIHVVDLAKGHLAAINFLEKCIGVEIFNLGTGFGYSVKEVLNSFEKMSGISIKHEVYPRRSGDVAINYTDISKSKNMLKWKCSLNLNDMTKDAWNWQSKNPYGYK

SEQ ID NO: 154980 - protein, 299 aa, Unknown
  Bacterial polypetide isolated from the Sargasso Sea
ESGYCPVVLDNFSNSSVKSLHKVEQIVEKKIDFLEGDIRDEEALSKLFSSNKFGAVIHLAGAKSISESVKKPLFYFENNVSGSLNLFKTMDKYEVRSIVFSSSATVYGIPKKLPLKESMPTSEPTNAYGITKLMIEKNLQELYSRNKAWNIINLRYFNPIGAHKSGLIGEDPQELPNNIMPYLTQVAIGKLNQLNIYGNDYKTHDGTGIRDYIHVMDLANGHIKALQKLEKEKGIWNINLGTGIGHSVLDLVKTFEKVTGKEIPYKLTDRRPGDIAISYTDPSFAKKEINWIAEFSLDD

SEQ ID NO: 154981 - protein, 251 aa, Unknown
  Bacterial polypetide isolated from the Sargasso Sea
MKILVVGGAGYIGSHMVKRFQDTDHEVEILDNLSTGFELNAQNYKLHICDLSNKDLVYQILKENKYEIVMHFASYINVGESYSQPKKYYKNNVTNTLNLLDCMIDLKILNFIFSSTAAVYGEPQDIPITEAQKISPVNPYGNTKAIVEKILKDYDEAYGLKYISLRYFNACGAHIDGTIGERHNPETHLIPLILQAASGRKKNFTIHGDDYDTKDGTCIRDYIHVMDLAEAHLLSLEDLIKTQNSEIYNMA

SEQ ID NO: 154982 - protein, 241 aa, Unknown
  Bacterial polypetide isolated from the Sargasso Sea
NPIKYYINNTANTANFIKSCTDASVKNIIFSSTAAVYGDSNQEKYSENMETKPVSAYGFSKLFSERMLIDTCKSKNIKYIIFRYFNVAGSDPKKRTGQIVKNATHLIKVACETALGKRDKIQIFGNNYDTKDGTCIRDYIHVWDLVTAHLKAITYLQEGGVSKILNCGYGNGFSVLDVIKNVKKLSNVNFKTEIVPRRLGDPAKIIADNSLILKYLKWNPKYNNLEKIVSDSLEWEKYSNN

SEQ ID NO: 154983 - protein, 196 aa, Unknown
  Bacterial polypetide isolated from the Sargasso Sea
MSKSSINILVTGGAGYIGSSVSNLLIDQGYNVTIFDNLITGHEELIPTEAKFEKLDISDTSNIEKIFKNKKFSAVFHFAGLIRVGESIEFPAKYMDNNFEKSKIFLNTCFDNDIKKVIFSSTAAVYGNAKKNKVVETDKINPLNPYAESKIKLENFLIDQSIKRQINYVILRYFNVAGADVEMRTGLISKFSSHLK

SEQ ID NO: 154984 - protein, 281 aa, Unknown
  Bacterial polypetide isolated from the Sargasso Sea
MKILVTGGAGYIGSQMVHSLLDNGFNVSVIDNLTTGNKNTIPKSVEFFHADIGAGNKITNYLKKNKIDAIFHFAASIKVEESETNPLKYFKNNFCETRAFLDSCIKANIKFFIFSSTAAVYGNSQSQFSKENDILEPSNNYGLSKLFCEQMIEKVCKTHQIKYCILRYFNVAGSDLRLRTGQMNDQPSHLIAVACHAALGLIESIPVFGTDYKTKDGTAIRDYIHVVDLVDAHLNALDYLKKDGTSGIFNCGYGQGYSVYEVINALNMIIEKEIKTTLRPR

SEQ ID NO: 154985 - protein, 171 aa, Unknown
  Bacterial polypetide isolated from the Sargasso Sea
MKILVTGGAGYIGSHVCNLLLDKGYKVIVIDSLVTGNKNLIPKNARLIVSDISDEKKVEDIIIKEKFDLVMHFAGLIRVDESVKEPKKYHEYNFEKAKIFLNICFKNGLNKIIFSSTASVYGNPKKERVLESDPPNPLNPYATSKLKLEEFIKKKSKEIDLRYIILRYFNV

SEQ ID NO: 154986 - protein, 231 aa, Unknown
  Bacterial polypetide isolated from the Sargasso Sea
MKVLITGGAGYIGSMVAHFLTDIGYDVYIIDNLSTGSIKLLPPNSKFYKLDIGLGDKVTKIIKDISPKVIIHLAASVEVEQSIINPLDYYENNISKSISFLKSSIESNIKNLIFSSTAAVYEIPKSQKRIKESHNKNPKSPYGYSKLVLENIIKNASQKYKFKSIILRYFNVAGADIKLRTGQIKEPATHLIKIACEVATNKKNSISIFGNDYNTKDGTCIRDYIHIADLA

SEQ ID NO: 154987 - protein, 250 aa, Unknown
  Bacterial polypetide isolated from the Sargasso Sea
MNNILVTGGAGYIGSHIVQKLLKLKKKVFIIDNLSTGYKRLINKKAKFYNCDINNFKKVNKIIRDENINSVIHLAALLDVNESQKNPKKYYKNNVLGTDNVIKACIKSNVKNFIFSSTAAVYRDGIFKVKESSQIKPKSIYGKCKFKAEKLIKQKLKKNKINYAILRYFNVCGSGQGYKYGQINTYDLLFKNLAKSIIKKKPEINIYGKNYPTKDGTCIRDFIHISDITNIHIKILKKISQSNKSYIFNC

SEQ ID NO: 154988 - protein, 150 aa, Unknown
  Bacterial polypetide isolated from the Sargasso Sea
LIGENPKGIPNNIYPLITKVAAKKIKHLEIFGSDWDTEDGTGVRDYIHVMDLAEGHVRAAEKILEGKSRVMNINLGTGKGTSVLELIHTFQDVNKVKIPFVFGKRRLGDYGKVVANNSLAIEFLNWKPSRTIEDMCSNGWEWQKLNPNGY

SEQ ID NO: 154989 - protein, 268 aa, Unknown
  Bacterial polypetide isolated from the Sargasso Sea
LGNKWSVKWGPLEVGELCSENDLQKLFEKYNFIGVIHLAALSNVSESVNNPSIYYKNNVIGSYNLIEKMIKFNVKKIVFSSTAAVYGNPIHSPICENHPTQPINPYGDSKLTIERLICNYSKCHDLNFVILRYFNVSGSDFSNNLGEAHLPETHLIPLALEAAHQKSIFKIYGDNYPTTDGTCIRDYIHVKDLGSVHLLSFNKLKSSKVNQIINVGGGKGYTVYEIIKYVKKITNLDLKIDVIKRRKGDPDILVSDISKSKNILSGNQ

SEQ ID NO: 154990 - protein, 254 aa, Unknown
  Bacterial polypetide isolated from the Sargasso Sea
NFINSDISDEKKIRDLLKKEKFDLIMHFAGLVKVEESLLHPERYKLNNVDKAKTFIKACMECGLNKIIFSSSAGVYGNTPSMEKLNESSELMPTNPYSKTKHEFEKYLLNLSKEKKIKCIILRYFNVAGADEKKRSGLVAKKSNNLIKSICEVATNKRSNIVINGDDYDTQDGTPVRDFIHVTDLAEMHTIAAENLDKKNSEIYNCGYGEGYSVKQVVLEMEKILNRSLNKKIGRRREGDIPYSVADTTKFKKE

SEQ ID NO: 154991 - protein, 272 aa, Unknown
  Bacterial polypetide isolated from the Sargasso Sea
DIKDLNKVKKILRKYQIDSIIHLAAHLNVSEAEKNKKRYYSNNILGTLKLVEACKNSKVKNIIFSSSCAVYGSINGSVNEKKKPNPQGYYAFTKYKGEQIIKKYAKKYNYRYAILRYFNVAGASKSNKIGEIQRSYGHLIKNLAIQSLKYRPKIFVYGNDYNTKDGTCVRDYVHVSDLADVHIKSLNHINLKSKSLILNCGYGKGYSVLDIVNIFKKKKKKLIIEFTKRRPGDVAKVFADTKKIKRILKWRPKYNNLNKILQSAFQWEKTLS

SEQ ID NO: 154992 - protein, 126 aa, Unknown
  Bacterial polypetide isolated from the Sargasso Sea
MKSILVTGGTGFIGSHTCCALLDSGFEIYVLDSLSHSKLNSLEAVNLILRNKILNISKKLHFFKGDLRYKESIDSIFKKAEIKGKPINGVIHFAGLKSVAESVRNPLTYWENNFIGSFNLLQSMQG

SEQ ID NO: 154993 - protein, 198 aa, Unknown
  Bacterial polypetide isolated from the Sargasso Sea
MKIFVTGCSGYIGGTFSYEALKKGHIVYGLDNFVNSKRDVIEKISSDFQDNFLFEQIDIATDAKDLDKFLMKSDPDVVVHFAGLKAVGESEKQPLAYWENNLMGTLNLIKSMQKSKTKSIVFSSSATVYGNSKVQPVDEDSYLNTTSTYGSTKLSIEYLLNDVSRTGALNVISLRYFNPVGAHKEKIIFEDPFDSPNN

SEQ ID NO: 154994 - protein, 318 aa, Unknown
  Bacterial polypetide isolated from the Sargasso Sea
MKVLVTGGAGYIGSHVVIGLCESGHEVVVIDNLSSGEKGAVDSRATFIEGSIQKKEDLNQCFEGVDTVVHLAALKSVNGSMQFPQKYSENNITGTLSVLETMHENNVKHIIFSSTAAVYGEPEYLPLDEKHPLKPVNFYGYTKLSAENLLEWYKELMGISYISLRYFNAAGYDASGRIKYLEKNPQNLIPIIMEVAAGKREKVDVFGDDYDTPDGTGIRDYIHVSDLVKAHLNALELIQTNQSAPINLGSDQQYSVMDVIKIAEKISGKDIPYKIVQRRKGDPAKIYASTAYAKKILNWSAEHSSLENIIETTWRIYK

SEQ ID NO: 154995 - protein, 123 aa, Unknown
  Bacterial polypetide isolated from the Sargasso Sea
KKVFKVYGSDYETIDGTGVRDYIHVKDLSRAHILSLQKILNDKKNHTLNIGTGKGYSVLDLIKAFEAVLGEKIPHVFEERREGDVAECFTETSLARDVIGFQADKDINDMVSSALNFAKNYSA

SEQ ID NO: 154996 - protein, 217 aa, Unknown
  Bacterial polypetide isolated from the Sargasso Sea
MGLKILFFPLQLQYMDIQKYLPIDESHVLNPVNYYGYTKLTVENIIQWYAKLGKLNYVIFRYFNAAGYDIKSRIKCVEQNPANLLPVIMETANKTRKKMEVYGDTYDTSDGTGVRDYIHVSDLATAHEKAVDYLLENNNNLITNLATGEGYSVLEIINRVEDILSCKINYDIVNKREGDPSKVIASSNIAYDKLGWEPKFSDIETILQSMWNIYKAL

SEQ ID NO: 154997 - protein, 306 aa, Unknown
  Bacterial polypetide isolated from the Sargasso Sea
DNFINSKKDVIEKISSEFQDNFLFEQIDIGTDAKDLEKFLIKSDPEVVVHFAGLKAVGESEKQPLAYWENNLMGTLNLIKSMQKSKTKSIVFSSSATVYGNSKVQPVNEDSYLSTTSTYGSTKLSIEYLLNDVSRTGALNVISLRYFNPVGAHKEKIIFEDPFDSPNNLMPRIVRVALGIDKEIGIFGSDYSTKDGTGERDYIHIEDLVQGHFHAVEYLEDFNGFASFNLGTGKKVSVLDLIKTFEESNKITIPYKLEQRRQGDVEICYADPSKSNQILNWRAKRSTTEMCIDTWEAIKKNINEIG

SEQ ID NO: 154998 - protein, 248 aa, Unknown
  Bacterial polypetide isolated from the Sargasso Sea
MKILLTGGAGYIGSHAAIALLEDGHKVTVIDNLSTGNKKLIPPSANFVNCNINDVTTISEILQKEKFDALMHFAGYIEVEESVSNPKKYFDNNTKNSKILFDTCIKNNLKNIIFSSTAAAYGNPVNSEPIKESTDLKPINPYGESKIQSELHLKENSQCNFIILRYFNVAGADPKMRSGLISKKATHLIKIASEVAVGKRKDITIFGNDYPTPDGTAIRDYIHVSDLADVHVKAVEYLVSKQQSNIIN

SEQ ID NO: 154999 - protein, 81 aa, Unknown
  Bacterial polypetide isolated from the Sargasso Sea
FIAQTAVGKREVVNIFGDDYDTEDGTGVRDYIHVLDLAKGHVAAFMQHKSDTAFHAYNLGTGQGYSVLDMINAFSASAGKA

SEQ ID NO: 155000 - protein, 158 aa, Unknown
  Bacterial polypetide isolated from the Sargasso Sea
ISIARYFNPISNHYTGLIKENPKGIPNNLLPFIIKVAQKKLPLLYVFGKNYKTKDGTCVRDYIHVMDLANGHISILKNRDKKCGFKVFNFGTGKGSTVLEVIQAFKKQTGKEVPYKFIGRRNGDVPSTICSPKKALKELNWRAKYNLNQAMIDIKKII

SEQ ID NO: 155001 - protein, 246 aa, Unknown
  Bacterial polypetide isolated from the Sargasso Sea
MKIIVTGGAGFIGSHTVVDLLENGFEPIIIDDFRNSKPFILDNLKKILNRDFKSYDIDCGDVDKLSVVFKKEKPDGIIHFAADKAVNESVNNPLKYYHNNITTLVNILKVVELYPIKSFVFSSSCTVYGVPKNVPVSEKSPIQPAFSPYGFTKQVGEQLLKDFALTNPKTAISLLRYFNPIGAHPSGLIGELPLGVPNNLIPFITQTAIGIRKSLTVNGNDYETPDGTCIRDYIHVVDLASAHVLA

SEQ ID NO: 155002 - protein, 189 aa, Unknown
  Bacterial polypetide isolated from the Sargasso Sea
KNPYAESKVKTEKFLIENQNYFKFIILRYFNVAGADKYLRSGQISKRSTHLIKILSEVVVGKRNHIEIYGNDYDTPDGTAVRDYIHVSDLADIHVEVAKYLLENLESNLFNCGYGNGFSVLDVVNTANKIYQNKISYKFSNRRNGDVEKLIAETSKILKCIDWKPKHNDLKEIIKSSIKWEEKINASNT

SEQ ID NO: 155003 - protein, 307 aa, Unknown
  Bacterial polypetide isolated from the Sargasso Sea
LVTGGAGYVGSHIIELLIKKKNKVFIYDNLVTGYKKLINKKAIFIKGDIKNFKLLAKTINENDINSIIHLAGYLNISEGQKNKKKYYKNNVIGTLNLVKACKNSNVKNIIFSSSCSVYGNIKGSVSEKKIPKPKSYYAFTKYKSEQIIKEYEKEFNFKYGILRYFNVAGASQSGNIGEIERSYGHLIKNLAIQSTKSKPKVDIFGNNYNTKDGTCIRDYIHVSDLADIHILALKKISGSKKSLILNCGYGKGYSVKEIVEIFKKIKKGVVVKYRKKRIGDVAQIYSDNSKLKKILKWKPNLTIFGLY

SEQ ID NO: 155004 - protein, 189 aa, Unknown
  Bacterial polypetide isolated from the Sargasso Sea
MKILLTGGAGYIGSHAAIALLEDGHKVTVIDNLSTGNKKLIPPSANFVNCNINDVTTISEILQKEKFDALMHFAGYIEVEESVSNPKKYFDNNTKNSKILFDTCIKNNLKNIIFSSTAAAYGNPVNSEPIKENTDLKPINPYGESKIQSELHLKENSQCNFIILRYFNVAGADPKMRSGLISKKATHLI

SEQ ID NO: 155005 - protein, 223 aa, Unknown
  Bacterial polypetide isolated from the Sargasso Sea
MSCRILITGGAGFIGSHTCLVLLEKGHSLVVVDNFDNSSPEALRRVQKLAASDALQLVEGDLRNPEVLDRAFRSGGPVDGVIHFAGLKAVGESVADPLRYWDVNLNGSRVLAAAMERHGCRTLVFSSTSTVYGEPEQFPLHEGMATAPVHPYAQTKLAVEQMLRALCRSGSWRVACLRYFNPVGAHPSGRIGEDPLGIPNNLFPFITQVAAGRRDKLRVFGQD

SEQ ID NO: 155006 - protein, 288 aa, Unknown
  Bacterial polypetide isolated from the Sargasso Sea
LINRKAIFLNEDIKNLKKLTKIINSYKIDTIIHLAAYLNVNEAETNKKKYYKNNIVGTQNLIKACKNSTVKNLIYSSSCSVYGNIKGAVSEKKKPNPQGYYAYTKYEGEKIIKKYSKKFKYKYAILRYFNVAGASPSKKIGQIEKSHGQLFKNIAIQSLKKKPTINIYGNDYSTLDGTCIRDYIHVSDLANIHIKTLDYLNKKKKSLILNCGYGKGYSVLDVVNTFKKIKKNSKIKFQKRRLGDISEVYANTSKIKKILRWKPKYNQLLKILKSSISWEKTLQNSSKY

SEQ ID NO: 155007 - protein, 176 aa, Unknown
  Bacterial polypetide isolated from the Sargasso Sea
YLLDNRNKYNSIILRYFNVAGADINQRTGLISKNATHLIKILSEVAVGKREKIQIFGNDYNTPDGTAIRDYIHVSDLSDIHVEVAKLLNEKKISHIFNCGYGIGYSVKEVIDKANEITNGSIKYEFINRRSGDPEKLVSNVDKIHKFINWKPKYNNLSTIIKSSIDWEKKINEENL

SEQ ID NO: 155008 - protein, 160 aa, Unknown
  Bacterial polypetide isolated from the Sargasso Sea
LRYFNVAGAANSEKIGEIGNRNDRLIKNLAIQFFKDKAKINIHGTNYKTKDGTCIRDYIHVSDIADIHEMCVDYLNKNLKSNTFNCGYEKGYSVLEISNIFKKLKKNTIIKFGKRRPGDVGQVFANSSKFKKIFKWKPKYNDIKKILNSSIKWEKKLNHL

SEQ ID NO: 155009 - protein, 172 aa, Unknown
  Bacterial polypetide isolated from the Sargasso Sea
NSDDLKFIILRYFNVAGADSKLRAGQISKKSTHLIKKLSEVVVGKEKSIEIYGNDYNTNDGTAVRDYIHVSDLAEIHVSAAEYLLKTLKSNIFNCGYGKGFSVLDVVNTTNKISNNSVKFNFSKRRDGDVEKLIAQTNKIKKHIDWIPKFNDLTKIIKSSIDWEKKINEKNL

SEQ ID NO: 155010 - protein, 218 aa, Unknown
  Bacterial polypetide isolated from the Sargasso Sea
MNVLVTGGCGYIGSHTCLALQAAGMNPVVVDNLGNSKRSVLARVAAISGQQPQFYQGDIRDAALLERIFAEQQIDAVIHFAALKAVGESTRIPLDYYENNLGGTLTLLQAMKRANVHNLVFSSSATVYGDPASLPIREDFPRCATNPYGRSKLLIEEILEDLQLAEPHWSMTLLRYFNPVGAHDSGTMGEDPQGIPNNLMPYITQVAIGRRDCLSVLE

SEQ ID NO: 155011 - protein, 232 aa, Unknown
  Bacterial polypetide isolated from the Sargasso Sea
MNILLSGGAGYIGSNLAYFLLDNGCKVIIVDDLSSGSLDLVPNEALFYKSDVDDEKAINKIFNANKIDAVVHLAGKIVVSESVINPLKYYLNNTVKTIKFFEICVKNNVGNFIFSSTASVYGKKSEGKINEESKLNPINPYAKSKLFCEEMLNDIAKQNKINIAILRYFNVAGADSKGRAGQISKPATHLIKVGCETALGLRKSINVFGNDYNTPDGTCMRDYIHVTDCPSF

SEQ ID NO: 155012 - protein, 221 aa, Unknown
  Bacterial polypetide isolated from the Sargasso Sea
MKILLTGGAGYIGSHVLLSIIENKHEVIVIDDLSTGNKKLIPENIKLINTNINNSEKISNLLVEENFDLLLHFAGFVKVEESVQKPDKYFKNNTDNAIELFETCYKHNLQNIIFSSTAAAYGNPSNNESIKEDEPLTPLNPYGESKVKTEEYLLNNKDKFNSIILRYFNVAGADPKLRSGLISNTPTHLFKILSEVAVGKREKISIYGNDYNTEDGTAIRD

SEQ ID NO: 155013 - protein, 252 aa, Unknown
  Bacterial polypetide isolated from the Sargasso Sea
MSRKSVLVTGGAGYIGSHVVYSLLEAGYAITVLDNLSTGRREILPREVEFIEGNAGDQRLVTDLCRNNEISAVLHFAGSIVAPESVRNPLIYYENNTSVSRNLLSACTEADIQTFIFSSSALVYGEPFTLPLKESAPTTPTTPYGRTKLMTEWMLEDTSNATGLQYAALRYFNVGGADPAGRTGQCSPNATHLLKIAGEVVTGKRPSIVINGDDYDTPDGTCVRDYIHVSDLADAHVEILKLLEKTGRKPDL

SEQ ID NO: 155014 - protein, 268 aa, Unknown
  Bacterial polypetide isolated from the Sargasso Sea
VIVDNLVNSSKKVLSRIEQITGTAPVFIEADLRDTSTIIEIFSDHPITSVVHFAGLKAVGESVEEPVKYYDNNLGSTLSLLDAMASSKVSTLVFSSSATVYSPSEIAPFDEAAELGPTNPYGMSKYFIEQILSDVALGDDEWSIGLLRYFNPIGAHPTGLIGEMPTGIPNNLVPYIMQVAVEKLEKLFIFGDDYQTPDGTCIRDYIHVVDLARGHLAALRFLEDANGSHVWNLGTGQGSSVHELVKMIEEVIGKPIPREVVGRRSGDI

SEQ ID NO: 155015 - protein, 207 aa, Unknown
  Bacterial polypetide isolated from the Sargasso Sea
VTEDSPKVEANSPYGNTKCISEEIISDFANSWPSLKAINLRYFNPVGAHPSGFIGEFPIGKPNNLLPYLTQTAIGRLESLTVFGNDYPTKDGTCIRDYIHVVDLANAHVKAISFLGNQAHSCCEVVNVGTGKGTSVLELINLFVSKTGQDLNWSYGPRRSGDVTEIFANVSKAKKTLSWKATYSIADALEHAWQWEKNINKRINHVN

SEQ ID NO: 155016 - protein, 237 aa, Unknown
  Bacterial polypetide isolated from the Sargasso Sea
MKILLTGGAGYIGSHVSLELLDKGHQVSIIDNLVNGSKKLLPVKADFLECDIEDEKKISNFLKNNKFDLVMHFAGYTRVGESTKYPEKYYENNFEKPKKFFDVCIENKLNKFIFSSTGSVYGNVSIQTNIPENYKKNPLNPYSDSKYKLENHLISLSNQNKISATILRYFNVAGADKKNRSGLITNPDNLIKAICEVATGKRKELIVNGNDYKTKDGTTIRDYIHVSDLAEMHVLAA

SEQ ID NO: 155017 - protein, 206 aa, Unknown
  Bacterial polypetide isolated from the Sargasso Sea
GDYGLNSIPEEATIKPINPYGQTKYTVEKILENLFSSESKEWRIANLRYFNPVGAHPSGLIGEKPKGKPNNLLPIIIKVATNNQKVLKVFGNDWPTHDGTCIRDYIHVMDLADGHLAALLNLIKGEPKIINLNLGTGIGTSVLEIIKIFEEVNKCKLPYEIVGRRDGDVASLVADSRKAKKYLEWTPQKTLEDVCIDSFKWINLNK

SEQ ID NO: 155018 - protein, 148 aa, Unknown
  Bacterial polypetide isolated from the Sargasso Sea
ENPLGIPNNLFPYVSQVAVGRRDQLQVFGGDWPTPDGTGVRDYIHVMDLAEGHRAALDCLLAEAPQLLTLNLGSGQGKSVLEVVQAMEAASGRSIPYAITDRRPGDAAISVADPTKASEHLGWRTQRSLEDICRDGWAWQQKNPRGYS

SEQ ID NO: 155019 - protein, 289 aa, Unknown
  Bacterial polypetide isolated from the Sargasso Sea
MNILITGGAGYIGSHTALSLIDRGYSVSIIDNLITGKKRLIPKKAKYFNFDIGNKEEITSLLNKNTFDIVIHFAGLIKVDESVRYPEKYYFNNFEKSKIFFDCCFENKIKKIIFSSTAGVYGNNNSTNIKESDNLLPLNPYAESKLKIETFLIENSKKKGISYTILRYFNVAGADKEKRSGLISDSSTNLIKILCEVATNKKKEIIINGNDYETKDGTAVRDFIHVSDVAEMHSIVAEYLYKNNKSGIYNCGYGRGFSVKEVIKEMENIVERKLNVQIGPRREKDIPFS

SEQ ID NO: 155020 - protein, 236 aa, Unknown
  Bacterial polypetide isolated from the Sargasso Sea
MASLLITGGAGFIGSHTLLVLLDAGHELVVLDNFANSSPISLDRVLELASPDAAGRLHRVEGDVRSAADLDRAFTAPAAPITGVVHFAGRKAVRESVENPLLYWDVNLGGTRALAEAMGRHGCDLVVFSSTATVYGEPDAFPLTELMPTPPVHPYAQTKLAAEQMLAALVQSQGWRVASLRYFNPVGAHPSGRIGEDPTGIPNNLFPYITQVAAGRLERLRVFGDDYPTRDGSGER

SEQ ID NO: 155021 - protein, 291 aa, Unknown
  Bacterial polypetide isolated from the Sargasso Sea
RRVEEITSRSISFVQGDIRNRDALRNAMEGCQAVIHFAGLKAVGESVAFPLMYYETNVYGTVCLLQVMQELGVRSLVVSSSATVYGDPVTLPLTEDHPCLPENPYGWTKYDIETMCRSLAVSDPEWHMVLLRYFNPVGAHESGRIGEDPCGTPNNLMPFVSQVAVGRREVLSVFGNDYDTVDGTGVRDYVHVVDLAKGHVAALERVGNFQCDVINVGTGKGYSVLDVVHAFEKVSQKQVPYVIKSRRDGDVATCYASVDKAEKVLGWKAEYGLERMCEDCWRWQVENPHGY

SEQ ID NO: 155022 - protein, 193 aa, Unknown
  Bacterial polypetide isolated from the Sargasso Sea
MKILLTGGAGYIGSHTALSLIDGGHSVTIIDNLITGTKKLLPPQAEYHECDMADKKSIENILKKNKFDIIMHFAGLTRVDESVKYPEKYELNNFEKSKTFFNCCFDNNIKKIIFSSTAGVYGDSTSEYVKETDALIPMNPYAESKLKIEKFLIENSKSQKLNYTILRYFNVAGADNKKRSGLISRSSTNLIKI

SEQ ID NO: 155023 - protein, 164 aa, Unknown
  Bacterial polypetide isolated from the Sargasso Sea
MTILVTGGAGYIGSHTVLELLQQGSDVVVIDNLANSSQESLARVKQITGKEVTFYQGDILDKAFLDSVFAKHTVNSVIHFAGLKSVGESVAKPVEYYQNNVQGTLTLVDAMRDAGVFKLVFSSSATVYGDPASLPIKEDFPVGGTTNPYGTSKLMVEMMLQGYR

SEQ ID NO: 155024 - protein, 206 aa, Unknown
  Bacterial polypetide isolated from the Sargasso Sea
MNFLLTGGAGYIGSHAALSLLDAGHSVHIIDDLSTGNESLIPKSALFTKCNINNEEVISKLIQLNNFDVLMHFAGFIQVEESVKYPQKYFDNNTENATKLFETCKSNGLNKIVFSSTAAAYGAVNENKLIDENTNLNPQNPYAESKIKTENFLFENKNDYKFIILRYFNVAGADKKLRAGQISKRSTHLIKILSEVVVGKRDHIEI

SEQ ID NO: 155025 - protein, 191 aa, Unknown
  Bacterial polypetide isolated from the Sargasso Sea
KPLNPYGLSKINTEKYLLKNKHKINSVILRYFNVAGADPDLRSGLISDEPTHLIKILSEVAIGKREKIFIYGNDYETKDGTAIRDYIHVSDLADIHLEVAKHLLDKNQSNIFNCGYGKGYSVLEVINAANKITNNKIKFEYTNRRAGDAEKLVSNVAKLHKHINWEPKFNNLDFIIQTAINWEKKINEKNL

SEQ ID NO: 155026 - protein, 169 aa, Unknown
  Bacterial polypetide isolated from the Sargasso Sea
KFNYKYGLLRYFNVAGASSSGKIGQIEKSHGQLIKNLAIQSLKRNPVISIYGNDYPTKDGTCIRDYIHVVDLANIHILAMNYLNKVKKSFIVNCGYGKGYSVKQIVNIFKKNKKNLTIRYDKRRPGDIAQVYSNTKKFQNLFKWKPKHNNINKIIKSAINWEKKISTVK

SEQ ID NO: 155027 - protein, 240 aa, Unknown
  Bacterial polypetide isolated from the Sargasso Sea
KYFENNTDNSIKLFNICKENGLTKIIFSSTAAAYGLVTENKLIDEYTNLNPQNPYAESKIKTEKFLFDNEDSFQFIILRYFNVAGADKKLRSGQISKKSTHLIKKISEVVVGKRDQIKIFGNDYNTHDGTAIRDYIHVSDLADIHLKVAKYLLKNLESNLFNCGYGNGFSVLDVVNTTNSIYQNKIIYKFSNRREGDVEKLISDTSKLLKYIKWQPKYNDLKKIINSSIKWEEKINASDT

SEQ ID NO: 155028 - protein, 168 aa, Unknown
  Bacterial polypetide isolated from the Sargasso Sea
QKFNYKYGILRYFNVAGASKSGKIGEIETSHGHLIKNIAIQSQKLKSKINIYGNDYDTNDGTCVRDYIHVSDLADVHLKILQNISIKRKSIILNCGYGKGYSVQEIVDIFKKIKKNIIIRYKKRRPGDVAQIYANTYKIRKVLKWKPKFNNIRTILNSAIKWEKKLTK

SEQ ID NO: 155029 - protein, 268 aa, Unknown
  Bacterial polypetide isolated from the Sargasso Sea
LIDKGYRVTIIDSLITGNLSLVPSKATLVVCDISDKIKVSKILKKKNFAAVLHFAGLIRVDESVKKPMKYHNYNFKKAKIFFDTCLKYNVNKIIFSSTASVYGNTNNKNVKEVDKLLPINPYASSKLKFEKYLLKKSNIKKMSYIILRYFNVAGADKKLRTGLISKYSTHLIKVACEVATKKRKKIIINGNNYNTKDGTPIRDYIHVSDLSEIHLISLNHLLKGGKSEIFNCGYGKGYSVKEVINEMNRILKKKIISEVGPRRKGDSQ

SEQ ID NO: 155030 - protein, 252 aa, Unknown
  Bacterial polypetide isolated from the Sargasso Sea
MKVLVTGGMGYIGSHSCIALYEAGITPVIFDNLVNSSVKVLEQLKKITGTSIEFIEGDVSDAVALEQALRQTNASAVLHFAALKAVGESTEQPLRYYQNNVAATLTLLEAMQKVGVNKIIFSSSATVYGDPQYLPFDEQHPLRATSPYGWSKIMAEQVVNDLCCAASDFLAVSLRYFNPVGAHPSGLLGESPQGTPNNLLPFIAQTAVGRRPFVKVYGSDYPTPDGSGVRDYLNVMDLAKGHVAALFTIRQI

SEQ ID NO: 155031 - protein, 302 aa, Unknown
  Bacterial polypetide isolated from the Sargasso Sea
HAALSLLDDGHKVHIIDNLSTGNEMLIPKSAKFTNCNINNEELISNLIQSNNFDLLMHFAGFIQVEESVKQPEKYFENNTNNAIKLFNICKKNSLTKIVFSSTAAAYGLVGEDKLIDEHTSLNPQNPYAESKIKTEKFLFNNKDNFQFIILRYFNVAGADKKLRSGQISKKSTHLIKKISEVVVGKRDQIEIFGNNYNTPDGTAIRDYIHVSDLADIHLEVAKYLLKNLESNLFNCGYGNGFSVLDVVKTTNSIYQNKVTYKFSSRREGDVEKLVADTSKLLNYFKWQPKYNDLREIINSSI

SEQ ID NO: 155032 - protein, 202 aa, Unknown
  Bacterial polypetide isolated from the Sargasso Sea
MKILLTGGAGYIGSHASLALLDQGHKVTIIDNLSTGNSELIPSAASFIKCDIEDVSKVSKLIKKNSFDVLIHFAGFVQVEESVKNPKKYFLNNTENSKILFNTCLQNNLKNIIFSSTAAVYGNPPNDKPIKENILLNPLNPYGESKIQTENYLQNNLDFNYIILRYFNVAGADPKMRSGLISKNATHLIKIASEVAVGIKRK

SEQ ID NO: 155033 - protein, 254 aa, Unknown
  Bacterial polypetide isolated from the Sargasso Sea
MKNILITGGCGFIGSHTCLSLLEQDFNLIVFDSNINSKSIVIRKIIEIGKLKKKEFDDRLSFINGDIRDFSVLENVFLNSINNKKPIDAVIHFAGLKSVEESVKDPLLYWDNNLSGSITLLKVMQKFDCKNIVFSSSATVYGVTSQLITENAEIKPFNTYGRTKFAIETILRELYESSSNKWRIANLRYFNPIGAHETGLIGENPSNLPNNLFPYICKVANRNLEKLNIFGNDWNTLDGTCIRDYIHVMDLAEA

SEQ ID NO: 155034 - protein, 292 aa, Unknown
  Bacterial polypetide isolated from the Sargasso Sea
LMNTSTPDILVVGGAGYIGSHVVKALRDAGRQPVVFDNLSTGLRENLFPEIPFIHGDLLIPEQVRAAMRGIRSVVHLAALKAAGDSMLEPERYALHNLNGTVNLLHAAGTAGVRHFVFSSSAAVYGEPQYLPLDENHPTEPANFYGQTKLQIEMLLSWFSRLRNMRYAGLRYFNAAGYDPDGEVRGLEKEPNNLLPLVLETLLGWRENLEVYGTDYDTEDGSCIRDYIHVSDLADAHIRALNFLEEQDEDLVVNLGTSKGISVLEIMDAARKVSGMDLPVILSDRRPGDPAV

SEQ ID NO: 155035 - protein, 282 aa, Unknown
  Bacterial polypetide isolated from the Sargasso Sea
NFTNCNINNEEVISNLIQSNNFDLLMHFAGFIQVEESVKVPEKYFENNTNNAIKLFNICKKNGLTKIIFSSTAAAYGLVSENKLIDEHTNLNPQNPYAESKIKTEKFLFDNKDNFQFIILRYFNVAGADKNLRSGQISKKSTHLIKKISEVVVGKRNQIEIFGNNYNTPDGTAVRDYIHVSDLADIHVEIAKYLLKNLESNLFNCGYGNGFSVLDVVETTNSIYQNKITYKFSNRREGDVEKLIADTSKLLNHIKWQPKYNDLREIINSSIRWEEKINASNI

SEQ ID NO: 155036 - protein, 203 aa, Unknown
  Bacterial polypetide isolated from the Sargasso Sea
PVRETTPQRPINPYGMSKLMTEYMLRDVAAAHAMNFCALRYFNVAGADPQGRTGQSTAGATHLIKVAVEAALGKRSHVSVFGTDFATPDGTGVRDYIHVSDLAAAHVLALEALIAHPDRNYMLNCGYGRGFSVLEVLDAVDRVTNMMIERRLEGRRAGDPDALISDNSALMAEFPWQPRYADLGQIVDHALAWERKLSDIQKA

SEQ ID NO: 155037 - protein, 306 aa, Unknown
  Bacterial polypetide isolated from the Sargasso Sea
MNFLLTGGAGYIGSHAALCLLDAGHNVHIIDNLSTGDEKLIPKEAEFTKCNIDDEENISSILNSNNFDVLMHFAGFIQVEESVKFPEKYFKNNTENAIKLFKICKKNGLDKIVFSSTAAAYGLVKENKLIDESTNLNPQNPYAQSKIETEKFLFENKNNFKFIILRYFNVAGADKNLRSGQISKRSTHLIKILSEVAIGKRDHIEIYGNDYNTPDGTAIRDYIHVSDLADIHLEVAKYLIEKKESNLFNCGYGNGFSVLDVVNTANKICQNKIKYKFSERRDGDVEKLIAETSKISKHIQWQPKYN

SEQ ID NO: 155038 - protein, 195 aa, Unknown
  Bacterial polypetide isolated from the Sargasso Sea
AISKIKVEEHLRGNFHEYPNWRIILLRYFNPIGAHKSGLLGDNPNDKPNNLMPFILKVASMEEEYLEVFGNDYETKDGTGVRDYIHVSDLSDAHVSSLNYLLSSDEKSGFCHALNIGTGRGYSVLEIIEAFEKINNKNIPYKVVDRRPGDISQSFTDTELSQRMLKWSAKKDLNDMCKDSWKWKQSEMKRKKYES

SEQ ID NO: 155039 - protein, 325 aa, Unknown
  Bacterial polypetide isolated from the Sargasso Sea
MITGGAGYIGSHIAEQLVNTKNNIIILDNLVTGYKRLINKKTKFLKMDLKNKKLLNKIIYENKIDTIIHLAAYLNVSEAENNRKKYYKNNIIGTKNLIEACKNSSVNNIIFSSSCSIYGNVKGAVSEEKKPNPLGYYAYTKYKGENLIKKYSKKIGYKYSILRYFNVAGASPSNKIGEIEKSHDHLFKNISIQALKKKPVVRIYGNNYNTKDGTCIRDFIHVSDLADIHVKCINYLCKKKKSITLNCGYGIGYSVQEIVNIFKKIKKNCKVVYEKRRAGDVDQVYSNIKKFKKTFKWKPKHNDIKKILLSSIKWERKLKKNNVKR

SEQ ID NO: 155040 - protein, 208 aa, Unknown
  Bacterial polypetide isolated from the Sargasso Sea
MNVLLTGGAGYIGSHAALSLLDAGHDVHIIDNLSTGNETLIPKNAKFTNCNINNDIAISNLIQSNKFDLLMHFAGFIQVEESVKNPEKYFENNTNNAIKLFKICKKNNLNKIVFSSTAAAYGSVSKDKPIDENTNLNPQNPYAESKIKTENFLLENKNEFNFIILRYFNVAGADKNLRSGQISNRSTHLIKVLSEVVVGRRDHIEIYG

SEQ ID NO: 155041 - protein, 200 aa, Unknown
  Bacterial polypetide isolated from the Sargasso Sea
MNILLTGGAGYIGSHVAISLLDAGYKVTIIDDLSTGHQELIPKEANFIEANINNKKILKSTLIKNKFDVLMHFAGYIEVEESVKNPKKYFINNTDNAKVLFDICTKHNLQNIIFSSTAAAYGNPEQKDLIKENSILKPLNPYGKSKVETEKYLQNNSNFNYIILRYFNVAGADPLMRCGLISKNPTHLIKITSEAATRKG

SEQ ID NO: 155042 - protein, 222 aa, Unknown
  Bacterial polypetide isolated from the Sargasso Sea
MNILLTGGAGYIGSHTALSLIENGHMVTVIDNLITGTKRLIPPKAKYYNCDIADSSSIKKILKENKFDVVMHFAGLTKVDESVNNPDKYNDYNFEKSKSFFNCCFENNLKKIIFSSTAGVYGDSSSQYVKETDEIKPMNPYAVSKSKVENFLIKKSKSEKINYIVLRYFNVAGADEDKRSGLISKSSTNLIKVICELATKKRKKMTINGNDYQTKDGTAIRD

SEQ ID NO: 155043 - protein, 328 aa, Unknown
  Bacterial polypetide isolated from the Sargasso Sea
MNTSTPDILVVGGAGYIGSHVVKALRDAGRQPVVFDNLSTGLRENLFPEIPFIHGDLLIPEQVRAAMRGIRSVVHLAALKAAGDSMLEPERYALHNLNGTVNLLHAAGTAGVHHFVFSSSAAVYGEPQYLPLDENHPTEPANFYGQTKLQIEMLLSWFSRLRNMRYAGLRYFNAAGYDPDGEVRGLEKEPNNLLPLVLETLLGWRENLEVYGTDYDTEDGSCIRDYIHVSDLADAHLRALNFLEEQDEDLIVNLGTSKGISVLEVLDAARKVSGLDLPVIHSDRRPGDPAVVLASAEKAERFLEWSPAFSDVETILKTMLAAYRSHHH

SEQ ID NO: 155044 - protein, 322 aa, Unknown
  Bacterial polypetide isolated from the Sargasso Sea
MNNILITGGAGYIGSHIVEQLIKAKKKVFVVDNLSTGYKRLLHKKANFFLCDIRNFKRLDIIVKQNKIQSIIHLAACLSVGESERKPKKYFSNNVIGTRNVINCCKKNDIKNLIFSSTCAVYKDKIKSVKENSKLEPKSVYGKTKLKGENIIKKNLFKNKTNYAILRYFNVAGASESGKIGQISIGDQLFKNLSICSKKMNPNINVYGSDYKTKDGTCVRDYIHVSDIAKIHIMVLKKINNENKNIILNCGYGNGVSVLDAIYEFQKQLGKKIKVKVKDRRKGDMEEIIANNKKIKRFLKWRPKKNILSKIVKSCIKWGKKI

SEQ ID NO: 155045 - protein, 327 aa, Unknown
  Bacterial polypetide isolated from the Sargasso Sea
MNVLLSGGAGYIGSHAALSLLDAGHNVHIIDDLSTGNESLIPKNTFFTNCNINDEKVISELIKSNSFDLLMHFAGFIQVEESVKYPQKYFNNNTENATKLFETCKNNGLNKIVFSSTAAAYGSVNENKLIDENTNLNPQNPYAESKIKTENFLFENKDDYKFIILRYFNVAGADKKLRSGQISKRSTHLIKILSEVVVGKRDHIEIFGNDYNTPDGTAIRDYIHVSDLADIHLEVAKYLLENSVSNLFNCGYGNGFSVLDVINTANKISGDKIDYKFSNRRDGDVEQLIADTSKILKHIDWRPKYNDLSEIINSSIKWEEKINESNT

SEQ ID NO: 155046 - protein, 305 aa, Unknown
  Bacterial polypetide isolated from the Sargasso Sea
MNFLLTGGAGYIGSHAALSLLDAGHNVHIIDDLSTGNKSLIPKNAFFTKCNINDEEVISELIKSNSFDILMHFAGFIQVEESVKYPQKYFDNNTENATKLFETCKNNGLNKIVFSSTAAAYGTVSENKLIDENTNLNPQNPYAESKIKTENFLFENKNDYKFIILRYFNVAGADKKLRSGQISKRSTHLIKILSEVVVGKRDHIEIYGNDYDTPDGTAIRDYIHVSDLADIHLEVAKYLFENSESNLFNCGYGNGFSVLDVIKTANKISEDKIDYKFSNRRDGDVEQLIADTSKILKHIDWRPEI

SEQ ID NO: 155047 - protein, 249 aa, Unknown
  Bacterial polypetide isolated from the Sargasso Sea
MKILLTGGAGYIGSHVLLSILEKNYKVVVVDDLSTGNINLIPENITLIKCNINDERKVSNIIQQEKFDILLHFAGFIKVEESVQNPSKYFKNNTENAITLFETCYKNNLRNIIFSSTAAAYGNPASNNSIKEDANLSPLNPYGQSKIDTEKYLIENSNKFNSVILRYFNVAGADPELRSGLISKEPTHLIKILSEIAVGKRDKIYLYGNDYNTDDGTPVRDYIHVSDLADIHIKTAEYLMEKKISNIFN

SEQ ID NO: 155048 - protein, 260 aa, Unknown
  Bacterial polypetide isolated from the Sargasso Sea
MTCRILITGGAGFIGSHTALVLLEQGHSLVVVDNFDNSSPEALRRVKALAASDALQLVEGDLRNPDVLDRAFRCDGLVDGVIHFAGLKAVGESVADPLRYWDVNLNGSRVLAAAMERHGCRTLVFSSTSTVYGEPEEFPLHEGMTTAPVHPYAQTKLAVEQMLGALCRSGPWRVACLRYFNPVGAHPSGRIGEDPLGIPNNLFPFITQVAAGRRDKLRVFGQDYPTPDGTGIRDYLHVMDLAEAHGVTLNHLLNQESPTQ

SEQ ID NO: 155049 - protein, 238 aa, Unknown
  Bacterial polypetide isolated from the Sargasso Sea
MNILLTGGAGYIGSHTALSLIDNGHSVTIIDNLITGSKTLIPSEAKHYNFDIADESSINKILKENKFDIAMHFAGLTRVDESVKYPEKYQLHNFEKSKIFFSSCIKNNLKKIIFSSSAGVYGNSNSNNLTEDSELKPINPYADSKYKIENYLIEISKKDKVDYTILRYFNVAGADKSKRSGLIARSSTNLIKVICEVATKKREKIIINGDDYETKDGTAIRDFIHVTDIADMHVLAAD

SEQ ID NO: 155050 - protein, 178 aa, Unknown
  Bacterial polypetide isolated from the Sargasso Sea
EDYLIKNADKFNSIILRYFNVAGADPKLRSGLISKEPTHLIKILSEVAVGKRDKIYLYGNDYNTDDGTAVRDYIHVSDLADIHIKTAEYLIEKKVSNIFNCGYGRGYSVLEVVKEANKITGDKIKYEFSNRRPGDAEKLISNIDKLSETINWKPKFNDLNLIIKTAISWEKKINEKNF

SEQ ID NO: 155051 - protein, 324 aa, Unknown
  Bacterial polypetide isolated from the Sargasso Sea
MRILITGGAGYIGSHVCNLLLDKGFKVTVIDNLVTGNKELVPKKAKLIIADIADEKKIEYVITNEKFDLVMHFAGLIRVDESVKEPEKYNEFNFEKAKKFLNICFKNKLFKIIFSSTASVYGNSKKQKVLETDPLDPLNPYAISKLKLENFIISKSKELKISYIILRYFNVAGADERLRSGLISKFSSHLIKRACEVAVGKREKLIINGNDYNTLDGTPVRDYIHITDLADIHYISAKHLMENGKSEIFNCGYGKGYSVKEVLESFSKVLGKKINFEIGPRRDGDSEMVVANSDKFNKFFNWKPKFNDIKFILKTAIDWEKKIK

SEQ ID NO: 155052 - protein, 327 aa, Unknown
  Bacterial polypetide isolated from the Sargasso Sea
MKNILLTGGAGYIGSHVANLLIDQGYDLTIIDSLITGNKTLINPKAKFINCDIADSKYISEILINKKFDIVMHFAGLIRVDESVKEPEKYNEFNFEKAKIFLDTCFKYGLKKVIFSSTASVYGNPIHNNVSESDELNPLNPYAKTKLKLENFLINKSKYEKISYIILRYFNVAGADEKLRSGLISKNSTHLIKIASEVAVGKRDEIIINGDDYDTKDGTAIRDFIHVSDLADIHLVSAKYLLDKNQSNIFNCGYGNGYSIKEVIDTYNKILNKKIKSKIGPRRPGDSKMVVADPTKFNKILNWKPKFNKLDYILKTAYEWEKKLKSS

SEQ ID NO: 155053 - protein, 329 aa, Unknown
  Bacterial polypetide isolated from the Sargasso Sea
MNNKANKILITGGAGYIGSHVAERLINSKLKIIAFDNLSRGNRKLINKKTKFIKADVNNLKKLKKVISENNVNTVIHLGGLASVAESLIRKKKYYINNVLGTLNVIKACNKSSVKNFIYSSSCSVYGNVEGNVDEKKKPNPKSYYAFTKFKSENLIKKFSKKYRYKYIILRYFNVAGASNSGKIGEIGNKNDRLIKNLAIQFFKKNPKINIHGTNYKTKDGTCIRDYIHVSDIADIHYQCIKYLNKYSKSNIFNCGYGKGYSVLEIANILKRMKKKTQINFMKKRPGDVGQVKANINKFKKTFKWKPKFNSINKILNSSIKWEKKLNHL

SEQ ID NO: 155054 - protein, 227 aa, Unknown
  Bacterial polypetide isolated from the Sargasso Sea
MTTKGTILVTGGAGFIGSHTCVELLNGGYDVVVIDNLVNSNRESLRRVEKITGKPVTFYEADARDEGALNRIFDAHPITGAIHFAALKAVGESVAKPVEYYSNNVGSLLALLGVMRDRKVKQFVFSSSATVYGVPKSSPIDESFPLSATNPYGQSKLIAEQVLRDLEVADPSWRIATLRYFNPVGAHESGLIGEDPAGIPNNLMPYVAQVAVGKLEKLRVFGGDYDT

SEQ ID NO: 155055 - protein, 276 aa, Unknown
  Bacterial polypetide isolated from the Sargasso Sea
NCNINDVTTISQILQKEKFDALMHFAGYIEVEESVSNPKKYFDNNTKNSKILFDTCIKNNLKNIIFSSTAAAYGNPANSEPIKESTDLKPINPYGESKIQSELHLRENSQCNFIILRYFNVAGADPKMRSGLISKKATHLIKIASEVAVGKRKDITIFGNDYPTPDGTAIRDYIHVSDLADVHVKAVEYLVSKQQSNIINCGYGKGFSVKDVLNIVNQVNDKPISIKNGDRRAGDPPMLVSNVSKLHSLFEWQPKYNDLSFIVKTSIDWEKKLLNY

SEQ ID NO: 155056 - protein, 261 aa, Unknown
  Bacterial polypetide isolated from the Sargasso Sea
MRYLVTGHKGFIGSNLLKKLSGDVTTIEANIVDEDYCYDYLEDVVKSVDVIFHIGAISDTTLQDSTEMLRYNYVFSKELFDYAQKYGKKVIYSSSAACYGDGGGMPLNIYGWSKLMAEQYGMAKCDNFIALRYFNVYGPGENHKGKMSSVALQSWNGEINKLFPQKPKRDFVYIDDVVSANIHAINSPKGVYEVGSGEARTFEDVLDNMEIKYSYHSEDKIPEWYQFYTKSDKSKWLPEWKPKYNLEKGIKKYKDYLNENL

SEQ ID NO: 155057 - protein, 142 aa, Unknown
  Bacterial polypetide isolated from the Sargasso Sea
PQETHKGRMASVAFHLFHQLRNGGSMNLFEGSEGFRRDFIHVQDTIRINLHFLESGKSGIFNAGTGKARSFTAIGECLREIEGSGELKSIPFPDDLLGKYQEFTEADTTRLREAGYEEEFLSLEEGIRLYHKMLSENGGFHL

SEQ ID NO: 155058 - protein, 239 aa, Unknown
  Bacterial polypetide isolated from the Sargasso Sea
GARTDTTEFNRELLWKLNTDYTKEIWKRCVDYQIPLVYASSAATYGLGEFGYKDDESLIPQLVPLNPYGDSKNEFDKWALKESEKPFFWAGLKFFNVYGPGESHKGRMASVVWHAYNQIKDTGAMKLFRSHNPKYKDGEQMRDFVYVEDVCEVMFWLMNHRKDSGIYNMGSGEARTFLDLVRAVFKAMGKEERISFVDTPADIRDKYQYFTEADMSKLRGIGYKKPFSGLEKGVEGYLK

SEQ ID NO: 155059 - protein, 249 aa, Unknown
  Bacterial polypetide isolated from the Sargasso Sea
INNIKKFRDVDIVFHLAAFNGTKYFYSKPLNVIDQNILSTLKLVQHYKNKRLIKFIIAGSSEAYAGAQIIKKNKGILHNEEEPIIFQDIKNPRWSYSTSKFMSEIITINSGMPYLILRYFNVYGPRQKDHFIPEFINRIKRGKYELYGFKNKRSFIYIDDAIKATIKASNIKKKNEIINIGSDIESKIIDVVRLIMKIFKINPKKLKLFPAPKGSVLNRRPDINKLRMIVGKTNFLSLEEGIRLLLKKK

SEQ ID NO: 155060 - protein, 165 aa, Unknown
  Bacterial polypetide isolated from the Sargasso Sea
MIVVTGGAGFIGSNILKGLNDAGENNIIVVDNLSNAQKHLNLNRLSFNDYIDKDDFLLKIGKFTNLKTIFHQGACSSTTEQDGKYMMSNNYEYSKILLNNCLEHKIDFLYASSAAVYGNGGNGFTEESKAEYPMNVYGFSKFAFDNYVRRVLPKAENQILGLRYF

SEQ ID NO: 155061 - protein, 228 aa, Unknown
  Bacterial polypetide isolated from the Sargasso Sea
MIIVTGGAGFIGTNLVRSLIELDKQILIVEELDKYTKKFENIKNLEILDCLNHNIFLKDLVNGKYANKIDQIFHLGACSKTTEPDRDYIMDVNFDYSKRLLEYSANNNIDMIYASSASVYGDGTVFKEDSSNESSLNYYSESKLLFDNYVRENMSKIKSQIVGMRYFNVYGPYEQHKEVMSSVIYHFHNQFKKYGMLKLFRGSHGYDDGEQRRDFVYVKDTVDIKLWF

SEQ ID NO: 155062 - protein, 144 aa, Unknown
  Bacterial polypetide isolated from the Sargasso Sea
YGPQENHKGRMASVAFHLFNQLQNSGKMRLFEGSQEFCRDFIHVADAVKINMHFYQTKSSGIFNAGTGKSRSFTDIARAMLDIHGIGEIEDIPFPKDLRGKYQKFTEASLENLRQAGFSEDFMSLEEGIKKYYDQLSKTNKPYI

SEQ ID NO: 155063 - protein, 213 aa, Unknown
  Bacterial polypetide isolated from the Sargasso Sea
NIFNISINKGIKKVIYAESSAVYEGVEVLPSVETITYPKSVYAKSKMETNAIAQQLFISKGLFATGLRYFNVYGPHQDYRRTIPPVFSAFIIKMLQGERPTIYGDGSKKRDFVYVDDVNDFHLMCMKNKLTDNNIYNIGSGKNYSIKSIYEQIKSILNSDIKPIYGENFDFEAQDTLANIDQAKKIGWEPKTSISTGLKKSIDYIKENSNLMT

SEQ ID NO: 155064 - protein, 276 aa, Unknown
  Bacterial polypetide isolated from the Sargasso Sea
LLELNHKVLVVEELDRQPNKFKNIKSLDIIDCIGHDVFIKDLFNEKYKNKIEYIFHLGACSKTTEPDRDYVMDVNLSYSKKLLEYSANNNINMIYASSASVYGSGNIFSEDPANESSLNHYSESKLLFDNYVRKNFDKINSQVVGLRYFNVYGPHEQHKEVMSSVIFHFYNQIKNIGKLKLFRGSHGYSDGEQRRDFVYVKDTIDIKLWFMNNGISGIYNVATGKSRSFNDVANSVIDFFDSGHIEYIDFPEGLEAQYQAFTEASLVKLRNSGYKG

SEQ ID NO: 155065 - protein, 223 aa, Unknown
  Bacterial polypetide isolated from the Sargasso Sea
STNLDYSKDLLEYSANNFINMVYASSASVYGSGNVFKEEPENESSLNHYSESKLLFDNFVRQNFSKIKSQVVGIRYFNVYGPYEQHKEVMSSVIYHFYNQFKKLGMLKLFRGSHGYGDGEQRRDFVYVKDTVKIKIWFMNNNVSGIFNVATGKSRSFNDVGNAVISYFSSGHIDYVDFPKGLERQYQAYTQADMTNLNNAGYQGKPTELEDGVNEYLSFLDKT

SEQ ID NO: 155066 - protein, 283 aa, Unknown
  Bacterial polypetide isolated from the Sargasso Sea
MSKNNSENIENFVGSILDVNNVNEAVRGCDAVIHLAAKLGVKRTETHRLETLNLNIQGTVNILEAAVKNNIDKVIFTSSSEIYGDQSVDFISETCPRNPKSIYGVTKLASEEYMEAYYGYYNLNYSILRYFNVYGPGQVAEFVLPRFIKAAMDNKSPIIYGDGSQVRSFCYVDDIARGTALALLSDKANFEVFNLGNDKDKVTILEAAKKVIKVSGKDYLIPELISFKEADRSTDRDISKRVPDISKARELLGYEPIVFLEEGIKRVMEDGEIPPSWIDPMEY

SEQ ID NO: 155067 - protein, 259 aa, Unknown
  Bacterial polypetide isolated from the Sargasso Sea
MIVITGGAGFIGSAFAKKCNQMGVDDLLIVDSLNESEKWKNLSHISYVDYIHKSEFLDMIVDDMLPPNIEAIVHMGACSATTEKDMDYLMDNNYRYTRILAQWCVDNKKRFIYASSAATYGDGEKGFLDDHNTLDDLIPINRYGYSKHLFDVYAQKQGYLDKMVGLKFFNVFGPNEYHKGSMMSMVCKGYTEIKNTGKMKLFKSYKDEFEDGAQRRDFVYVKDCVDIIWWLLENPKVNGLLNIGTGKARTWNDVAKALF

SEQ ID NO: 155068 - protein, 244 aa, Unknown
  Bacterial polypetide isolated from the Sargasso Sea
ELIEKRKPICDEIDFIFHQGACTVTTEWDARYMMDNNFRYSKTLLSFCLERSIPFIYASSASVYGTCTNFSERRKNEGPLNIYGYSKWLFDQYVRSLEKKIKSQVVGLRYFNVFGPREAHKNNMASVVYHFNNQINETEQVQLFSGSHGYDNGEQCRDFIFVDDIIDMNLWMMNNPSISGIYNAGTGVAHSFNEIANTVIKSRKKGKIKYIPFPKELEECYQSFTQANLKKLRSVGYKKEFTSL

SEQ ID NO: 155069 - protein, 305 aa, Unknown
  Bacterial polypetide isolated from the Sargasso Sea
MKILITGVAGFIGSNLAELLIKNNFEVIGIDNLSYGVSEQIPKGVVFHKEDIRNNEIYHLFSDVEYVFHLAAKNSIIDCENDPEETFQINVNGTINVFNAAIKNNVKKVIYAESSAVYEGSKNLPSIETEVSPKSVYAESKMTTNRIAEEFSKSKGLVTTGLRYFNVYGPKQDYRRTIPPVFSAFIINLLKGHQPIIFGDGSKKRDFIYVDDVNDFHLMCMKDNKTDNEVFNIGSGKNYSIKHIFNSIKNILNVDINPIFGKNLDFEAQENLANIDKANSIGWSPKIDLNTGLKKSIDYIKEHVI

SEQ ID NO: 155070 - protein, 250 aa, Unknown
  Bacterial polypetide isolated from the Sargasso Sea
CEDIDFMFHQGACTVTTEKNVEYMMSNNYMYSKTLLDFCTEREIPFIYASSAAIYGLSSNFTEEEKNEEPINIYGQSKWMFDQYVRDLKIRKILKSQVVGLRYFNVYGPHETHKKSMASVIYHFNNQINDMGNLNLFSASGGYKNGEQRRDFIYVDDVVKTNVWMMNNRNISGIYNVGTGKSNSFNDIANTIIKRRKKGKINYIPFPKEIEKNYQSFTEANLTKLRSIGYNTEFISVDKGVNLYLDELLN

SEQ ID NO: 155071 - protein, 214 aa, Unknown
  Bacterial polypetide isolated from the Sargasso Sea
TKTPLIYASSASVYGAGKIFKESVEYEDPINLYAYSKFKFDQLVRQELIKRETQIVGLRYFNVYGPQEQHKGTMASVAFHFHNQLKDNEEIKLFEGSEGYDDGEQRRDFIYVDDVVKVNLWFLKNKKVSGIFNVGTGKSQTFNEVAHSVINWNKRGKINYVPFPEKLKGAYQSYTQANISKLREAGYKDEFLNVQEGVKKYLDRLESWPKNEPS

SEQ ID NO: 155072 - protein, 177 aa, Unknown
  Bacterial polypetide isolated from the Sargasso Sea
FKFDQLVRQELIKSETQIVGLRYFNVYGPQEQHKGTMASVAFHLHNQLKDNNEIKLFEGSDGYDDGEQRRDFIYVEDVVKVNLWFLENQKVSGIFNVGTGKSQTFNEVAHSVINWNKKGKINYVPFPEKLKGAYQSYTQADISKLRKAGYKDEFLNVQEGVKKYLDRLESWPKNEPS

SEQ ID NO: 155073 - protein, 174 aa, Unknown
  Bacterial polypetide isolated from the Sargasso Sea
MVSPIFLRHYVRRFLPEAQSQILGLRYFNVYGPQETHKGRMASVAFHLFHQLRKGGSMNLFEGSEGFRRDFIHVQDTIKINLHFLESGKSGIFNAGTGKARSFTAIGECLREIEGSGELNTIPFPDDLRGKYQEFTEADTTRVREAGYEEEFLSLEEGIRLYHKMLSENGGFHL

SEQ ID NO: 155074 - protein, 91 aa, Unknown
  Bacterial polypetide isolated from the Sargasso Sea
MIIVTGGAGFIGSNIVKSLNDKGITDILVVDNLKDGTKFVNLVDLNIADYMDKEDFLIQIMAGGRFRRYRSYFPRRRMLFHHRVGRAVYDG

SEQ ID NO: 155075 - protein, 192 aa, Unknown
  Bacterial polypetide isolated from the Sargasso Sea
EKLENESPINLYAYSKYLFDQIVRKHLGSNESQIVGLRYFNVYGPNEVHKEGMASVAYHLHQQLKNSDQVNLFKGSDGFGDGEQRRDFIHVDDVVNVNLWFMDNPSVSGIFNVGTGKSQTFNEVANAVIEWNQKGHINYINFPENLKGAYQSFTEADIGALRSAGYKQEFLDVSSGVKKYLDVLSGWPKNEY

SEQ ID NO: 155076 - protein, 164 aa, Unknown
  Bacterial polypetide isolated from the Sargasso Sea
VRRFLPEAQSQILGLRYFNVYGPQETHKERMASVAFHLFHQLRKGGSMNLFEGSEGFRRDFIHVQDTIKINLHFLESGKSGIFNAGTGKARSFTAIGECLKDIEGSGELKSIPFPDDLRGKYQEFTEADTTRLREAGYEEEFISLEEGIRLYHKMLSENGGLHL

SEQ ID NO: 155077 - protein, 263 aa, Unknown
  Bacterial polypetide isolated from the Sargasso Sea
MKNYFDNKNILVTGGTGFIGSNIVKYLINNNENVSIDIFDKEDNLKYFTKKELNSIKLIKGDLENFNFDNLKNKYHHIFHQAAITDTTVMDETLMLSVNTESFNKIVNLALKNNSTLIYASSAATYGNTDAPNIVGKGEKPTNIYGVSKLKMDHLAYKFMKLYPELKIIGLRYFNVYGPGESKKGKMSSMILQLYKQIEKNQPPRIFKYGEQKRDFVYVKDVVQANIKATINGESGVYNVGSGKARSFNDIVSIINDILNSDK

SEQ ID NO: 155078 - protein, 192 aa, Unknown
  Bacterial polypetide isolated from the Sargasso Sea
LFDRYAFGESRPASPQLVGLRYFNVYGPREDHKGRMASVAWHLTRQYFESGSVRLFEGSGGYQAGEQRRDFIHVDDVVKANLFFLDNPEKSGIFNVGTGKAGTFNDVALAVINACREIDGKPKLLLEEACREELLGYFPMPDALVGKYQSYTEADVSHLKAAGFSNNSLDVEEGVGRYAKQLYTTLKKGEHS

SEQ ID NO: 155079 - protein, 291 aa, Unknown
  Bacterial polypetide isolated from the Sargasso Sea
DDHNNPELKENITHCEIKDYLDIDEFLFLLQKNKFDGTKLKSIFHQGACSNTMEWDAEYLYKNNFLYSKEILNLSIQSDTPLIYASSASVYGSGDVFEESIENENPINLYAYTKFKFDQLVRKALTENTTQIVGLRYFNAYGPQEQHKGSMASVAYHLHNQLKDNDSIKLFKGSDGYNDGEQRRDFIYIDDIVKVNLWFMENKKISGIFNLGTGKSRAFNDVAQAVINWHSQGKIEYIDFPEKLKGSYQSFTEANISKLRKVGYTEDFVDVTEGVNLYLDNLEKWPKNDPS

SEQ ID NO: 155080 - protein, 175 aa, Unknown
  Bacterial polypetide isolated from the Sargasso Sea
LFDQNVRRHLGKNKSQIVGLRYFNVYGPNEAHKGRMASVAYHLHQQLKTSEQINLFKGSDGFEDGEQRRDFIHVDDVVNVNLWFMNNTNVSGIFNVGTGKSQTFNEVAKAVIKWNQKGHINYIDFPEKLKDAYQSFTEADIEALRKAGYTEDFLDVNAGVKKYLDALSGWPKNEY

SEQ ID NO: 155081 - protein, 177 aa, Unknown
  Bacterial polypetide isolated from the Sargasso Sea
MTIIVTGAAGFIGANIVKGLNERGETDIIAVDNLTRADKFKNIVDCQISDYLDKTDFVERFARGEFGKVRAIFHEGACSDTMETDGRYMMDNNYRYSLAVMRACLDQGVQFLYASSAATYGASETFREEPQFERPLNVYGYSKLLFDQIVRRVMPTALSQIVGFRSSTSTARASSLP

SEQ ID NO: 155082 - protein, 356 aa, Unknown
  Bacterial polypetide isolated from the Sargasso Sea
MQTVTGGRPVLNQTTDLAPDGQPWNLITLRNNAGMVVTLMDWGATLLSAQVPLANGEVREALLGCAAPENYTRQAAYLGASVGRYANRIANSRFTLDGQTVQLTPSNEAGHQLHGGPDGFDKRRWQIVSADEHQALFALASDDGDQGFPGNLKATAHYRLTEDNRIAIEYRATVDRPCPVNLTNHVYFNLDGGQTDVRNHQLQIFADSYLPVESDGIPGGDLQDVTRTSFDFRTPKTVAVDFLRDADQQKVKGYDHAFLLQAKGDARKAAAHVWSQDGQLQMAVYTSAPALQFYSGNYLGGTPSRTEQPYADWQGLALESEFLPDSPNHPEWPQPDCILRPGEEYVSLTEYQFIAR

SEQ ID NO: 155083 - protein, 194 aa, Unknown
  Bacterial polypetide isolated from the Sargasso Sea
MLEQLKAEVLAANLALPAHGLVTFTWGNVSAVDETRKLMVIKPSGVEYEVMTADDMVVVDIASGNVVEGNKKPSSDTPTHLALYRRYPQIGGIVHTHSRHATIWSQAGLDLPAWGTTHADYFYGSIPCTRLMTAEEINGEYEYQTGEVIIQTFEQRDLNPLQVPAVLVHSHGPFAWGKDAADAVHNAVVLEECA

SEQ ID NO: 155084 - protein, 146 aa, Unknown
  Bacterial polypetide isolated from the Sargasso Sea
MLEDLKRQVLEANLALPKHNLVTLTWGNVSAVDRERGVFVIKPSGVDYSVMTAEDMVVVSIATGEVVEGNKKPSSDTPTHRLLYQAFPTIGGIVHTHSRHATIWAQAGQSIPATGTTHADYFYGTIPCTRKMTEEEINGEYEWETG

SEQ ID NO: 155085 - protein, 117 aa, Unknown
  Bacterial polypetide isolated from the Sargasso Sea
MVQGGGLDADMQNKPSESAAIENEANNGLKNDRGTIAMARTMDPHSATSQFFINHADNDFLNFSSETTQGWGYAVFGKVIEGMEVVDSVALSPTMVVNGYQDAPANPVIINSVSISE

SEQ ID NO: 155086 - protein, 122 aa, Unknown
  Bacterial polypetide isolated from the Sargasso Sea
MRCANTVKNFTDLIEKGFYDGLNFHRVIPNFVIQGGCPQGTGTGGPGYRIDCEINPNRHQAGTLSMAHAGKDTGGSQFFICHSPQPHLDGVHTVFGHTANMDVVNSIEQGDEIISAEIVSGD

SEQ ID NO: 155087 - protein, 243 aa, Unknown
  Bacterial polypetide isolated from the Sargasso Sea
MGGDDLGPDAMSDEDDIVYDDLEVGEEADVSKLKDGGCVKKVLVKGTGTDRPETGSEVTVHYTGTLLDGTKFDSSVDRGDPFKFKLGVGQVIKGWDEGVASMLKGEKAILTCKPDYAYGARGSPPTIPPDATLQFEVELFSWTSDKDYFDDGGCVRVKTLKRSSAYGSPKDIDEVTVSYAVSAPDDDVAGAGDEIVKPTDATFAVKDAPFVGLGAILKKMKEGESVLARMRDVPGGTQYCSGL

SEQ ID NO: 155088 - protein, 140 aa, Unknown
  Bacterial polypetide isolated from the Sargasso Sea
MQAIMKTAKGEIQIDLFNEDAPNTVKNFTDLIEKGFYDGLNFHRVIPNFVIQGGCPQGTGTGGPGYHIDCEINANRHQAGTLSMAHAGKDTGGSQFFICHSPQPHLDGVHTVFGHTANMDVVNSIEQGDEIISVEIVPSD

SEQ ID NO: 155089 - protein, 83 aa, Unknown
  Bacterial polypetide isolated from the Sargasso Sea
MANQGTPNTNGSQFFIVTGPFGASLDPNYSLMGHVVAGLDVALAIQKVETDAQDLPVEPVLISSVTIAGAASSEIDIYKDLTD

SEQ ID NO: 155090 - protein, 193 aa, Unknown
  Bacterial polypetide isolated from the Sargasso Sea
MVSTEVFADQVDQRLKIKIIKSGKGQEALPQSKVTVHYTGWLLNGRKFDSSLDRKRPFEFTLGAGRVIKGWDQGVLGMRVGEKREIIVPPELGYGRTGAGGVIPPNATLKFEVELLSVKAPKFKSIDENTLRRLVKNGTKIIDIRRPEEWLKTGVIKGSYKLTAFDKSSRFNRSFPLELSKISSPVEPELLLL

SEQ ID NO: 155091 - protein, 102 aa, Unknown
  Bacterial polypetide isolated from the Sargasso Sea
SGTQPIQNEANNGLPNDRGTIAMARTGDPHSATSQFFINHKDNSFLNHSSETMRGWGYAVFGKVTDGMDVVDAIAVVDTGNFQQYADVPVEPIMIQSISVME

SEQ ID NO: 155092 - protein, 96 aa, Unknown
  Bacterial polypetide isolated from the Sargasso Sea
RLVPLPGAKFSVHYQGMLLNGTIFDSSYKRNKPIKFSVGVGQVIKGWDEGIMLLNKGAAARFVIPSHLGYGMRGAGGVIPPNSTLIFDVELINIEN

SEQ ID NO: 155093 - protein, 243 aa, Unknown
  Bacterial polypetide isolated from the Sargasso Sea
MNTELNDNKEFITESGLKYEIIKMGNGEKPVATDKVEVHYHGTLLDGTVFDSSVDRGQTITFGLNQVIKGWTEGLQLMPIGSKFKFTIPPELGYGDRDIGSIPANSTLIFEVELFDIQKPFVDADFSIPAEEIVLESGLRYLEHIPGSGDVTTKGNIVVVHYSGFLSDGTKFDSSHDRARPFNFTLGENRVIKGWEEGLLNMKKGGKRTLIIPPDLAYGERGAGGVIPPNATLLFEVELVDFK

SEQ ID NO: 155094 - protein, 87 aa, Unknown
  Bacterial polypetide isolated from the Sargasso Sea
LKWTLSMARTNDPHSASSQFFINLVNNVSLDHTEETIQGWGYAVFGEVVDGFETVEAIAATATGSSGFHQDVPIEEILITDTKVTTE

SEQ ID NO: 155095 - protein, 145 aa, Unknown
  Bacterial polypetide isolated from the Sargasso Sea
MTQALFETEVGNINIEFFSDDAPNTVKNFTKLICDGFYDGLAFHRVIPGFMAQGGCPNTRNGASGMPGTGGPGYNIKCEINANKHLKGSLSMAHAGKDTGGSQFFIVYEPQPHLDGVHTVFGKTDDMDVVLKLTNGSKILKATVN

SEQ ID NO: 155096 - protein, 175 aa, Unknown
  Bacterial polypetide isolated from the Sargasso Sea
MSTKFTSLEQHASYGIGLQMGQQLADNPFDGLDILAVAAGLAAAFQGDEPEVSDEQIGAAFQVISQRMQQQQEQQAKALAGAGEAFLAENAKKPGVTVTASGLQYEVLVQGEGEKPTKASTVRTHYHGTLIDGTVFDSSYDRGQPAEFPVSGVIAGWTEALQLMPVGTQVTFNYP

SEQ ID NO: 155097 - protein, 80 aa, Unknown
  Bacterial polypetide isolated from the Sargasso Sea
ARTANPHSASSQFFINHADNAFLNFRTNQVDEGWGYAVFGQVIEGMEVVDKIADVETGSVGPYQDVPVEAITVLKTEVID

SEQ ID NO: 155098 - protein, 145 aa, Unknown
  Bacterial polypetide isolated from the Sargasso Sea
MTKALFETEVGSINIEFFPEDAPNTVKNFTNLISDGFYDGLAFHRVIPGFMAQGGCPNTRDGASGMPGTGGPGYNIKCEINSNKHLKGSLSMAHAGKDTGGSQFFIVYEPQPHLDGVHTVFGKTDDMDVVLKLNNGSKIIKATLK

SEQ ID NO: 155099 - protein, 76 aa, Unknown
  Bacterial polypetide isolated from the Sargasso Sea
IPYEKGILAMANRGPNTNGSQFFIMHADYPLPYQYTIFGKVTDGFDVIDTIASVETDTSDKPLDDIVINSIVIKEN

SEQ ID NO: 155100 - protein, 150 aa, Unknown
  Bacterial polypetide isolated from the Sargasso Sea
MASAPQMNIDNETTYRVSIQTAKGTIVMDLDPKLAPNTVNNFVNLARDGYYTGLTFHRVVPDFVIQGGCPEGTGTGGPGYRFDDEPVNAEYTLGAVAMANAGPNTNGSQFFICIDDCRSKLAPAYNLFGYVSSGMDVALTIAVGDVMESV

SEQ ID NO: 155101 - protein, 137 aa, Unknown
  Bacterial polypetide isolated from the Sargasso Sea
MTQVKLTTNHGDIVIELNAEKAPITVANFIEYVKAGHYENTVFHRVIGNFMIQGGGFEPGMKEKKDKRPSIQNEADNGLSNDKYTVAMARTMEPHSASAQFFINVADNAFLNHSGKNVQGWGYAVFGKVTRSTDVVD

SEQ ID NO: 155102 - protein, 71 aa, Unknown
  Bacterial polypetide isolated from the Sargasso Sea
AGTLSMANAGPGTNSSQFFVCTGPTSFLDGKHVVFGKVTKGLDVVRAIERVGSKEGKTARTVLINDCGQIA

SEQ ID NO: 155103 - protein, 86 aa, Unknown
  Bacterial polypetide isolated from the Sargasso Sea
DRGTIAMARTGDPHSATSQFFINHKDNGFLNHTGENPQGWGYAVFGKVTDGMDVVDQIADVATGNVGPYQDVPLEVITIESVTISE

SEQ ID NO: 155104 - protein, 78 aa, Unknown
  Bacterial polypetide isolated from the Sargasso Sea
SDPHSASSQFFINVNDNLFLDHKNTTAQGWGYAVFGRVTEGMDTINKIKECKTSSQLGHQDVPDEDVVINTAKSIEEN

SEQ ID NO: 155105 - protein, 141 aa, Unknown
  Bacterial polypetide isolated from the Sargasso Sea
MTQVMMKTAKGDIQIDLFDEDAPNTVKNFTDLIEKGFYDGLNFHRVIPNFVIQGGCPQGTGTGGPGYHIDCEINPNRHQAGTLSMAHAGKDTGGSQFFICHSPQPHLDGVHTVFGHTANMDVVNSIEQGDEIISAEIVSGD

SEQ ID NO: 155106 - protein, 145 aa, Unknown
  Bacterial polypetide isolated from the Sargasso Sea
MTTALFETEVGNINIEFFSEDAPNTVKNFTSLISDGFYDGLAFHRVIPGFMAQGGCPNTRDGASGMPGTGGPGYNIKCEINSNKHLEGSLSMAHAGKDTGGSQFFIVYEPQPHLDGVHTVFGKTDDMDVVLKLTNGSKILKATLK

SEQ ID NO: 155107 - protein, 162 aa, Unknown
  Bacterial polypetide isolated from the Sargasso Sea
MQENIVFKKIIALITSFFIVEQVASANETTNSKLLLNTSKGEIVIKFLPDLAPVHVARIIELVKSGFYDGIIFHRVIPGFMAQTGDPKGNGTGGSGQKLKAEFSDYQYTSGTVGMARTMDPNTGDSQFFICFDGCGHLTGQYTAWGQVETGMDVVENINVGE

SEQ ID NO: 155108 - protein, 124 aa, Unknown
  Bacterial polypetide isolated from the Sargasso Sea
MIAKYKKDNKSEVVTTKSGLRYIVLAEGKGDAPAAGTRIAAHYTGTLTDGKKFDSSRDRNEPIRFPVGKGFVIPGWDEALSQMKKGERRILIIPHKLGYGERGAGGGVIPPFATLIFDVELVDF

SEQ ID NO: 155109 - protein, 232 aa, Unknown
  Bacterial polypetide isolated from the Sargasso Sea
MIIVTTPQAFAEYEDTIVVLETDSGRLIIEFFPQFAPNHVENFVTLSEDGFYTGTIFHRIIEGFMIQGGDPKSADPSFSMSEWGTGDPGYSIDAEFNSIEHKRGIVSMARSSDPNSAGSQFFIVHKDSNFLDGQYTVFGRILTDESFETLDRIATMDTAPNDQPMDAWRAIIKNVQVIDRSELSNLPEHTTPVTTDEGDALIAPTTSQPNSFPEYGLSFTSPAGWIVQTPPP

SEQ ID NO: 155110 - protein, 152 aa, Unknown
  Bacterial polypetide isolated from the Sargasso Sea
IIFVKLAQRGDYDNTPFHRVIDDFMIQGGDFTNGDGTGGHAAEFYGYCDGTETAVECSNPTSFTLPDEADNGLLHQPCTISMAKTSQPNTGGSQFFLIPQDSTPDWLDGQHTVFGQITSGCSFITSISEVETGGQQGSTPVNPVTLVSVVIS

SEQ ID NO: 155111 - protein, 126 aa, Unknown
  Bacterial polypetide isolated from the Sargasso Sea
PNHVQRIAELANEGFYDGVPFHRVIPGFMAQGGDGGNHNGTGGSSKPNLKQEFNKEPHVRGVCSMARTMDPNSANSQFFICFDDARFLDGQYTVWGEVTEGMELIDALPKGEPPANPGKIVTMKAQ

SEQ ID NO: 155112 - protein, 164 aa, Unknown
  Bacterial polypetide isolated from the Sargasso Sea
MLPAVPDDFVPWEGQRALAEVAPPARNNIYSEAPPMTIDTSGSYQAIITTADGDMTFDLLVETAPITVNNFVKLTEDGYYDGVIFHRVLEDFMAQGGDPAGQGTGGPGYQFEDEVDDGPAMESRGLLAMANAGPGTNGSQFFITFAPTPHLTGNHTVFGTLTAG

SEQ ID NO: 155113 - protein, 272 aa, Unknown
  Bacterial polypetide isolated from the Sargasso Sea
MIIVTTPQAFAEYEDTIVVLETDSGRLLIEFFPQFAPNHVENFVTLSEDGFYTGTIFHRIIEGFMIQGGDPKSADPSFSMSEWGTGDPGYSIDAEFNSIEHKRGIVSMARSSDPNSAGSQFFIVHKDSNFLDGQYTVFGRILTDESFETLDRLATLNTAPNDQPMDAWRAIIKNVQIIDRSELSNLPEYVTPVTTDEGDALIAPTTSQPNSFPEYGLSFTSPAGWIVQTPPPSGNNPDIVVVGSKTTTSAPAVSFAITRQDVTIEEAINGLR

SEQ ID NO: 155114 - protein, 90 aa, Unknown
  Bacterial polypetide isolated from the Sargasso Sea
MAQTGDGQFGNGTGGSSKPDLMQEFNITSHLRGTVSMARTHDPNSPNSQFFICFGPTPHLDGQYTVFGQVVSRMEYVNNIKVGSGSNGEV

SEQ ID NO: 155115 - protein, 176 aa, Unknown
  Bacterial polypetide isolated from the Sargasso Sea
VAPSTVSAAPAQPAAVRSEASKPQKALSFELDPDDPNPTLFTMANDSAPADASALGGPLDAPDTTITASGLKIIELEVGSGDEATPGQTVVVHYRGTLEDGLQFDASYDRGTPFSFPLGAGRVIKGWDEGVAGMKVGGKRKLVIPSDLAYGTRGAGGVIPPNATLIFEVELLDVKK

SEQ ID NO: 155116 - protein, 168 aa, Unknown
  Bacterial polypetide isolated from the Sargasso Sea
MTGNAAQGGEIAVIETTMGNIELEFLEDVAPGHVKNFKDLANKGFYDGTIFHRVIPGFMIQGGDPNSKSEDRSMHGVGGPGYTIKAEFNDTPHDRGILSMARSQDPNSAGSQFYIVVKDSHFLDGQYTAFGRVLKGMDVADKIVNAPRDARDNPNERIEMKSVKIVNR

SEQ ID NO: 155117 - protein, 173 aa, Unknown
  Bacterial polypetide isolated from the Sargasso Sea
MSCGSKESSQKQDVAIISTKYGDMVVEFFDEHAPKHVESFKMHSQNGYYNGTIFHRVIPGFVIQGGDPNSKSEDRGMHGIGGNAAKYFGVGDERDSTTWSIPAEFNSLKHQKGILSMARANDPNSAGSQFFICAGNVNQLDNNYTVFGKVIKGLTIIDQIVNVPRDGRDNPND

SEQ ID NO: 155118 - protein, 147 aa, Unknown
  Bacterial polypetide isolated from the Sargasso Sea
MSLVTISTSAGDIHLELDADNAPITVANFLKLAEDGYYSGTIFHRIIEGFMVQGGGLDENMAPKLTNTDPIQNEANNGLKNDRGSIAMARTMDPHSATGQFFINHKDNDFLNHTAETSQGWGYAVFGSVIDGMDIVDQNSPQVQLLL

SEQ ID NO: 155119 - protein, 119 aa, Unknown
  Bacterial polypetide isolated from the Sargasso Sea
MTQVTIKTSVGDIQLELNDEKAPITVENFKTIASSGYYEGTIFHRVINGFMIQGGGLTADMSNKSSGTGPIQNEANNGLPNDRGTISMARTMDPHSATSQFFINHKDNAFLNHTGETSQ

SEQ ID NO: 155120 - protein, 177 aa, Unknown
  Bacterial polypetide isolated from the Sargasso Sea
MQENKVFKKIIALITSFFIVEQVASANETTNSKLLLNTSKGEIVIKFLPDIAPVHVARIIELVKSGFYDGIIFHRVIPGFMAQTGDPKGNGTGGSGQKLKAEFSDYQYTSGTVGMARTMDPNTGDSQFFICFDGCGHLTGQYTAWGQVETGMDVVENINVGEPPSNPDKIINASISE

SEQ ID NO: 155121 - protein, 91 aa, Unknown
  Bacterial polypetide isolated from the Sargasso Sea
NGLPNDRGTIAMARTMDPHSATSQFFINHKDNGFLNHTGETSQGWGYAVFGMVTEGMDVVDQIAEVATGSSGAYQDVPEEVITIESVTISE

SEQ ID NO: 155122 - protein, 78 aa, Unknown
  Bacterial polypetide isolated from the Sargasso Sea
RTNDPHSATSQFFINLQDNISLDFSSETPMGWGYAVFGKVVKGQEVVDEMATVQTGSFGPYQDVPREDIKILSASLKQ

SEQ ID NO: 155123 - protein, 87 aa, Unknown
  Bacterial polypetide isolated from the Sargasso Sea
MKRIHIFIACLALILTGIKLDASENYPQIEIVTTSGTIVVELDRNRAPKTVENFLNYVQSGAYVGTIFHRVIPGFVIQYRWLRCESQ

SEQ ID NO: 155124 - protein, 109 aa, Unknown
  Bacterial polypetide isolated from the Sargasso Sea
MKTAEIHTKKGVMKIEFFERDAPNTVQNFIELAEKGYYDGLTFHRVIPDFVIQGGCPKGDGSGGPGYQIDCELNGDNQYHDRGVLSMAHAGRNTGGSQFFICHSRNNTS

SEQ ID NO: 155125 - protein, 131 aa, Unknown
  Bacterial polypetide isolated from the Sargasso Sea
MIKIYTTQGEIELKLFDDKAPETTKNFILYAEAGKYNGTIFHRVIKDFMIQGGGHLPDLSEIATESPVVNESNNGLSNKKGTIAMARTSDPHSATSQFFINLKDNDFLDKKNAPDNYGYCVFGEVTNGIDV

SEQ ID NO: 155126 - protein, 113 aa, Unknown
  Bacterial polypetide isolated from the Sargasso Sea
MTKATIKTSEGEIKLELNGEKAPITVENFKTIANSSYYEGTVFHRVINGFMIQGGGLTSDMNNKSSGTSPIQNEANNGLSNDRGTIAMARTMDPHSATSQFFINHKDNSFLNH

SEQ ID NO: 155127 - protein, 107 aa, Unknown
  Bacterial polypetide isolated from the Sargasso Sea
DASLKEKPTRAPIPLEADNGLKNDRGTIAMARTGNPNSATSQFFINVVNNDMLNAPKPDGHGYAVFGRVVQGMDVVDKIRTVATGNQGMHQNVPTKPVTILSATEVK

SEQ ID NO: 155128 - protein, 183 aa, Unknown
  Bacterial polypetide isolated from the Sargasso Sea
MTDCPNADGSSERVTQFAEQPPMCIDTNKSYTATMETSMGDMVIHLDVVNAPVTVNNFVFLSRYHYYDGLIFHRIINGFMCQGGCPEGSGRGGPGYRFEDELPAPGRYEIGSIAMANAGPNTNGSQFFIVTGQSGVGLPPQYSLFGKVVNGLEVADEMQRVQTQPGDRPITDVVIHSVQITES

SEQ ID NO: 155129 - protein, 76 aa, Unknown
  Bacterial polypetide isolated from the Sargasso Sea
MDKTLQIRGNPKVYFDITVGGEATGRVVMQLRKDKVPKTAENFRQLCLKPEGEGYLNSSFHRVIPDFMCQGGDSRT

SEQ ID NO: 155130 - protein, 141 aa, Unknown
  Bacterial polypetide isolated from the Sargasso Sea
MTQVLMKTTKGDIEINLFNEDAPNTVKNFTDLIGKGFYNGLNFHRVIPNFVIQGGCPQGTGMGGPGYQIDCEINSNLHQAGTLSMAHAGKDTGGSQFFICHSPQPHLDGVHTVFGHTESMDVVNSIEQGDEIISIEIVSGE

SEQ ID NO: 155131 - protein, 174 aa, Unknown
  Bacterial polypetide isolated from the Sargasso Sea
MTLFSQFNSPQVVYAAESKTQFVQKTPVEKSSNVSNNNIFELDPSDPNPILFAMSEEKQSDSNSRTTESGLVITDIVYGEGDEASAGKTVSVNYTGTLEDGTQFDTSIGRAPFSFPLGAGRVIKGWDEGVAGMKVGGKRKLIIPPELGYGSRGAGNVIPANATLVFEVELLKVN

SEQ ID NO: 155132 - protein, 103 aa, Unknown
  Bacterial polypetide isolated from the Sargasso Sea
MRCTSFAQRPALRVPPWARSAANICESSARQKSCHRSGRRKMGKPVGFKGCSFHRIIKGFMLQGGDFVKGDGTGCISIYGDKFDDENFELKHTGPGLLSVRLE

SEQ ID NO: 155133 - protein, 178 aa, Unknown
  Bacterial polypetide isolated from the Sargasso Sea
MIIFHAINVHAQTVNDEIIIIETSEGKITVHLDGRRAPITVSNFVSLIKADYFDNSIFHRVIDNFMIQGGGFDENMNDLESLNTIPNESGNGLSNLRGTVAMARTSEPHSANAQFFINTQDNRSLNPKSGRWGYAVFGTVIEGMEVVDKISKKPTGPKGRFTSDVPIETVLIMNISIE

SEQ ID NO: 155134 - protein, 155 aa, Unknown
  Bacterial polypetide isolated from the Sargasso Sea
MDYTHIVIKLETGDVKIKLRPDLAPNHVKQITELAEEGFYDGIVFHRVIPDFMAQTGDPTGTGTGSSDKPNLKQEFSAEKHTRGTASMARSSDPNSANSQFFICFNDANWLDGQYTIWGEVVEGMDLIDGLKKGLDQSGMVTDPDKMLKVTPIKE

SEQ ID NO: 155135 - protein, 120 aa, Unknown
  Bacterial polypetide isolated from the Sargasso Sea
RIAELASSGFYDGVIFHRVIPGFMAQTGDPTGTGMGGSGTNLDAEFTDYEYRVGTVGMARSSSPNSGDSQFFICFDGCGHLTGQYTVWGQVERGMGAVEKLAAGQPPVEPDQIISASVID

SEQ ID NO: 155136 - protein, 191 aa, Unknown
  Bacterial polypetide isolated from the Sargasso Sea
MLKNLTVSTILLCLAGSGQASENLVLIETSEGNITIELDFDKAPITSANFIKYVESGFFNNTIFHRVIPGFVIQGGGFEHPMNRKETLPPIENEADNGLKNLRGTLSMARTSDPNSATSQFFINLVNNDFLDYKSKDVAGWGYAVFAEITSGIEVIDRIASIPTTSFNGMQDVPTTPITINNVSLISGNTE

SEQ ID NO: 155137 - protein, 133 aa, Unknown
  Bacterial polypetide isolated from the Sargasso Sea
INIEFFSEDAPNTVKNFTNLINDGFYDGLAFHRVIPGFMAQGGCPNTREGASGMPGTGGPGYNIKCEINSNKHLKGSLSMAHAGKDTGGSQFFIVYEPQPHLDGVHTVFGKTDDMDVVLKLTNGSKIIKATLK

SEQ ID NO: 155138 - protein, 144 aa, Unknown
  Bacterial polypetide isolated from the Sargasso Sea
MLLETTQGQVEIAFFPELAPNHVNRISELASSGFYDGIIFHRVIPGFMAQTGDPTGTGMGGSGTNLDAEFTDYEYRVGTVGMARSSNPNSGDSQFFICFDGCGHLTGQYTVWGQVERGMDTVEKLAAGEPPAEPDQIVSAAVID

SEQ ID NO: 155139 - protein, 193 aa, Unknown
  Bacterial polypetide isolated from the Sargasso Sea
MIIVTTPQAFAEYEDTIVVLETDSGRLLIEFFPQFAPNHVENFVTLSEDGFYTDTIFHRIIEGFMIQGGDPKSADPSSSMSEWGTGDPGYTIDAEFNSIEHKRGIVSMARSSDPNSAGSQFFIVHKDSNFLDGQYTVFGRILTDESFETLDRIATLNTAPNDQPMDAWRAIIKNVQIIDRSELLNLPEICNSQ

SEQ ID NO: 155140 - protein, 197 aa, Unknown
  Bacterial polypetide isolated from the Sargasso Sea
MIIVTTPQAFAEYEDTIVVLETDSGRLIIEFFPQFAPNHVENFVTLSEDGFYNGTIFHRIIEGFMIQGGDPKSADSSVSLSEWGTGDPGYSIDAEFNNIEHKRGIVSMARSSDPNSAGSQFFIVHKDSNFLDGQYTVFGRILTDESFETLDRIATMDTAPNDQPMDAWRAIIKNVQVIDRSELSNLPEYTTPVITDE

SEQ ID NO: 155141 - protein, 184 aa, Unknown
  Bacterial polypetide isolated from the Sargasso Sea
MHTNFGDLNIELHCDRAPRTCENFITLAEKGYYDDVKFHRSIKNFMLQGGDPTGTGKGGHCIWGETFKDEIKNNPFRHDDRGVLSMANRGKDTNGSQFFITYKSTPHLDGKHTVFGRVVGGMETLAKIEKVETDAADRPLKLIKITACTIFTNPYEELREEDEQREREEAAAKAKAEDMKSGKG

SEQ ID NO: 155142 - protein, 116 aa, Unknown
  Bacterial polypetide isolated from the Sargasso Sea
VKNFTDLIEKGFYDGLNFHRVIPNFVIQGGCPQGTGTGGPGYHIDCEINPNRHQAGTLSMAHAGKDTGGSQFFICHSPQPHLDGVHTVFGHTANMDVVNSIEQGDEIISAEIVSGD

SEQ ID NO: 155143 - protein, 114 aa, Unknown
  Bacterial polypetide isolated from the Sargasso Sea
MTTALFETEVGNINIEFFSDDAPNTVKNFTSLISDGFYDGLAFHRVIPGFMAQGGCPNTRDGASGMPGTGGPGYNIKCEINSNKHLKGSLSMAQTGKDTGGSQFFIVYEPQPHL

SEQ ID NO: 155144 - protein, 79 aa, Unknown
  Bacterial polypetide isolated from the Sargasso Sea
MLNGAKFDASYDRRSPLEFAVGTGRVIKGWDEALLDMKVGEKRMLKIPSNLAYGAKGAGGVIPPDATLVFYVELVTLAA

SEQ ID NO: 155145 - protein, 141 aa, Unknown; identical to SEQ ID NO: 155130
  Bacterial polypetide isolated from the Sargasso Sea

SEQ ID NO: 155146 - protein, 181 aa, Unknown
  Bacterial polypetide isolated from the Sargasso Sea
MTGGHAFYSLRSSKDSIMVELHTNHGVIKLELDAEKAPKSVENFLNYVKAGHYDNTVFHRVIDGFMIQGGGFEPGMKQKPTAEPITNEANNGLKNVNGSIAMARTNDPHSATAQFFINVNDNDFLNHSSPTPQGWGYAVFGKVVEGMDIVEKIKKVKTGSKGFHQDVPADDVVIEKAVIVD

SEQ ID NO: 155147 - protein, 172 aa, Unknown
  Bacterial polypetide isolated from the Sargasso Sea
MRFTWVSNGVAQEGEIVIELYPEAAPFHVNNFVALVEGGYYNDTIMHRIIQNFMIQGGDFVNRDGTGGHAVVWSGYCYGQSVETSEDCAQTLWNLPDEADNGLTHEPYVLSMAKTNRPNTGGSQFFIVSPDIYPHWLDGVHTVFGKVISGQSVIDAIEKVSTGQYDRPIDAV

SEQ ID NO: 155148 - protein, 110 aa, Unknown
  Bacterial polypetide isolated from the Sargasso Sea
MKAVIATSLGQITIELNQEKAPKTVENFLAYVKSGFYDGTIFHRVIEGFMIQGGGMDKEMKTKPTNPSIENEANNGLSNLHGTIAMARTSNPHSATAQFFINTEDNRGLD

SEQ ID NO: 155149 - protein, 277 aa, Unknown
  Bacterial polypetide isolated from the Sargasso Sea
MKTVKCPHCKKEIELGEVAAAQAEALAAQKIKNYKTESDKKIKALEKEKQNARKDAKEEAKKELEIKFNKNQKQKDEKIKALEKEKQNARKDAKEEAKKELEKENKDFKESLTAELNAKAENKIRKNDEKKDQEIKFLILKNERMKKDMEKAKQRAEQGSSADQGASQHNLLGDNLKEMFGETEDEIRSTETGEPGADWIQRIKKDGEVIGKILYESKKTQKFSKDWYGKLQDDMKSAKADIGIIFSTAIPKDFDKKKGYLEKGNIYVCDYDLDKLK

SEQ ID NO: 155150 - protein, 64 aa, Unknown
  Bacterial polypetide isolated from the Sargasso Sea
MTSVNIETNHGNISFNLLPELAPETVRSFVKLASDGFYDGTLFHRVIPGFMIQGGDPNTKDPNM

SEQ ID NO: 155151 - protein, 93 aa, Unknown
  Bacterial polypetide isolated from the Sargasso Sea
PGYRFEDELPAPGRYELGSLAMANAGPNTNGSQFFIITGPSGQGLPPQYSLFGQVIRGLEVADAMQKVPTNHSDRPETDIVIESVTITENEEV

SEQ ID NO: 155152 - protein, 79 aa, Unknown
  Bacterial polypetide isolated from the Sargasso Sea
MTSVNIETNHGNISFNLLPELAPETVRSFVKLASDGFYDGTLFHRVIPGFMIQGGDPNTKDPNMKSQWGMGGPGFNVKG

SEQ ID NO: 155153 - protein, 111 aa, Unknown
  Bacterial polypetide isolated from the Sargasso Sea
DGFYDGLAFHRVIPGFMAQGGCPNTRDGASGMPGTGGPGYNIKCEINSNKHLKGSLSMAHAGKDTGGSQFFIVYEPQPHLDGVHTVFGKTDDMDVVLKLTNGSKILKATIK

SEQ ID NO: 155154 - protein, 155 aa, Unknown
  Bacterial polypetide isolated from the Sargasso Sea
MGITHISIKLETGNVKIKLRPDLAPNHVQRIIELASEGFYNGVVFHRVIPNFMAQTGDPTGTGTGSSDKPNLNQEFSSESHVRGTASMARSADPNSANSQFFICFGDCSWLNNQYTIWGEVEEGMELIDQIKKGEDESGMVRDPDKMIEVVTLEG

SEQ ID NO: 155155 - protein, 165 aa, Unknown
  Bacterial polypetide isolated from the Sargasso Sea
MVTLHTNHGDITLTLNAEKAPETVANFLQYCRDGHYDNTIFHRVIDGFMIQGGGYAPGFEEKDTRAPIKNEAANGLSNKVGTIAMARTMEPHSASAQFFINVNNNDFLDFKSATTQGFGYCVFGEVTAGMDVVNKIKGVKTGNYGRIHQDVPTEDVVITKVTLAE

SEQ ID NO: 155156 - protein, 167 aa, Unknown
  Bacterial polypetide isolated from the Sargasso Sea
MSLVTISTSAGDIHLELDANNAPITVANFLKLAEDGYYTGTIFHRIIEGFMVQGGGLDENMAPKPTNTDPIQNEANNGLKNDRGSIAMARTMDPHSATGQFFINHKDNDFLNHTAETSQGWGYAVFGSVIDGMDVVDQIALSITSNVGGYADAPLEPTIINSVTVSE

SEQ ID NO: 155157 - protein, 197 aa, Unknown
  Bacterial polypetide isolated from the Sargasso Sea
MSDKFSTVEQQASYGVQQNSFEGVDIAAVQAGLADAFAGVESAVSMQDMQVAFTEISRRIQAAQEQAAAEASAEGEAFLAENAKRAGVIVTDSGLQYEVLVQGSGAKPTYEDTVRTHYHGSFINGDVFDSSVVRGQPAEFPVSGVIAGWTEALQLMPVGTKLKLFVPHHLAYGERGAGASIPPYSTLVFEVELLDIV

SEQ ID NO: 155158 - protein, 147 aa, Unknown
  Bacterial polypetide isolated from the Sargasso Sea
MLLSIFEDYINNKSQADILRAEEEAKLLDDLTSGMIETESGLKYKVSKKGSGPNAKIDDVLSVHYSLKLVDGSEIDSSFTRGEPIEFTCGVGQVIKGWDEAMQLLNKGSKATLVIPSELGYGSTGAGNGVIPPNATLIFEVELVDIK

SEQ ID NO: 155159 - protein, 140 aa, Unknown
  Bacterial polypetide isolated from the Sargasso Sea
MTTALFETEVGNINIEFFAEDAPNTVKNFTSLISDGFYDGLAFHRVIPGFMAQGGCPNTRDGASGMPGTGGPGYNIKCEINSKKHLKGSLSMAHAGKDTGGSQFFIVYEPQPHLDGVHTVFGKTDDMDVVLKLTNGSKIL

SEQ ID NO: 155160 - protein, 145 aa, Unknown
  Bacterial polypetide isolated from the Sargasso Sea
MTTALFETEVGSINFEFFSYDAPNTVNNFTKLISDGFYDGLAFHRVIPGFMAQGGCPNTREGASGMPGTGGPGYNIKCEINANKHLKGSLSMAHAGKDTGGSQFFIVYEPQPHLDGVHTVFGKTDDMDVVLKLTNGSKILKATLK

SEQ ID NO: 155161 - protein, 140 aa, Unknown; identical to SEQ ID NO: 155088
  Bacterial polypetide isolated from the Sargasso Sea

SEQ ID NO: 155162 - protein, 108 aa, Unknown
  Bacterial polypetide isolated from the Sargasso Sea
MSCSKDQKVAVISTKFGDMVVEFFPDVAPKHVENFQILAEEGYYNGTTFHRVIPGFMIQGGDPNSKDLDRMNDGTGGRAGKFFGIGRENDSESWTVPAEFNDTPHQRG

SEQ ID NO: 155163 - protein, 145 aa, Unknown
  Bacterial polypetide isolated from the Sargasso Sea
MTTALFETEVGNINIVFFSDDAPNTVKNFTSLISDGFYDGLAFHRVIPGFMAQGGCPNTRDGASGMPGTGGPGYNIKCEINSNKHLRGSLSMAHAGKDTGGSQFFIVYEPQPHLDGVHTVFGKTDDMDVVLKLTNGSKILKATLK

SEQ ID NO: 155164 - protein, 167 aa, Unknown
  Bacterial polypetide isolated from the Sargasso Sea
IALITSFFIVEQVASANETTNSKLLLNTSKGEIVIKFLPDLAPVHVARIIELVKSGFYDGIVFHRVIPGFMAQTGDPKGNGTGGSGQKLKAEFSNYQYTSGTVGMARTMDPNTGDSQFFICFDGCGHLTGQYTAWGQVETGMDVVENINVGEPPSNPDKIINASISE

SEQ ID NO: 155165 - protein, 201 aa, Unknown
  Bacterial polypetide isolated from the Sargasso Sea
MSCEKDNEVAVLSTSYGSMVIEFYPDIAPMHVESFKILAEEGYFDGTTFHRVIPGFVIQGGDPNSKDDDRMNDGTGGRAGKYFGDETDDYVGRKDDPSTWTIPAEFNDSLHVKGTLSMARSQNPNSGSSQFFICHAPTPQLNGQYTVFGKVIKGLDVIDKIVNVDRPNKQNQYYGGPDGDNPFEKVPMTVKVMKQSQAMES

SEQ ID NO: 155166 - protein, 186 aa, Unknown
  Bacterial polypetide isolated from the Sargasso Sea
MTSCEKQPDVAVVSTRYGDMVLEFYPEVAEKHVDSFLTHARNGYFNGTTFHRVIPGFVIQGGDPNSKSDDRSNHGMGGHAANFYGVGNEDDQSSWMLPAEFNSRPHLTGTLSMARSQSPNSAGSQFFICAGPTPQLDNQYTVFGQVIEGLDVIQKIVNSPRDRRDNPKDKVEMTVTVMPKNEAVDS

SEQ ID NO: 155167 - protein, 115 aa, Unknown
  Bacterial polypetide isolated from the Sargasso Sea
MENIVIELDKGNAPITTENFLNYIESGFYEGTVFHRVISGFMIQGGGHLADMTSKDNKLEPILNEANNGLVNSRGTIAMARTSDPHSASSQFFINHADNDFLNFKTDQVDQGWGY

SEQ ID NO: 155168 - protein, 181 aa, Unknown; identical to SEQ ID NO: 155146
  Bacterial polypetide isolated from the Sargasso Sea

SEQ ID NO: 155169 - protein, 194 aa, Unknown
  Bacterial polypetide isolated from the Sargasso Sea
MSCSKEEKVAVISTQYGDMVLEFYEEVAPMHVESFKALADEGYFDNTAFHRVIPGFVIQGGDPNSKGDDRMRWGSGGRAGKFFGIGNEKDNKTWKIPAEFNDKKHVKGTLSMARSKDPNSAGSQFFICHAATPQLNNQYTVFGQVIDGLEIIDQIVYSETPRKQNPGYRGPDADYPFEKVEMKIKLVNKSQALK

SEQ ID NO: 155170 - protein, 141 aa, Unknown
  Bacterial polypetide isolated from the Sargasso Sea
MTQVMMKTAKGDIQIDLFDEDAPNTVKNFTDLIEKGFYDGLNFHRVIPNFVIQGGCPQGTGTGGPGYHIDCEINPNRHQAGTLSMAHAGKNTGGSQFFICHSPQPHLDGVHTVFGHTANMDVVNSIEQGDEIISAEIVSGD

SEQ ID NO: 155171 - protein, 172 aa, Unknown
  Bacterial polypetide isolated from the Sargasso Sea
MIKEGIVTVLLTTSLGEIKIELNKELAPITTQNFVKYVESGFYDQTIFHRVIENFVIQGGGHNEDMSMKDRDLEPIQNEANNGLKNERGSIAMARTAEPHSASSQFFINLQNNFTLNHTSETSRGWGYAVFGKVSEGMDVVDKIAMTETGVFPPHTDVPVEPILILKASIVE

SEQ ID NO: 155172 - protein, 145 aa, Unknown
  Bacterial polypetide isolated from the Sargasso Sea
MKTALFETEVGNINIEFFSEDAPNTVKNFTNLISDGFYDGLAFHRVIPGFMAQGGCPNTRDGASGMPGTGGPGYNIKCEINSNKHLKGSLSMAHAGKDTGGSQFFIVYEPQPHLDGVHTVFGKTDDMDVVLKLTNGSKILKATLK

SEQ ID NO: 155173 - protein, 148 aa, Unknown
  Bacterial polypetide isolated from the Sargasso Sea
MNKLSSFKGLILILIGLIWIVSCSQNEKEIKVITFETTLGPIVIELFEEEAPITSKNFLEYAESGFYNGTLFHRVIPGFVIQGGGMESGMVNKEGNPPIMNEGNNGIKNLKWTLSMARTNDPHSASSQFFINLVNNVSLDHTEETIQG

SEQ ID NO: 155174 - protein, 195 aa, Unknown
  Bacterial polypetide isolated from the Sargasso Sea
MIIVTAPQAFAEYEDTIVVLETDSGRLIIEFFPQFAPNHVENFVTLSEDGFYTGTIFHRIIEGFMIQGGDPKSADPSFSMSEWGTGDPGYSIDAEFNSIEHKRGIVSMARSSDPNSAGSQFFIVHKDSNFLDGQYTVFGRILTDESFETLDRIATMNTAPNDQPMDAWRAVIKNVQVIDRSELSNLPEYTTPVTT

SEQ ID NO: 155175 - protein, 164 aa, Unknown
  Bacterial polypetide isolated from the Sargasso Sea
MIIFTTNFGDITLELDVERAPVTAKNFIRYCKEGFYDHTIFHRVIKGFMIQGGGFTAKMKEKPTHEPIVNEANKGLSNVFGTIAMARTDAPHSATAQFFINTANNEFLDHTAPTNNGWGYAVFGKVTAGLEVVLQIEGVKTTRVAGHEDVPREPIIIEKVTIIE

SEQ ID NO: 155176 - protein, 167 aa, Unknown
  Bacterial polypetide isolated from the Sargasso Sea
MTKATIKTSLGEIKLELNDEKAPITVENFKTIANSGYYEGTIFHRVINGFMVQGGGLTADMNNKSSGTSPIQNEANNGLTNDRGTIAMARTMDPHSATSQFFINHKDNGFLNHTGENSQGWGYAVYGVVTEGMDIVDQIADVATGSSGGHQDVPVDVITIESVTISE

SEQ ID NO: 155177 - protein, 205 aa, Unknown
  Bacterial polypetide isolated from the Sargasso Sea
MSDKFSTVEQQASYGVGRQMGEQLAANSFEGVDIAAVQAGLADAFAGVESAVSMQDMQVAFTEISRRIQAAQEQAAAAASAEGEAFLVENAKRAGVIVTDSGLQYEVLVQGSGAKPTYEDTVRTHYHGSFINGDVFDSSVVRGQPAEFPVSGVIAGWTEALQLMPVGTKLKLFVPHHLAYGERGAGASIPPYSTLVFEVELLDIV

SEQ ID NO: 155178 - protein, 118 aa, Unknown
  Bacterial polypetide isolated from the Sargasso Sea
FVIQGGGMESGMQNKPGNPPIINEANNGLKNLKWTLSMARTNEPHSASSQFFINLVSNASLDHTEETIQGWGYAVFGEVVEGFETVEAIAAVATGSSGFHQDVPLEEISIIDTKVTTE

SEQ ID NO: 155179 - protein, 269 aa, Unknown
  Bacterial polypetide isolated from the Sargasso Sea
KLQESKYLKGLLHGTHKEWWENGNKKFQGRFKSGDKNGRWVGYFENGKIKSEINYKNGIEDGLETHWHENGVKYSKGSYRKGKKVGEWNYWDEQGDPIHYVCIETKFGRIMIDLFSGIAPMHVESFKMHANTGYFNGTIFHRVIPGFVIQGGDPNSRSSNRRTHGIGGASAVFYGIGDKRDPSTWKIPSEFNSTPHKRGIVSMARGSDENSAGSQFFICVKDAPNLDNRYTVFGKVLEGMEIVDQIVNVRVDLRDNPIDRIEMEVSICN

SEQ ID NO: 155180 - protein, 164 aa, Unknown
  Bacterial polypetide isolated from the Sargasso Sea
MVSLHTNFGVIKLALFADKAPATVENFLNYVKEGFYDNTIFHRVINGFMIQGGGFTPDMEQKEPGKPIKNEANNKVANKAGTIAMARTSDPHSATCQFFINVANNDFLDFSSETSQGWGYCVFGEVVEGMDVVNKIKTVSTGRKFGHADVPTDAVIIEKAEIHG

SEQ ID NO: 155181 - protein, 65 aa, Unknown
  Bacterial polypetide isolated from the Sargasso Sea
MTSVNIETNHGNISFNLLPELAPETVRSFVKLASDGFYDGTLFHRVIPGFMIQGGDPNTKDPNMK

SEQ ID NO: 155182 - protein, 193 aa, Unknown
  Bacterial polypetide isolated from the Sargasso Sea
MKRLLLALGGAALLATATAPAFAQSATAHPVVQLKTSQGDIRVELYPEKAPKSVANFLDYVKAGQYNGTIFHRVIKGFMIQGGGYKTNFEEKPTRAPIPLESRNGLKNLTGTIAMARTSDPNSATAQFFINTVDNSGLDYPNPDGNGYAVFGKVVSGLDVVKKIEGVATTSRGPMQDVPAQPIVIESASIVSK

SEQ ID NO: 155183 - protein, 148 aa, Unknown
  Bacterial polypetide isolated from the Sargasso Sea
MQTSQGEIHIELFEDEAPNTVANMIELSEQGFYDGLVFHRVINDFMIQGGCPNGKGTGGPGYRFRDECHPDRRHDGPGVLSMANAGPNTNGSQFFITHSAQPHLDGKHTVFGRVLEGLDVVNRISQGDEIQSVTVLDKRDHEYNVVKL

SEQ ID NO: 155184 - protein, 210 aa, Unknown
  Bacterial polypetide isolated from the Sargasso Sea
MSCGKPKKEAQVNATTEQSAQETKQPEQVDQDKQQKDVAIITTDFGDMVVEFFESVAPKHVESFKLHAQNGYYNGTLFHRVIPGFMIQGGDPNTKTDNKASYGTGGHAAKYFGVGNESEPTTWNVPAEFNDINHSRGILSMARANDPNSGGSQFFICAADAPHLNGKYTVFGQLIKGDQVLEQIVNLPRDARDNPTRRVEMSVRLDKIDN

SEQ ID NO: 155185 - protein, 159 aa, Unknown
  Bacterial polypetide isolated from the Sargasso Sea
EIVTTSGTIVVELDRNRAPKTVENFLNYVQSGAYVGTIFHRVIPGFVIQTGGYDVNLNEIDTFPEIINESGNGLKNQRMSLGMARTNEPHSGSSQFYINLNDNFSLDPMPTRWGYAVFGDVIDGFSVVDDIASNATQTTKGFQDVPVAPIIILEVNRID

SEQ ID NO: 155186 - protein, 217 aa, Unknown
  Bacterial polypetide isolated from the Sargasso Sea
NGSQFFITHKETPWLDGKHTIFGHVILDGQKVVDSIEKDDVMKSVKILRIGKEAKKFDANKIFNDQMAVIEKEAEEKRKAAAEKLKNLTKGATVTKSGLAYKVIKKGSGKVHPTATQTVTVHYTGKLTDGTVFDSSVERGQPASFPLNRVIPGWTEGVQLMVVGDQFTFIIPSNLAYGERGAGGVIPPNADLIFEVELISIQGAESHDGHNHDGQNH

SEQ ID NO: 155187 - protein, 173 aa, Unknown
  Bacterial polypetide isolated from the Sargasso Sea
MDKDNAVISTQFGDIVLEFFDDIAPKHVESFKLHAQNGYYNGTTFHRVIPGFMIQGGDPLTKSDDRSRHGTGGNAAKYFGIGTESDESTWDLPAEFSPTPHTRGILSMARSQNPDSGGSQFFICVADARFLDNQYTVFGKVVSGMDAVDAIVSAPRDARDNPNDRIEMKVHLE

SEQ ID NO: 155188 - protein, 276 aa, Unknown
  Bacterial polypetide isolated from the Sargasso Sea
MQTSKGEIVLRLFYRRVPMTVANFVGLAEGFKEWKDPVTGKARKTRYYDGLSFHRVINDFMIQGGDPMGTGTGGPGYTFQDEFHPELKHSKPGILSMANAGPNTNGSQFFITHVPTPHLDNKHSVFGEVVDGIEVVNAILKGDLINSITIISKGESAKSFDSLSIEKIIAEKNRKLAEKNRKIIPKPTSEIDASKVPDSAQVDAEEVSTQLLVIAYKGSNSPKKNIFYDKSRAKEAAKKIVDLARRKGVSFPDLIKQFSDLPQQPKLPLLSAKNNL

SEQ ID NO: 155189 - protein, 181 aa, Unknown
  Bacterial polypetide isolated from the Sargasso Sea
VLAWLLSLSATVFGQSNPVVVMETSMGTIKIELRPDLTPITAENFLRYVDNGYYDGLIFHRVISGFMVQGGGFDSDMVQKSTYDPIKNEADTGISNARGTIAMARTGVVDSATSQFFINLVNNARLDFQNSSPSGYGYTAFGRVIEGMDVVDQIARVATGSQRGYQNVPLEAVVINSMSQE

SEQ ID NO: 155190 - protein, 175 aa, Unknown
  Bacterial polypetide isolated from the Sargasso Sea
MTYDKTYSAPPAMNINENGNYSAVIETSLGSIEIELFTDIAPITVNNFVNLSKDGYYDNVIFHRVIKGFMIQGGDPSGTGHGEMGKYPGYEFQDELNNPMQYEKGIVAMANRGPNTNGSQFFIMHVDYPLPYDYTIFGKVSNGIDVVDAIANVQTGDMDKPVDDVVINSVDIKEN

SEQ ID NO: 155191 - protein, 113 aa, Unknown
  Bacterial polypetide isolated from the Sargasso Sea
NRAPKTVENFLNYVQSGAYVGTIFHRVIPGFVIQTGGYDVNLNEIDTLPEIINESGNGLKNQRMSLGMARTNEPHSGSSQFYINLNDNFSLDPMPTRWGYAVFGDVIDGFSVV

SEQ ID NO: 155192 - protein, 204 aa, Unknown
  Bacterial polypetide isolated from the Sargasso Sea
MIKHITTFLAISIFIAGCGSKQKSKESIMDKENAVISTQFGDIVVEFFDDIAPKHVESFKLHAQNGYYNGTTFHRIIPGFMIQGGDPLTKSDDRSRHGTGGNAAKYFGIGTESDQSTWDLPAEFSPTPHERGILSMARSQNPDSGGSQFFICVADARFLDNQYTVFGKVVSGMDAVDAIVSAPRDARDNPNDRIEMKVHLEDKK

SEQ ID NO: 155193 - protein, 182 aa, Unknown
  Bacterial polypetide isolated from the Sargasso Sea
AFFAGSALFAANLMAAEPAKAPHVLLDTTNGQIEIELDPVKAPISTKNFLAYVDKGFYTNTIFHRVIPGFMVQGGGFTQQMSQKPTEAPIKNEASNGLHNVRGTLSMARTNDPNSATSQFFINVADNAFLDPGRDAGYAVFAKVVKGMDVVDIIVNSQTTTKQGMQNVPIDPVIIKSAKRID

SEQ ID NO: 155194 - protein, 133 aa, Unknown
  Bacterial polypetide isolated from the Sargasso Sea
MTKTVIAVVISTSLGDITLELDKEKAPGTVENFINLVESGYYDETIFHRVIDGFMVQGGGLTADMRTKPSGTQPIQNEANNGLPNDRGTIAMARTNDPHSATSQFFINHKDNSFLNHSSETMRGWGYAVFGKV

SEQ ID NO: 155195 - protein, 136 aa, Unknown
  Bacterial polypetide isolated from the Sargasso Sea
TAGNFIDLAKKGYYDDLIFHRVIEDFMIQGGCPDGTGRGGPGYTISDEFAPGLAHTEKGLFSMANAGPNTGGSQFFITLAATNWLDGKHAIFGKVTGGMDVVEAIGKIETGFGDRPNEPVVMIKVTVSETESDRSD

SEQ ID NO: 155196 - protein, 104 aa, Unknown
  Bacterial polypetide isolated from the Sargasso Sea
MEAHIKTNKGTIKLKLFYEQTPITVSNFINLAIRGYYNNLSFHRVIDNFMIQGGCPLGTGTGGPGYNFQDEFNDNLKHNKPGVLSMANSGPGTNGSQFFITHIE

SEQ ID NO: 155197 - protein, 207 aa, Unknown
  Bacterial polypetide isolated from the Sargasso Sea
ATPWLDGKHTVFGKVLGKSDLDVVNAIAKGDKIIKLTILRVGDKAKAFKGDEAHFAKIMEDKENAKKIAFEARMKKEEEQVAALIAKYKKDNKSEVVTTKSGLRYIVLAEGKGDAPAAGTRIAAHYTGTLTDGKKFDSSRDRNEPIRFPVGKGFVIPGWDEALSQMKKGERRILIIPHKLGYGERGAGGGVIPPFATLIFDVELVDF

SEQ ID NO: 155198 - protein, 166 aa, Unknown
  Bacterial polypetide isolated from the Sargasso Sea
MSLVAVMETNKGTIRLDLYPEETPVTVANFVNLAQRGFYDGLSFHRVIDDFMVQGGCPQGTGTGGPGYRFADEFVPSLRHDAPGKFSMANAGPGTNGSQFFITHVPTPWLDDAHSIFGAVQSDDDQDIVNAIAQGDSIVSVTIEGETQALLDSVEQIADWNAALDG

SEQ ID NO: 155199 - protein, 142 aa, Unknown
  Bacterial polypetide isolated from the Sargasso Sea
ENFLSYVESGFYNETVFHRVISGFMIQGGGHLADMTPKDEKLDPIQNEANNGLKNNRGTIAMARTANPHSASSQFFINHADNAFLNFRTNQVDEGWGYAVFGQVIEGMEVVDKIADVETGSVGPYQDVPVEAITVLKTEVID

SEQ ID NO: 155200 - protein, 160 aa, Unknown
  Bacterial polypetide isolated from the Sargasso Sea
MTSVNIETNHGNISFNLLPELAPETVRNFVKLTKDGFYDGTLFHRVIPGFMIQGGDPNTKDPNMKSQWGTGGPGYNVKGEFSSRSHLRGIVSMARAMDPDSAGSQFFIVTKDSTFLDREYTVFGEVVEGMDVADKIVNLDRDNNDCPLQDAKMVKVSISE

SEQ ID NO: 155201 - protein, 179 aa, Unknown
  Bacterial polypetide isolated from the Sargasso Sea
MLLSCSNNEEKEVKVITLETNLGPIEIELFFEEAPITSKNFLEYAESGFLNGTLFHRVIPGFVIQGGGLTTGMQDKQGNPPIENEANNGLKNEKWTLSMARTSDPHSASSQFFINLTNNTSLDHTSETPQGWGYAVFGEVIGGFETVEKIAAAETGNSGFHQDVPLEEISILDTKIATE

SEQ ID NO: 155202 - protein, 129 aa, Unknown
  Bacterial polypetide isolated from the Sargasso Sea
MVKLHTNYGVITLELFADKAPVTVENFKQYVRDGHYDGTIFHRVISNFMIQGGGFAPGMQQKDTRDPIKNEADNGVGNSVGTVAMARTPDPHSASAQFFINVADNDFLNFSAPTMHGWGYAVFGKVTDG

SEQ ID NO: 155203 - protein, 130 aa, Unknown
  Bacterial polypetide isolated from the Sargasso Sea
YDETIFHRVIDGFMVQGGGLTADMRTKPSGTQPIQNEANNGLPNDRGTIAMARTGDPHSATSQFFINHKDNSFLNHSSETMRGWGYAVFGKVTDGMDVVDAIAVVDTGNFQQYADVPVEPIMIQSISVME

SEQ ID NO: 155204 - protein, 175 aa, Unknown
  Bacterial polypetide isolated from the Sargasso Sea
MPIIEETKMTQVTIKTSLGDIQLELEAEKAPITVENFVSIANSGYYTDTIFHRVINGFMVQGGGLTADMGNKSSGTAPIQNEANNGLSNDRGTIAMARTMEPHSATSQFFINHKDNSFLNHTGENPQGWGYAVFGKVTEGMDVVDAIADVATGSSGGHQDVPLEVINIESVTVSE

SEQ ID NO: 155205 - protein, 149 aa, Unknown
  Bacterial polypetide isolated from the Sargasso Sea
MIKLSTNMGDITLELFQDKAPETVANFLKYTNEGKLNGTIFHRVIPNFMIQGGGHLQDMSQIDTFDPVINESSNNISNKKGTIAMARTSSPNSATSQFFINLRDNEFLDKANSADGYGYCVFGQVTDGIEIVEQIGAVSTGNNAGHSDV

SEQ ID NO: 155206 - protein, 150 aa, Unknown
  Bacterial polypetide isolated from the Sargasso Sea
MSILVRIFGQAFFILAATFLSQSVQGASDLTIQQIEEEGGLVQLASGLRYKVIREGSGPKPLANDTVVTHYHGTFLDGSMFDSTVRRGTPATFPVNGVIKGWTEALQLMSVGSKWRLVIPPHLAYGKRGMRGAIPPNATLVFEVELLDIR

SEQ ID NO: 155207 - protein, 155 aa, Unknown
  Bacterial polypetide isolated from the Sargasso Sea
MTSVNIETNHGNISFNLLPELAPETVRSFVKLASDGFYDGTLFHRVIPGFMIQGGDPNTKDPNMKSQWGMGGPGFNVKAEFSTRSHLRGIVSMARAQDPDSAGSQFFIVTKDSTFLDREYTVFGEVIEGMDVADKIVSLDRDGNDCPLEDAKMLK

SEQ ID NO: 155208 - protein, 171 aa, Unknown
  Bacterial polypetide isolated from the Sargasso Sea
MIIRTDASENYPQIEIVTTSGTIVVELDRNRAPKTVENFLNYVESGAYIGTIFHRVIPGFVIQTGGYDVNLDEIETLPEIINESGNGLKNQRMSLGMARTNEPHSASSQFYINLNDNFSLDPMPTRWGYAVFGDVIDGFSVVDDIASNATQSTKGFQDVPVAPIIILKSNE

SEQ ID NO: 155209 - protein, 89 aa, Unknown
  Bacterial polypetide isolated from the Sargasso Sea
PGYKFDDEINDNLSHDKAGILSMANAGPGTNGSQFFITFSPTPHLDGMHTIFGHVVSGLENVMKITPRDPFSASEPGDRIIKIIIKNQP

SEQ ID NO: 155210 - protein, 157 aa, Unknown
  Bacterial polypetide isolated from the Sargasso Sea
MDKKLQYFAKFETEKGDFTAILYPNEAPLTVENFINLSEKNFYNGTTFHRVIPGFMAQGGDPTGTGSGGPGYKFNDEFSSSLRHNGEGILSMANAGPNTNGSQFFITYTATPHLDGMHTVFGKIIEGMDVVNSIRERDPMSDAEEGDKIHKITIEKK

SEQ ID NO: 155211 - protein, 254 aa, Unknown
  Bacterial polypetide isolated from the Sargasso Sea
MHIRKTLKLSVILAILSASLALGCQPDVVELASVTPEASEALQIPTSTPVPEPTVEEECLEPVKSETEWMGQMIPQYSCVPQISVDPAKTYYATIKVTNESGESYAGHPVGDIKIELLASVAPLTVSSFKFLAEDGFYDGLIFHRVIPDFMIQGGDPTGTGTSGPGYKFKDEFEQNTTFDRTGILAMANSGPGTNGSQFFITVAPTPHLNFNHTIFGYIVEGQELADEISMATGDQSNRPTESIIIETIIIDEG

SEQ ID NO: 155212 - protein, 220 aa, Unknown
  Bacterial polypetide isolated from the Sargasso Sea
MSTFTRNCFVALSILCLSACGSEETQEDSANDNSNTSQGNGSEATDPAAEVLANQFTIVTTLGTIQIELDPVNAPITTANFEQYADDGFYDGRDGDGATVFHRVISNFMIQGGGYTESGSEKSSRSSIDIESNNGLSNDRGTLAMARTNDPNSATSQFFINHKNNSFLNYENDSNPGYAVFGVVVDGLDVVDAIAAVDTDGNDEPYTPVVITSVTRTPAP

SEQ ID NO: 155213 - protein, 111 aa, Unknown
  Bacterial polypetide isolated from the Sargasso Sea
MTSVNIETNHGNISFNLLPELAPETVRSFVKLASDGFYDGTLFHRVIPGFMIQGGDPNTKDPNMKSQWGMGGPGFNVKGEFSTRSHLRGIVSIARAQDPDSAGSQFFIVQK

SEQ ID NO: 155214 - protein, 146 aa, Unknown
  Bacterial polypetide isolated from the Sargasso Sea
MTSVNIETNHGNISFNLLPDLAPEHVRNFVKLAKEGFYDGTLFHRVIPGFMIQGGDPNTKNPNMKSQWGMGGPGYTIKAEFNSRSHLRGIISMARAMDPDSAGSQFFIMHKDSTFLDNEYTVFGEVTEGMDTVDKIVALPRDGECP

SEQ ID NO: 155215 - protein, 160 aa, Unknown
  Bacterial polypetide isolated from the Sargasso Sea
NEQAKYIATIETSLGTLVIDLYADIAPKTVNNFVNLSNDGYYDDIIFHRVIKGFMIQGGDPSGTGHGEMGKFPGYEFEDELYYPMNYAKGIVAMANRGPNTNGSQFFIMHVDYPLPYQYTIFGKVSEGLDTVDSIANVQTGDNDKPVDDVVIKSVKITEK

SEQ ID NO: 155216 - protein, 163 aa, Unknown
  Bacterial polypetide isolated from the Sargasso Sea
MQIDEGKSYTAVIKTNLGDMTVEFFTDDAPITVNNFISLSKDGYYDNVIFHRVISGFMIQGGDPSGTGHGDYGKFPGYEFEDELNNQRPYEKGILAMANRGPNTNGSQFFIMHVDYPLPYSYTIFGQVVDGFDVIDKIASVDTDSADKPTTDVVISTVEVTEN

SEQ ID NO: 155217 - protein, 178 aa, Unknown
  Bacterial polypetide isolated from the Sargasso Sea
MFKSEYKPPDTTVTTRTFMEFTMDGEPAGRVEFGLYGEQVPRTAENFRALCSGEKGAPLAFEGSPMHRIIPGFMLQGGDTTNGDGTGGESIYGGKFEDENFGIKHERAGLLSMANSGPDSNGSQFFVTTEDTPWLDGKHVVFGEVLEGMDVVKALEALGTADGKPSKKVLISKCGELS

SEQ ID NO: 155218 - protein, 160 aa, Unknown
  Bacterial polypetide isolated from the Sargasso Sea
MTSVNIETNHGNISFDLLPDLAPETVRNFVKLAKEGFYDGTLFHRVIPGFMIQGGDPNTKNPNMKSQWGMGGPGYNVKAEFSSRSHLRGIVSMARAMDPDSAGSQFFIVTKDSTFLDREYTVFGVVAEGMDVADKIVSLDRDQNDCPLENATMVKVSISE

SEQ ID NO: 155219 - protein, 155 aa, Unknown
  Bacterial polypetide isolated from the Sargasso Sea
MTKTVIAVVISTSLGDISLGLDQEKAPGTVENFINLVESGYYDETIFHRVIDGFMVQGGGLTADMRTKPSGTQPIQNEANNGLPNDRGTIAMARTGDPHSATSQFFINHKDNSFLNHSSETMRGWGYAVFGKVTDGMDVVDAIAEVDTGNFQQYA

SEQ ID NO: 155220 - protein, 178 aa, Unknown
  Bacterial polypetide isolated from the Sargasso Sea
MSCGKSKKEEPVTIEQENQNIDQPQENEPENPKREVGVITTEFGDLIVEFFEDSAPKHVESFKLHAENGFYDGTIFHRVIPGFMIQGGDPNTKGENKASYGTGGHAAKYYGIGNEDQPQTWSLPAEFNDISHKRGILSMARSSDPNSGGSQFFICAADAPHLNGQYTVFGQVIQGEQI

SEQ ID NO: 155221 - protein, 167 aa, Unknown
  Bacterial polypetide isolated from the Sargasso Sea
MTEVIIKTSLGDINLELNNEKAPITVENFISIAESGYYEGTIFHRVINGFMIQGGGLTADMSNKSSGTSSIQNEANNGLSNDRGTIAMARTMDPHSATSQFFINHKDNGFLNHTGETSQGWGYAVFGVVTDGMDVVDQIAEVATGSSGAYQDVPQEVITIESVVISE

SEQ ID NO: 155222 - protein, 75 aa, Unknown
  Bacterial polypetide isolated from the Sargasso Sea
HDGPGVLSMANAGPGTNGSQFFITHEAQPHLDGKHTVFGKVISGMDVVNNINQGDVIEKMLILQRRDHEYKVETL

SEQ ID NO: 155223 - protein, 73 aa, Unknown
  Bacterial polypetide isolated from the Sargasso Sea
MLTSVGELGFGYKGSSFHRIIPGFVMQGGDVTSNARGDGQLSVYGPTFEDENFLVKHDSLGIIQQHSHIPNTH

SEQ ID NO: 155224 - protein, 140 aa, Unknown
  Bacterial polypetide isolated from the Sargasso Sea
NFKTIASSGYYEGTIFHRVINVFMIQGGGLTADMSNKSSGTGPIQNEASNGLSNDRGTIAMARTMDPHSATSQFFINHKDNAFLNHTGETSQGWGYAVFGIVTEGMDVVDQIAEVATGSSGAYQDVPEEVITIESVTISE

SEQ ID NO: 155225 - protein, 153 aa, Unknown
  Bacterial polypetide isolated from the Sargasso Sea
TNHGNISFNLLPELAPETVRSFVKLASDGFYDGTLFHRVIPGFMIQGGDPNTKDPNMKSQWGMGGPGFNVKAEFSTRSHLRGIVSMARAQDPDSAGSQFFIVTKDSTFLDREYTVFGEVVEGMDVADKIVSLDRDGNDCPLEDAKMLKVSISE

SEQ ID NO: 155226 - protein, 102 aa, Unknown
  Bacterial polypetide isolated from the Sargasso Sea
MQTSQGEIHIELFEDEAPNTVANMIELIQQGFYDGLVFHRVINDFMIQGGCPHGKGTGGPGYRFRDECHPDRRHDGPGVLSMANAGPNTNGSQFFITHSAQP

SEQ ID NO: 155227 - protein, 167 aa, Unknown
  Bacterial polypetide isolated from the Sargasso Sea
MTQVTIETSLGDIKLELNDEKAPITVENFKTIANSGYYEGTIFHRVINGFMIQGGGLTSDMNNKSSGTGPIQNEANNGLSNDRGTIAMARTMDPHSATSQFFINHKDNGFLNHTGETSQGWGYAVFGKVTEGMEVVDKIADVPTGSSGAYQDVPEEVITIESITISE

SEQ ID NO: 155228 - protein, 162 aa, Unknown
  Bacterial polypetide isolated from the Sargasso Sea
IPTQKAKLSLSLMGEKAPITVENFKNIVKSGYYEGTVFHRVINGFMIQGGGLTADMIEKPSGTAPIQNEANNGLSNERGTIAMARTSDPHSATSQFFINHKDNSFLNHTGENSQGWGYAVFGAVTEGMDIVDQIADVATMSYKGYADVPIYDITIESVTIIE

SEQ ID NO: 155229 - protein, 141 aa, Unknown
  Bacterial polypetide isolated from the Sargasso Sea
MSALSAIIQTSKGDIHLNLFNEEAPQTVANFVNLSERGYYDNLNFHRVIENFMIQGGCPEGSGMGGPGYQFDDECTETRLHNKAGILSMANSGPGTNGSQFFITHVETPWLDQKHTVFGEVKSDADQAVVNLIEQNDTIVT

SEQ ID NO: 155230 - protein, 118 aa, Unknown
  Bacterial polypetide isolated from the Sargasso Sea
NNIIFHRVIKDFMIQGGDPSGTGHGEMGKYPGYEFGDELNNPMPYEKGILAMANRGPNTNGSQFFIMHTDYPLPYQYTIFGKVTEGLDVIDQIAMIETDSSDKPLNDVIINSITIKNN

SEQ ID NO: 155231 - protein, 140 aa, Unknown
  Bacterial polypetide isolated from the Sargasso Sea
NFEQYVKEGHYDGTIFHRVIGNFMIQGGGFEPGMKQRPTRAPIKNEANNGVANKVGTIAMARTMEPHSASAQFFINVADNAFLNHSAPTVQGWGYAVFGEVVEGMDVVEKIKGVATTMKSGHQDVPVDDVIIEKAEVVAE

SEQ ID NO: 155232 - protein, 201 aa, Unknown
  Bacterial polypetide isolated from the Sargasso Sea
HITTFIAISIFIVGCGSKEKGKESIMDKDNAVISTQFGDIVLEFFDDIAPKHVESFKLHAQNGYYNGTTFHRVIPGFMIQGGDPLTKSDDRSRHGTGGNAAKYFGIGTESDESTWDLPAEFNPTPHTRGILSMARSQNPDSGGSQFFICVADASFLDNQYTVFGKVVSGMDVVDAIVSAPRDARDNPNDRIEMKVRLEDKK

SEQ ID NO: 155233 - protein, 108 aa, Unknown
  Bacterial polypetide isolated from the Sargasso Sea
MPLVFFDISIGGKYAGRIKMRLRSDVVPKTAENFRCLCTGEKGLTAANGRPLRYKDAPFHRIIPKFMCQVRTARVIRGVRSSHRHPPVNLTPLPRVPSTRIAPRARAA

SEQ ID NO: 155234 - protein, 99 aa, Unknown
  Bacterial polypetide isolated from the Sargasso Sea
MHPPGEPPPLSPHASRPPPRRHTHACFAAQGGDFTAGNGTGGESIYGKTFEDENFKLYHNAPGVLSMANSGKNTNGSQVGGRACMRARACLHACCLSRC

SEQ ID NO: 155235 - protein, 148 aa, Unknown
  Bacterial polypetide isolated from the Sargasso Sea
MQTSQGEIQIELFEDEAPNTVANMIELSEKGFYDGLVFHRVINDFMIQGGCPHGKGTGGPGYRFRDECHPDRRHDSPGVLSMANAGPNTNGSQFFITHSAQPHLDGKHTVFGRVLEGLDVVNRISQGDEIQSVTVLNKREHEYSVVKL

SEQ ID NO: 155236 - protein, 169 aa, Unknown
  Bacterial polypetide isolated from the Sargasso Sea
MDASENYPQIEIVTTSGTIVVELDRNRAPKTVENFLNYVQSEAYVGTIFHRVIPGFVIQTGGYDVNLNEIDTLPEIINESGNGLKNQRMSLGMARTNEPHSGSSQFYINLNDNFSLDPMPTRWGYAVFGDVIDGFSVVDDIASNATQTTKGFQDVPVAPIIILEVNRID

SEQ ID NO: 155237 - protein, 125 aa, Unknown
  Bacterial polypetide isolated from the Sargasso Sea
FHRVIDGFMVQGGGLTADMRTKHSGSQPIQNEANNGLPNDRGTIAMARTGDPHSATSQFFINHKDNSFLNHSSETMRGWGYAVFGKVTDGMDVVDAIAVVDTGNFQQYADVPVEPIMIQSISVME

SEQ ID NO: 155238 - protein, 187 aa, Unknown
  Bacterial polypetide isolated from the Sargasso Sea
MLLVPTAIRKIIFFITTFVFFSTTSSAGALVEGLYAKMQTSKGEIVLRLFYKRAPLTVANFVGLAEGSKEWKDPVTGKTRKTRYYDGLSFHRVINDFMIQGGDPLGTGTGGPGYTFQDEFHPDLKHSKAGILSMANAGKNTNGSQFFITHVSTPHLDKKHSVFGEVVDGMKVVNSIVKGDIINTVTI

SEQ ID NO: 155239 - protein, 204 aa, Unknown
  Bacterial polypetide isolated from the Sargasso Sea
MIKHITTFLAISIFIAGCGSKQKSKESIMDKDNAVISTKFGDIVLEFFDDIAPKHVESFKLHAQNGYYNGTTFHRVIPGFMIQGGDPLTKSDDRSRHGTGGNAAKYFGIGTESDESTWDLPAEFSSTTHERGILSMARSQNPDSGGSQFFICVADARFLDNQYTVFGKVVSGMDAVDAIVSAPRDARDNPKDRIEMKVRLEDKK

SEQ ID NO: 155240 - protein, 190 aa, Unknown
  Bacterial polypetide isolated from the Sargasso Sea
MVSQLVAPSTVDAAAVDAASATSTATTASVVAKTASAVAAWSSFELDPDDPNPTLFAMAPDTNQADASALGGPLDAPDTQITASGLKITELQVGEGAEAASGQTVSVHYRGTLENGKQFDASYDRGTPFNFPLGAGRVIKGWDEGVVGMKVGGKRKLVIPPDLAYGSRGAGGVIPPNATLVFEVELLDMK

SEQ ID NO: 155241 - protein, 171 aa, Unknown
  Bacterial polypetide isolated from the Sargasso Sea
MTKTVIAVVISTSLGDISLELDKEKAPDTVENFINLVESGYYDETIFHRVIDGFMVQGGGLTADMRTKPSGTQPIQNEANNGLPNDRGTIAMARTGDPHSATSQFFINHKDNSFLNHSSETMRGWGYAVFGKVTDGMDVVDAIAVVDTGNFQQYADVPVEPIMIQSISVME

SEQ ID NO: 155242 - protein, 285 aa, Unknown
  Bacterial polypetide isolated from the Sargasso Sea
DEIHPDLKHSGPGILSMANAGPNTNGSQFFITHKATPWLDGKHSVFGKVIRGMETVNKIQKGDLIQTVSIIRRGKEAKGFDPSKIEAAQKAKQKSLAIKQKKDLPPITGESDPTKVPGKNQPLAEEVSLELMVIAYEGVQTSLPALYYDKSGAKKVAEQLAELARRKNSNFSRLTDQFSDLKQQKKIPMLQADTPNLMPFLKAGLSLKEGQISDPVDSPFGFIIFHRVPLDVITASHILISFKGASRSEQNRSRDEAKKLAGELAEKAQKGEDFANLARMNSDGP

SEQ ID NO: 155243 - protein, 157 aa, Unknown
  Bacterial polypetide isolated from the Sargasso Sea
MHTTHGDVTLELYYKHAPKTCENFFELARRGYYDGTVFHRVIADFMIQGGDPTGTGRGGESAFGGKFEDEISKGLRHVGAGILSMANSGPNTNKSQFFITLAATPWLDGKHAIFGRVENGMHAVRALGAVKVDKNDKPLKEVKILRVTCDDRGFSWY

SEQ ID NO: 155244 - protein, 182 aa, Unknown
  Bacterial polypetide isolated from the Sargasso Sea
MEPPPGNGEVTTRCFFDVGVNGKARGRIVFGLFGKHAPRTVENFRALCEGETGESPRSGKRLTYEGSCFHRIVKGFVCQGGDFTSQNGRGGESIYGEEFEDEAFGMSHDAAGVLSMANHGPNTNGSQFFITTGPAPSLDDAHVVFGRVLEGMDVVEAIDAVGSDTGQPRGQACITKCGELKS

SEQ ID NO: 155245 - protein, 196 aa, Unknown
  Bacterial polypetide isolated from the Sargasso Sea
MTIEQKNQNIDQPQANEPENPKREVGVIITEFGDLIVEFFEDSAPKHVESFKLHAKNGFYDGTIFHRVIPGFMIQGGDPNTKGENKASYGTGGHAAKYYGIGNEDQPQTWSLPAEFNDISHKRGILSMARSSDPNSGGSQFFICAADAPHLNGQYTVFGQVVQGEQIIDQVVNLPRDARDNPNRRVTMKVKIEKRD

SEQ ID NO: 155246 - protein, 239 aa, Unknown
  Bacterial polypetide isolated from the Sargasso Sea
MVLGPLPALANEGLIVETLQKGKGDLATANQQISVHYEGKLTDGTVFDASRPRGQPFSFILGKGQVIKGWDLGIEGMAIGEIRRLTIPPEMGYGTTGAGGVIPPNATLIFEVELLAVSSPLTLGQLNSDELLDAQAQGAVIIDIRREEEWQKTGVIDGAKTITAFTKNGRLHQDFQEKFLSAVPSLKAPIVLYCRTGNRTTKLGNALVNQLGYSNLSHLRDGITGWFKAGLKSVPYNRQ

SEQ ID NO: 155247 - protein, 167 aa, Unknown
  Bacterial polypetide isolated from the Sargasso Sea
MLQAIIKTSEGEIKLELNNEKAPITVENFKTIANSGYYEGTIFHRVINGFMVQGGGLTADMNNKSSGTAPIQNEANNGLSNDRGTIAMARTMDPHSATSQFFINHKDNGFLNHTGENSQGWGYAVFGAVTEGMDIVDQIADVATGSSGGHQDVPVDVITIESVTISE

SEQ ID NO: 155248 - protein, 160 aa, Unknown
  Bacterial polypetide isolated from the Sargasso Sea
MTSVNIETNHGNISFDLLPDLAPETVRNFVKLAKEGFYDGTLFHRVIPGFMIQGGDPNTKDPNMKSQWGMGGPGYNVKAEFSSRSHLRGIVSMARAMDPDSAGSQFFIVTKDSTFLDREYTVFGVVTEGMDVADKIVSLDRDNNDCPLQDAKMAKISISE

SEQ ID NO: 155249 - protein, 133 aa, Unknown
  Bacterial polypetide isolated from the Sargasso Sea
MTSVKIETNHGNISFNLLPELAPETVRSFVKLASDGFYDGTLFHRVIPGFMIQGGDPNTKDPNMKSQWGMGGPGFNVKAEFSSRSHLRGIVSMARAMDPDSAGSQFFIVTKDSTFLDREYTVFWRSYRRNGCC

SEQ ID NO: 155250 - protein, 112 aa, Unknown
  Bacterial polypetide isolated from the Sargasso Sea
MTSVTIETNHGNISFNLLPELAPETVRSFVKLASDGFYDGTLFHRVIPGFMIQGGDPNTKDPNMKSQWGMGGPGFNVKAEFSSRSHLRGIVSMARAQDPDSAGSQFFIVTKD

SEQ ID NO: 155251 - protein, 157 aa, Unknown
  Bacterial polypetide isolated from the Sargasso Sea
MTKVTIETNFGNIEFNLLPELAPETVRNFVKLAESEFYNGSLFHRVIPGFMIQGGDPNTKNPELRAQWGIGGPGYTVNAEFSSRSHLRGIVSMARSTDPNSAGSQFFIVTTDSTFLDREYTVFGEVTQGMDVADKIVNLPRDQGDCPQEDAKMLKVT

SEQ ID NO: 155252 - protein, 167 aa, Unknown
  Bacterial polypetide isolated from the Sargasso Sea
MTQVTIKTSVGDIQLELNNEKAPITVENFKTIANSGYYEGTIFHRVINGFMVQGGGLTADMNNKSSGTSPIQNEANNGLSNDRGTIAMARTMDPHSATSQFFINHKDNGFLNHTGENSQGWGYAVFGAVTEGMEIVDQIAEVATGSSGGHQDVPVEVITIESVTISE

SEQ ID NO: 155253 - protein, 113 aa, Unknown
  Bacterial polypetide isolated from the Sargasso Sea
MSTVTTESGLKYEDIVEGTGAEAVAGKTVSVHYTGWLTDGQKFDSSKDRNDPFAFVLGGGMVIKGWDEGVQGMKVGGTRKLTIPPQLGYGVRGAGGVIPPNATLVFEVELLDV

SEQ ID NO: 155254 - protein, 167 aa, Unknown
  Bacterial polypetide isolated from the Sargasso Sea
MTLVTIQTSLGEIKLELNNEKAPLTVENFRTIASSGYYEGTIFHRVINGFMVQGGGLTADMNNKSSGTSPIQNEANNGLSNDRGTIAMARTGDPHSATSQFFINHKDNGFLNHTGENPQGWGYAVFGAVTEGMDVVDQIADVATGNVGPYQDVPLEVITIESVTISE

SEQ ID NO: 155255 - protein, 126 aa, Unknown
  Bacterial polypetide isolated from the Sargasso Sea
NMIELSEQGFYDGLVFHRVINDFMIQGGCPNGKGTGGPGYRFRDECHSDRRHDGPGVLSMANAGPNTNGSQFFITHSAQPHLDGKHTVFGRVLEGLDVVNRISQGDEIQSVTVLNKRDHEYSVVKL

SEQ ID NO: 155256 - protein, 163 aa, Unknown
  Bacterial polypetide isolated from the Sargasso Sea
MIKLSTNMGDITLELYTDKAPETVANFLKYTKEGKLNGTIFHRVIPNFMIQGGGHLPDMSQIDTFDPIINESSNNISNKKGTIAMARTSSPNSATSQFFINLRDNEFLDKSNAADGYGYCVFGQVTEGIEIVEQIGGVATGNNAGHSDVPIENVLINSVEVIE

SEQ ID NO: 155257 - protein, 175 aa, Unknown
  Bacterial polypetide isolated from the Sargasso Sea
MANKINKEFTQVIIQTSEGEIKLELNNKKAPITVGNFKNIAKSGYYEGTVFHRVINGFMIQGGGLTADMNEKPSGTAPIQNEANNGLSNDRGTIAMARTSAPHSATSQFFINHKDNGFLNHTAENSDGWGYAVFGVVTEGMDIVDQIADAETMSYMGYADVPIYDITIESVTIIE

SEQ ID NO: 155258 - protein, 171 aa, Unknown
  Bacterial polypetide isolated from the Sargasso Sea
MENKMTQVTIKTSVGDIQLELNDEKAPITVENFKTIASSGYYEGTIFHRVINGFMIQGGGLTADMNNKSSGTGPIQNEANNGLPNDRGTIAMARTMDPHSATSQFFINHKDNAFLNHTGETSQGWGYAVFGMVTEGMDIVDQIAEVATGSSGAYQDVPEEVITIESVTISE

SEQ ID NO: 155259 - protein, 168 aa, Unknown
  Bacterial polypetide isolated from the Sargasso Sea
MPKVKITTSYGEIVIELDKENAPITTENFLSYVESGFYNETIFHRVISGFMIQGGGHLTDMTPKDEKLDPIQNEANNGLKNNRGTIAMARTANPHSASSQFFINHADNAFLNFRTNQVDEGWGYAVFGQVVEGMEVVDKIAAVETTSMGPYQDVPVEVITVLNTELVE

SEQ ID NO: 155260 - protein, 171 aa, Unknown
  Bacterial polypetide isolated from the Sargasso Sea
MTKTVIAVVISTSLGDISLELDREKAPGTVENFINLVESGYYDETIFHRVIDGFMVQGGGLTADMRTKPSGTQPIQNEANNGLANDRGTIAMARTNDPHSATSQFFINHKDNSFLNHSSETMRGWGYAVFGKVTDGMDVVDAIAMVDTGNFQQYSDVPVEPIMIQSISVME

SEQ ID NO: 155261 - protein, 181 aa, Unknown
  Bacterial polypetide isolated from the Sargasso Sea
MGLISLTGCSQNKEIKVITFETTLGPIVIELFEEEAPITSKNFLEYAESGFFNGTLFHRVIPGFVIQGGGMESGMVDKRGKDPIQNEANNGVKNLKWTLSMARTNEPHSASSQFFINLVNNSSLDHTEETIQGWGYAVFGEVVDGFETVEAIAAVATGNSGFHQDVPIEEISILDTKVTTE

SEQ ID NO: 155262 - protein, 149 aa, Unknown
  Bacterial polypetide isolated from the Sargasso Sea
MEKTMTQVIIKTSVGDIQLELNDEKAPITVENFKAIAKSGYYEGTIFHRVINGFMVQGGGLTADMNNKSSGTSPIQNEANNGLSNDRGTIAMARTMDPHSATSQFFINHKDNGFLNHTGENSQGWGYAVFGSVTEGMDIVDSIADVPTG

SEQ ID NO: 155263 - protein, 160 aa, Unknown
  Bacterial polypetide isolated from the Sargasso Sea
MTSVNIETNHGNISFDLLPELAPETVRNFVKLAKEGFYDGTLFHRVIPGFMIQGGDPNTKDPNMKSQWGMGGPGYNVKAEFSSRSHLRGIVSMARAMDPDSAGSQFFIVTKDSTFLDREYTVFGEVTEGMDVADKIVSLDKDSNDCPLQDAKMAKVSISE

SEQ ID NO: 155264 - protein, 189 aa, Unknown
  Bacterial polypetide isolated from the Sargasso Sea
MKVITEETTTTKGETVSEKTYNQPHEMNIDTSKSYSATIKTNFGEMKIEFFTEDAPVTVNNFVTLARDGYYDNVIFHRVISGFMIQGGDPSGTGHGDYGKYPGYEFEDELNNQKPYEKGIMAMANRGPNTNGSQFFIMHVDYPLPYSYTIFGQVTEGFEVIDSIAAVQTDAADKPLEDVVIESVEISEN

SEQ ID NO: 155265 - protein, 173 aa, Unknown
  Bacterial polypetide isolated from the Sargasso Sea
MTIRIDASENYPQIEIVTTSGTIVVELDRNRAPKTVENFLNYVESGAYIGTIFHRVIPGFVIQTGGYDVNLDEIETLPEIINESGNGLKNQRMSLGMARTNEPHSASSQFYINLNDNFSLDPMPTRWGYAVFGDVIDGFSVVDDIASNATQSTKGFQDVPVAPIIILEVKRID

SEQ ID NO: 155266 - protein, 163 aa, Unknown
  Bacterial polypetide isolated from the Sargasso Sea
MTINEQAKYIATIETSLGTLVIDLYADIAPKTVNNFVNLSNDGYYDDIIFHRVIKGFMIQGGDPSGTGHGEMGKYPGYEFEDELDYPMNYAKGIVAMANRGPNTNGSQFFIMHVDYPLPYQYTIFGKVSEGLDIVDSIANVQTGDNDKPVDDVVIKSVKITEK

SEQ ID NO: 155267 - protein, 160 aa, Unknown
  Bacterial polypetide isolated from the Sargasso Sea
MTSVNIETNHGNISFDLLPDLAPETVRNFVKLAKEGFYDGTLFHRVIPGFMIQGGDPNTKDPNMKSQWGMGGPGYNVKAEFSSRSHLRGIVSMARAMDPDSAGSQFFIVTKDSTFLDREYTVFGVVTEGMDVADKIVSLDRDNNDCPLEDAKMVKVSISE

SEQ ID NO: 155268 - protein, 169 aa, Unknown
  Bacterial polypetide isolated from the Sargasso Sea
MDASENYPQIEIVTTSGTIVVELDRNRAPKTVENFLNYVQSGAYVGTIFHRVIPGFVIQTGGYDVNLNEIDTLPEIINESGNGLKNQRMSLGMARTNEPHSGSSQFYINLNDNFSLDPMPTRWGYAVFGDVIDGFSVVDDIASNATQTTKGFQDVPVAPIIILEVNRID

SEQ ID NO: 155269 - protein, 145 aa, Unknown
  Bacterial polypetide isolated from the Sargasso Sea
PVTVENFINLVESGYYNETIFHRVMNGFMVQGGGLTADMRTKPSGTQPIQNEANNGLSNDRGTIAMARTNDPHSATSQFFINHKDNDFLNHSSETMRGWGYAVFGKVTDGMDVVDAIADVATGNFQQYADVPVEPIMIQSVSVME

SEQ ID NO: 155270 - protein, 167 aa, Unknown
  Bacterial polypetide isolated from the Sargasso Sea
MPIATISTSLGDIELELDVQSAPITTKNFIDLANAGYYENTIFHRVIEGFMIQGGGLDRDMNNKPSGSSSITNEANNGLKNDRGTVAMARTNDPHSATSQFFINHKDNEFLNFTSETPQGWGYAVFGNVIKGMDIVDLIAEVNTTTINQYQDVPLDPITIKSVSIDE

SEQ ID NO: 155271 - protein, 143 aa, Unknown
  Bacterial polypetide isolated from the Sargasso Sea
MGKVKIELYADKTPKTVQNFIDLSNSGFYDGIIFHRVIPGFMAQTGDPDGTGSGGPGYTFEDEFHPSLSHDSAGILSMANRGPDTNGSQFFITYGPQPHLDNMHSVFGKVVEGLELIEAIPPRDPSMINDPSVKMVGIEITEN

SEQ ID NO: 155272 - protein, 140 aa, Unknown
  Bacterial polypetide isolated from the Sargasso Sea
FLSYVESGFYNETVFHRVISGFMIQGGGHLADMTPKDEKLDPIQNEANNGLKNNRGTIAMARTANPHSASSQFFINHADNAFLNFRTNQVDEGWGYAVFGQVIEGMEVVDKIADVETGSVGPYQDVPVEAITVLKTEVID

SEQ ID NO: 155273 - protein, 115 aa, Unknown
  Bacterial polypetide isolated from the Sargasso Sea
MLNAEIVTEKGTISVDLFSEQTPITVANFVNLASRGFYDNLNFHRVIQDFMIQGGCPSGNGMGGPGYRFADEFLPELRHDSPGKLSMANAGPGTNGSQFFITHVPTPHLDDAHTI

SEQ ID NO: 155274 - protein, 175 aa, Unknown
  Bacterial polypetide isolated from the Sargasso Sea
MSNNKVYESMPEMNIDITKNYTAVIKTSMGDMSVEFFTEDAPMTVNNFINLSRDGYYDDVIFHRVISGFMIQGGDPSGTGHGEMGKYPGYKFEDELNNQRAYEKGILAMANAGPDTNGSQFFIMHVDYPLPYQYTIFGIVTDGQDVIDKIASVQTGDGDRPVTDVVIKTVEVKEN

SEQ ID NO: 155275 - protein, 167 aa, Unknown
  Bacterial polypetide isolated from the Sargasso Sea
MTQVTIKTSVGDIQLELNDEKAPITVENFKAIAQSGYYEGTIFHRVINGFMVQGGGLTADMNNKSSGTAPIQNEANNGLSNDRGTVAMARTMDPHSATSQFFINHKDNGFLNHTGENSQGWGYAVFGAVTEGMDVVDQIADVATGTSGGYQDVPEDVITIESVTISE

SEQ ID NO: 155276 - protein, 203 aa, Unknown
  Bacterial polypetide isolated from the Sargasso Sea
MISCTSGENTEANSNEVITEETTTTKGETVSEKTYNQPHEMNIDTSKSYSATIKTNFGEMKIEFFTEDAPVTVNNFVTLAKDGYYDNVIFHRVISGFMIQGGDPSGTGHGDYGKYPGYEFEDELNNQKPYEKGIMAMANRGPNTNGSQFFIMHVDYPLPYSYTIFGQVTEGLDVIDSIAAVQTDAADKPLEDVVIESVEISES

SEQ ID NO: 155277 - protein, 148 aa, Unknown
  Bacterial polypetide isolated from the Sargasso Sea
MTEVIIKTSLGDINLELNNEKAPITVENFISIAESGYYEGTIFHRVINGFMIQGGGLTADMSNKSSGTSPIQNEANNGLSNDRGTIAMARTMDPHSATSQFFINHKDNGFLNHTGETSQGWGYAVFGVVTDGMDVVDQIAEVATGSSG

SEQ ID NO: 155278 - protein, 233 aa, Unknown
  Bacterial polypetide isolated from the Sargasso Sea
MKYVSTIIISVFIIAISCSNSEQQAEDVKLNDYMDTVSYSVGVDIGKSFRYQEMDINPKVLAKGLEDAFSEKEIELTEEEVQLTLGKFRQEFQQKQREVAQRKAQEAAAAEQSYLVASSQKEGVVSLPSGLQYKVVRPGDGPSPLKTDKVKVHYRGTLTDGTVFDSSYDRGQPISFNVSGVIKGWTEALLLMQVGAKWELTIPSGLGYGARGGGAKIPPNSTLLFEVELLEIE

SEQ ID NO: 155279 - protein, 185 aa, Unknown
  Bacterial polypetide isolated from the Sargasso Sea
MIKNITTFFAISIFIVGCGSKQKGKESIMDKDNAVISTQFGDIVLEFFDDIAPKHVESFKLHAQNGYYNGTTFHRVIPGFMIQGGDPLTKSDDRSRHGTGGNAAKYFGIGTESDESTWDLPAEFSPTPHERGILSMARSQNPDSGGSQFFICVADARFLDNQYTVFGESSKWGWMRVDAIVSAPR

SEQ ID NO: 155280 - protein, 175 aa, Unknown
  Bacterial polypetide isolated from the Sargasso Sea
MTSAGVNGSVGVVISTSLGDINLELDKEKAPGTVENFITLVESGYYDETIFHRVINGFMVQGGGLTADMRTKPSGTSPIQNEANNGLSNDRGTIAMARTNDPHSATSQFFINHKDNNFLNHSSETMRGWGYAVFGKVTDGMDVVDAIAVVDTGNFQQYADVPVESIIIQSISIME

SEQ ID NO: 155281 - protein, 167 aa, Unknown
  Bacterial polypetide isolated from the Sargasso Sea
MNPKVIIETSKGNIEIELYQTEAPETVKNFINYASSGFYNDTIFHRVIKGFMIQGGGLTEDMQNKETDKPIKNEATNGLSNKRGTIAMARTSEPHSASSQFFINHKDNDFLDFKDESPNGWGYCVFGIVVNGLDIVDEIANVETGNYGPYSDVPKDVIQIISVKISE

SEQ ID NO: 155282 - protein, 160 aa, Unknown
  Bacterial polypetide isolated from the Sargasso Sea
MTSVTIETNHGNISFNLLPELAPETVRSFVKLASDGFYDGTLFHRVIPGFMIQGGDPNTKNPNMKSQWGMGGPGFNVKGEFSTRSHLRGIVSMARAQDPDSAGSQFFIVTKDSTFLDREYTVFGEVTEGMDVADKIVSLDRDGNDCPLEDAKMLKVSISE

SEQ ID NO: 155283 - protein, 189 aa, Unknown
  Bacterial polypetide isolated from the Sargasso Sea
MLLSSCGDRTSNNEIEKIMEKTMTQVTIKTSVGDIQLELNNEKAPITVENFKTIANSGYYEGTVFHRVINGFMVQGGGLTADMNNKSSGTSPIQNEANNGLSNDRGTIAMARTMDPHSATSQFFINHKDNGFLNHTGENSQGWGYAVFGAVTEGMEIVDQIAEVATGSSGGHQDVPIEVITIESVTISE

SEQ ID NO: 155284 - protein, 175 aa, Unknown
  Bacterial polypetide isolated from the Sargasso Sea
MIKRYDSAPENHLEEGKKYSAIIKTSKGDMTLELFTDEVPVTTNNFIFLAREGFYDNGCFHRVIKEFMIQGGCPRGTGSGGPGYQFNDEPVSRPYTRGTLAMANAGPNTNGSQFFIVHGADVPLPPNYTIFGFLTAGDEVLETLATIAIDYTKPSGEQSTPAERLTINTVEIIES

SEQ ID NO: 155285 - protein, 193 aa, Unknown
  Bacterial polypetide isolated from the Sargasso Sea
MKWLMLALGSAALIANAPAFAQSGSQAAHPSVLFKTTEGDIRVELYPEKAPKTVANFLDYVKSGQYSGTIFHRVIPGFMIQGGGYTQSFAEKPTRAPIPLESRNGLKNTVGTLAMARTSDPNSATAQFFINTVDNAGLDYPNPDGNGYAVFGKVTSGMDVVKKIEGTPTTTRGPMSDVPQKPIVIESATVVSK

SEQ ID NO: 155286 - protein, 163 aa, Unknown
  Bacterial polypetide isolated from the Sargasso Sea
MTTSYGEIVIELDKENAPITTENFLSYVESGFYNETVFHRVISGFMIQGGGHLADMTPKDEKLDPIQNEANNGLKNNRGTIAMARTANPHSASSQFFINHADNAFLNFRTNQVDEGWGYAVFGQVIEGMEVVDKIADVETGSVGPYQDVPVEAITVLKTEVID

SEQ ID NO: 155287 - protein, 175 aa, Unknown
  Bacterial polypetide isolated from the Sargasso Sea
MNNNKVYDSMPEMNIDISKKYTAVIKTSMGDMSIEFFTEDAPMTVNNFINLSRDGYYDNVIFHRVISGFMIQGGDPSGTGHGEMGKYPGYKFEDELNNQRSYDKGILAMANAGPDTNGSQFFIMHVNYPLPYQYTIFGFVTDGLEVIDKIASVETGDGDKPVNDVVIETVEVKEN

SEQ ID NO: 155288 - protein, 173 aa, Unknown
  Bacterial polypetide isolated from the Sargasso Sea
MTIRIDASENYPQIEIVTTSGTIVVELDRNRAPKTVENFLNYVESGSYIGTIFHRVIPGFVIQTGGYDVNLDEIETLPEIINESGNGLKNQRMSLGMARTNEPHSASSQFYINLDDNFSLDPMPTRWGYAVFGDVIDGFSVVDDIASNATQSTKGFQDVPVAPIIILEVKRID

SEQ ID NO: 155289 - protein, 204 aa, Unknown
  Bacterial polypetide isolated from the Sargasso Sea
MIKHITTFLAISIFIAGCGSKEKGKESIMDKENAVISTQFGDIVVEFFDDIAPKHVESFKLHAQNGYYNGTTFHRVIPGFMIQGGDPLTKSDDRSRHGTGGNAAKYFGIGIESDESTWDLPAEFSPTPHERGILSMARSQNPDSGGSQFFICVADARFLDNQYTVFGKVVSGMDAVDAIVSAPRDARDNPNDRIEMKVRLEDKK

SEQ ID NO: 155290 - protein, 160 aa, Unknown
  Bacterial polypetide isolated from the Sargasso Sea
MTSVNIETNHGNISFNLLPELAPETVRSFVKLASDGFYDGTLFHRVIPGFMIQGGDPNTKDPNMKSQWGMGGPGFNVKAEFSTRSHLRGIVSMARAQDPDSAGSQFFIVTKDSTFLDREYTVFGEVTEGMDVADKIVSLDRDGNDCPLEDAKMLKVSISE

SEQ ID NO: 155291 - protein, 171 aa, Unknown
  Bacterial polypetide isolated from the Sargasso Sea
MTKTVIAVVISTSLGDITLELDKEKAPGTVENFINLVESGYYDETIFHRVIDGFMVQGGGLTADMRTKPSGTQPIQNEANNGLPNDRGTIAMARTGDPHSATSQFFINHKDNSFLNHSSETMRGWGYAVFGKVTDGMDVVDAIAVVDTGNFQQYADVPVEPIMIQSISVME

SEQ ID NO: 155292 - protein, 171 aa, Unknown
  Bacterial polypetide isolated from the Sargasso Sea
MEKTMTLVTIKTSVGEIKLELDDGKAPITVENFKNIANSGYYEGTIFHRVIKDFMVQGGGLTADMNNKSSGTAPIQNEANNGLSNDRGTIAMARTMDPHSATSQFFINHKDNGFLNHTGENSQGWGYAVFGAVTEGMDVVDQIAEVATGSSGGHQDVPVEVITIESVTISE

SEQ ID NO: 155293 - protein, 167 aa, Unknown
  Bacterial polypetide isolated from the Sargasso Sea
MTLVTIQTSLGEIKLALNDEKAPLTVENFKTIASSGYYEGTIFHSVINGFMVQGGGLTDDMNNKSSGTSPIQNEANNGLSNDRGTIAMARTGDPHSATSQFFINHKDNGFLNHTGENPQGWGYAVFGAVTEGMDVVDQIADVATGNVGPYQDVPLEVITIESVTISE

SEQ ID NO: 155294 - protein, 136 aa, Unknown
  Bacterial polypetide isolated from the Sargasso Sea
MTSVTIETNHGNISFNLLPELAPETVRSFVKLASDGFYDGTLFHRVIPGFMIQGGDPNTKDPNMKSQWGMGGPGFNVKAEFSTRSHLRGIVSMARAQDPDSAGSQFFIVTKDSTFLDREYTVFGEVVEGIGCCKIK

SEQ ID NO: 155295 - protein, 210 aa, Unknown
  Bacterial polypetide isolated from the Sargasso Sea
MRSITGLIFAGGLSLVLSACGGGDDELTPSIPTPDPTPPSLSADVCYLMSTTKGDLTLAIDLTNMPITGKNFKQYVDKSFYNGTLFHRTINNFVIQGGGFTTGLQSKPTSAPIKNEAAVGISNKRGTIAMARTTVPDSATSQFFINVLDNPQLDASASSYGYAVFGKVVEGMDVVDQISIVPTKTSNGFSDTPVTEILINSVTETSCPAA

SEQ ID NO: 155296 - protein, 173 aa, Unknown
  Bacterial polypetide isolated from the Sargasso Sea
MTISTDASENYPQIEIVTTSGTIVVELDRNRAPKTVENFLNYVQSGAYIGTIFHRVIPGFVIQAGGYDVNLNQIETLPEIINESGNGLKNQRMSLGMARDNPPHTASSQFYINLDDNFSLDPMPTRWGYAVFGDVIDGFSVVDEIASNATQSIKWFQDVPVAPIIILEVKRID

SEQ ID NO: 155297 - protein, 171 aa, Unknown; identical to SEQ ID NO: 155241
  Bacterial polypetide isolated from the Sargasso Sea

SEQ ID NO: 155298 - protein, 99 aa, Unknown
  Bacterial polypetide isolated from the Sargasso Sea
MDDPIVFLDIAVGARPVGRIEIALSSNVAPRTCENFRALCTGERASARTREPLHFKESSFHRVIPGFMAQGGDFTRHNGTGGESIYGEKFKDENFELKH

SEQ ID NO: 155299 - protein, 338 aa, Unknown
  Bacterial polypetide isolated from the Sargasso Sea
MKKLKFLLISSVFLINSCNNMKDYSNLTDGIYADIQTNKGDMILKLTYEETPLTVSNFIALAEGNHPLASEEFKNKPYYNGIKFHRVIDNFMIQGGDPTGTGSGGPGYSFEDEFVDSLKHDGAGILSMANSGPNTNGSQFFITHLETPWLDGKHSVFGKVTIGQDIVDKIEQNDLINKLEIIRIGETAKDFDAPTVFNDYLELKKKANEEKLEAQKEELKNLTKGMKSTDSGISYKITKKGTGGNAKDNDNVKVHYTLKLIDGSEVDSSLSRGEPIEFTLGVGQVIPGWDEGIKLLNKGASCTLVIPPNLAYGEAGAGNGVIPSNATLIFDVTLVDIN

SEQ ID NO: 155300 - protein, 150 aa, Unknown
  Bacterial polypetide isolated from the Sargasso Sea
NNEKAPITVENFISIAESGYYEGTIFHRVINGFMIQGGGLTSDMSNKSSGTSPIQNEANNGLSNDRGTIAMARTMDPHSATSQFFINHKDNGFLNHTGETSQGWGYAVFGVVTDGMDVVDQIAEVATGSSGAYQDVPQEVITIESVVISE

SEQ ID NO: 155301 - protein, 210 aa, Unknown
  Bacterial polypetide isolated from the Sargasso Sea
MSCGKPKKEAQVNATTEQSAQETKQPEQVDQDKQQKDVAIITTDFGDMVVEFFEGVAPKHVESFKLHAQNGYYNGTLFHRVIPGFMIQGGDPNTKTDNKASYGTGGHAAKYFGVGNESEPTTWNVPAEFNDINHSRGILSMARANDPNSGGSQFFICAADAPHLNGKYTVFGQLIKGDQVLEQIVNLPRDARDNPTRRVEMSVRLDKIDN

SEQ ID NO: 155302 - protein, 171 aa, Unknown
  Bacterial polypetide isolated from the Sargasso Sea
MTKTVIAVVISTSLGDITLELDKEKAPGTVENFINLVESGYYDETIFHRVIDGFMVQGGGLTADMRTKPSGTQPIQNEANNGLPNDRGTIAMARTNDPHSATSQFFINHKDNSFLNHSSETMRGWGYAVFGKVTDGMDVVDAIAVVDTGNFQQYADVPAEPIMIQSISVME

SEQ ID NO: 155303 - protein, 155 aa, Unknown
  Bacterial polypetide isolated from the Sargasso Sea
MNIDTNKSYSATIKTNFGEMKIQFFTEDAPVTVNNFVTLARDGYYDNVIFHRVISGFMIQGGDPSGTGHGDYGKYPGYEFEDELNNQKPYEKGIMAMANRGPNTNGSQFFIMHVDYPLPYSYTIFGQVTEGLDVIDSIAAVQTDSADKPLEDVVI

SEQ ID NO: 155304 - protein, 210 aa, Unknown
  Bacterial polypetide isolated from the Sargasso Sea
MRSITGFIFAGGLSLALSACGGGDDELTPSIPTPDPTPPSLSADVCYLMSTTKGDITLAIDLTNMPITGKNFKQYVDKSFYNGTLFHRTINNFVIQGGGFTTGLQSKPTSAPIKNEAAVGISNKRGTIAMARTTVPDSATSQFFINVLDNPQLDASASSYGYTVFGKVVEGMDVVDQISIVPTKTSNGFSDTPVNEILINSVTETNCPAA

SEQ ID NO: 155305 - protein, 113 aa, Unknown
  Bacterial polypetide isolated from the Sargasso Sea
MSVITTESGLKYEDLTEGTGDVAQAGQTVSVHYTGWLTDGQKFDSSKDRNDPFAFVLGGGMVIKGWDEGVQGMKVGGVRRLTIPPQLGYGPRGAGGVIPPNATLVFEVELLDI

SEQ ID NO: 155306 - protein, 163 aa, Unknown
  Bacterial polypetide isolated from the Sargasso Sea
MVELHTNHGVIKLELDAAKAPKTVENFLNYVKKGHYDGTVFHRVINGFMIQGGGFEPGLKQKPTDAPIDNEANNGLKNDNYTVAMARTNDPHSATAQFFINVNDNDFLNHSSPTPQGWGYAVFGKVVEGQDVVDKIKGVKTGNAGFHQDVPTDDVVIEKAVVV

SEQ ID NO: 155307 - protein, 207 aa, Unknown
  Bacterial polypetide isolated from the Sargasso Sea
MKKYLILFVLLLTFCGEDTVEEPIIDTTEVTKMAYDKTYTSPPEMTINEQAKYIATIETSLGTLVIDLYADIAPNTVNNFVNLSNDGYYDDVIFHRVIKGFMIQGGDPSGTGHGEMGKYPGYEFEDELDYPMNYAKGIVAMANRGPNTNGSQFFIMHVDYPLPYQYTIFGKVSEGLDTVDSIANVQTGDNDKPVDDVVIKSVKITEK

SEQ ID NO: 155308 - protein, 189 aa, Unknown
  Bacterial polypetide isolated from the Sargasso Sea
MLLSSCGDRTSNNEIEKIMEKTMTQVTIKTSVGDIQLELNNEKAPITVENFKTIANSGYYEGTIFHRVINGFMVQGGGLTADMNNKSSGTSPIQNEANNGLSNDRGTIAMARTMDPHSATSQFFINHKDNGFLNHTGENSQGWGYAVFGAVTEGMEIVDQIAEVATGSSGGHQDVPVEVITIESVTISE

SEQ ID NO: 155309 - protein, 89 aa, Unknown
  Bacterial polypetide isolated from the Sargasso Sea
MSKLVAGNWKMFGNKAMIADLKKIDQYCKEKTCEVAICPPFPLISAAHEQTKNIKIGAQNCHININGAHTGEVSAEMLIEVGAQLILVG

SEQ ID NO: 155310 - protein, 87 aa, Unknown
  Bacterial polypetide isolated from the Sargasso Sea
AIEPPELIGTGRAISTEKPALITNAVKAVSSAKNSTKLLCGAGIVSGQDVSKAKELGSKGILVASGIVKAKNWEKIISEFCKGLKSQ

SEQ ID NO: 155311 - protein, 104 aa, Unknown
  Bacterial polypetide isolated from the Sargasso Sea
NLTEGILYTQIKDSIPNLANHQNALIAYEPVWAIGTGLTPTLDEINQVHELIKNFDTKFRNFKILYGGSVKSTNSKEINDLNHVDGCLIGGASLKVDEFNIIIS

SEQ ID NO: 155312 - protein, 248 aa, Unknown
  Bacterial polypetide isolated from the Sargasso Sea
MTNNNIYFVANWKMFGSVKSVNLLNKVISYSKTKKHKAKIIYCPPYTLIKSFVDKTKNSNIEIGAQDCHSEQNYGPFTGAISSKMIKELGGKFVIIGHSETRSENDNKKINLKIKSAINEKLNVILCIGEKLIDKKKNKTKYILKKQLIEGLKNLTNLSKVIIAYEPVWSIGTGIIPTENDLKKNITFIRNTLKISKKFTKSKILYGGSVNAKNIKNLMRIDNIDGFLIGGASTNEKIFIDIIKKTIN

SEQ ID NO: 155313 - protein, 243 aa, Unknown
  Bacterial polypetide isolated from the Sargasso Sea
MYFIANWKMFGSVKSVNSLNKVISYSKTKKLKANIIYCPPYTLIKSFVDKTRKSNIKIGAQDCHTQINYGPFTGAISSKMIKDLGGEFVIIGHSETRAENDNKKINLKIKSALNEKLNVILCIGEKLIDKRKNKTKYVLKKQLLEGLKNLKNLNKVIIAYEPVWSIGTGIIPSENDLKKNIRFIRNTLKISKKFTKSKILYGGSVNPKNIKNLMRIDNIDGFLVGGASTNEKIFIDIMKKSNN

SEQ ID NO: 155314 - protein, 97 aa, Unknown
  Bacterial polypetide isolated from the Sargasso Sea
KRNFNTKNIIIAYEPVWSIGTGRIPKNSDIEKNLKFIKKEFKKIVRKKYPPTVLYGGSVNSKNIRNFSSNSEIDGFLIGGASQSSKKFIDIIKNYYK

SEQ ID NO: 155315 - protein, 144 aa, Unknown
  Bacterial polypetide isolated from the Sargasso Sea
RNDKIINKKISSALKNNLKVIFCIGETILQKRKKMTKKILLNQLSKGLHKIKKKENILIAYEPVWSIGTGLVPKSEDLNHVISFIKIFLRNKMKFKNPKVLYGGSVNPQNISPLRKVLNLDGFLVGGSSQNSKKFIDIIKKTFI

SEQ ID NO: 155316 - protein, 99 aa, Unknown
  Bacterial polypetide isolated from the Sargasso Sea
QLEVIKKESLDTVIIAYEPIWAIGTGQNAETSYINEIHQFIKQEVKIKLKSSNDIQTIYGGSVNIENYKEIYSSEHVDGLLIGGASLDHNIFSTIYNLA

SEQ ID NO: 155317 - protein, 107 aa, Unknown
  Bacterial polypetide isolated from the Sargasso Sea
MIKLDNFSSFFVANWKLNGNFQFIDQFMSEISLPQDKSKCVVICPTSVHLDYMSKMKTRFYLGAQNVSQHEDGSFTGEISAASLSDLNINFCIVGHSERRQFFFEKE

SEQ ID NO: 155318 - protein, 79 aa, Unknown
  Bacterial polypetide isolated from the Sargasso Sea
IAYEPIWSIGTGLIPEINDIQLAIDSIRSKFHKPIKVLYGGSVNSSNASSISDKTDIDGLLVGGASLNPKEFAKIAQLC

SEQ ID NO: 155319 - protein, 309 aa, Unknown
  Bacterial polypetide isolated from the Sargasso Sea
SVFEERVAQLEGGRGAVATSSGHAAQFIAAATLMEAGDEFIASRNLYGGSVTQFGVSFPKLGWKCNFVDPTDPENFEKAMNDKVKFIFCEGVANPGGIILDLEKIADIAHKHGVLLIVDNTLASPYLLRPFEWGADLVVHSTTKFIGGHGNTMGGILIESGKIDWHKNDKYPGMSKPDQAYHGLTFAETFGDFGFTMKARMVGLRDYGSTLSPQSAWNLLQGVETLPLRMERHCSNAQTVAEWLEGHSKVSWVSYPGLKSNKFYGLANKYLPRGKGAVFTFGVKGGYDAGVKLIDSVDLHSNLANIGDT

SEQ ID NO: 155320 - protein, 181 aa, Unknown
  Bacterial polypetide isolated from the Sargasso Sea
LSFRTKLRTLTGAISSKMIKDLGGKCVIIGHSETRAENDNKKINLKIKSALNEKLNVILCIGEKLIDKKKNKTKYVLKKQLLEGLKNLKNLNKVIIAYEPVWSIGTGIIPSENDLKKNIRFIRNTLKISKKFTKSKILYGGSVNPENIKNLMRIDNIDGFLIGGASTNEKIFIDIMKKSIN

SEQ ID NO: 155321 - protein, 245 aa, Unknown
  Bacterial polypetide isolated from the Sargasso Sea
MYFVANWKMYGNLSSINSIKSVKIFNQSKKLKNIKIIYCPPFTLLRPLVKKLKNSKISVGAQNCHHNSDFGPFTGSVNAKMVKSVGCKYIILGHSENRHNGETDKIINLKIKSALKENLKIIFCIGETLREKRNRKTRIILRKQIMSGLKNITKLNNIIIAYEPIWSIGSGKIPKSKELNKAIEYIKSLTIKKNKLKNNKVLYGGSVNPKNIKNLSKIGSLDGFLIGGASQKSKNFIDIIKKTIN

SEQ ID NO: 155322 - protein, 290 aa, Unknown
  Bacterial polypetide isolated from the Sargasso Sea
FLAALGVLYLYGGSVNMISLFALIMTLGIIVDDAIVVGEDAVTHFERGENPLSAAEGGARRMLAPVVSSSLTTIAAFMPLLLIGGIIGSILRTIPIIVICVILASLVESFLVLPGHLRGTFARMGHYRPKGLRKKLDAGFARFREGIFRPMVSAGVRARWITVALAIAILTSTFGWVAGGRIAFNFFPVAEGPILFANVDFVSGTPESQVAQYLEEIEQAAWDTDAHFGGGLVRTAISRKGLGESGDWERRSSDNIGSVLVELIKPDERSVRNREFINEWRARIPKPQDS

SEQ ID NO: 155323 - protein, 245 aa, Unknown
  Bacterial polypetide isolated from the Sargasso Sea
MFFIANWKMFGDLKSVNSIKKVIKISKNKKYKKAQIIYCPPFTLIDKFLRLVKNTKIDIGAQNCHYSENPGPFTGSVNTDLIKSIGAKYVIIGHSENRASGDNNKTINLKIKSALKKKLKVIFCIGETLKERKNNRTNRILNSQITLGLKKIKKNNNIIFAYEPVWSIGTGVIPKSDSLKKQIFLIKKMINRIWKLKGPKVLYGGSVNSKNITDLKKINSINGFLIGGASQNSKNFIDIIKKTIN

SEQ ID NO: 155324 - protein, 72 aa, Unknown
  Bacterial polypetide isolated from the Sargasso Sea
IGTGKTCEAEDANKICSLIRNLIGFDDVIIQYGGSVKPNNIDEIMSMTDIDGVLVGGASLDPNSFARIANYQ

SEQ ID NO: 155325 - protein, 237 aa, Unknown
  Bacterial polypetide isolated from the Sargasso Sea
MFVANWKMNGSSIAVKEWLKIISSSENLNECIFCPPLLYLKEANEFISEKKLSLSLGAQDIDPDINISLTGGISPSMLKDVGCKYSIIGHSERRNFYKEDSTLLIDKVSICLKEGIKVIFCIGESLEDRNSGQTKEILSQQLRALDGFSSKNLMVAYEPVWAIGSGIIPLLEDISETSDYLIDELISLGHKQEEITILYGGSVDASNAKEIYQLKAVSGLLIGGASLDGEQFLKIIG

SEQ ID NO: 155326 - protein, 140 aa, Unknown
  Bacterial polypetide isolated from the Sargasso Sea
YFEETNQNINKKINNLIESEIIPVICIGETLVQKEQGITNQILSTQIEQCIPVQSNYKNTIIAYEPIWAIGTGLTPSINDIQDVHAFIKSIDNKLNNFKVLYGGSVKSTNSKEIVNLKNVDGCLIGGASLNIGEFNTIIS

SEQ ID NO: 155327 - protein, 85 aa, Unknown
  Bacterial polypetide isolated from the Sargasso Sea
MNKILVAANWKMNGSKSFVSDFIRDIVTNYNQEHYHELLICPSFPYLDQVSKGLAKTDVKVGAQDIAQYENGAYTGEVSAEMLQT

SEQ ID NO: 155328 - protein, 158 aa, Unknown
  Bacterial polypetide isolated from the Sargasso Sea
MKRVKYTIANWKMNGLNGAVKVVNSIDRHIKNTRHKKSKVVICPPFTLLTNFINAKTVIDFGGQDCHHLNEGAFTGCISAQMLKSAGCKYVIIGHSERREYQKETSKELNLKIDIANKYKLKIIYCIGERLSEIKIRKKILNSQLSSLPKKISIKNLI

SEQ ID NO: 155329 - protein, 109 aa, Unknown
  Bacterial polypetide isolated from the Sargasso Sea
MKYNPDSTTFAGNWKMNGRQDDTLDIEKLIKLIREDDANIILFPPYTLISSFVNISKNSNLNIGGQDCHHEDSGAFTGSISASMLRDSGADFVIIGHSEVRAIHGEGPR

SEQ ID NO: 155330 - protein, 233 aa, Unknown
  Bacterial polypetide isolated from the Sargasso Sea
MFGSIKLVNSLNNVINYSKKNKQKAKIVYCPPYTLLKSFIDKTKNSNIEIGAQDCHINSDYGPHTGAISSKMIKDLGAKFVIIGHSETREENDNKKINLKIKSALNKKLKVIFCIGEKLIDKKKNKTNFVLKKQLLEGLKNLNKLNKVIIAYEPVWSIGTGIIPTENNLIKNIKFIKDTLKRAKKFSKSKVLYGGSVNPKNIKNLMRIDNIDGFLIGGASTNEKIFIDIMKKS

SEQ ID NO: 155331 - protein, 46 aa, Unknown
  Bacterial polypetide isolated from the Sargasso Sea
NKYKILYGGSVKPSNAKEITGLPNVDGALIGGASLKSEAFSKILED

SEQ ID NO: 155332 - protein, 82 aa, Unknown
  Bacterial polypetide isolated from the Sargasso Sea
MIELSHFSSFFIANWKLNGSFEFIDNFVNDLNIEKSTKNCISLCVPYVYLNYIKKIKGDFYLGAQDCSLFESGAYTGEISAK

SEQ ID NO: 155333 - protein, 164 aa, Unknown
  Bacterial polypetide isolated from the Sargasso Sea
SVNPKMLKSVGAKYVIIGHSENRQEGETDKLINIKIKCALKSGLKVIFCIGETLKEKKTKKTKQILNRQIRTGLDKIKSKNDIIIAYEPVWSIGSGLIPKSKELLETINFIRKKTRNCKILYGGSVNPKNISKLNTMSNVDGYMIGGASQDPKKLIDIIIKTYN

SEQ ID NO: 155334 - protein, 48 aa, Unknown
  Bacterial polypetide isolated from the Sargasso Sea
KSKVLYGGSVNSKNIKNLMRIDNIDGFLIGGASTNEKIFIDIMKKSIN

SEQ ID NO: 155335 - protein, 133 aa, Unknown
  Bacterial polypetide isolated from the Sargasso Sea
VQKKTDLCLINKIKPIVCIGEPLTIYKSKKTKVFVKKQINQIFKKSNNYQEVVLAYEPLWSIGTGLTPKLSEINDILGFLSKILENYSFKKINILYGGSVNLSNIKDILSLRNLNGVLVGSASTKASFIKHFK

SEQ ID NO: 155336 - protein, 56 aa, Unknown
  Bacterial polypetide isolated from the Sargasso Sea
LKISKKFTKSKILYGGSVNPKNIKNLLRIDNIDGFLVGGASTNEKIFIDIMKKSIN

SEQ ID NO: 155337 - protein, 211 aa, Unknown
  Bacterial polypetide isolated from the Sargasso Sea
MFGIPSSFKIIDKINDFVRLDKKHNQKYKVIIAPPFTLLQDYSKRYKYKKIILSAQNCYHKNSFGAFTGNISPYMVKKIGINYIIIGHSESRADGDNNKIIQEKIFLAIKNNLNIIYCIGENKKEKKDKKTLNVLKKQILSSIKKNYNLKKIIFAYEPVWSIGSGKVPSINDLNKTINFMKKFVKRKYDIKNEPKFLYGGSVDKKIISNFK

SEQ ID NO: 155338 - protein, 101 aa, Unknown
  Bacterial polypetide isolated from the Sargasso Sea
KLLSKQIKLGLNKIKNNKNIIIAYEPIWSIGSGLIPKKKELYETIKFIKKKAKNYKVLYGGSVNPKNINSLNLISNIDGYMIGGASQDPKKFIDIIKKTYN

SEQ ID NO: 155339 - protein, 76 aa, Unknown
  Bacterial polypetide isolated from the Sargasso Sea
PVWAIGTGLTPTLEEINKTHEFIKNYNSKFTNYKILYGGSVKANNAKEIVSLSNVDGALIGGASLKSDDFKKIIAD

SEQ ID NO: 155340 - protein, 242 aa, Unknown
  Bacterial polypetide isolated from the Sargasso Sea
MTWIGTSWKMNHDLPATKNYINSLIKNSKYLKNSKINFFVIPPHTSLMMFKNFKKKLPVMYGAQNMHWAEAGAYTGEISASMIKSCGCKIVELGHSERLKFFNENSNLINKKINLAIKHNLIPLICVGEKKLEKNLSRRKQVLKNQLDILFKKVINKKKLILIAYEPIWAIGKNNKAASIDYCNETMQYIRKIVSKKINKTKILYGGSVDEKNYKEFLKSDYIDGIFIGRAALNANNFIKIC

SEQ ID NO: 155341 - protein, 143 aa, Unknown
  Bacterial polypetide isolated from the Sargasso Sea
NRESGETDKLINIKIKAATKSGLKVIFCIGETLDQKRKKIAKKILSKQITLGLRKVNKRKNIIIAYEPVWSIGTGIIPKPDDLFSTINFIKKKVKNIKVLYGGSVNPKNINELKLIENIDGFLIGGASQDSKKFIDIIKKTYN

SEQ ID NO: 155342 - protein, 196 aa, Unknown
  Bacterial polypetide isolated from the Sargasso Sea
MSKLIIANFKMNGTKSSIQEWFNVFSEENNGPNKIIVALPSPFLADFAANNISVASQNVSSHNSGAFTSQVSAEILKDCNINYSIIGHSESREFLNETNEDIFDKYNQLIKHSIKPIICIGEPSKIREDNLFSAFITEQLELFKDVEDELIIAYEPIWAIGSGITPTIADINEVSELIKGLCDNVKVLYGGSVNKE

SEQ ID NO: 155343 - protein, 132 aa, Unknown
  Bacterial polypetide isolated from the Sargasso Sea
ALNEKLNVIFCIGEKLIDKKKNKTKYVLKKQLIEGLKDLKNLNKVIIAYEPVWSIGTGIIPNEIDLKKNISFIRNTLKISKKFTKSKILYGGSVNPKNIKNLIRIDNIDGFLIGGASTNEKIFIDIMKKSIN

SEQ ID NO: 155344 - protein, 242 aa, Unknown
  Bacterial polypetide isolated from the Sargasso Sea
YMYFVANWKMYGNLKSVNTLNKVIKFSKSKEIKKGRLIYCPPYTLLSLFFNKFKNCLIDIGAQNCHESDEFGSHTGFINSKMIKNIGANYVIIGHSENRKKGETDKLINLKIQSAIKAKLKIIFCIGETYTEKKSGKTKQILSKQIKLGLKSIKKKSNLFIAYEPVWSIGTGKVPKSNDLKQIVEFIKMKFKGKLPKILYGGSVNSQNIKDLKKINNLDGFLIGGASQNTKKFIDIVKKTYS

SEQ ID NO: 155345 - protein, 78 aa, Unknown
  Bacterial polypetide isolated from the Sargasso Sea
SGLNAEKDHIEETHGFIKKYINDHLEWDKLDIYPAVLYGGSVNLNNCEEIISSTNVDGLLIGGASLNSETFSKIYNLS

SEQ ID NO: 155346 - protein, 199 aa, Unknown
  Bacterial polypetide isolated from the Sargasso Sea
MIFIANWKMNGEKSHISGINKTIKFLKQSKNKKNQIIYCPPFTLISSVKDKVKNTKIKVGAQNLSQLNDYGAFTGSVNSKLIKSAGGEYVIVGHSEIRNQESDILINKKIHSALKEKLKVILCIGETYKEKKNNKTLSVLKRQITIALKNIKKINNIIFAYEPRWAIGTGKIPKSSELRKNFKDINNIINKLKKNQKRK

SEQ ID NO: 155347 - protein, 237 aa, Unknown
  Bacterial polypetide isolated from the Sargasso Sea
MKYFIGNWKMFGIPGSIKILDRINNYVKKDKPRSKNYKVIISPPYTLLENFAKSFKNKKISISAQNCFHKNNYGSHTGFVSPYMIKKLGVKHVIIGHSENREAGENNHILKEKVLASVKNNLNIIFCIGENKYEKRKKLTLNVLKNQIRKSLNKKYDFKKILIAYEPIWSIGSGKLPSENELSNIIINLKNFLKMNYNKKHNFRILYGGSVDSKSIHKFKKIKHLDGFLIGGASKSS

SEQ ID NO: 155348 - protein, 58 aa, Unknown
  Bacterial polypetide isolated from the Sargasso Sea
LSDNSAIPMVLYGGSVNQENAENFFKEEFVDGALIGGASLDGREFANIINIFNEINFK

SEQ ID NO: 155349 - protein, 54 aa, Unknown
  Bacterial polypetide isolated from the Sargasso Sea
NSLIPCVLYGGSVNEENVKNFLKSEFVMGALIGGASLDGSSFAKIAKSFNGSYR

SEQ ID NO: 155350 - protein, 104 aa, Unknown
  Bacterial polypetide isolated from the Sargasso Sea
NQILKRQIEKGLKSIKNKSKIIIAYEPVWSIGTGVIPKEADLNKTISFIKSRFIKKYPKILYGGSVNANNVTILKKIPSIDGFLIGGASQIPKKFIDIIKKTIN

SEQ ID NO: 155351 - protein, 70 aa, Unknown
  Bacterial polypetide isolated from the Sargasso Sea
TIHEFIKDVVQSASEKNLRPKVLYGGSVNKLNAPDFFVEKNIDGALIGGASLDANVFSDIIEIFSRHKEK

SEQ ID NO: 155352 - protein, 216 aa, Unknown
  Bacterial polypetide isolated from the Sargasso Sea
FKTNKKNKFRIIYCPPCTLIRPLSKRLKKTKIEVGAQNCHHSYDFGANTGQVNSRMLKNVGAKYVIIGHSENRQLGEDDKLINLKIKSALKTGLKIIFCIGETLREKRNKKTNQVLAKQIKNGLSSINNKSKILIAYEPVWSIGSGLIPKSEDLKKSIAFIKSKIGKKSSKILYGGSVNGNNVDKLKIVTGIDGFLVGGASQNPKKFIDIIKKTIN

SEQ ID NO: 155353 - protein, 71 aa, Unknown
  Bacterial polypetide isolated from the Sargasso Sea
QEVHKAIRRTLKELFGSPAEEIRIQYGGSVKPENAGALMAQKDIDGALIGGAGLAHESFAAIVRYQMESKG

SEQ ID NO: 155354 - protein, 124 aa, Unknown
  Bacterial polypetide isolated from the Sargasso Sea
MKENIVPVICIGETLEQKEKNLTEEILSTQIKDSIPDLANHQNTLIAYEPVWAIGTGLTPTLDEINQVHELIKNFDTRFNNFKVLYGGSVKSANSKEINDLNHVDGCLIGGASLKVDEFNIIIS

SEQ ID NO: 155355 - protein, 125 aa, Unknown
  Bacterial polypetide isolated from the Sargasso Sea
VGETLQQREEEKTLQVLARQLDAVYAAQPHLLAHSVVSYEPIWAIGTGQTATPQQAQQVHQFIRQHLAQYDVQAAEAVKIIYGGSVTAANCEALFAEADIDGALIGGASLKVADFSAICTMAKDS

SEQ ID NO: 155356 - protein, 125 aa, Unknown
  Bacterial polypetide isolated from the Sargasso Sea
MKRVKYTIANWKMNGSNGAAKVVKSIDKHIKKTRHKKSKVVICPPFTLLNNFINTKTGIDFGGQDCHHYNEGAFTGCISAQMLKSVGCKYVIIGHSERREYQKETSKELNLKIDIANKHNLKIIY

SEQ ID NO: 155357 - protein, 187 aa, Unknown
  Bacterial polypetide isolated from the Sargasso Sea
MSLRLIANWKLNGSIQFNDQWAEDFFKNFSSLNSESIGIAPAFIYIDHIRKLIGDSGINIGVQNICEEESGARTGEISASMIKDLGCKFSLIGHSERRIFFHESNKTISKKLNLANNNSVMPILCIGESAEENERNDTYDILKFQVEEALKDLFEQSALIIAYEPVWAIGSGKIPNPEEINSVHKMI

SEQ ID NO: 155358 - protein, 249 aa, Unknown
  Bacterial polypetide isolated from the Sargasso Sea
MKYFIGNWKMFGIPGSIKILDRINKYVKKDKARSKNYKVIISPPYTLLENFAKSFKNKKISISAQNCFHKNNYGSHTGFVSPYMIKKLGVKHVIIGHSENREAGENNHILKEKVLASVKNNLNIIFCIGENKYEKRKKLTLNVLKNQIRKSLDKKYDFKKILIAYEPIWSIGSGKLPSENELSNIIINLKNFLKMNFNKKHNFRILYGGSVDSKSIHKFKKIKHLDGFLIGGASKSSKKFIDIIKNFYK

SEQ ID NO: 155359 - protein, 168 aa, Unknown
  Bacterial polypetide isolated from the Sargasso Sea
SPMMLKSIGSKYVIIGHSENRSTGETDFQIKSKINSSIKSGLNVIFCIGESLQQRKKKLTNKTLKNQILKGLPKIKKLNKILIAYEPIWSIGTGVIPNLSELDKNITFIKNILKNNIKIKKPKVLYGGSVNSKNVKNLASIKNIDGFLVGGASQKANNFIDIVKKTII

SEQ ID NO: 155360 - protein, 55 aa, Unknown
  Bacterial polypetide isolated from the Sargasso Sea
MIRKLIGFDDVIIQYGGSVKPNNIDEIMSMSDIDGVLVGGASLDPNSFARIANYQ

SEQ ID NO: 155361 - protein, 61 aa, Unknown
  Bacterial polypetide isolated from the Sargasso Sea
MVKPREENKNDQTRDILKKQLEVVKDIELNNSLVIAYEPVWAIGTGNTPTPNNINEIHKFI

SEQ ID NO: 155362 - protein, 151 aa, Unknown
  Bacterial polypetide isolated from the Sargasso Sea
SENRKNGETDSIINKKIHSALNENLKIIFCIGEKLADKRKKNTLRVLRNQLNQGLKGVKKFDSLIIAYEPVWSIGTGIIPKKSELSKNITNIKKILSNFKNSKNIKLLYGGSVNPENSKELSRIKEINGFLIGGASLNLKKFIDIIKKSIN

SEQ ID NO: 155363 - protein, 60 aa, Unknown
  Bacterial polypetide isolated from the Sargasso Sea
LKNFLLKKIKIKNPRVLYGGSVNNKNIVDLKKINAIDGFLIGGASHKTNKFIDIIKKTFN

SEQ ID NO: 155364 - protein, 104 aa, Unknown
  Bacterial polypetide isolated from the Sargasso Sea
KKGATKDILYEQIKNSSPREELNDTIIIAYEPIWAIGTGLVPTLEEINNINLFLKKELNNCKVLYGGSVKRSNAQDIKDLDSVDGLLVGGSSLNSSEFIEILNA

SEQ ID NO: 155365 - protein, 120 aa, Unknown
  Bacterial polypetide isolated from the Sargasso Sea
MRQRKPLVVANWKMNGSLDLVQQMSDALSVLKQPLPDILICPPVIFLSYFPKHANYKLGAQNMSEQLVGAFTGEISADMLLTAGATHVIIGHSERRALYGELDAVISQKVKVAVDAGLTP

SEQ ID NO: 155366 - protein, 92 aa, Unknown
  Bacterial polypetide isolated from the Sargasso Sea
NLSKVIIAYEPVWSIGTGIIPSEKNLVKNIKFIKDTLKRSKKFLKSKVLYGGSVNQKNIKNLMRIDNIDGFLIGGASTNEKIFIDIMKKSII

SEQ ID NO: 155367 - protein, 111 aa, Unknown
  Bacterial polypetide isolated from the Sargasso Sea
MTCAEAKSYLEEFIPLIKNINEDRKVVIAPPFTAISTFSDHSDFDYLDISSQNIHWEEEGAFTAEISPRMLLEHGVSYAIVGHSEPRKYFSESDEQLIKEQFLLNLVDLHR

SEQ ID NO: 155368 - protein, 296 aa, Unknown
  Bacterial polypetide isolated from the Sargasso Sea
DLSDTSYVFQDSDHAAALFNLEQGGHIYSRISNPTVAVLEERIAALEGGAGAVATASGQSALFSTILTLMGQGNHIVSSASLYGGSVNLFKHTLPRFGIETTFVNPRKPEEFRQAICPETRLCFGEIIGNPGLEILDVPSVAEIAHAAGIPLMIDATFNTPYLCKPLELGADLVSHSVTKWMGGHGVALGGIVVEGGRFDWEKDGNFPTLTKPYDGYHGINFFEEFGPQAFSMRMRSEAMRDFGPAMSPQNAFYLIQGLETLPVRMEKHIRNTKLLLDFLQNSEEVSWVTHPSMPD

SEQ ID NO: 155369 - protein, 127 aa, Unknown
  Bacterial polypetide isolated from the Sargasso Sea
LNVIFCIGETIQEKRKGKTFSVLKKQILDTLERKDNINKIIFAYEPVWSIGTNKIPKISELSKIIKFIKNKVKKSLKKNHPKVLYGGSVNNKNIRLFRSIPDIDGFLIGGASQSSKKFIDIIKNYYK

SEQ ID NO: 155370 - protein, 249 aa, Unknown
  Bacterial polypetide isolated from the Sargasso Sea
MKYFIGNWKMFGIPSSFKIIERINSFLQKDKTNKRKYKAIIAPPFTLLQDFSKKCKNKKIIISAQNCYHKDLFGAHTGSISPFMIKKMGVKYIIIGHSENRASGETNKEIEEKIFFSLKNKFNIIFCIGESKQEKKNKKTLSVLKKQITSVIKKKYDLKRILFAYEPVWSIGSGKVPSPFELRRIAIIIKNFIKVKFSKNHQPKFLYGGSVDKKIINSLKSIEELDGFLVGGASKSSKNFIDIIKNFYK

SEQ ID NO: 155371 - protein, 219 aa, Unknown
  Bacterial polypetide isolated from the Sargasso Sea
MRYFIGNWKMFGVPKSISILNKVNSYYSKDKNRNKYRVIITPPYTLIESYSKYFKNKKISIGAQNCYQKEQFSSNTAAVSPYMLKSVGAKYTLVGHSDNRGEGDTDTMLKDKVRYALKNNLKVVFCIGENKTEKKNKKTLSVLKRQLTKVLEKKFNKNNIIVAYEPIWSIGTGKIPTADELKKTTIHIKKVLKGIFKKNSLAVLYGGSVDGSNVEMFKE

SEQ ID NO: 155372 - protein, 87 aa, Unknown
  Bacterial polypetide isolated from the Sargasso Sea
YEPVWAIGTGLSASSQQAQEIHKLIRTILRDNISYSDANNIRIIYGGSMNASVILGLLSEPDIDGGLVGGASLQGKQFAELINLAIQ

SEQ ID NO: 155373 - protein, 130 aa, Unknown
  Bacterial polypetide isolated from the Sargasso Sea
HSINLFGESIEQRNSGKYLDYIIKQVDSAPKGLRKDKVDEIVFAYEPIWAIEPGETASLLNIIEVVSEVKKFIKSKPFYNEEKIKFVYGGSVTPNNSEEILNSNIINGALVGGASLDVEQFVKIIESIEL

SEQ ID NO: 155374 - protein, 220 aa, Unknown
  Bacterial polypetide isolated from the Sargasso Sea
PCIFCPPTCYLEYARRLIDENGYQIKIGSQIVNHTFEHESLTGGISTTMLKDLSVEYVLVGHSEQRNFLKESNIVITKKIEKALDDEMSIIYCIGEDIDTKNKNETYLFLSEQLDVLDQLESTHQDKLKSITVAYEPIWAIGSGLNAEKDHIEETHKFIKKYINDHLGWSHLDIYPAVLYGGSVNLDNCEEIISANDVDGLLIGGASLNSETFYKIYNLS

SEQ ID NO: 155375 - protein, 109 aa, Unknown
  Bacterial polypetide isolated from the Sargasso Sea
EKRKKITKRVLAKQIKIGLQKVKRKERVLIAYEPVWSIGTGLIPKSGDLLKIIKFIREKTKKNKVLYGGSVNSKNISELKNVFNIDGFLIGGASQEAKKFIDIIKKTYS

SEQ ID NO: 155376 - protein, 138 aa, Unknown
  Bacterial polypetide isolated from the Sargasso Sea
MNPKFYKPETLSLHGGQLPDPVTGARAVPIYQTTSYVFENSDQAAALYNLEQGGHIYTRITNPTVAVLEERISALEGGSGAIATASGQSALFLTLMTLLDQGSHIVSSTCLYGGSVNLLKHTLPRFGIETQFCSSPGI

SEQ ID NO: 155377 - protein, 78 aa, Unknown
  Bacterial polypetide isolated from the Sargasso Sea
HWTGVVPNSFELDKNIYFIKNILKNKMRVKNPKVLYGGSVNSKNVKNLALIKNIDGFLIGGASQKANNFIDIVKKTII

SEQ ID NO: 155378 - protein, 248 aa, Unknown
  Bacterial polypetide isolated from the Sargasso Sea
LKYFVGNWKMFGNIADLKKIYQIHRFCSSKKFKTKNRVVICIPNTLLYLFSNKLRSTCISVGAQNCHHHEGYGPFTGSISASMLKKVGAKYIILGHSENRAEGDTNKMILKKIQTALKNNLKVIFCIGETLKEKLNGKTLTTLKKQLKSSIKSKFNEKNIIIAYEPVWSIGTGRTPKNHDIEKNLKFIKKEFRKITKKKYSPAVLYGGSVNRKNIRNFSSNREIDGFLIGGASQSSKKFIDIIKNYYK

SEQ ID NO: 155379 - protein, 89 aa, Unknown
  Bacterial polypetide isolated from the Sargasso Sea
FIAIEPPELIGTGRAISTEKPALITNAVKAVSSAKNSTKLLCGAGIVSGQDVSKAKELGSKGILVASGIVKAKNWEKIISEFCKGLKSQ

SEQ ID NO: 155380 - protein, 279 aa, Unknown
  Bacterial polypetide isolated from the Sargasso Sea
NASATISSGDGQTTLDGGTSSVNITEGGNDDVALAPPSTSTQMVVTAGAGSSGTATLAEGGTTSATITASNATATLASADGQTTLDGSTSNVNITEGGNDDVVIAPPSTSTQMGVTAGAGSSGSTTLGEGATTSATITASAATATISSADSQTTLDGGTSSVNITERADDDVAIAPPSTTTQLTVTAGAGSSGTTTFSEGSTTSATITNSKATATVSSADSQTTLDGSTSNVTITESSDDDVAIAPVSTTTQLTITAGAGSTGTATLSEGGTTSATITV

SEQ ID NO: 155381 - protein, 115 aa, Unknown
  Bacterial polypetide isolated from the Sargasso Sea
MGEPLKIYKSKKTKVFLKKQINKIFKKSNNYEEVVLAYEPLWSIGTGLTPKLSEIDDILGFLSKILENYSFKKINILYGGSVNLSNIKDILSLQNLNGVLVGSASTKSSFIKHFK

SEQ ID NO: 155382 - protein, 225 aa, Unknown
  Bacterial polypetide isolated from the Sargasso Sea
FNSLHKVSKFFKSFKKNKLVKIIYCPPNTLIRPMSRKLKNTRIDVGAQNCHENKNYGAFTGSVNPMMLKNVGAKYVIIGHSENRKAGETNKLINLKIKSSLDSGLKVILCIGETLQEKKKKITKKILLKQIKFGLYKIKNKKNVLIAYEPVWSIGTGLVPKEKDLFEIIDFVKKNIKKCKVLYGGSVNPKNIHLLKTISNIDGYLIGGASQDPNKFIDIIKKTYN

SEQ ID NO: 155383 - protein, 108 aa, Unknown
  Bacterial polypetide isolated from the Sargasso Sea
KRKKITKKILSKQIALCLQKVNKKQNIIIAYEPVWSIGTGIIPKLDDLFSTINFIKKKVRNIKVLYGGSVNPKNINELKLIKNIDGFLIGGASQDPKKFIDIIKKTYN

SEQ ID NO: 155384 - protein, 196 aa, Unknown
  Bacterial polypetide isolated from the Sargasso Sea
AQIMSDIKAECRMVAVVSPFDLSSVVSAAPQLEVWCQHLDPIGFGSNTGWLHPETAIDRGASGTLINHAEHKVSIEHVAMLIEQVPEEFVVCACAADVDEARKLASLNPEYVAVEPPELIGGEISVTSADPEIINSTLQAVKEISGSVGVLCGAGVKDGDDVTKAIHLGTRGVLLASGVTKSEDPRKSLEGLVRNL

SEQ ID NO: 155385 - protein, 188 aa, Unknown
  Bacterial polypetide isolated from the Sargasso Sea
MFIINCKNYEEIAGEKIVKMAKITEKISKKYKVPIAIAPPHHLIPLITKFKITVLAQHVDDKKVGSTTGFIVPEIVKKSKINGSIINHSEHRISEKEIISLVKRLQKLKLKTVLCVKNVNEAKKYAKLNPTFIAIEPPELIGTGRAISTEKPALIVNAVKAVSSSKNSTKLLCGAGIVSGQDFKSKRT

SEQ ID NO: 155386 - protein, 57 aa, Unknown
  Bacterial polypetide isolated from the Sargasso Sea
ITFIKKENKKYKVLYGGSVNPKNINELRFVDNIDGFLIGGASQDSKKFIDIIKKTYN

SEQ ID NO: 155387 - protein, 201 aa, Unknown
  Bacterial polypetide isolated from the Sargasso Sea
MSKKIIAGNWKQNGNIKSSIKLAQDIIRGVKKNNIKHEVIIFPPSIYLLSIKNINKKEIINIGSQNVSAYNDGALTGEISATMLKDSKIQYCLVGHSERRHILDENNLSLCEKVSRLRENNIKVIYCIGETLKEYKTKRTKYILNKQLQSLFKSLNKSKRSNKVIIAYEPVWAIGTGLIPSAKELSNTFGYIYNTVKRYNE

SEQ ID NO: 155388 - protein, 212 aa, Unknown
  Bacterial polypetide isolated from the Sargasso Sea
NSWFSDFKNDSQNQILLAPPSVYLDFFSTKKLNFELCSQNVCEFEEGPFTSQHTASMLLDLGVKSCIIGHSESRKLLKEEDHQIFEKFQKLNSKKIRPIVCIGEPLEIRENNKVKDYIRQQTEKFHDFEEEIIFGYEPLWAIGTGKVPKLDEIEEAAKTIKEFCGENKKILYGGSINSSNCKDILKLKEIDGALVGGASLNPKEFAMIAQSC

SEQ ID NO: 155389 - protein, 240 aa, Unknown
  Bacterial polypetide isolated from the Sargasso Sea
MYFIANWKMFGGLNSLNSLHKIVKFFKTFKKNKSIKIIYCPPNILIRPMSKKLKNSKIEVGAQNCHENDTYGAFTGSVNSMMLKNVGAKYVIIGHSENRQSGENDKLINLKIKSALNSGLKVIFCIGETLKEKRKKITKKVLNLQLRKGLNKIKNNRNIIIAYEPVWSIGTGLIPKSTELSDTIDFIKSKIKKNKVLYGGSVNPKNIIQLRSIDNIDGFLVGGASQDAKKFIDIIKKSFN

SEQ ID NO: 155390 - protein, 281 aa, Unknown
  Bacterial polypetide isolated from the Sargasso Sea
MEAGDEFIASRNLYGGSVTQFGVSFPKLGWKCNFVDPTDPENFEKAMNDKVKFIFCEGVANPGGIILDLEKIADIAHKNGVLLIVDNTLASPYLLRPFEWGADLVVHSTTKFIGGHGNTMGGILIESGKIDWHKNDKYPGMSKPDQAYHGLTFAETFGDFGFTMKARMVGLRDYGSTLSPQSAWNLLQGVETLPLRMERHCSNAQTVAEWLEGHSKVSWVSYPGLKSNKFYDLANKYLPRGKGAVFTFGVKGGYDAGVKLIDSVDLHSNLANIGDTRSLIL

SEQ ID NO: 155391 - protein, 197 aa, Unknown
  Bacterial polypetide isolated from the Sargasso Sea
FVDKTKNSNIQIGAQDCHINSNYGPFTGAISSKMIKDLGAKFVIIGHSETREENDNKKINLKIKSALNEKLNVIFCIGEKLIDKKKKRTNSVLKKQLLEGLKDLNKLNKVIIAYEPVWSIGTGIIPTENNLIKNIKFIKYTLKRSKRFPKSKVLYGGSVNPKNIKNLMGIDNIDGFLIGGASINEKIFIDIMKKSIN

SEQ ID NO: 155392 - protein, 250 aa, Unknown
  Bacterial polypetide isolated from the Sargasso Sea
MTNNNIYFVANWKMYGNLASKNSINNVIKLTKLKKFKKIRIVYCPPYTLLNVFVKKTKNTKIYVGAQNCHYKLDYGSFTGFINAKMIKDTGSKFVIVGHSESRKEGDTDKKINLKIKSALDSNLKVIFCIGETGYQKTNKQTYLTLQKQITSGLKNIKKFQNIIIAYEPVWSIGSGIVPNNKLLTKTITFIKKTLKEKIKKEDIKIFYGGSVNTNNVKKLRKIKQIDGFLVGSASLKAKKFIDIIKKSII

SEQ ID NO: 155393 - protein, 286 aa, Unknown
  Bacterial polypetide isolated from the Sargasso Sea
ELGTIQYGGSCSSDNASAQADNNTVTFNLLADGNYSNCMISVTDLAGNLSDNLSISSFTIDTTKPLLREIESVATNTNDNTPTYTFSSSELGTIQYGGSCSSDNASAQADNNTVTFNLLADGNYSNCMISVTDLAGNLSDNLSVKAFTIDTLAPILVSITLDNNTAISSDNFSILAEGFKATFNEAMKVSTMQVNDGSTGEIKINCNSANTLRLGADNITTPGKSQCREMAQMSSSDNLSWTSLIRTFGNNNCPVTDNLTGSPSGTCAATLDPGTKYQLILTSRYD

SEQ ID NO: 155394 - protein, 72 aa, Unknown
  Bacterial polypetide isolated from the Sargasso Sea
PKNSELIKNIINIKKILYNLKKLKNVKILYGGSVNPNNAKELAQIKDINGFLVGGASLNPKKFIDIIKKSIN

SEQ ID NO: 155395 - protein, 249 aa, Unknown
  Bacterial polypetide isolated from the Sargasso Sea
MTKRKNVDDVTSNIPGSEGQSRKYGMSTLAVHAGARPDPVTGARGTPIYQTTSFVFDDAEHGAELFNLQTFGYVYSRMTNPTVSVFEERVAQLEGGRGAVATSSGHAAQFIAAATLMEAGDEFIASRNLYGGSVTQFGVSFPKLGWKCNFVDPTDPANFEKAMNDKVKFIFCEGVANPGGIILDLEKIADIAHKHGVLLIVDNTLASPYLLRPFEWGADLVVHSTTKFIGGHGNTMGGILIESGKMIGI

SEQ ID NO: 155396 - protein, 147 aa, Unknown
  Bacterial polypetide isolated from the Sargasso Sea
MNKKYIIFNWKMNFTVSESIEFSNDILKPISNFKNERFEIVICPSFMSLPFNYQILSNLVKFGAQNISHNHGEKGSFTGEISANMVSDYAEYVILGHSERRRNLLETNRNIDDKRKLSIENGLKPIICIGENLDLRDSNKYLEFLSK

SEQ ID NO: 155397 - protein, 187 aa, Unknown
  Bacterial polypetide isolated from the Sargasso Sea
LGAQNCHFEISSGPFTGSISPSMLKRIGSNYVIIGHSENRSIGESDFQINKKIKSSIKSGLKIIFCIGETLTQKKNKMTNKILRKQILKGLFKIKNLNKILVAYEPVWSIGTGIVPHTFELDTNISFIKNILKNKLKIKNPKVLYGGSVNSQNVKNLASIKGIDGFLIGGASQKANNFIDIVKKTII

SEQ ID NO: 155398 - protein, 161 aa, Unknown
  Bacterial polypetide isolated from the Sargasso Sea
PQCLKDNNIDFCLVGHSERRQYFAETNDNVNIKSLNLIEENIIPVICIGETLEQKENNLTEEILFTQIKDGIPKSANHQNALIAYEPVWAIGTGLTPTLDEINQVHELIKNFDTKFGSFKVLYGGSVKSSNSKEINELKQVDGCLIGGASLKVDEFNTIIS

SEQ ID NO: 155399 - protein, 180 aa, Unknown
  Bacterial polypetide isolated from the Sargasso Sea
MPNPNYGPFTGAISSKMIKDLGGKYVIIGHSETRAENDNKKINLKIKSALNEKLNVILCIGEKLIDKRKNRTKYVLKKQLLEGLKNLKNLNKVIIAYEPVWSIGTGIIPSEIDLKKNIRFIINTLKISKKFTKSKILYGGSVNPKNIKNLMRIDNIHGFLIGGASTNEKIFIDIMKKSIN

SEQ ID NO: 155400 - protein, 147 aa, Unknown
  Bacterial polypetide isolated from the Sargasso Sea
NMGDTDSQINKKINSSIKSGLKIIFCIGETLNQKKKKKTNQILSKQILKGLFKINNLNKILIAYEPVWSIGTGAVPRSFELEKNITFIKKILKNKFRIKNPKVLYGGSVNPKNAKNLAAINNIDGFLIGGASQKANNFIDIVKKTII

SEQ ID NO: 155401 - protein, 234 aa, Unknown
  Bacterial polypetide isolated from the Sargasso Sea
MFGSVKLVNSLNNIISYSKKNKQKAKIVYCPPYTLLKSFIDKTKNSNIEIGAQDCHINSDYGPHTGAISSKMIKDLGAKFVIIGHSETREENDNKNINLKIKSALNKKLNVIFCIGEKLIDKKKNKTKFVLKKQLLEGLKNLNELNKVIIAYEPVWSIGTGIIPTENNLIKNIKFIKDTLKRSKKFLKSKVLYGGSVNPKNIKNLMRIDNIDGFLIGGASTNEKIFIDIMKKSI

SEQ ID NO: 155402 - protein, 141 aa, Unknown
  Bacterial polypetide isolated from the Sargasso Sea
IKLTRLLENEIIPILCFGESLEQRSEGSYLEFIKNQINEGLKGVRKDKVNKLVLAYEPIWAIGTGEVASIENIVEVLDFVKDLVSDKSYFSDETVKLIYGGSVSPDNSSEILNTSIVDGALVGGASLDADKFVDIIKSVNL

SEQ ID NO: 155403 - protein, 251 aa, Unknown
  Bacterial polypetide isolated from the Sargasso Sea
NKFKYFIGNWKMFGDFSDFKIISKINQFIYRSRNSLKKRKIVLCVPNTLIHYFNKKLISKFISLGVQNCHHQEGYGPFTGSISASMLKKAGAQYIILGHSENRSEGESHKLIKKKIISSLNQNLNVIYCIGETFYEKKKNKTFNVLRKQIKSSLQKNFNINKIFIAYEPVWSIGTNKIPKSIELQKIIMFIKKELKKIFKNKKSPTVLYGGSVNPKNIRFFSSFHDLDGFLIGGASQSSKKFIDIVKNYYK

SEQ ID NO: 155404 - protein, 187 aa, Unknown
  Bacterial polypetide isolated from the Sargasso Sea
MIFVANWKMHGNFNDISKVKTVLNLIKNKKYKKIKIIYCPPFTLIKSFSNYFNNSKFNIGAQNCYYKSDYGPYTGNVNAKLIKSAGAKYIILGHSENRNEGETDLLINQKIKSVLKEKLSIIFCVGETLHEKQKKITFQVLKRQLSKGLKGIKNINKIIIAYEPVWSIGSGIVPSRNELEKNIKNIK

SEQ ID NO: 155405 - protein, 104 aa, Unknown
  Bacterial polypetide isolated from the Sargasso Sea
KRQIIKGLNKVKKLNKIIIAYEPVWAIGTGVIPKIEDLKMQIYKIKKIIKKEFKKQNPKIIYGGSVNSENIDKLNKIDNINGYLIGKSSQNSKIFIDIIKKTIN

SEQ ID NO: 155406 - protein, 160 aa, Unknown
  Bacterial polypetide isolated from the Sargasso Sea
IGANFVILGHSEMRHNGDTNKIINKKIKSAIQSKLKVILCIGESHVQKRNNKTLNILKSQILNCLKNIKISKNIFIAYEPVWSIGTGNTLSNEELAKIIKKIKYICYKKFKKNVKIFYGGSVNPKNITNLKKNQLIDGFLVGSASRSSNKFIDIINKSIN

SEQ ID NO: 155407 - protein, 420 aa, Unknown
  Bacterial polypetide isolated from the Sargasso Sea
MSTLAVHAGARPDPVTGARGTPIYQTTSFVFDDAEHGAELFNLQTFGYVYSRMTNPTVSVFEERVAQLEGGRGAVATSSGHAAQFIAAATLMEAGDEFIASRNLYGGSVTQFGVSFPKLGWKCNFVDPTDPANFEKAMNDKVKFIFCEGVANPGGIILDLEKIADIAHKHGVLLIVDNTLASPYLLRPFEWGADLVVHSTTKFIGGHGNTMGGILIESGKIDWHKNDKYPGMSKPDQAYHGLTFAETFGDFGFTMKARMVGLRDYGSTLSPQSAWNLLQGVETLPLRMERHCSNAQTVAEWLEGHSKVSWVSYPGLKSNKFYDLANKYLPRGKGAVFTFGVKGGYDAGVKLIDSVDLHSNLANIGDTRSLILHPASTTHRQLTEEQRDGAGASSDAIRLSVGIEDVNDIIADLDQALNQV

SEQ ID NO: 155408 - protein, 259 aa, Unknown
  Bacterial polypetide isolated from the Sargasso Sea
MDPKFYKLETLSLHGGQLPDPVTGARAVPIYQTTSYVFENSDQAAAQYNLEQGGHIYTRITNPTVAVLEERISALEGGSGAVATASGQSALFLTLMTLLDQGSHIVSSTCLYGGSVNLLKHTLPRFGIGTSFVHPRDLEGFRQAIRPETRLVFGEVIGNPGLEILDLEVVSGIAHDAGIPLLIDATFNTPFLCRPFDWGADLIMHSATKWIGGHGVAIGGLVVEGGRFDWEQNNRFPTLTEPYAPFGGIQWYQEFGPQA

SEQ ID NO: 155409 - protein, 220 aa, Unknown
  Bacterial polypetide isolated from the Sargasso Sea
MGGSLVVVNFKTYQTAHGACAEDLARAMASIDTKIRMVAAVSAFDLSAVVAAAPGLEVWCQHLDPVGFGSNTGWLHPETAMERGASGTLINHAEHKVSLEHVAMLMEQIPDGFHVCACAADIHEARALAALGPGFVAVEPPELIGGETSVTSADPGIVSGTAQAVREVSTRVGILCGAGVKTGEDVAKAIELGTSGVLLASGVTKSEDPRSSLIDLVSLL

SEQ ID NO: 155410 - protein, 436 aa, Unknown
  Bacterial polypetide isolated from the Sargasso Sea
MAIEEFHVGSDNEFNGFQTRSVHAGARPDANTGSRAQPIHQTTSYVFESPDSAAAYFNLQEYGNTYSRIMNPTVGALEERIANLESAVGSVAFASGLAAQSAALFTLLQPGDHIVASRSLYGGSVTQLKHLMRKLSVDLDFVEATELDQWKGAIKENTKLFFGETIGNPSGVILDIEAISKIAKENEVPLMVDNTFATPYLCRPMEWGADIVVHSVTKFLGGHGTSIGGIVLESGEFDWSNGRFPIVAEPSPAYHELEFHETFGTFGYLMKLRAETLRDLGACMSPFNAFLIGLGVETLPLRMQQHIDNASTVAEFLNASDRVEKVHYVDYSTPAQRDLADKYLKGSGGAVFCFDLAGGRNEGVKFIENLHLFSHLANVGDAKSLVIHPASTTHRQLSDSELLNAGIGPGTIRLSIGIEDSYDLISDLKNSLDKLN

SEQ ID NO: 155411 - protein, 168 aa, Unknown
  Bacterial polypetide isolated from the Sargasso Sea
MKRVKYTIANWKMNGLNGAVKVVNSIDRHIKKTRHKKSKVVICPPFTLLTNFINANTGIDFGGQDCHHLNEGAFTGCISAQMLKSAGCKYVIIGHSERREYQKETPKELNLKIDIANKYNLKIIYCIGEKLNEIKIRKKILNRQLSSLPKKINIKNLIIAYEPVWAIG

SEQ ID NO: 155412 - protein, 181 aa, Unknown
  Bacterial polypetide isolated from the Sargasso Sea
HHEESSGPYTGSISSKMLKKIGVKYVIIGHSENRSTGETDDDINKKIKSSIKNNLNIIFCFGETLKQKRKKDTNRVLIRQISRALKGVKEKDKILFAYEPIWSIGTGLIPKSKDLNQTINFVKNKLKNNFRLKFPKVLYGGSVNPNNIKKLKEIKIIDGFLIGGASQKSKNFIDIVKKTFI

SEQ ID NO: 155413 - protein, 224 aa, Unknown
  Bacterial polypetide isolated from the Sargasso Sea
MKQKIIIGNWKNYLTKDESVKLAKEILDEKIPDGIRLMISPNNLYLNHVNNILKHSSVEVIGQNVTSYMSSSDTGGVTIIGLKDIGVDRTILGHSEVRKRNKSFRSEEILKEVIPEEFKFILCFEVVEQIPFSILNNDFEIILAYEPVWAIGSGETASVEHINEVHGIVKSELSKHNLDIPVLYGGSVNPDNSNEILSQELVDGVLVGGASTNYENLHKIINSL

SEQ ID NO: 155414 - protein, 235 aa, Unknown
  Bacterial polypetide isolated from the Sargasso Sea
MYGSIKSVKSLNKVIGYSKIKKLKAKIIYCPPYTLIKTFVDKTKNSNIEIGAQDCHANSNYGPFTGAISSKMIKDLGCKFVIIGHSETRSENDNKKINLKIRSAINEKLKVILCIGEKLIDKKKNKTKSVLKRQLLEGLKNLKNLNKVIIAYEPVWSIGTGIIPTENDLKKNIRFIRNTIKISKKFTKSKILYGGSVNSKNIKNLMRIGNIDGFLIGGASTNEKKFIDIMKKSIN

SEQ ID NO: 155415 - protein, 172 aa, Unknown
  Bacterial polypetide isolated from the Sargasso Sea
TGSINANLLKITGAKYVIIGHSENRARGDTNYLINLKIKAALNKNLKIIFCIGETLLEKRKNKANLIINSQLSRGLKNIKKNKNILFAYEPVWSIGTGIIPKITDLENQVNKIKKMINKIWKLKNPKILYGGSVNSKNVIQLNKISSINGYLVGGASQNANNFIDIIKKTII

SEQ ID NO: 155416 - protein, 83 aa, Unknown
  Bacterial polypetide isolated from the Sargasso Sea
MIDLSHFTSFFIANWKLNGSFQFIDNFTEFLKVPKTAKKCITLCPPNLYLNYLKLKKGDFKLGAQDCSYFDEGAYTGEISAKM

SEQ ID NO: 155417 - protein, 158 aa, Unknown
  Bacterial polypetide isolated from the Sargasso Sea
MVGAKSIILGHSENRQEGESDQLINLKIRSAINSGLKIIFCIGETLKEKRNKKTNKVLSNQIKKGLQSIKKKSDIIIAYEPVWSIGTGIIPKSDDLIKSVNFIKSKFGSKSPKILYGGSVNNQNISQLKNISTIDGFLIGGASQDPKKFIDIIKKTYN

SEQ ID NO: 155418 - protein, 99 aa, Unknown
  Bacterial polypetide isolated from the Sargasso Sea
ILKEISDNFTCNKFLIAYEPIWAIGTGKSASSSQIYEILNFIHEYTHDTFSQVDLSILYGGSVSTSNIKELLTIDKCNGFLIGGASLSLDSFELICESI

SEQ ID NO: 155419 - protein, 140 aa, Unknown
  Bacterial polypetide isolated from the Sargasso Sea
YFSETNDNVNIKSSNLIEENIIPVICIGETLEQKENNLTEQTLSSQIKDSVPNSANHQNALIAYEPVWAIGTGLTPTLDEINKVHELIKNFDRKFINFKVLYGGSVKSSNSKEITQLSHVDGCLIGGASLKVDEFSTIIS

SEQ ID NO: 155420 - protein, 250 aa, Unknown
  Bacterial polypetide isolated from the Sargasso Sea
MTNNNIYFIANWKMHGNIADINRSKSVIKLSNLKKYKKNKIIYCPPYTLLKSFYSKVKNSNILIGAQNCHSNSDYGPYTGSINVKLIKSTGAKYIIIGHSENRKSGETDLIINKKIQAALKENLKVIFCIGEKLSEKRKKQTFKVLQKQLNIGLKGIKKLENIIVAYEPVWSIGTGIIPKNSELNTNIKNIKKILSKLKKTINLKILYGGSVNPKNAKELAQIKDINGFLIGGSSLSSKKFIDIIKKSIN

SEQ ID NO: 155421 - protein, 220 aa, Unknown
  Bacterial polypetide isolated from the Sargasso Sea
MFIINCKNYDEIAGDKIVKMAKIAEKISKKYKVSIAIAPPHNLIPLITKFKITVLAQHVDDKKVGSTTGFMVPEIVKKSKVSGSIINHSEHRISEKEIISLVKRLQKLKLKTVLCVKNVNEAKKYAKLNPTFIAIEPPELIGTGRAISTEKPALITNAVQAVKSAKNSTKLLCGAGIVSGEDVSKARELGSRGILVASGIVKAKNWEKIISEFCKGLKSQ

SEQ ID NO: 155422 - protein, 240 aa, Unknown
  Bacterial polypetide isolated from the Sargasso Sea
MYFIANWKMFGGLNTLNSLHKVLKFLKEFKKNKFVKIIYCPPSTLIRPMSKKLKNSQIKVGAQNCHESETYGSFTGSINTKMLKDVGAKYVIIGHSENRNSGETNKLINSKVKAALKTGLKVIFCIGETFQEKKKKITKKVLRQQIKLGLRKIKNPNNVIIAYEPVWSIGTGLIQNSNELFETISFIKKENKRYKVLYGGSVNPKNIHQLRSVKNIDGFLIGGASQDSKKFIDIIKKTYN

SEQ ID NO: 155423 - protein, 117 aa, Unknown
  Bacterial polypetide isolated from the Sargasso Sea
MKKIIIGNWKLNLDHLQGIQLLQKINYSLPKDVEENIDIVLAPSHTSLRSLQTVISTDKLKIKLSSQDVSMYKEGAYTGEVSSTQLEKLDISYSIIGHSERRTLLNENDEIINQKLK

SEQ ID NO: 155424 - protein, 206 aa, Unknown
  Bacterial polypetide isolated from the Sargasso Sea
MYFIANWKMFGSVKLVNSLNKVISYSKIKKLKANIIYCPPYTLIKSFVDKTKKSNIKIGAQDCHAQQNYGPFTGAISSKMIKDLGGKFVIIGHSETRAENDNKKINLKIKSALNEKLNVILCIGEKLIDKRKNKTKYVLKKQLLEGLKNLKNLKKVIIAYEPVWSIGTGIIPSENDLKKNITFIKNTLKISKKFTKSKILYGGSVT

SEQ ID NO: 155425 - protein, 220 aa, Unknown
  Bacterial polypetide isolated from the Sargasso Sea
MKYIIFNWKSYLNIAESMNLSKIVSKLPSTKKYKLICSPNNFYNLSLKSRYPKNIYAAQNIDLHGKGASTGSIDIEDLVNNKIKYCILGHSEVRSNFGETDLIVQKKTDLCLINKIKPIVCIGEPLKIYKSKKTKVFLKKQINNIFKKSNNYEEVVLAYEPLWSIGTGLTPKLSEIDDILEFLSKILENYSFKKINILYGGSVNLSNIKDILSLRNLNGV

SEQ ID NO: 155426 - protein, 143 aa, Unknown
  Bacterial polypetide isolated from the Sargasso Sea
MKKIIIGNWKLNLDHLEAIQLFQKLNYSLNNDVDKKIDIVVAPSFTSLRSIQTIIEADKLNLFLSSQNVSEFVEGAYTGEVSSEQLIKLKVSYCIVGHSERRQYFKETDESINLKVHNLVNKKITPIICFGESIEQRNSGKYL

SEQ ID NO: 155427 - protein, 229 aa, Unknown
  Bacterial polypetide isolated from the Sargasso Sea
MSKIIIANFKMNGTKSSIQEWFNVFSEENNTSNKIIVALPSPFLADFATNDINVASQNVSSHDSGAFTSQVSAGMLRDCNINYSIIGHSESREFLGETNEDIFDKYSQLIKHSIKPIICIGESSKVREDNLFSTFITEQLELFKDVEDELIIAYEPIWAIGSGITPTIADINEVSELIKGLCGNVKVLYGGSVNKENASNLLNNSNIDGVLVGGASLDPKEFANIAQSC

SEQ ID NO: 155428 - protein, 240 aa, Unknown
  Bacterial polypetide isolated from the Sargasso Sea
MYFIANWKMFGGLNSLNTINKVVKFFKAFKKNRPIKIIYCPPSTLIGPMSKRLKKTNIEIGAQNCHEQESYGAFTGSINSKMLKNIGAKYVIIGHSENRQSGESNQLINLKIKSALKSGLKIIFCIGETLSEKRKKITKKILDKQLKLGLNKINSKKNIIIAYEPVWSIGTGLIPKSNDLYETVNFIKKKMRKNKVLYGGSVNSKNINDLKSINNIDGYLIGGASQNPKKFIDIIKKRYS

SEQ ID NO: 155429 - protein, 242 aa, Unknown
  Bacterial polypetide isolated from the Sargasso Sea
MKHLIANWKMNFINSDAWLKDFDLNNIPKEIQVVICPNYLDMEDFFEISSKTHEKIFIGAQNLSAEIEGAFTGQISGKMLKNIGASYSIVGHSESRLQGEDDETILRKVHTALECELIPILCIGENQEEYSKGRTENKIKHQLTENLFPLKNLSKSVLIAYEPIYAIGSGIAVKNEHLEEVSLLVNDLVRDNLGIDFTMIYGGSVTSESAKKLAKVNGIDGFLVGNASLDPKEFANIALSLE

SEQ ID NO: 155430 - protein, 243 aa, Unknown
  Bacterial polypetide isolated from the Sargasso Sea
MIVANWKNAGSKELIKVWVDSVSKDIDIVQGKDCVFCPPTCYLDYSKDYIKQRNKDIRIGSQELDSELTSPLTGAISSQMLADLGCEFVIIGHSEQRLHLNESNEILSNKLLKAVERDIIPIFCIGETKSEKESDLTKKVLSKQLDAIHTDLTSKCIIAYEPVWAIGTGDYAEISLIEKIHVHIKEYIMNKTKSSNQISVVYGGSVNLENYKEIYSSTQVDGLLIGGASLDANTFTEIYNMSQ

SEQ ID NO: 155431 - protein, 230 aa, Unknown
  Bacterial polypetide isolated from the Sargasso Sea
MSKIIIANFKANGCKEFFNNWFSDFKNDSQNQILLAPPSVYLDFFSTKKLNFELCSQNVCEFEEGPFTSQHTASMLLDLGVKNCIIGHSESRKLLKEEDHQIFEKFQKLNNKKIRPIVCIGEPLEIRENNKVKDYIRQQTEKFHDFEEEIIFGYEPLWAIGTGKVPKLDEIEEAAKTIKEFCGENKKILYGGSINSSNCKDILKLKEIDGALVGGASLNPKEFAIIAQSC

SEQ ID NO: 155432 - protein, 213 aa, Unknown
  Bacterial polypetide isolated from the Sargasso Sea
MYFIANWKMFGDLRSINSLNKVIKFFKIFKKKKFVKIIYCPPNTLIRAMSEKLLNSKIEVGAQNCHQNENAGAFTGSVNSKMLKNVGAKYVIIGHSENRITGETDKLINLKIKSAIKSGLKVIFCIGETLNEKRRKATKRVLDRQISLGLKKINKKNSNIIIAYEPVWSIGTGLIPATEELLGIVNFIKKKSNSKKVLYGGSVNPKNVNVLNS

SEQ ID NO: 155433 - protein, 248 aa, Unknown
  Bacterial polypetide isolated from the Sargasso Sea
MKFFIGNWKMFGVPRSINILNKINKFIKKDSNRNKYKVIVAPPFTLIETFAKKFKKSSIEIGAQNCYYKDGFASDTAAISSYMLKKVNAKYVIIGHSDNRAEGDDNKILKAKLNHALKNNLKVIFCIGENSKDKIKRKTYQILSNQLSSVLERKMPQNNIIVAYEPIWSIGTGNVPSNIELEKITKKIKEITKKIFNKQKQSYVLYGGSVDGKNIKKINNISSIDGFLIGGASKTSKKFIDIIKNYYR

SEQ ID NO: 155434 - protein, 220 aa, Unknown
  Bacterial polypetide isolated from the Sargasso Sea
MFIINCKNYDEIAGDKIIKIAKISEKVSRKYKVPIAIAPPHHLIPLITKFKITVLAQHVDDKKVGSTTGFMVPEIVKKSKINGSIINHSEHRISEKEIISLVKRLQKLKLKTVLCVKNVNEAKKYAKLNPTFIAIEPPELIGTGRAISTEKPALITNAVKAVSSAKNSTKLLCGAGIVSGQDVSKAKELGSKGILVASGIVKAKNWEKIISEFCKGLKSQ

SEQ ID NO: 155435 - protein, 158 aa, Unknown
  Bacterial polypetide isolated from the Sargasso Sea
ADINVDFCIVGHSERRQFFFEKNEEINYKSENLIKNNIIPIICIGETLEDKEKGITNDILEDQLKKSIPISSNFENSIIAYEPVWAIGTGLTPTNDEINETHSFIRQHNEKFNNFKIIYGGSVKASNVNEITSLLNVDGALIGGASLKSDEFTKIIQD

SEQ ID NO: 155436 - protein, 366 aa, Unknown
  Bacterial polypetide isolated from the Sargasso Sea
MTDRKNVDNVKSNIPGGDGQSREYGISTLAVHAGARPDPVTGARGTPIYQTTSFVFDDAEHGAELFNLQTFGYVYSRMTNPTVSVFEERVAQLEGGRGAVATSSGHAAQFIAAATLMEAGDEFIASRNLYGGSVTQFGVSFPKLGWKCNFVDPTDPENFEKAMNDKVKFIFCEGVANPGGIILDLEKIAEIANKHGVLLIVDNTLASPYLLRPFEWGADLVVHSTTKFIGGHGNTMGGILIESGKIDWHRNDKYPGMSKPDQAYHGLTFAETFGDFGFTMKARMVGLRDYGSTLSPQSAWNLLQGVETLPLRMERHCSNAQAVAEWLEKHPKVSWVSYPGLKSNKFYDLANKYLPKGKGAVFTFGV

SEQ ID NO: 155437 - protein, 243 aa, Unknown
  Bacterial polypetide isolated from the Sargasso Sea
MYFIANWKMFGTIKSVNSLNKVISYSKTNKHKAKIVYCPPYTLLKSFVEKTKKTNIKIGAQDCHTQPNYGPYTGGISSKMIKDLGCKFVIIGHSETRAKNNNKKINLKIKSALDEKLNIILCIGEKLVDKNKNKTKNVLKKQLLEGLKNLSNLNKVIIAYEPVWSIGTGIIPSENDLIKNIKFIKDTLKKSKKFTKSKVLYGGSVNPKNIKNLMRISNIDGFLIGGASTNEKIFIDIIRKSII

SEQ ID NO: 155438 - protein, 121 aa, Unknown
  Bacterial polypetide isolated from the Sargasso Sea
NIIPVICIGETLEQKEKNLTEEILSTQIKDSIPNLANHQNALIAYEPVWAIGTGLTPTLDEINQVHELIKNCDTKFRNFRVLYGGSVKSSNSNEITKLSQVDGCLIGGASLKVDEFNTIIS

SEQ ID NO: 155439 - protein, 80 aa, Unknown
  Bacterial polypetide isolated from the Sargasso Sea
IAYEPVWSIGTGIIPKSEDLFKTISFIKKEKKNYKVLYGGSVNPKNINQLKSINNIDGYLIGGASQDPKKFIDIIKKTYN

SEQ ID NO: 155440 - protein, 125 aa, Unknown
  Bacterial polypetide isolated from the Sargasso Sea
CIGETEKENIEGKTKQALQTQLEVIKNYELHEFFKVAYEPVWAIGSGKTPQPEEINEIHKFIKDVVQSFSTNNLVPDVLYGGSVTDKNAIGFFNQDFVDGALIGGASLDGSVFAEIVNIFNGTKN

SEQ ID NO: 155441 - protein, 123 aa, Unknown
  Bacterial polypetide isolated from the Sargasso Sea
MGLIPIICIGETLEQKEKGITKKVLEEQLMNSVPSSSNFENTIIAYEPVWAIGTGLTPTIEDIDETHRYIREHKDKLNKYKILYGGSVKASNAKEITGLPNVDGALIGGASLKPQEFSVILAD

SEQ ID NO: 155442 - protein, 143 aa, Unknown
  Bacterial polypetide isolated from the Sargasso Sea
MSGENEKLINLKIKNAIKSGLKIIFCIGETLKQKRDKRTNQVLNSQLKKGLKSIKKINDIIIAYEPVWSIGTGLIPSSEELSKSIKFIKSKFRKKSPKVLYGGSVNSKNIDQLKIIPDIDGFLIGGASQNPKKFIDIIKKTIN

SEQ ID NO: 155443 - protein, 127 aa, Unknown
  Bacterial polypetide isolated from the Sargasso Sea
ICFGESNDQRTEGNYMDFLLNQIENSTKGLRKDKVDEIIFAYEPIWAIGTGQNASLQDIVEVISKVKEFISKKTFFNEEKIKFIYGGSVSPDNSYEILNSKIIDGALVGGASLDVDKFIKIIESVDL

SEQ ID NO: 155444 - protein, 229 aa, Unknown
  Bacterial polypetide isolated from the Sargasso Sea
MPKIIIANFKMNGTKSFITQWFDDFSKEGNISNEIIVALPSPFLIDFADNDISVAAQNVSSHTTGAFTSQVSAEMLKDCGINYSIIGHSESREFLKETDEDIFNKYNQLIKYCIKPIICIGEPLKIREDNLLQSFISSQLKQFEDTENELIIAYEPIWAIGSGLIPTVEDINEVSELIRGLCKNVKILYGGSVNKENASNLLNNSNIDGVLVGGASLDPKEFANIAQSC

SEQ ID NO: 155445 - protein, 109 aa, Unknown
  Bacterial polypetide isolated from the Sargasso Sea
IYKSKKTKNFLKKQINKIFKKSNIYNEVILAYEPLWSIGTGLTPKISEINDILQFLIKILKNYSFKKIKILYGGSVNLSNIKEILSLQKLDGVLVGSASTKPSFIKYFK

SEQ ID NO: 155446 - protein, 151 aa, Unknown
  Bacterial polypetide isolated from the Sargasso Sea
SEKRSKGENDKIINKKIFSALKNNLKVIFCIGETSTQKRKKLTKKVLYNQLNNGLKNIKNKKNIIIAYEPVWSIGSGLIPKIEDLINTTEIIKIFLTNKMKFKNPKVLYGGSVNPKNITLLRKVTNLDGFLIGGSSQNSNKFIDIIKKTFN

SEQ ID NO: 155447 - protein, 111 aa, Unknown
  Bacterial polypetide isolated from the Sargasso Sea
MKKIIIGNWKLNLDHLEAIQLFQKLNYSLNTDIDEKISIVIAPSHTSLRSIQTIIDADKLNIFLSSQDVSMFNDGAYTGEVSAPQLAKLNISYSIVGHSERRQHFNETDEF

SEQ ID NO: 155448 - protein, 245 aa, Unknown
  Bacterial polypetide isolated from the Sargasso Sea
MTNKYIYFVANWKMFGVLKSLNSLHKVIKFLKNFKKNKIVKIIYCPPSTLIRPMSKKLINTGIEVGAQNCHEHQTYGAFTGSINSMMLKNVGAKYVIIGHSENRQIGETDKLINSKIKSALKSGLKVIFCIGETLREKKKNVIKQVLDKQIKLGLNKIKNKNNIIIAYEPVWSIGTGMIPKTDELSNTIDFIKKKYKNLKVLYGGSVNPKNINDLKLIKNIDGYLIGGASQDHKKFIDIIKKTYN

SEQ ID NO: 155449 - protein, 52 aa, Unknown
  Bacterial polypetide isolated from the Sargasso Sea
SRLKNIKILYGGSVNTKNIKELSKIRSINGFLIGGASQKTKNFIDIIKKTIN

SEQ ID NO: 155450 - protein, 245 aa, Unknown
  Bacterial polypetide isolated from the Sargasso Sea
MTNKYMFFIANWKMFGGLSSLNSINKVLTFLKKSKISKFAKIIYCPPSTLICPMAKKLKRTRVEVGAQNCHENEKPGAFTGSINSSMLKNVGAKYVIIGHSENRILGEKDKLINLKIKSAMKSGLKVIFCIGETLQQKRKKITKKVLNRQIIQGLKKIRNKQKILIAYEPVWAIGTGLIPKSKDLDETVNFIKNKNKNIKVLYGGSVSSQNINELKLIKNIDGFLIGGASQDAKKFIDIIKKTYN

SEQ ID NO: 155451 - protein, 65 aa, Unknown
  Bacterial polypetide isolated from the Sargasso Sea
YIKDVVQSTSTNNQVPNVVYGGSVTDKNAESFFKEEFIDGALVGGASLNGSTFANIVKIWGKSII

SEQ ID NO: 155452 - protein, 153 aa, Unknown
  Bacterial polypetide isolated from the Sargasso Sea
RRQIFNEKNDSINKKVIKVIESGIKPILCVGETIDEMNAGKAYDIIKEQLISGLNNIKSLSNIIIAYEPVWAIGTGLTASIEQINEANIFIRKILSQLFDDKESENTPILYGGSVSSTNANELISIDSVNGFLIGGASLDVVKFTEVIKIVNG

SEQ ID NO: 155453 - protein, 204 aa, Unknown
  Bacterial polypetide isolated from the Sargasso Sea
MYGDLKALNSLNKVIKFYKSIKHKKLKLIYCPPSTLINSLSNKLKNTKIEVGAQNSHESDHYGAFTGQINSKMLKNVGARYVILGHSENRQTGEDNQKINSKIINSLKSGLKIIYCIGETLKEKRNKKTNQVLSKQIKMGLKSIRNKSNIIIAYEPVWSIGTGLIPKPSDLIKSISFIKKKLGKKPSKILYGGSVNSDNINQLK

SEQ ID NO: 155454 - protein, 140 aa, Unknown
  Bacterial polypetide isolated from the Sargasso Sea
MGIDRTILGHSEVRKRNKGFKSEKILKEVIPEEFKFILCFEGIEQIPFNILNNDFEIILAYEPVWAIGTGETASVEHINEVHGMVKSELSKLNLDIPILYGGSVNPDNSNEILSQELVDGVLVGGASTNYDDLHKIINYL

SEQ ID NO: 155455 - protein, 159 aa, Unknown
  Bacterial polypetide isolated from the Sargasso Sea
KNVGARYVILGHSENRQLGEDNKKINSKIKSALKSGLKIIFCIGETLKEKRNKKTNMVLSKQIKMGLKSIQKKSNIIIAYEPVWSIGTGLIPKPKDLIKSISFIKKKLGKKPYKILYGGSVNSENIKQLKNINTIDGFLIGGASQDPKKFIDIIKKTIN

SEQ ID NO: 155456 - protein, 229 aa, Unknown
  Bacterial polypetide isolated from the Sargasso Sea
MKRNNYIIANWKMNGTKKSISLIKSIQSYILGKRKHTSKIVICPPFTLLSNFIQKSNSIIKFGAQDVHYEVSGAFTGSISASMLQELGVKFVIIGHSERRQYQNESISEISKKINSALSTNLKIIFCIGEKLDEINKRSIILKKQLTSLPDTFLSKNIIIAYEPVWAIGTGKTPTINEINDIHKSIRKMIYKKIGKEALKVSILYGGSVNPKNSSDILKLSDVDGALVG

SEQ ID NO: 155457 - protein, 62 aa, Unknown
  Bacterial polypetide isolated from the Sargasso Sea
RDRVAQHNEVVAETVKILYGGSVNEENAGSFFEKDEIGGALVGGASLKPHSFNEIRKLAAET

SEQ ID NO: 155458 - protein, 86 aa, Unknown
  Bacterial polypetide isolated from the Sargasso Sea
PIWAIGTGQTAEPDDIEEIHGHIRNTLKAKYPNNEGIPILYGGSVKPENASKILALPDVGGALVGGASLNPEDFLAIIDKTSGKSE

SEQ ID NO: 155459 - protein, 124 aa, Unknown
  Bacterial polypetide isolated from the Sargasso Sea
GETEEENKNDQTKDVLKRQLEVIKDVEFNDSLVIAYEPVWAIGTGNTPTPDKINEIHKFIKDVVQSLSDNSAIPMVLYGGSVNQENAENFFKEESVDGALIGGASLDGRQFANIINIFNGIDLK

SEQ ID NO: 155460 - protein, 149 aa, Unknown
  Bacterial polypetide isolated from the Sargasso Sea
GDSDVIIRAKARLLLNEMITPIICVGEDESVRNNGQHFSFVKSQLKQGLPYLEFGENVRDIVIAYEPIWAIGSGKTATLAQIEEMAKEIHTIVGNFYQHFSQLRITVLYGGSVKPDNAKEILGLPSVDGLLIGGASLVPKNMEQILSFC

SEQ ID NO: 155461 - protein, 156 aa, Unknown
  Bacterial polypetide isolated from the Sargasso Sea
MVGAKYVILGHSENRDSGETDKLINAKIRAATHAGLKVIFCIGETLGQKRKKITKKILSKQIIIGLEKIKKRKNIIIAYEPVWSIGTGLIPKADELFNTINYIKKKVRNIKVLYGGSVNPKNINELKLIKNIDGFLIGGASQDPKKFIDIIKKTYN

SEQ ID NO: 155462 - protein, 162 aa, Unknown
  Bacterial polypetide isolated from the Sargasso Sea
MGAKYIILGHSENRAEGDTNKIILKKIESALKNNLKVIFCVGETLKDRLNGKTFSILKQQLKSSIKNNFKAKNIIIAYEPIWSIGTGKIPKNYHIEKNLKFIKKEFKKIVKKKYSPTVLYGGSVNDKNISNFSLNSEIDGFLIGGASQSPKKFIDIIKNYYK

SEQ ID NO: 155463 - protein, 255 aa, Unknown
  Bacterial polypetide isolated from the Sargasso Sea
MSHPLVIANWKMNLPSGGISSWIQNEMLSNNNERDFNNKFSHFKFMGIAPPISHLTELKQQFRFGFLGAQDISRFNDGAKTGDISADMVIDKGCTFSILGHSERREFYNETNSIVSEKLRICLEKNIVPVVCIGESLEDYNVGKTLDVLEMQLKEIFTSISTKKTVVIAYEPVWAIGSGKTPTVDEVNNIHQHIKDIVQSIAEIEAISVIYGGSVNCENAKSFFQQTNIDGALIGGASLNGKDFLDIYNDFLETF

SEQ ID NO: 155464 - protein, 233 aa, Unknown
  Bacterial polypetide isolated from the Sargasso Sea
MYGDLATLNSLDKVIKFSKTIKEKRFKLIYCPPNTLIRPLSKRLKKTKIEVGAQNSHESDRYGAFTGQINSKMLKNVGAQYVILGHSENRKLGEDNKKINLKIKSALKAGLKIIYCIGETLKEKRNKKTNHVLSNQIKIGLKKIKNKTNIIIAYEPVWSIGTGLIPKTNDLIKSISFIKNKLGKKSPKILYGGSVNGENIKKLKNINIIDGFLVGGASQDPKKFIDIIKKTIN

SEQ ID NO: 155465 - protein, 206 aa, Unknown
  Bacterial polypetide isolated from the Sargasso Sea
KESISLAHLLLEIVTKDITRVMVSPNHLYLNEVNQILSTTNIEVISQNLTSTESKSDTGGITLKNLKEININRSLVAHSETRIREKNPQSILLEIIPIGFPFVLCFEEISQIPFDILNDDFEIILAYEPVWAIGTGETASIGHINEIHSDVKSKLSKLGLNIPVLYGGSVNPSNCKEILASDNVDGVLVGGASTKYDLFKEIVNSI

SEQ ID NO: 155466 - protein, 142 aa, Unknown
  Bacterial polypetide isolated from the Sargasso Sea
RSKTETLLRNGIRPILCVGESLQQRSSGNHEDVVVAQLRKVLAGFTTEDQSRCVLAYEPIWAIGTGKTATPEQANSMHSIIRKEIGSLCNTDVAANIQILYGGSVNVENAEYLLAQSEIDGALVGGSSLNIEDFSRIVAAGT

SEQ ID NO: 155467 - protein, 115 aa, Unknown
  Bacterial polypetide isolated from the Sargasso Sea
MTKIIAANWKQNGSLKFLIKLTRDIRTGINRLKIRPKVILFPPSVYLDSISKEIKKNKSNSKNIQLGIQNISPYENGAYTGEISIDMTNDFSCSYILIGHSERRHIFMESEELIS

SEQ ID NO: 155468 - protein, 254 aa, Unknown
  Bacterial polypetide isolated from the Sargasso Sea
MKKIIIGNWKLNLDHLQGIQLLQKINYSLDKDIEEKIDIVLSPSHTSLRSLQTVISTDNLKIKISSQDVSTYSDGAFTGEVSAIQLKKLNIDYSIIGHSERRLHFNESDNDVNIKLTRLLENEIIPILCFGESLEQRSEGSYLEFIKNQINEGLKGVRKDKVNKLVLAYEPIWAIGTGEVASIENIVEVLDFVKDLVSDKPFFSDETVKLIYGGSVSPDNSSEILNTSIIDGALVGGASLDADKFVDIIKSVNL

SEQ ID NO: 155469 - protein, 96 aa, Unknown
  Bacterial polypetide isolated from the Sargasso Sea
KQIEESVPEISNFDNTIIAYEPIWAIGTGLTPSLDEIEEVHSFIKNINEKYNNFRVLYGGSVKAANSADINNLQNVDGCLVGGASLKVNEFNKIIS

SEQ ID NO: 155470 - protein, 239 aa, Unknown
  Bacterial polypetide isolated from the Sargasso Sea
MNHNLPETKKYLNILIKNSKYLANPKINFFIIPPFTSLALFNNYKKKLPFIYGAQNMHWEEKGAFTGEVSASMLKSCGCQIVEIGHAERIKYFNENFTHMSKKINLALKYNLTPIVCIGEVKYEKNILKRKKILSKQIEILFKKIRNKKKQIILAYEPIWAIGEKNKAANIEYCNESISYIRKSALKKLNKVSVLYGGSVNEKNYSKFTESKFIDGIFIGRAALNANNFIKICKGITKK

SEQ ID NO: 155471 - protein, 168 aa, Unknown
  Bacterial polypetide isolated from the Sargasso Sea
MRKPIVAGNWKMNGNLSRAKDLAGEIVRGLSVNPVRECEVVLLPTFVHLTTVNRLASGTDIAIGSQDLDERNEGAVTGGISASILKDAGCSFALCGHSERRTLFAENDNQVASKFAAAIDAGLIPILCLGETLAQRERGKTADVVFAQLDAVLEQRGLQMLFSGGFSL

SEQ ID NO: 155472 - protein, 182 aa, Unknown
  Bacterial polypetide isolated from the Sargasso Sea
GAQNCHHSYDYGAYTGQVNSTMLKNVGAKFVILGHSENRQLGETDNLINLKIKSAIKSDLKIIFCIGETLKERRQKKTNQILKKQIEKGLKSIKNKSKIIIAYEPVWSIGTGVIPKEADLNKTISFIKNKFIKKYPKILYGGSVNANNVSILKKIPNIDGFLIGGASQNPKKFIDIIKKTIN

SEQ ID NO: 155473 - protein, 213 aa, Unknown
  Bacterial polypetide isolated from the Sargasso Sea
MICPSFPYLGQAFEAFKNLGIRVGAQDCHYKANGAYTGDVSSKMIRELGSSYIIVGHSERRDNYQLEDLHIFEKVKRTIDENLIPIICIGENLAERQNDDTETVLKTQLNFFLKSDLKEVDFVVAYEPKWAIGSGQVASLLEIDKTHTFIRETISRTFNAEIARGTRIIYGGSVKPDNSKKILKLEEVDGVLIGGASLNPQDFFSIIKEFKKD

SEQ ID NO: 155474 - protein, 158 aa, Unknown
  Bacterial polypetide isolated from the Sargasso Sea
MINRKQYCVANLKMNLSGNQTMDYISELNNLFDKSGNNKVNTIICPSVTSLSIFFDYIRDNNYCLGAQNIHHKEYGAYTGETSINMISDFINFVILGHSERRQYFNETNEIINKKIIKVSQHSLNSIVCIGETLEQRKNNEVKKTLKNQLSTCLQNVE

SEQ ID NO: 155475 - protein, 115 aa, Unknown
  Bacterial polypetide isolated from the Sargasso Sea
NQTTEVLNRQLEVIKDIEFNDSLVIAYEPVWAIGTGNTPTSDKINEIHKFIKDVVQSFTDDSTIPMVLYGGSVNQENAENFFKEESVDGALIGGASLDGRQFANIINIFNGINLK

SEQ ID NO: 155476 - protein, 207 aa, Unknown
  Bacterial polypetide isolated from the Sargasso Sea
MNQKIIIGNWKNYLNYEESILLSKAISNINISNKIRVMISPNHLYIKEVNEILRKTNVEVIAQNLTSLESKSDTGGISAVNLKNLNINRSLVAHSETRLRQKDPQNILNEIIPIGYQFVLCFEEIDQIPFDLLTNNFEIILAYEPVWAIGTGETASIDHINEIHDQVKSRLKDLSLNIPVLYGGSVNPSNSKDILESKFVDGVLVGG

SEQ ID NO: 155477 - protein, 156 aa, Unknown
  Bacterial polypetide isolated from the Sargasso Sea
IIGHSENRFEGDTNKLIKQKIESALKQNLNVIFCVGETLKEKNKGKTFKVIKNQIKSSLSKKYNFNKIILAYEPVWAIGTGKIPKIQTVKKTIIFIKNQFQKILKVKKTPVVLYGGSVNNSNIRMFSSISEIDGFLIGGASQSSKKFIDIIKNYYK

SEQ ID NO: 155478 - protein, 90 aa, Unknown
  Bacterial polypetide isolated from the Sargasso Sea
LVIAYEPVWAIGTGKTASAEDAQLMCAHIRSVVTDIHKPAGTNVRIQYGGSVNASNAAELMSMEDIDGALVGGAALEAASFARIVSFQDA

SEQ ID NO: 155479 - protein, 126 aa, Unknown
  Bacterial polypetide isolated from the Sargasso Sea
MIIANWKCNGSKAMINTWINNFLTNYDETKKAFIGIAPPSIYIESLLETELNKLAEINIGSQDIDISSGARTGAISSDMILDFDCKFSIIGHSERRQLFNETNEEIKQKILKIAKKTITILCVGET

SEQ ID NO: 155480 - protein, 233 aa, Unknown
  Bacterial polypetide isolated from the Sargasso Sea
MYGNLKSLNTLNKVIRFSKSKEIKKGRLIYCPPNTLISSFLKKFENCLIDIGGQNCHESEDYGSHTGFVNSKMLKSSGANYVILGHSENRQKGETDKLINLKIKSAIKSKLKVIFCIGETLAEKKKKKTKSILSKQIKLGLKKIKKKSNIFVAYEPVWSIGTGKIPKIDELEQTVEFIKKKFKGKLPKILYGGSVNPKNIRNLKKITNLDGFLIGGASQNSKKFIDIVKKTYN

SEQ ID NO: 155481 - protein, 217 aa, Unknown
  Bacterial polypetide isolated from the Sargasso Sea
MYGNFTSINSINSVIKLTKLKKFRKIRIVYCPPYTLLDSFVKKTKNTKIYIGAQNCYYKSPYGSYTGSISCKMIQNTGSKFVIIGHSERRKEGDTDKKINLKIKSALDSNLKVIFCIGETLHQKKNKQTYRILQKQIISGLKNIKKLQNVIIAYEPVWSIGSGAVPNNELLSKTIKFIKKILKEKIKYERVKIFYGGSVNPTNIKKIRKIKQINGFL

SEQ ID NO: 155482 - protein, 179 aa, Unknown
  Bacterial polypetide isolated from the Sargasso Sea
NCHHSYDYGAYTGQVNSNMLKNVGAKYIILGHSENRQLGETDNLINLKIKSAIKSGLKIIFCVGETLKERRQKKTNQIIKKQIEKGLKSITNKSKIIIAYEPVWSIGTGIIPKEAVLNETISFIKSKFVKKYPKILYGGSVNTNNADKLKKIPSIDGFLIGGASQNPKKFIDIIKKTIN

SEQ ID NO: 155483 - protein, 234 aa, Unknown
  Bacterial polypetide isolated from the Sargasso Sea
MTNNNMIFIANWKMNGEKSHISGIKKTIKFLKQSKNKKKQIIYCPPFTLISSVKNKVKNTKIKVGAQNLSHLNDYGALTGSVNSKLIKSAGGDYVIVGHSEIRKQENDILINKKIHSALKEKLKVILCIGETYKEKKNNKTLSVLKRQITIALKNIKKINNIIFAYEPRWAIGTGKIPKSSELRKNFKDINHIINKLKKNQKYKIIYGGSVNSKNVLELKKINDLKGFLIGSAS

SEQ ID NO: 155484 - protein, 229 aa, Unknown
  Bacterial polypetide isolated from the Sargasso Sea
GLSTLNSLNKVIKFLKIFKKSNNTKIIYCPPSTLIRPLSKKIINSKIQVGAQNCHESSTYGAATGSINPTMLKNVGAKYVILGHSENRETGETDKLINAKIKSATKSGLKVIFCIGETLSQKRKKITKKILSKQITLGLQKVKKRKNIVIAYEPVWSIGTGVIPKPNDLLSTVNFIKKKVRNIKVLYGGSVNPKNINELKLIKNIDGFLIGGASQDPKKFIDIIKKTYN

SEQ ID NO: 155485 - protein, 224 aa, Unknown
  Bacterial polypetide isolated from the Sargasso Sea
NSLHNVEKFLKRFKKNKFSKIIYCPPYTLIRPMSKKLQKSRIEVGAQNCHEAEISGAFTGSVNPSMLKSVGAKYVIIGHSENRRNGEDDKLINRKIKTSLKMGLKVIFCIGETLQEKRKKITKKILSKQIKDGLRNIKTKKNIIIAYEPVWAIGTGLIPKIKDLFLIVAFIKKRMKNVKILYGGSVNPKNIQQLKIIDNIDGFLVGGASQDSKKFIDIIKKTYN

SEQ ID NO: 155486 - protein, 222 aa, Unknown
  Bacterial polypetide isolated from the Sargasso Sea
MKQKIIIGNWKNYLGHKESVSLAHSLSELVTKDKTRVMVSPNHLYLNEVNQILSTTNIEVISQNLTSAESKSDTGGITLKNLKEININRSLVAHSETRIREKNPQSILLEIIPIGFPFVLCFEEINQIPFDVLNDDFEIILAYEPIWAIGTGETASIGHINEIHSDVKLKLSKLGLNIPILYGGSVNPSNCKEILASDNVDGVLVGGASTKYDLFKEIVNSI

SEQ ID NO: 155487 - protein, 49 aa, Unknown
  Bacterial polypetide isolated from the Sargasso Sea
PILYGGSVNGSNAFEIFNVPNVNGALVGGASLSFDKFSPIIRALEDANC

SEQ ID NO: 155488 - protein, 104 aa, Unknown
  Bacterial polypetide isolated from the Sargasso Sea
FICSQLKECFKDIQADNIVIAYEPIWSIGTGTLPKINEISEIHSSIKDYCINHLKFKPESILYGGSVNDENCSNLINDKYIDGFLVGGASLKGNSFAKIVNNSI

SEQ ID NO: 155489 - protein, 103 aa, Unknown
  Bacterial polypetide isolated from the Sargasso Sea
MVNLDKYSSIFIANWKLNGNSSFLKDYYEKLKVNSNNCTIICSPSIYLKSLKTNNKNLFCGAQDVSYYKEGAYTGELSAIMLKDNNIDFCLVGHSERKQYFAE

SEQ ID NO: 155490 - protein, 178 aa, Unknown
  Bacterial polypetide isolated from the Sargasso Sea
MFILINLKTYVCDPIEIAKAANSISNELDVRIAVAPQVIHLKEVVETGVETWAQHMDKEGDKVRTGTVTSAGLSEAGVRGSLLNHSEHRLLLAEIDESIQEASEAKLETVVCANNPSQIAAATSLDPTFVAVEPPELIGSGIPVSKAAPDIVRDAVESAGKVNPKIPVLCGAGISNGE

SEQ ID NO: 155491 - protein, 137 aa, Unknown
  Bacterial polypetide isolated from the Sargasso Sea
MTCAESKSYLEEFIPLIKNINEDRKVIIAPPFTAISTFSDHSDFDCLEISSQNIHWENEGAFTAEISPKMLIEHGVSFAIVGHSEPRKYFSESDEQINKRAVFAQSSGLTPIVCVGETLEQREREEADRVITRQVNK

SEQ ID NO: 155492 - protein, 191 aa, Unknown
  Bacterial polypetide isolated from the Sargasso Sea
MKEKIIIGNWKNYLNLDKTIELAAKVSTEQIPDNIRLMVSPCSLYINEVNQVLKESSIEVIGQNITSYESSADTGGVTAIGLNNIGVSRSIVGHSEVRKRNKGFKSEDILTQLIPARFKFILCFEVIEQIPFDILNNDFEMILAYEPVWAIGTGETASIKHINEIHGLVKSKLSKLNLDIPVLYGGSVNPG

SEQ ID NO: 155493 - protein, 171 aa, Unknown
  Bacterial polypetide isolated from the Sargasso Sea
VHIQGFVNSKMLKSSGANYVILGHSENRQKGETDHLINLKIKSAIKSKLKVIFCIGETLAEKKRKKTKSILSKQIKLGLKKIKNKSNIFVAYEPVWSIGTGKIPKIDELEQTIEFIKKKFKGKLPKILYGGSVNPKNIGNLKKITNLDGFLIGGASQNHKKFIDIVKKTYN

SEQ ID NO: 155494 - protein, 174 aa, Unknown
  Bacterial polypetide isolated from the Sargasso Sea
PPTGSINAMMIKSLKCEYVILGHSEKRAKGENDKIINKKIISALKNNLKVIFCIGETSAQKKKKLTKKVLFNQLNKGLKKVKNKNNVLIAYEPVWSIGSGIIPKPQALKETTNIIKLFLAKKMNFKNPKILYGGSVNPKNIYLLKNIGNLDGFLIGGASQNSNKFIDIIKKTFN

SEQ ID NO: 155495 - protein, 118 aa, Unknown
  Bacterial polypetide isolated from the Sargasso Sea
VKTNRRIASFLGSERIQKCNIAYEPIWAIGTGNVAKESDIKEMHDAIRVFLEESISKSSAQDISLLYGGSVNYENVLSIVDQENVDGVLVGGASVSMETFGKLLEALSGIGSSSKQYS

SEQ ID NO: 155496 - protein, 140 aa, Unknown
  Bacterial polypetide isolated from the Sargasso Sea
AVAHGFDVMICLGETLGERQSGKAEQVVIDQLRISVPEDIPQNRLMIAYEPLWAIGTGEVASLQDIAAMHDAISSELPKSQDGATSAKAPVLYGGSVNAGNAAAIFALDNVHGGLVGGASLDAAAFGSICDLAQQQMLRC

SEQ ID NO: 155497 - protein, 153 aa, Unknown
  Bacterial polypetide isolated from the Sargasso Sea
AKYVILGHSENRESGETDELINNKIKAATKSGLKVIFCIGETLGQKRKKITKKILSKQIALCLQKVNKKQNIIIAYEPVWSIGTGIIPKLDDLFRTINFIKKKVKNIKVLYGGSVNPKNINELKLIKNIDGFLIGGASQDPKKFIDIIKKTYN

SEQ ID NO: 155498 - protein, 53 aa, Unknown
  Bacterial polypetide isolated from the Sargasso Sea
KSAAEEVRIQYGGSVNAANAGELMSMPDIDGALVGGASLDAASFARVVSFQDT

SEQ ID NO: 155499 - protein, 208 aa, Unknown
  Bacterial polypetide isolated from the Sargasso Sea
MAEIVVAANWKMNKTVSESDNLIKEILEKIPPVNSVTCVVFPPFLSIPSAAGLIDGSSVNLGAQNVHSAKNGAFTGEVSALMLQDYCSYVLLGHSERRLLFGETDAFVNEKLAGAIECGLRPIVCVGEQSSDRESGLTENVIRNQIKNSFKDIRAINNIIVAYEPVWAIGTGTAASPDDAEDVNKLIREELAFIFGSEQVSKTQYFTE

SEQ ID NO: 155500 - protein, 165 aa, Unknown
  Bacterial polypetide isolated from the Sargasso Sea
MIVANWKCNGSKAMINEWTNNFLTNYLEVKKAFIGIAPPSIYIESILETKLSKLKEINIGSQDIDISSGARTGAISSEMILDFDCKFSIIGHSERRQFFNEKNDEIKQKILKIANKTLTILCVGETEEENNNGQTKDVLKRQLEVVKDIEFNDSLVIAYEPVWAI

SEQ ID NO: 155501 - protein, 243 aa, Unknown
  Bacterial polypetide isolated from the Sargasso Sea
MFMTNNIIFIANWKMYGNKNNINGIDKVVNFLKKNKKKKFKVIYCPPYTLLSKLKKKFSKTRVLLGAQNCHHEINYGPYTGSINAKLLKNEEVKYIIIGHSENRSSGDTDYIINQKIKSAIRENLNVIFCVGETLEERKKKITSKVIKKQILNGLRNIEAYNKIIISYEPRWSIGTGKILHKEDLEKVISLIIKILSSLKKNAKFKIIYGGSVNKSNIHILRKIQGVDGFLIGGASLKAQYFY

SEQ ID NO: 155502 - protein, 250 aa, Unknown
  Bacterial polypetide isolated from the Sargasso Sea
MTNKYKYFVANWKMFGDIRSINSLKKVIKISKLRKYKTAKIIYCPPYTLLNTFVSRLKKTNINVGAQNCHQSSSGGAYTGHVNSQMIKNIGCKYVIIGHSENRIDGDTDSKINKKIKASIENNLNVIFCIGEKIKEKKLKKTKSVLYKQIKKGLRRLKNLNKIVIAYEPVWSIGTGMVPKNHELLSNILYIKKILKSRFKLKNPKVLYGGSVNPVNIKDLRKINQIDGFLIGGASQNSYKFIDIIKKTFI

SEQ ID NO: 155503 - protein, 220 aa, Unknown
  Bacterial polypetide isolated from the Sargasso Sea
MINLANFSSIFIANWKLNGNIEFIKEYYQKLIPNSKNCIVICSPNIYLNQLKSNNKFLFSGAQDVSIYNNGAYTGELSSSMLLDNNINFCLVGHSERRQYFNESNEAIKIKSTNLINESIIPVICIGESLEEKKSDKTKEILKKQIENCIPEISNHQNTIIAYEPIWAIGTGLTPSISEIDEVHQYIKNINDKFINFKVIYGGSVKSSNSANGKTPPLQK

SEQ ID NO: 155504 - protein, 205 aa, Unknown
  Bacterial polypetide isolated from the Sargasso Sea
VYSTIIEADKLNLFLSSQNVSEFVQGAYTGEVSSEQLVKLKVSYCIVGHSERRQHFKESDESINLKVHNLINKSITPIICFGESIEQRNSGKYLDYIINQVDSATKGLRKDKVDEIVFAYEPIWAIGTGETASLQNIIEVVSEVKKYIESKPFYNEEKIKFVYGGSVSPNNSEEILNSNIINGALVGGASLDVEQFVKIIESIEL

SEQ ID NO: 155505 - protein, 128 aa, Unknown
  Bacterial polypetide isolated from the Sargasso Sea
NIVLGETLEQRNSNQYLEHITNQINSAVKGLRKDKVENLVFAYEPIWAIGTGEVASLEDAVEVMSMVKENISEKPFYDSDSVRFIYGGSVTPDNSSELLNSKIIDGALVGGASLDVDKFVTIINSIDL

SEQ ID NO: 155506 - protein, 237 aa, Unknown
  Bacterial polypetide isolated from the Sargasso Sea
MFGLISSINKIDKVINLTKKNTFKKINIIYCPPSTILSIFANKLRNSKIKIGAQNIFYTENFGPHTGNVNAKMIKDSGASYVILGHSENRNEGETDLVINKKIKAALKEKIKVIFCFGEKLRDRNNKKTSNVLKKQILNALKGVNDIKNIIFAYEPVWSIGTGKVLKSENLFKDIEKIKGIIRTNFNIKEINILYGGSVNTKNIIDLKKVDNLSGFLIGAASQNQNKFIDIIKKTFN

SEQ ID NO: 155507 - protein, 175 aa, Unknown
  Bacterial polypetide isolated from the Sargasso Sea
MIIANWKCNGSKAMINEWANNFLTNYVEMNKAFIGIAPPSIYIESILNTKLNKLKEINIGSQDIDISSGARTGAISSEMILDFDCKFSIIGHSERRQFFNEENDEIKQKILKIANKTQTILCIGETEEENKNDQTEDVLKRQLEVIKDIEFNDSLVIAYEPVWAIGTGNTPTPDR

SEQ ID NO: 155508 - protein, 58 aa, Unknown
  Bacterial polypetide isolated from the Sargasso Sea
LSNLVSLRFSKHVSILYGGSVNAVNSVDILNLDQVDGALVGGASLKSKEFCKIIDSYL

SEQ ID NO: 155509 - protein, 197 aa, Unknown
  Bacterial polypetide isolated from the Sargasso Sea
MDKKFYIAANWKMNASLAFIDEYFASLGSESKNSNEMIICPPDIYLQFVTEKAPSFVKVGAQNISPHDSGAYTGECSGQMIADQSAQYAIIGHSERREYHNESNDQIRLKLLKAIEYDINPILCIGESIEQRDSGQTLDVINDQIRSVLDNEILSANTNMLIAYEPIWAIGTGLTATPDMANEVHAHIHSVLSEMSP

SEQ ID NO: 155510 - protein, 125 aa, Unknown
  Bacterial polypetide isolated from the Sargasso Sea
MINLSEFSKFFIANWKLNGNLSFIKEYTQLLKVNSSKGNCVVICPTAIYLNNFKQNEGNYYLGAQDISQYETGAFTGEISSKSLTEFGVNFCIVGHSERRQYFNEKNEDVKEKATKLLENEIIPI

SEQ ID NO: 155511 - protein, 184 aa, Unknown
  Bacterial polypetide isolated from the Sargasso Sea
MEQTGARTGEISASMIKDLGCAFSIVGHSERRILFHETNQMICQKLIQANNHSLIPILCIGESADENQRNNTYKVLKEQIIEALENANELSSLIIAYEPVWAIGSGKTPNPEEINSVHEMIKDVVQSRFPKIGLESVLYGGSVNLKNASSLFEQKNIDGALIGGASLDGREFALIANVLKEQRV

SEQ ID NO: 155512 - protein, 161 aa, Unknown
  Bacterial polypetide isolated from the Sargasso Sea
MINLTSFSSIFIANWKLNGNKAFIKEYYQKLSPGKGNCVIVCSPNIYLSQLYSNNKNIFSGAQDISKFIEGAYTGELSSIMLKDFDINFCIVGHSERRKYFNEVDQSVNLKSSNLIKHNIVPVICIGETLEEKEKGITKDVLKKQIENGIPDNSSDLNTII

SEQ ID NO: 155513 - protein, 248 aa, Unknown
  Bacterial polypetide isolated from the Sargasso Sea
MRKKVLAGNWKMNLNSEQSLALFNDISVALSSKKEIDFIVFPPFLYLKELIDSRSFVEVGAQNFHPELSGAFTGEVSVSQLNDIGVKSALVGHSERRISFKESNSFLKQKVDAAIQHQIRVVFCCGEPLEVRENQDPVMYVTNQLEESLFHLNSEQLKTCMIAYEPIWAIGTGKVATEEQISQMHTAIRNELKSKYGQEIANEISILYGGSCKPSNAKAIFSCENVDGGLIGGASLDSTSFIELSKCF

SEQ ID NO: 155514 - protein, 202 aa, Unknown
  Bacterial polypetide isolated from the Sargasso Sea
PPNTLISSFLKKFKNCLIDIGGQNCHESEDYGSHTGFVNSKMLKSSGANYVILGHSENRQKGETDKLINLKIKSAIKAKLKVIFCIGETLAEKKKKKTKSILSKQIKLGLKKIKEKSNIFVAYEPVWSIGTGKIPKIDELEQTVEFIKKKFKGRLPKILYGGSVNPENIRNLKKITNLDGFLIGGASQNSKKFIDIVKKTYN

SEQ ID NO: 155515 - protein, 83 aa, Unknown
  Bacterial polypetide isolated from the Sargasso Sea
ILAYEPVWAIGTGETASFDHINEIHEQIKSKLKDLELNIPVLYGGSVNPSNSKGILESEFVDGVLVGGASTKIDQLEGILNSI

SEQ ID NO: 155516 - protein, 238 aa, Unknown
  Bacterial polypetide isolated from the Sargasso Sea
MNNDEIESQRLINSIIEKKLDNNCEVYVSPSFPFLKDAIKLCDKTNIKVLAQNVSHEIEGAFTGDVSCKMLDSLEVKSVIIGHSERRTIFKEDNNMLLNKLKLCFKNNFQVFFCIGEDIDARKSEEQFFVIEDQLNKTVFQLENIDPNKLIIAYEPVWAIGTGLSATPNQAQEMHKFIREKFKNKFSESISEKLSIIYGGSVKPSSAKEIFAQNDVDGGLIGGASLKSKDFADIVNSI

SEQ ID NO: 155517 - protein, 233 aa, Unknown
  Bacterial polypetide isolated from the Sargasso Sea
MYGDLKVLNSLDKVIKFSKSIKQKKIKLIYCPPSTLINILFNKLKKTKIEVGAQNSHESDKFGPFTGQINSRMLKNVGARYVILGHSENRQLGEDNKKINSKIKSALKSGLKIIFCIGETLKDKRNKKTNQVLSKQIKIGLKSIRKKSNIIIAYEPVWSIGTGLIPKRNDLIKTISFIKKKLGKKPSKILYGGSVNSENINQLKNIYDIDGFLVGGASQDTKKFIDIIKKTIN

SEQ ID NO: 155518 - protein, 202 aa, Unknown
  Bacterial polypetide isolated from the Sargasso Sea
MYGDLKALNSLNKVIKFYKSIKHKKLKLIYCPPSTLINSLSNKLKNTKIEVGAQNSHESDHYGAFTGQINSKMLKNVGARYVILGHSENRQTGEDNQKINSKIINSLKSGLKIIYCIGETLKEKRNKKTNQVLSRQIKMGLKSIRNKSNIIIAYEPVWSIGTGLIPKPSDLIKSISFIKKKLGKKPSKILYGGSVNSDNINQ

SEQ ID NO: 155519 - protein, 145 aa, Unknown
  Bacterial polypetide isolated from the Sargasso Sea
YTGEISCQMLVEAGCRYVLVGHSERRRLFGETSFIVAEKFAAARAAGLIPILCLGESGAARQARRTFEVIAEELDIVIEKNGAMAFDNAIIAYEPIWAVGTGKCATPEQAQEVHSFIRGRLAEDTPVIGEKVIIIYGGSVTPANA

SEQ ID NO: 155520 - protein, 219 aa, Unknown
  Bacterial polypetide isolated from the Sargasso Sea
MKKIIIGNWKLNLDHLEAIQLFQKLNYSLNNDVDKKIDIVVAPSFTSLRSIQTIIEADKLNLFLSSQNVSEFVEGAYTGEVSSEQLLKLKVSYCIVGHSERRQHFNETDESINLKVHNLINKKITPIICFGESIEQRNSGKYLDYLIKQVDSATKGLRKDKVDEIVFAYEPIWAIGTGETASLQNIIEVVSEVKKFIESKHFYNEEKIKFIYGGSVSPK

SEQ ID NO: 155521 - protein, 93 aa, Unknown
  Bacterial polypetide isolated from the Sargasso Sea
FDTLNDNFEIILAYEPVWAIGTGETASIGHINEIHSDVKSKLSKLGLNIPILYGGSVNPSNCKEILASDKVDGVLVGGASTKYDLFKEIVNSI

SEQ ID NO: 155522 - protein, 71 aa, Unknown
  Bacterial polypetide isolated from the Sargasso Sea
MKKVPIIAGNWKMNKLPSEGRSFINEVTNLVLDIKSVSVIFAPPFTGLFEVQVKSPFHIAAQIVIGRTRVH

SEQ ID NO: 155523 - protein, 58 aa, Unknown
  Bacterial polypetide isolated from the Sargasso Sea
RLAARFGSHGDAFRILYGGSVKPSNAEELMSVPNVNGALVGGASLNATDFFGIISAYL

SEQ ID NO: 155524 - protein, 141 aa, Unknown
  Bacterial polypetide isolated from the Sargasso Sea
FLINKKIKSALRENLKVIFCVGEKLSDKKNKTTYNVLKKQINNGLKNIKNLNNIIFAYEPVWSIGTGIIPKNQELTKNINNIINILNKLKKSKKPRILYGGSVNPKNVKELAEINQINGFLVGGASLSAKKFIDIIKKSIN

SEQ ID NO: 155525 - protein, 219 aa, Unknown
  Bacterial polypetide isolated from the Sargasso Sea
MKKIIIGNWKLNLDHLQGIQLLQKINYSLDKDIEEKIDIVLSPSHTSLRSLQTVISTDNLKIKISSQDVSSYSDGAFTGEVSAIQLKKLDIDYSIIGHSERRLHFNETDNDVNIKLTRLLENEIIPILCFGESLEQRSEGSYLEFIKNQINEGLKGVRKDKVNKLVLAYEPIWAIGTGEVASIENIVEVLDFVKDLLSDKPYFSDETVKLIYGGSVSPR

SEQ ID NO: 155526 - protein, 181 aa, Unknown
  Bacterial polypetide isolated from the Sargasso Sea
MKRTKYTIANWKMNGQKDSYKLVKSISNYYHKMKRKTSKVVICPPFTLLSELIKKEKKIKFGGQDCHYKSEGAYTGSISANMLKTINCQYVILGHSERRIYQKETSQELYLKIQSAIKSNLTVIYCIGEKLEEIKKRNIILKKQLSSLPKKIDPKKIIIAYEPVWAIGTGKVPSLDDINKI

SEQ ID NO: 155527 - protein, 176 aa, Unknown
  Bacterial polypetide isolated from the Sargasso Sea
GPYTGALSAGMLKHAGAKYVILGHSENRSTGDTNTIIKKKIGASLSKNLKVIFCIGETISEKNKGKKFSVLKKQINNSINKNFDLKKIIIAYEPVWAIGSSKIPKYKDLKKTFIFIKQHFKKRFRTKKTPIVLYGGSVNHKNITMFSSISEIDGFLIGGASQSSKKFIDIIKNYYK

SEQ ID NO: 155528 - protein, 196 aa, Unknown
  Bacterial polypetide isolated from the Sargasso Sea
MKKIIIGNWKLNLDHLEAIQLFQKLNYSLNNDVDKKIDIVVAPSFTSLRSIQTIIEADKLNLFLSSQNVSEFVEGAYTGEVSSEQLIKLKVSYCIVGHSERREHFKETDESINLKVHNLVNKKITPIICFGESIEQRNSGKYLDYIIKQVDSATKGLRKDKVDEIVFAYEPIWAIGTGETASLQDIIEVVSEVKKF

SEQ ID NO: 155529 - protein, 117 aa, Unknown
  Bacterial polypetide isolated from the Sargasso Sea
MDKKFYIAANWKMNASLSFIDEYFDSLGSESKNSNEMIICPPDIYIQLVKEKAPNFVKVGAQNISHHDSGAYTGECSGQMITDQSAQYAIIGHSERREYHNESNDLIRLKLLKAMNT

SEQ ID NO: 155530 - protein, 244 aa, Unknown
  Bacterial polypetide isolated from the Sargasso Sea
YFIANWKMYGNIADISKSKSVVRLSNLKKFKKTKIIYCPPYTLLKTFYEKVKNSNISIGAQNCHSNYEYGAFTGSVNAKLIKSSGAKFVILGHSENRKNGENDLIINKKIHSVLKENLNVIFCIGETLAEKKNKKTYSVLKKQITKGLKGIKKINNIMIAYEPVWSIGTGLIPNNSELLKNISNIKKIFKKFTKYSNIKILYGGSVNPKNIRELAQIKAINGFLVGGASLNSKKFIDIIKKSII

SEQ ID NO: 155531 - protein, 86 aa, Unknown
  Bacterial polypetide isolated from the Sargasso Sea
MVNLSKYSSIFIANWKLNGNSSFLKDYYEKLKVNSNNCTIICSPSIYLKSLKRNNENLFCGAQDVSSYQEGAYTGELSASMLRDNN

SEQ ID NO: 155532 - protein, 164 aa, Unknown
  Bacterial polypetide isolated from the Sargasso Sea
MKSPIVAANWKMNLTIDEGLKLVEQILDSSSSDSSEIIFFPPSIALSAICGELKNTGYKIGIQNIHHEESGAYTGEISAGMVKSLDVQYAIIGHSERRQYFLETDLQVNGKIKSALGAGLCPIVCVGESLDERESGKTNEILKKQLMSAFNNIDNKLDRLVVAY

SEQ ID NO: 155533 - protein, 216 aa, Unknown
  Bacterial polypetide isolated from the Sargasso Sea
KKYNKAKIIYFPPFTLISDLIKKFSKTKILVGGQNCHHIEDYGSFTGSISPKMLKDLGCKYVILGHSENRTSGENDNEVNKKIRSALNKKLKIVFCIGETLKEKRKKLTYSVLKKQINKGLKGVKNYQNILIAYEPVWSIGTGVIPTDKELKFNVATIRKLVSKKTKKKLPILYGGSVNSKNISGLKNITGISGFLVGSASQSSKKFIDIIKKTIN

SEQ ID NO: 155534 - protein, 111 aa, Unknown
  Bacterial polypetide isolated from the Sargasso Sea
MNNKFIIAGNWKMNKTPSEGKIFINEVRSMVPGLQNTKVIFFPAYSGLANIDVRDPFYLGAQNCHWEGSGAFTGEISIEMIKDCDAKYIIVGHSERRQLFKEHDKDINNKI

SEQ ID NO: 155535 - protein, 201 aa, Unknown
  Bacterial polypetide isolated from the Sargasso Sea
MIVAANWKMNKNLSEAIEFLEKLDFHIDENDSQSSVIIFPPFIGLESLAGKFNSNNFYLGSQNFYYEESGAFTGEVSISMLEHIGIDYAIIGHSERRSLFYENDNLINKKIRSCLASSIKPILCIGESLEQRDSSLTENTLKNQLKSGLKNIDALKLDKLIIAYEPIWAIGTGKTATVDQIYSTHQQIKGILNELFNDESP

SEQ ID NO: 155536 - protein, 243 aa, Unknown
  Bacterial polypetide isolated from the Sargasso Sea
MLIAGNWKLNCDIEEAKDLSTSILNNLRDKALSSEVALFPPNIYIDTVKKIVNNSNIFIGAQDCSVHTSGAYTGDVSAKMLNDMECKYIIVGHSERRIGKFETNNDVALKAKNVMENKMCPIICVGEDAKDRDDGNALNFIEKQLNESIPKSYYKDFIIAYEPIWAIGSGKIPTIDSINEMFNMIRQWLLNNGIDNNIKILYGGSVNKENVKEIFSCRDLGGLLIGGVSLKAKEFSEICILAG

SEQ ID NO: 155537 - protein, 147 aa, Unknown
  Bacterial polypetide isolated from the Sargasso Sea
MRAPLVAANWKMNGSFSMLDKMLEFLRKNSENTPCQVVICPPHVLLSSLKKSVEGSGIEVGAQNVHSELSGAFTGETSAPLLKECGVKFCIVGHSERRKLFDESDQFIRSKTETLLRNGIRPILCVGESLEQRSSGNHEDVVTRSIT

SEQ ID NO: 155538 - protein, 88 aa, Unknown
  Bacterial polypetide isolated from the Sargasso Sea
MAYEPIWAIGTGKTATPEQANSMHAIIRNEIGSLSNTEVAANIQIIYGGSVNVENAKYLLAQSEIDGALVGGASLKIEDFSHIVAAGT

SEQ ID NO: 155539 - protein, 254 aa, Unknown
  Bacterial polypetide isolated from the Sargasso Sea
MKKIIIGNWKLNLDHLEAIQLFQKLNYSLNNDVDNKIDIVVAPSFTSLRSIQTIIEADKLNLFLSSQNVSEYVGGAYTGEVSSEQLVKLKVSYCIVGHSERRKHFKETDESINLKVHNLINKNITPIICFGESIEQRNSGKYLDYIINQVDSATKGLRKDKVDEIVFAYEPIWAIGTGETASLQNIIEVVSEVKKYIESKPFYNEEKIKFIYGGSVSPNNSEEILNSNIINGALVGGASLDVDQFVKIIESIEL

SEQ ID NO: 155540 - protein, 176 aa, Unknown
  Bacterial polypetide isolated from the Sargasso Sea
MKRTKYTIANWKMNGQKDSYKLVKSISNYCQKMKRKTSKVVICPPFTLLSELIKKEKKIKFGGQDCHYKSEGAYTGSISANMLKNINCQYVILGHSERRIYQKETSQELNLKIQSAIKSNLTVIYCIGEKLEEIKKRNIILKKQLSSLPKNIDPKKIIIAYEPVWAIGTGKVPSLD

SEQ ID NO: 155541 - protein, 233 aa, Unknown
  Bacterial polypetide isolated from the Sargasso Sea
MYGDLKALNSLNKVIKFYKSIKHKKLKLIYCPPSTLINSLSNKLKNTKIEVGAQNSHESDHYGAYTGQINSKMLKNVGARYVILGHSENRQTGEDNQKINSKIKSALKSGLKIIYCIGETLKEKRNKKTNQVLSKQIKMGLKSIRNKSNIIIAYEPVWSIGTGLIPKPSDLIKSISFIKKKLGKKPSKILYGGSVNSDNINQLKNINTIDGFLIGGASQDPNKFIDIIKKTIN

SEQ ID NO: 155542 - protein, 255 aa, Unknown
  Bacterial polypetide isolated from the Sargasso Sea
MSHPLVIANWKMNIPSGGISGWIQNEMISNNDKVDFDNKSSYFKFMGIAPPISHLTELKNLFQFGFLGAQDISKFNDGAKTGDISADMAIDKGCTFSILGHSERREFYNETNSIVSEKLRVCLEKDILPVVCVGESLDDFNAVKTLDVLEMQLKEIFTSISAKKTVLIAYEPVWAIGSGKTPSADEVNNIHQHIKDIVQSVADIEAISVIYGGSVNCENAKSFFQQTNIDGALIGGASLNGKEFLDIYNDFLETF

SEQ ID NO: 155543 - protein, 239 aa, Unknown
  Bacterial polypetide isolated from the Sargasso Sea
MIIANFKSNVINFDKWVDDFENSCVPVDFYVGIAPPSIYITEYSSFRLAIGAQDVDHSSGSRTGAVSIEMLDEVGVEFVIIGHSERREFFHEDNDLIRKKIQAVNESKIGSIILCIGETKEENKMGATKDVLKNQLSVIDGFELGKNFTIAYEPVWAIGSGHTPEPKDINEIHKYIKDVVQSVSENNHVPDVVYGGSVTDKNAESFFKEEFVDGALVGGASLNGSTFANIVNKWRENII

SEQ ID NO: 155544 - protein, 252 aa, Unknown
  Bacterial polypetide isolated from the Sargasso Sea
MPICIVANWKLNGSRAFNTQWTLEFFKNFNGHNFSSLGIAPASLYIDHLKSVIGDYDIKIGSQNIDLEQTGARTGEISASMIKDLGCEFSIIGHSERRMLFHETNQMICQKLIQANNNFVIPILCIGESAEENQSNTTFKVLEQQIIEALENLDELSSLIIAYEPVWAIGSGKTPNPEEIDSVHEMIKDVVQSRFPKIGLESVLYGGSVNLKNAYSLFEQKNIDGALIGGASLDGREFALIANLFNELRIQQ

SEQ ID NO: 155545 - protein, 185 aa, Unknown
  Bacterial polypetide isolated from the Sargasso Sea
RLGSQELDSLLSKPLTGGITAEMLVEVGCSFVIIGHSEQRIHLNESNELLSNKLVSAIDNNLTPIYCVGETAKQKKSNQTKEVLLEQLDVIQSQIIDKCIIAYEPVWAIGTGESAEISYIEEVHSFIKEEFKNTTDFSKEISVVYGGSVNLENYKETYNSSQVDGLLIGGASLNHSTFTKIYNMS

SEQ ID NO: 155546 - protein, 248 aa, Unknown
  Bacterial polypetide isolated from the Sargasso Sea
MLWVGTSWKMNHNLPETKKYLNILIKNSKYLSNPKIKFFIIPPFTSLALFNKYKKKLPFIYGAQNMHWEEKGAFTGEVSASMLKSCGCQIVEIGHAERIKYFNENLIHMNKKINLALKYNLIPLVCIGEAKYEKNILKRKKFLNKQIEILLKKIRNRKKQIILAYEPIWAIGGGNKAANIDYCNESIRYIRESALKRLNKVSVLYGGSVNEKNYTKFTESKFIDGIFIGRAALDAKNFIKICKGIDKQ

SEQ ID NO: 155547 - protein, 153 aa, Unknown
  Bacterial polypetide isolated from the Sargasso Sea
MLEIKEFNKIIVANWKLNGSNDFLEAYFEKLVLKGPNSDICGVICPPITYMKNCYSKLHSLYLGAQDCSKFKDGAYTGEISASMLRENNCKFCIVGHSERRQVFNEHNEDIKLKAEQLLDARIIPIICIGETLEQKKMNKTHEVLKEQVINSL

SEQ ID NO: 155548 - protein, 241 aa, Unknown
  Bacterial polypetide isolated from the Sargasso Sea
MYFVANWKMFGDLRTLNSLDKVIKFSKNNKKNKIKIVYCPPNTLIRPLSRRLKKTKIEVGAQNCHHSYDYGAYTGQVNSTMLKNVGAKFVILGHSENRQLGETDNLINLKIKSAIKSGLKIIFCIGETLKERRQKKTNQILKKQIEKGLKSIKNKSKIIIAYEPVWSIGTGVIPKEADLNKTISFIKSRFVKKYPKILYGGSVNTNNVSILKKIASIDGFLIGGASQNPKKFIDIIKKTIN

SEQ ID NO: 155549 - protein, 250 aa, Unknown
  Bacterial polypetide isolated from the Sargasso Sea
MDKKFYIAANWKMNASLTFIEEYFASLGSESKNSNEMIICPPDIYIQSVTEKAPSFVKIGAQNISPHDSGAYTGECSGQMIADQSAQYAIIGHSERREYHNESNELIRLKLLKAIQHDINPILCIGESIEQRDSGQTLDVINDQIRSVLDNEILSANTNMLIAYEPIWAIGTGLTATPDVANEVHAHIHSVLNEMSSNKIPILYGGSMKSSNAKELLQMEHIHGGLIGGASLDASEFLKIYNIAEEIRNG

SEQ ID NO: 155550 - protein, 244 aa, Unknown
  Bacterial polypetide isolated from the Sargasso Sea
MIFIANWKMNGEKSHISGINKTIKFLKKSKNKKNQIIYCPPFTLISLVKNKVKNTKIKVGAQNLSQLNDYGAFTGSVNSKLIKSAGGEYVIVGHSEIRNQENDILINKKIHSALKEKLKVILCIGETYKEKKNNKTFSVLKRQITIALKNIKKINNIIFAYEPRWAIGTGKIPKSSELRKNFREINNIISKLKKNQKHKIIYGGSVNSKNVFELKKINDLKGFLIGSASLRAKNFIDIIKKSTN

SEQ ID NO: 155551 - protein, 187 aa, Unknown
  Bacterial polypetide isolated from the Sargasso Sea
VKQQIFISGAQDVSIYNNGAYTGELSSSMLLDNNINFCLVGHSERRQYFNESNEAIKIKSTNLINESIIPVICIGESLEEKKSDKTKEILKKQIENCIPEISNHQNTIIAYEPIWAIGTGLTPSISEIDEVHQYIKNINDKFINFKVIYGGSVNSSNSANINNLNNVDGCLIGGSSLKVDEFNRIIS

SEQ ID NO: 155552 - protein, 241 aa, Unknown
  Bacterial polypetide isolated from the Sargasso Sea
MNKFFISNWKMNLTVADSIVFSNEISSAINEGNIKDDIEIIICPPFISIPYCFQILKSVSKIGAQDISKMDGAKGAFTGEISAKMVSDYADYVIIGHSERRLNQKETNQDVALKGANILKNNMTPILCIGETEEERKTGEYISILINQLAESSKGLDNKMIVAYEPIWAIGSGNSCNLEQIIEVSGQVKAKYGDDTPFVYGGSVNEENCQELLSQKEIDGVLVGSASLSLDSFNKMIIFNK

SEQ ID NO: 155553 - protein, 206 aa, Unknown
  Bacterial polypetide isolated from the Sargasso Sea
APPSIYITEYSTPKLAIGAQDVDHSSGSRTGAISIEMLDDVGVEFVIIGHSERREFFHEDNGLIRKKIQAVNESKIGSVILCIGETKEENKMGATKDVLKNQLSVINGFELGKNFTIAYEPVWAIGSGQTPEPKDINEIHKYIKDVVQSVSGNNHVPDVVYGGSVTDKNAESFFKEEFVDGALVGGASLNGTTFANIVNIWRENII

SEQ ID NO: 155554 - protein, 239 aa, Unknown
  Bacterial polypetide isolated from the Sargasso Sea
MINLANFSSIFIANWKLHGNIEFINEYYQKLSINSNNCVVVCSPSIFLNHLKTNSKNLFSGSQDVSIYNEGAYTGELSAAMLADNNINFSLVGHSERRQYFFENNEKVKLKSINLIENKIIPVICVGETLEQKEKKMTKEILTEQINQSVPEISNFENTIIAYEPIWAIGTGLTPSINEIEEVHQYIKNINKKLNNFKVIYGGSVKASNSADINNLKNVDGCLIGGASLKVDEFNTIIS

SEQ ID NO: 155555 - protein, 70 aa, Unknown
  Bacterial polypetide isolated from the Sargasso Sea
VDLRGSRSHRICGLIRSWVGATDLIIQYGGSVKPTNIDELMAMSDIDGVLVGGASLKPDSFARIANYQAS

SEQ ID NO: 155556 - protein, 180 aa, Unknown
  Bacterial polypetide isolated from the Sargasso Sea
GSRTGEISASMIKDLGCAFSIIGHSERRMLFHETNQMICQKLIQANNNSIIPILCIGESVDENKSNITFNVLKKQIIGALKDVNELSSLIIAYEPIWAIGSGKTPNPEEINSAHEMIKDVVQSRFPKIDLESVLYGGSVNFKNASSLFEQKNIDGALIGGASLDGKEFALIANVFNELRL

SEQ ID NO: 155557 - protein, 164 aa, Unknown
  Bacterial polypetide isolated from the Sargasso Sea
QYAIIGHSERREYHNESNDIIRLKLLKAIQHKINPILCIGESIEQRDSGQTLDVINDQIRRVLDNEILSANTNMLIAYEPIWAIGTGLTATPDMANEVHAHINSVLSEMSSNGIPILYGGSMKSSNAKELLQMEHIHGGLIGGASLDASEFLKIYNIAEEIRNG

SEQ ID NO: 155558 - protein, 253 aa, Unknown
  Bacterial polypetide isolated from the Sargasso Sea
MTTGSKYFVGNWKMFGIPSSFKILDRINQYFQKDTKNKRKYKIIMAPPFTLLQNFVTRYKNKNIFISAQNCYHKDSFGAYTGNISPFMLKKIGINYVIIGHSENRASGETDAMLKKKVFFALKNNLNIIFCIGENKKEKRNKKTFSVLKKQLTSVLEIKYNFKNIIIAYEPIWSIGSGKVPSSYELLKISINLKKFIKSKFKLNKMPKFLYGGSVNSQIISDFKSIKQLDGFLIGGASKSSKNFIDIIKNFYK

SEQ ID NO: 155559 - protein, 255 aa, Unknown
  Bacterial polypetide isolated from the Sargasso Sea
MRPIIAANWKMNKTIDESISFINSVKETASDGNRSKIIFCPPFTSLFSISKLLYKSDLLLGAQNVHPQKKGAFTGEISVDMLKSALVQYVIIGHSERRKLFGESNKFIQEKVFSVLNSGLIPILCIGEELDERSSGETELILKEQLESVFNSNNIVDIKKIIIAYEPIWAIGTGDTATTNQVEEAHSFIRLILENIFGNNGQNIPIIYGGSVDVDNAKSLINVNGVDGFLIGGASLDGKSFCKIIKIVSENYNRG

SEQ ID NO: 155560 - protein, 243 aa, Unknown
  Bacterial polypetide isolated from the Sargasso Sea
MSKFYILANLKMNKSFDQSVKYLESLSKKVTNYDDEIILFPSNISLEYFSRNIGKFKLGIQDLDFRNEGQGTGSIAASQVKNLCDYSLIGHSERRQHFFENDEIISRKINISQKNNITPVLCVGEDLDTRNKGFSEVEKFISNQINKAISEETDLRNIMIAYEPIWAIGTGKSASIIDIEEVILIIKNCLEKISKQFIVPILYGGSVSEKNSEEFRKSKKINGILVGSASLDSEILSKIINYG

SEQ ID NO: 155561 - protein, 220 aa, Unknown
  Bacterial polypetide isolated from the Sargasso Sea
MSHPLVIANWKMNIPSGGISGWIQSEMVSNNEEEDFDNKSSHFKFMGIAPPISHLTELKNLFKFGFLGAQDISRFNDGAKTGDISADMVIDKGCTFSILGHSERREFYNETNSLVSEKLRICLEKNIVPVVCIGESLEDYNAGKTLEVLDMQLKEIFTSISTKKTVVIAYEPVWAIGSGKTPNVDEVNNIHQHIKDIVQSIAEIEAISVIYGGSVNCENA

SEQ ID NO: 155562 - protein, 250 aa, Unknown
  Bacterial polypetide isolated from the Sargasso Sea
MIIANWKCNGSKAMIDDWFNSYRKTIQNKGFDAGIIGIAPPSIFLNELDLHIKKYDMDIDLCSQDISGSVRRCTGAISSDMLKDNNTFGYCIVGHSERRALYKEDNEIIQDKVFECLSSDINPIICIGESEEENNLGKTEEILKEQLNILRNVSLSDSTIIAYEPIWAIGTGKTPDPKDVNEIHKFIKDVVQSISANSRVPLVLYGGSVSKENAESFLKEEYVDGALIGGASLDGKNFAEIINTMRNIKC

SEQ ID NO: 155563 - protein, 243 aa, Unknown
  Bacterial polypetide isolated from the Sargasso Sea
MTNKYLYFVANWKMFGDLKALKSLDKVIKFSKTIKQKKIKLIYCPPSTLINSLSNKLKKTKIEVGAQNSHESDKYGAFTGQINSKMLKNVGAQYVILGHSENRQLGENNKKINSKIKSALKSGLKIIFCIGETLIEKRNKKTNQVLSKQIKMGLKSIRKKSNIIIAYEPVWSIGTGLIPNQNDLIKSISFIKKKLGKKPSKILYGGSVNSDNINQLKNINTIDGFLVGGASQDSKKFIDIIKK

SEQ ID NO: 155564 - protein, 181 aa, Unknown
  Bacterial polypetide isolated from the Sargasso Sea
MSKKLLIAGNWKLNGEKKDISFIKNLLKFHSKKLTKKVDILICPPFTLIDKFCQLTQRSNIEIGGQDCSENETGAYTGEVSANMLNDLKATYCIVGHSERRLYHNENNNLLNKKILNIQKNNIKAILCIGESLSDRKQSKTLRVLGNQLKGALKNNINPNLLEIAYEPIWAIGTGLVPEYS

SEQ ID NO: 155565 - protein, 245 aa, Unknown
  Bacterial polypetide isolated from the Sargasso Sea
MFFIANWKMFGDLRAINSTKKVIKFSKNKKFARAQIVYCPPYTLIEQFNKITKNSKIKVGAQDCHFLESHGPFTGSVNANLLKIIGAKYVIVGHSENRARGDTNYLINLKIKSALNKNLKVIFCIGETLKEKKKNKTNLIINTQISRGLKNIKKNKNVIFAYEPVWSIGTGIIPKISDLEKQVSLIKKMINKIWKYKNPQILYGGSVNSKNVRQLKKIRSINGYLIGGASQNANNFIDIIKKTII

SEQ ID NO: 155566 - protein, 241 aa, Unknown
  Bacterial polypetide isolated from the Sargasso Sea
MYFVANWKMFGDLRTLNSLDKVIKFSKNNKKNKLKIVYCPPNTLIRPLSRRLKKTKIEVGAQNCHQSYDYGAHTGQVNSTMLKNVGAKYVILGHSENRQLGETDNLINLKIKSAIKSGLKIIFCIGETLKERRQKKTNQILKRQIEKGLKSIKNKSKIIIAYEPVWSIGTGVIPKEADLNKTISFIKSRFVKKYPKILYGGSVNTNNASILKKIPNIDGFLIGGASQIPKKFIDIIQKTIN

SEQ ID NO: 155567 - protein, 176 aa, Unknown
  Bacterial polypetide isolated from the Sargasso Sea
SRTGAISVEMLEEYVNFVIIGHSERREFFHEDNDLIRKKIHAVNESTLMPILCIGETKEENDKGITKDVLKDQLEIVNAIDLDESFTVAYEPVWAIGSGITPEPKDINEIQKYIKDVVQSNSANNLIPKVLYGGSVTDKNAESFFVEEFVDGALVGGASLDGSTFAKIVNIFNSTK

SEQ ID NO: 155568 - protein, 244 aa, Unknown
  Bacterial polypetide isolated from the Sargasso Sea
MIFIANWKMNGEKSHISGINKTIKFLKKSKNKKNQIIYCPPFTLISSVKNKVKNTKIKVGAQNLSQLNDYGAFTGSVNSKLIKSAGGEYVIVGHSEIRNQENDILINKKIHSALKEKLKVILCIGETYKEKKNNKTFSVLKRQITIALKNIKKINNIIFAYEPRWAIGTGKIPKSSELRKNFRDINNIIKKLKKNQKYKIIYGGSVNSKNVSELKKINDLKGFLIGSASLRAKNFIDIIKKSTN

SEQ ID NO: 155569 - protein, 241 aa, Unknown
  Bacterial polypetide isolated from the Sargasso Sea
MYFVANWKMFGNLKSINTLDKVIKFSKSKEIKKGRLIYCPPYTLITSFFKKFENCLIDIGGQNCHENDDYGAHTGSINSKMLKSIGANYVILGHSENRIKGETDKLINLKIRSAIKAKLKVIFCIGETLKEKNSGKTNSILSKQIKFGLDKVKKKSNIFIAYEPVWSIGTGKIPKSKELQQTVEFIKKKFKGKLPKILYGGSVNPKNINDLKKISSLDGFLIGGASQSSKKFIDIVKKTFN

SEQ ID NO: 155570 - protein, 207 aa, Unknown
  Bacterial polypetide isolated from the Sargasso Sea
APPISHLTELKNLFKFGFLGAQDISRFNDGAKTGDISADMVIDKGCTFSILGHSERREFYNETNNLVSEKLRICLEKNIMPVVCIGESLEDYNAGKTLEVLDMQLKEIFTSISSKKTVVIAYEPVWAIGSGKTPTADEVNNIHHHIKDIVQSIAEIEAISVIYGGSVNCENAKSFFQQTNIDGALIGGASLNGKDFLDIYNDFLETF

SEQ ID NO: 155571 - protein, 226 aa, Unknown
  Bacterial polypetide isolated from the Sargasso Sea
IAANFKMHGDVDFYSSWLKKFELPKQNTVLFAPPYLYFDCFLKDERNLLVMSQDVSDEEIGPFTSQISAKMLNEIGVEFSLIGHSETRDKMGFTNKNVFQKFLSLRANRITPIICVGESKDYRDGGKHFGFLEEQLSFYKAESKTGLIFAYEPVWSIGTGILPKSSEIFEVVEFIKSYFDFKIKVLYGGSVNASNAKDLLRIKNLDGLLVGGASLKAEEFAMIAGS

SEQ ID NO: 155572 - protein, 217 aa, Unknown
  Bacterial polypetide isolated from the Sargasso Sea
MGIEHWPEVGIAPPSIYITEYSTPKLAIGAQDVDHSSGSRTGAISIEMLDDVGVEFVIIGHSERREFFHEDNDLIRKKIQAVNESKIGSIILCIGETKEENKMGATKDVLKNQLSVINGFELGKNFTIAYEPVWAIGSGQTPEPKDINEIHKYIKDVVQSVSVNNHVPEVVYGGSVTDKNAESFFKEEFVDGALVGGASLNGTTFANIVNIWRENII

SEQ ID NO: 155573 - protein, 255 aa, Unknown
  Bacterial polypetide isolated from the Sargasso Sea
MIIANWKSNGGLRMIYKWNSDFKNSCPPVDFYVGVAPPVIYMSEISLLEFPLDTPQKKSNNKVWDINIGAQDVDHLSGSRTGTVSIRMFEEFSIDFAIIGHSERREFFNEDNDLIRQKIIALNNSNVKTKILCIGETKEENDKGITKDVLKNQLEVVDAMDLENFIIAYEPVWAIGSGLTPDPKDINEIHKYIKDVVQSNSTNKLIPKVLYGGSVTDKNAENFFKEDFVDGALVGGASLDGKTFANIVNIYSSTK

SEQ ID NO: 155574 - protein, 81 aa, Unknown
  Bacterial polypetide isolated from the Sargasso Sea
AIGTGATASPSDAQEMCSHIRSTLASMHAPAAEKVRIQYGGSVNASNVNELMSMPDVDGALVGGASLEAASFARIVGYEDA

SEQ ID NO: 155575 - protein, 187 aa, Unknown
  Bacterial polypetide isolated from the Sargasso Sea
MFFREDDGPYTGEVSVKMLLDMGCSWAMIGHSERRQYLLETNEMINKKVLSSIKKGLKVILCVGESFEQRRRKKTFESIADQLYRGLRGVSEDLIPQIVIGYEPIWVIGSGEAASVNDISSVHNFISDELKSMFPSAKLLPRIVYGGSVNTDNISQISNLNNVDGVLVGNASMDCDKFCDIVMKVVK

SEQ ID NO: 155576 - protein, 246 aa, Unknown
  Bacterial polypetide isolated from the Sargasso Sea
MSEKIFAANWKMYLNDKESKEFISRITSNKEFFSEFNIMIFPNHLSIAAVQNLAKDLPNIKIGMQDCDASTSGAITGSNSITSLDVDSCIVGHSERRNVFNESNEIIKSKLNNCLNNIDSVILCVGEQLDEKEQNKTFEIIQKQLSILPKELNGKNLIIAYEPVWAIGTGLVASKEYIDDVLSYINNLIKELYSEENCSNISLFYGGSVDENSVKELSSINLLDGFLIGSASADFEKFENILNKMR

SEQ ID NO: 155577 - protein, 231 aa, Unknown
  Bacterial polypetide isolated from the Sargasso Sea
MKQKYIVGNWKMTLNKKDSLKLAEDIRLIKQKDNVSIEIAPTYLYLQDIIEILNDTDVSVISQNFDYESLGSFTGGISLTQLKEIGLSKTILGHSERRSKFNESNEMVDKKLEIVLNSNFDVIYCFDSYEQIPFNLIKNNLNTNSKLTLAYEPIWAIGTGETATVEHIEEIHSKVSSTLKSLDIKDIPILYGGSVNPANSNQILHANNVDGVLVGGASTKFNLLKGIINSI

SEQ ID NO: 155578 - protein, 246 aa, Unknown
  Bacterial polypetide isolated from the Sargasso Sea
MTNKIMYFIANWKMYGNLKSLNTLGKVIKFSKSKEIKKGRLIYCPPYTLISSFLKKFENCLIDIGGQNCHESENYGSHTGFVNSKMLKSSGANYVILGHSENRQKGETDKLINLKIKSAIKSKLKVIFCIGETLAEKKKKKTKSILSKQIKHGLKKIKKRSNIFVAYEPVWSIGTGKIPKIDELEQTVEFIKKKFKGKLPKILYGGSVNPENVRNLKKITNLDGFLIGGASQNSKKFIDIVKKSYN

SEQ ID NO: 155579 - protein, 151 aa, Unknown
  Bacterial polypetide isolated from the Sargasso Sea
MTNRQILVAANWKMNGSLKSIRELGDAFTEGVSDKTPTEVVVCPSFVHLFQLSEKLNESDIKLGAQNVSHLDEGAYTGEVCASMLVDFGCEYVIVGHSERRMLYHETDMRVAEKFYTVQASGMIPILCVGELLEERESNSTEEVIARQLDA

SEQ ID NO: 155580 - protein, 253 aa, Unknown
  Bacterial polypetide isolated from the Sargasso Sea
MTNKLKYFIGNWKMFGDFSSLEIIKRINNFCLKFRKKNKNSKVILCVPNILINFFKSKLNSNIISIGAQNCSHNKNYGPFTGSVSALMLKKSGANFVILGHSENRFEGESNKLIMQKIENALEANLKVIFCIGETQKQKNKGQTFAVISNQLKKSIKKSFDKNKIIIAYEPVWSIGSGKIPKKSELIKIFKFIKNIYKKLFKTKKYPKVLYGGSVNNKNISLFSKISEIDGFLIGGASQSSKKFIDIIKKYYK

SEQ ID NO: 155581 - protein, 246 aa, Unknown
  Bacterial polypetide isolated from the Sargasso Sea
MTNKYLYFVANWKMYGDLKALNSLDKVMKFSKSIKHKKLKLIYCPPSTLINSLSNKLKNTKIEVGAQNSHESDHYGAHTGQINSKMLKNVGARYVILGHSENRQTGEDNQKINSKIKSALKSSLKIIYCIGETLKEKRNKKTNQVLSKQIKIGLKSIRNKSNIIIAYEPVWSIGTGLIPKPKDLIKSISFIKKKLGKKPSKILYGGSVNSDNINQLKNINSIDGFLIGGASQDPKKFIDIIKKTIN

SEQ ID NO: 155582 - protein, 250 aa, Unknown
  Bacterial polypetide isolated from the Sargasso Sea
MTNNNIYFIANWKMYGNIADINKSKSVVRLSNLRKFKKAKIIYCPPYTLLNTFYERVKNSNISIGAQNCHSNPEYGAFTGSVNAKLIKSSGARFVILGHSENRKNGENDLTINKKILSVLKENLNVIFCIGETLTEKKNKKTYSVLKKQITKGLKGIKKLNNILVAYEPIWSIGTGLIPNNSELLKNISNIKKIFKKFKKSSNIKILYGGSVNPKNIRELAQIKAINGFLVGGASLNSKKFIDIIKKTIN

SEQ ID NO: 155583 - protein, 75 aa, Unknown
  Bacterial polypetide isolated from the Sargasso Sea
PEPKDINEIHKYIKDVVQSNSENNLSPKVLYGGSVTDKNAESFFKEEFVDGALVGGASLDGTTFAKIVNIFNRTK

SEQ ID NO: 155584 - protein, 255 aa, Unknown
  Bacterial polypetide isolated from the Sargasso Sea
MSHPLVIANWKMNIPSGGISSWIQSEMVSTNDEVDFNKKSSYFKFMGIAPPISHLSELENLLNFGFLGSQDISRFNDGAKTGDISADMVIDKGCTFSILGHSERREFYNETNKDVSEKLRICLEKNILPVICIGESLEDYNAGKTLEVLDMQIKEIFTSLSTKKTVVIAYEPVWAIGSGKTPTPDDVNNIHQHIKDIVQSIAEIEAISFIYGGSVNCENAKSFFQQTNIDGALIGGASLNGKEFLDIYNDFLETF

SEQ ID NO: 155585 - protein, 267 aa, Unknown
  Bacterial polypetide isolated from the Sargasso Sea
MTFNHPDRLFPSDTFTRGLARELFENIETLPIISPHGHCDPSWFSENKRFPDPAQLFVVPDHYVFRMLVSQGLTLNELGVQTLDGSVFENDPQKIWKKFSENYYLLRGTPTAMWLDYSFEKVFGISEPLTPLNSDFYFNHIEEKLSQPEFLPRALFDKFNIETLATTDAALSELSDHQNIKSCTWDGRIIPTYRPDSVIDPDNIEFKNNLRILGELTDNDTCSWDGYLKAHKSRRLFFKEMGATASDHGHPTARTENLSYTHAEQLF

SEQ ID NO: 155586 - protein, 123 aa, Unknown
  Bacterial polypetide isolated from the Sargasso Sea
MTLNHPDRLLPSDTFTRGLARELFEHIEGLPIISPHGHCDPSWFSENKRFPDPAQLFVVPDHYVFRMLVSQGLTLNELGVQALDGSVFENDPKKIWKKFSENYYLFRGTPTAMWLDYLSKKFR

SEQ ID NO: 155587 - protein, 212 aa, Unknown
  Bacterial polypetide isolated from the Sargasso Sea
PYKRKPVVGDALAAYQSFLMIAFGEMDAEQGWVKQLHLGALRNPNTKAFDQLGPDSGFDSIGDFSQIDGLTGYLDALEQREKLPKMVLYNINPRDNYAIAALCGSFQGEGVRGKIQFGSGWWFLDQLDGMRWQMNALSQIGLLSNFIGMLTDSRSFLSFPRHEYFRRLLCDIVGNDVEQGLIPADMSTLKQLIKDISYRNATNFFDMPGSNI

SEQ ID NO: 155588 - protein, 277 aa, Unknown
  Bacterial polypetide isolated from the Sargasso Sea
SLGISRLDVTPIEKDHRRIWQTFADHFYLFRGTPSRIWFEHALHEVLGIELPFNPENADVIYDEINEKLTQESFQPRALFERFNLEVLATTESPLDELVHHRSIADSGWNGRVITAFRPDPVVDPEFEGFSENIILLGQLSGEDTTSWKGYLNALMQRRAFFKSMGATSTDHGHPSAVTANLEPEECETLYIEALKKGLSGKKAEMFRGQMLTEMARMSLEDGLVMQIHPGSLRNHNQTLFQRFGRDMGADIPTQTDYVHALQPLLNRFGNEPELSV

SEQ ID NO: 155589 - protein, 196 aa, Unknown
  Bacterial polypetide isolated from the Sargasso Sea
MLNHPDRLLPAQPFARDIARELFTTVEDLPIISPHGHCDPGWFAHNVRFPDPAQLFVVPDHYVFRMLASQGIALGELGVNTLDNTPFQKNPQKIWKKFSENYKLFRGTPTSMWLDYSFEKVFGLTEPLTSENCDFYFNHIEGKLSKPEFLPQALFERFNIEVLATTDAAVSELKEHRSIKNGDWSGRIFPPIVQMP

SEQ ID NO: 155590 - protein, 181 aa, Unknown
  Bacterial polypetide isolated from the Sargasso Sea
MSDTAKELYAVAAKEPIYDYHCHLSPKEIAQNKQWDNLAEVWLAGDHYKWRALRAAGIPEKYITGNATDYEKFCAFAETMPKLFRNPLWHWSHLELSRVFGINEVLNQSSAQRIWDEANTQLGKISAQTLLADFRVAAIGTTDDPCDSLPHHIEIAKSELKTRVYPAFRPDKALAADDAEL

SEQ ID NO: 155591 - protein, 161 aa, Unknown
  Bacterial polypetide isolated from the Sargasso Sea
FRNHNPSIFERFGADKGADIPSPTEFVSNLKPLLDKYGNNAALKIILFTLDETTYARELAPLAGHYPALKLGPAWWFHDSPEGMLRFRHQVTETAGFYNTVGFNDDTRAFLSIPARHDVARRIDCRFLAGLVAEHRLSEDEAHELAQQLTYQLVKQAYQLD

SEQ ID NO: 155592 - protein, 156 aa, Unknown
  Bacterial polypetide isolated from the Sargasso Sea
NDQLFRLFGRDKGADIPLSIEYVKALKPLLDKFGNNKDLSLILFTLDETTYSRELAPLAGHYPCLKLGPAWWFHDSPEGMIRFRRQTTETAGFYNTVGFNDDTRAFLSIPARHDVARRMDAVYLAELVARHMLDEEDAAVIAKDLAYGLAKKAYQL

SEQ ID NO: 155593 - protein, 133 aa, Unknown
  Bacterial polypetide isolated from the Sargasso Sea
ALRPLLGKYGNEPNLDIILFTLDETTYSRELAPLAGHYPCLKLGPSWWFHDSPEGMLRFRHQVTETAGFFNTVGFNDDTRAFLSIPARHDVARRIDCRFLAQLVVEHRISETEAASIARKLTYDFAKQAYKLG

SEQ ID NO: 155594 - protein, 315 aa, Unknown
  Bacterial polypetide isolated from the Sargasso Sea
MLDKFNIELIATTEGAVNSLKHHAALKGTGYEKRVITTFRPDDVIDADRADFLANIKKLAEQTGQDTHSWQGYLQALRIRRQFFRDHGATATDHGHPTAKTANLSEHEASSLFQLCLSGTASKEQTELFRGQMLTEMAGMSIEDGMTMQIHPGAFRNHNPSIFERFGADKGADIPSPTEFVSNLKPLLDKYGNNAALKIILFTLDETTYARELAPLAGHYPALKLGPAWWFHDSPEGMLRFRHQVTETAGFYNTVGFNDDTRAFLSIPARHDVARRIDCRFLAGLVAEHRLNEDEAHELAQQLTYQLVKQAYQLD

SEQ ID NO: 155595 - protein, 415 aa, Unknown
  Bacterial polypetide isolated from the Sargasso Sea
AELLVVPDHYLLRMLASQGVPLTDLGVLRSDGGKTEEDPRAIWQRFAAHYHFFRGTPSAIWLDHSFEHLFGIDEVLSADTANAYYDHIDNCLGRDEFRPRALFEQFNVELLATTDAATDPLPWHQQLRDSGWKGRIVTTYRPDATVDPEFPGFAKTVAELGEITREDTSSWAGYLAAHRSRRAYFKSFGATATDHGHASARTADLPRAEAEALFGKVLASTCTADEADLFRGQMLTEMARMSLDDGLVMQIHAGSRRNHNGDIFARHGRDMGFDIPGRTDYVEGLKPLLNAVGLEPGLTIILFTLDETTYGRELAPLAGAYPSLRLGPPWWFFDSFEGISNFRRAVTETCGFYNTAGFNDDTRAFCSIPARHDVARRSDCAYLAELVGTGRLREAEAFEVAHDLAYSLAKSAYNL

SEQ ID NO: 155596 - protein, 208 aa, Unknown
  Bacterial polypetide isolated from the Sargasso Sea
MGIKLIAMTGNPASTLAKLADAHLCVKVEQEACPLGLAPTASTTATLAMGDALAVALLDARGFSADDFALSHPGGSLGRKLLLRLEDIMHTGEQVPTVLYSATIKDALLEISKKGLGMTAVVDEQGKMAGVFTDGDLRRILDQRYDIHSNQIADVMTRNCITAQAQQLAAEALQIMQQKKINGLIIIDDAGKPVGAMNMHDLLRAGVL

SEQ ID NO: 155597 - protein, 251 aa, Unknown
  Bacterial polypetide isolated from the Sargasso Sea
RLEAAALTALSNRVDKVFAQAVQMVLQTRGRVVVMGMGKSGHVGRKIAATLASTGTPAFFVHPAEASHGDLGMVTSDDLVLAISNSGESGELTAILPVLRRLGAPMIAMTGGLQSTLARYADLVLDCSVAREACPLNLAPTASTTAQLAMGDALAVALLDARGFRPEDFARSHPGGALGRKLLTHVSDVMRSGAEVPRVAPDASFSDLMREMSAKGLGASAIVDAAGQVLGIFTDGDLRPRIEAGAELRST

SEQ ID NO: 155598 - protein, 187 aa, Unknown
  Bacterial polypetide isolated from the Sargasso Sea
DIHIHVPVDEEVCPMNLAPTASTSTALAVGDAFAVALLERKGFTKEDFAKSHPGGSLGKQLLLSIGDIMHTGEEIPLVYSDDSLSVGLIEMSQKALGMTAVVNKDNQLAGIFTDGDLRRTLESNIDIKVTKMSDVMTANPFVLSAETLAYNAVSLIQEKKITSIIVTKENKVVGALNIHDLFRAGLM

SEQ ID NO: 155599 - protein, 191 aa, Unknown
  Bacterial polypetide isolated from the Sargasso Sea
SHEADIHVHVLVKEEACPMNLAPTASTSAALAMGDAIAVALLEKRGFTKEDFAKSHPGGSLGKQLLLSVEDIMHTGDEIPSVYETDKLASGLIEMSEKALGMTVVLNQKDDLVGIFTDGDLRRTLENRIDIQNTSMKEVMTKDPYIINKETLAYNAVAKIQDKKITSLIIVDGKKVIGALNIHDLFRAGVM

SEQ ID NO: 155600 - protein, 228 aa, Unknown
  Bacterial polypetide isolated from the Sargasso Sea
LIFSYSGETEEIISLIPYLKKKEIKIIAFTGNIDSKLSSESDIHIHVPVEEEACPMNLAPTASTTTALAVGDAFAVALLERKGFTKEDFAKSHPGGSLGKQLLLSIRDIMHTGEEVPVVYSDDTLSKGLIEMSQKALGMTAIVNENDQLVGIFTDGDLRRTLESNIDIKLTKMNQVMTKNPFVLPADTLAYNALSLIQEKKITSIIVTNERKVVGALNIHDLFRSGLM

SEQ ID NO: 155601 - protein, 327 aa, Unknown
  Bacterial polypetide isolated from the Sargasso Sea
MIAKINDDRALALARDVLDIEADAVRALRDQLDGGFVQAVALLLGCRGRVVVSGIGKSGHIARKIAATLASTGTPAFFVHPAEASHGDLGMVTSDDVFIGISYSGESEELVAILPLVKRIGAKLIAITGRAESSLGTLADVNLNAAVSKEACPMNLAPTASTTAALALGDALAVAVLDARGFGSEDFARSHPGGALGRRLLTYVRDVMRSGDDVPSVGLDATLSDALFQITAKRLGMTAVVDAGGKVAGIFTDGDLRRVLARDGDFRTLPITDVMTRDPRTVAPDHLAVEAVELMERHRINQMLVVDADGVLIGALNMHDLFSKKVI

SEQ ID NO: 155602 - protein, 225 aa, Unknown
  Bacterial polypetide isolated from the Sargasso Sea
IRVRLMKIVGLLPVIKRLNISLITLTGNSDSTLAKASNININVSVEKEACPLGLAPTSSTTATLAMGDALSIALLEKRGFNEDDFALSHPGGALGKRLLLRVDDIMHTENEIPKVLENATLGEALIEMSAKGLGVTTITNKNNEFLGIFTDGDLRRALDSGIDFKLSKIKDVMTKNAKTIVTNSLAASALALMETHSINALVVVDEEEILCGILNMHDLLRARVI

SEQ ID NO: 155603 - protein, 65 aa, Unknown
  Bacterial polypetide isolated from the Sargasso Sea
MDNWKRIMSHLELQPGFDFQQAGKEVLAIEREGLAELDQYINQNFTLACEKIFSCPGKVVVMGMG

SEQ ID NO: 155604 - protein, 322 aa, Unknown
  Bacterial polypetide isolated from the Sargasso Sea
MKDFDYITVAKKVLEIESKALTKQIDQIDQTFVDACELCLECNGKLIVMGLGKSGHIADKIAATLSSTGTPSYFIHPSEAIHGDIGMIDEKDIVLIFSYSGETEEIISLIPYLKKKEIKIISFTGNIDSKLSSESDIHIHVPVEEEACPMNLAPTASTTTALAVGDAFAVALLERKGFTKEDFAKSHPGGSLGKQLLLSIKDIMHTGEEVPVVYSHDTLSKGLIEMSQKALGMTAIVDEKDQLVGIFTDGDLRRTLESNIDIKTTKMHQVMTKDPFVIPADTLAYSALSLIQEKKITSIIVTNENKVIGALNIHDLFRSGLM

SEQ ID NO: 155605 - protein, 321 aa, Unknown
  Bacterial polypetide isolated from the Sargasso Sea
MREQIQRYAHETLSIELAEAQRLCSRLNDSFVSACEAILACTGKIVVTGIGKSGHIGKKIAATLASTGSPAFFVHPAEALHGDLGMITKGDLVIMISNSGEAGEFKTMLPLLKHKGLVVIGFTGKLDSYLARQADHVIDISVQQEACPLGLAPTSSAINTLMMGDALAISAMRIRDFNEQDYAVSHPGGSLGARLLLRNKDILDPELPIPVCSADTSLRDAIVALSRGGFGLVVISSDQGSILGVFTDGDLRRSLEKTLPLDTCVTELMTRTPVVVQADGLAAATLELMHEHRINAVPVVSDEARLLGVISIHQIYKAGIR

SEQ ID NO: 155606 - protein, 190 aa, Unknown
  Bacterial polypetide isolated from the Sargasso Sea
FESDIHIHVPVEEEACPMNLAPTASTTTALAVGDAFAVALLERKGFTKEDFAKSHPGGSLGKQLLLSINDIMHTGEEVPVVYSDDTLSKGLIEMSQKALGMTAIVDKKDQLVGIFTDGDLRRTLESNIDIKTTKMHEVMTKNPFVLPADTLAYNALSLIQEKKITSIIVANENKVIGALNIHDLFRSGLM

SEQ ID NO: 155607 - protein, 193 aa, Unknown
  Bacterial polypetide isolated from the Sargasso Sea
LQKTSTVNIDVSVKKEACPLGLAPTSSTTATLAMGDAIAIALLESRGFSEDDFALSHPGGTLGRRLLLRVDDIMHTGEEIPKVNESATLSEALVEMSKKGLGVTTIVKKDGVVLGIFTDGDLRRALDSGADFKNCHVKDVMTKDGKQITVDSLAASALALMENHRINALVVVDEKNKLCGILNMHDLLRARVI

SEQ ID NO: 155608 - protein, 310 aa, Unknown
  Bacterial polypetide isolated from the Sargasso Sea
MDIEKQAIDGLYQYLNDAFDQACEMILRCSGKIVVTGMGKSGHVGSKIAATLASTGTPAFFLHPGEASHGDLGMISGGDLIIAISNSGESDEILALLPVLKRRGIPLICMTGNPASTMAKEANVHLCIKVEKEACPLGLAPTSSTTATLVMGDALAVALLEARGFTADDFALSHPGGSLGKRLLLRVGDLMHSGELLPQVGIDATISQALLEVSRKGLGMTAVADADGRLAGLFTDGDLRRILDLQVDIHHTPISRVMTVNCVTVGPEMMAAEAVKLMETRKINGLLVVDGDKRPLGAFNMHDLLKAGVI

SEQ ID NO: 155609 - protein, 325 aa, Unknown
  Bacterial polypetide isolated from the Sargasso Sea
MVDQSQLRQWGCKVIDIEKSALDNLYQYVDSVEFAQACELILNCTGKVIVMGMGKSGHIGNKISATLASTGTPAFFVHPGEASHGDLGVLSDNDVILAISNSGESSEILALMPVIQRKAIPVIAMTGKPESTMARLSKIHLCIEVPEEACPLGLAPTSSTTATLVMGDAIAIALLQAKGFTREDFAMSHPGGALGRKLLLKVSNVMHSGDDLPLVKHDICITDALYEISKKGLGMTAVIDEQNKLVGIFTDGDLRRVIDAQVNLRTTPIADVMTRNCVTITENVLAAQALQVMDSKNINGLIVIDKEHHPVGALNMLDMVKAGVI

SEQ ID NO: 155610 - protein, 326 aa, Unknown
  Bacterial polypetide isolated from the Sargasso Sea
MKKISPEKLKALGQAVIQTEQVELSALIKRIDNKFVDACNIILQCDGRTVVTGMGKSGHIANKIAATLASTGTPSFFVHPGEASHGDLGMITTDDVVIALSNSGETDEIVALLPVIKRMNTPLITLTGNPDSTLAKTSTVNIDVSVEKEACPLGLAPTSSTTATLAMGDAIAIALLESRGFSEDDFALSHPGGTLGRRLLLRVDDIMHTGEEIPRVNENASLSEALVEMSEKGLGVTTIVNKDGVVLGIFTDGDLRRALDSGTDFKNCHVKDVMTKNGKQITVDSLAASALALMENHRINALVVVDEKNKLCGILNMHDLLRARVI

SEQ ID NO: 155611 - protein, 322 aa, Unknown
  Bacterial polypetide isolated from the Sargasso Sea
MTNFDYIAVAKKVLEIESKALTKQINQIDQAFVDACELCLQCSGKLIVMGLGKSGHIADKIAATLSSTGTPSYFIHPSEAIHGDLGMIDEKDIVLIFSYSGETEEIISLLPYLKKKEIKIVAFTGNIDSKLSLESDIHIHVPVDEEACPMNLAPTASTTTALAVGDAFAVALLERKGFTKEDFAKSHPGGSLGKQLLLSIGDIMHTGEEIPVVCSDDSLSTGLIEMSQKALGMTAVVDKDNQLAGIFTDGDLRRTLESNIDIKATKMSDVMTPNPFVLSEDTLAYNALSLIQEKKITSVIVTKENKVIGALNIHDLFRAGLM

SEQ ID NO: 155612 - protein, 274 aa, Unknown
  Bacterial polypetide isolated from the Sargasso Sea
MGLGKSGHIADKIAATLSSTGTPSYFIHPSEAIHGDLGMIDEKDIVLIFSYSGETEEIISLLPYLKKKEIKIVAFTGNIDSKLSLESDIHIHVPVDEEACPMNLAPTASTTTALAVGDAFAVALLERKGFTKEDFAKSHPGGSLGKQLLLSIGDIMHTGEEIPVVCSDDSLSAGLIEMSQKALGMTAVVDKDNQLAGIFTDGDLRRTLESNIDIKATKMSDVMTANPFVLSEDILAYNAVNLIQEKKITSVIVTKENKVIGALNIHDLFRAGLM

SEQ ID NO: 155613 - protein, 322 aa, Unknown
  Bacterial polypetide isolated from the Sargasso Sea
MTNFDYIAVAKKVLEIESKALTKQIDHIDQAFVDACELCLECSGKLIVMGLGKSGHIADKIAATLSSTGTPSYFIHPSEAIHGDLGMIDEKDIVLIFSYSGETEEIISLLPYLKKKEIKIVAFTGNTDSKLSLESDVHIHVPVDEEACPMNLAPTASTTTALAVGDAFAVALLERKGFTKEDFAKSHPGGSLGKQLLLSIGDIMHTGEEIPIVCSDDSLSVGLIEMSQKALGMTAVVNKDNQLAGIFTDGDLRRTLESNIDIKATKMFDVMTAKPFVLSEDTLAYNAVNLIQEKKITSVIVTKENKVVGALNIHDLFRAGLM

SEQ ID NO: 155614 - protein, 325 aa, Unknown
  Bacterial polypetide isolated from the Sargasso Sea
MVDQSQLRQWGCKVIDIEKSALDNLYQYVDSVEFAQACELILNCTGKVIVMGMGKSGHIGNKISATLASTGTPAFFVHPGEASHGDLGVLSDNDIILAISNSGESSEILALMPVIQRKAIPVIAMTGKPESTMARLAKIHLCIEVPEEACPLGLAPTSSTTATLVMGDAMAIALLQAKGFTREDFAMSHPGGALGRKLLLKVSNVMHSGDDLPLVKHDICITDALYEISKKGLGMTAVIDEQNKLVGIFTDGDLRRVIDAQVNLRTTPIADVMTRNCVTITENVLAAQALQVMDSKNINGLIVIDKDNHPVGALNMLDMVKAGVI

SEQ ID NO: 155615 - protein, 82 aa, Unknown
  Bacterial polypetide isolated from the Sargasso Sea
MTTQLEQAWELAKLRFAAVGIDVEAALRQLDRLPVSMHCWQGDDVAGFENPEGSLTGGIQATGNYPGKARNATELRADLEQA

SEQ ID NO: 155616 - protein, 66 aa, Unknown
  Bacterial polypetide isolated from the Sargasso Sea
MILFPAIDLKDGKCVRLTQGDFNKSTVYNSSPIDQAKIFEDLGVEWLHCVDLDGALHGVSENLKFI

SEQ ID NO: 155617 - protein, 109 aa, Unknown
  Bacterial polypetide isolated from the Sargasso Sea
FATDLVKEFSSFNIASFIVTDINTDGTLEGTNEEFIKSILEITDIPVIASGGVGSISDLLSLVKFENSGLFGVIVGKALYENKFTINEANNVFSSKRLNDFDLNRNYYA

SEQ ID NO: 155618 - protein, 219 aa, Unknown
  Bacterial polypetide isolated from the Sargasso Sea
MSFSLIPAIDIIDGGLVRLVQGDYSQVTKYDASPVDIAQYYVSLGFNYIHVVDLNGAKDGHLTNLDVIQSIAALPDVNIQVGGGVRSHDHVKQLLDVGVSSVIVGSLFVQDYDLAIQIVQDFPGKIIAGLDILDGCLASHGWTQQSQISLDVMIGQLSDLPLHSIVTTDISKDGTFEGLNVDLYRNMSRISSHAIVASGGVATISDVIGLRDRNFTNGR

SEQ ID NO: 155619 - protein, 57 aa, Unknown
  Bacterial polypetide isolated from the Sargasso Sea
MDLIPAIDLMNGKCVRLFKGDFNKRKDFTKEPHEQAKFWESEGAKYIHIVDLDAARF

SEQ ID NO: 155620 - protein, 86 aa, Unknown
  Bacterial polypetide isolated from the Sargasso Sea
FLNMFESAGLTHVLCTDIDRDGTLRGFNRALYTSVKREFSCLQLQASGGASRLEDLKHLDADGVIIGKALYEGRFSVAEALEATAC

SEQ ID NO: 155621 - protein, 203 aa, Unknown
  Bacterial polypetide isolated from the Sargasso Sea
ESRSKRLHLVDLDGSFDGVGANISCIRSILKNVSIPVQIGGGLRTEEDIDTMMDLGVSAVIVGTMAVKFPAVLEKLLNKYTDEQIILGVDARNRKVSIEGWKENTQIKDVKFALKWKNFGIKRVVFTDISRDGMLSGPNLVALREMAEHTGLKIVASGGVSSIDDLEQLKKLEQYGVDQVISGKAIYERKIDLKRVFKCLQSE

SEQ ID NO: 155622 - protein, 108 aa, Unknown
  Bacterial polypetide isolated from the Sargasso Sea
MIIYPAIDIIDGKCVRLSKGDYSLKTIYSDNLEDIAKSLISNGTKFLHIVDLDGAKAGMPTNIQNIFDIRKSFPNIFIQVGGGIRTIDTIEQYLSHGIDRIILGTKIL

SEQ ID NO: 155623 - protein, 232 aa, Unknown
  Bacterial polypetide isolated from the Sargasso Sea
MKIIPAIDLMDGKVVRLYKGDPKNKTIYSDNPVKIAKKWESSGADILHVVDLDATLGSGENFKTIKEISENISIPLQVAGGLRTEEKISEVLDFASRAVIGTIAMQLKESEQDNILSDFIQTFGNEKIVISIDHIDGKIVTHGWQNSTDIDLYDATNEFVKYGFTEFLTTNVSKDGTLEGPDIESLRKICQIEKCNAIASGGISKIEDIQDVNKINPFGVILGKALYERASF

SEQ ID NO: 155624 - protein, 218 aa, Unknown
  Bacterial polypetide isolated from the Sargasso Sea
MKIFPAIDIRGGKCVRLLKGDFEKSTEYKKTPLDQAKEFLDLGFKDLHIVDLDGALKGKTVNLDIIREIISNYNLKIEVGGGIRSLDSIKQYIDSGVEKVILGSGAIKNKGFLKDACKKFKNKIALGLDSKGGYLSISGWKEKLNVRTIDYLKQVNSFGISRIIYTDINRDGMKTSPNFGETIKIAEISNCPVVISGGVSTIKDIIKCKELKNKKLKV

SEQ ID NO: 155625 - protein, 206 aa, Unknown
  Bacterial polypetide isolated from the Sargasso Sea
MILFPAIDIKDGDCVRLVKGKRDSATVFNKNPADQASFFKRMGCEWIHLVDLDGAYFGKVKNVESIEAIRKEVDVQIQLGGGIRNLKSIELWLSKGLDRIILGTAALENSNLVRKSCKLFPNSIVVGIDVRNGYVCTEGWEKTSKTQAVDLARKLEDFGVAAIIYTDINRDGVLSGPNIDQLEFFADAINVPIILSGGVSSHDDLQ

SEQ ID NO: 155626 - protein, 143 aa, Unknown
  Bacterial polypetide isolated from the Sargasso Sea
MKIFPAIDLKNGSCVRLLKGDFNNLTEYNKDPIDQAKIFLENNFDFLHVVDLDGAQTGNQSNVSVIKELLKIPNLKIQVGGGIRTIDDALNAIDMGVSRIIIGTSIFKKGFLAEIKKKFNREQIILAIDFIETNGIPYIYTHG

SEQ ID NO: 155627 - protein, 169 aa, Unknown
  Bacterial polypetide isolated from the Sargasso Sea
MKKKLFPAIDLIDGKCVRLLQGEYSNETKYSEDPISQALSFQEEGASWLHVVDLDAARTGIANNASIVEKIASRLEIPVQVGGGIRDIECARSLFESGVTRIVIGTAATDNPSLVEEVASIGRVAVAVDLRGDKVAVHGWKTETDLSYGDLFESFEKSGIDAYIVTHIE

SEQ ID NO: 155628 - protein, 244 aa, Unknown
  Bacterial polypetide isolated from the Sargasso Sea
IVKIFPAIDLKDNKCVRLTKGKDDTSEVFNENPIEQAKYFEGQGCSRLHLVDLDSAFGRKEINSKTIQKIREAISIPVQLGGGIRNKEIAEKYFELGINYLIIGSYAVKNIEEVIGLADSYKDRIYVALDLIGETIMVNGWENKSVFTPAKIFQHYDKTNIRGYVLTDIENDGMLSGLNLNMISSNVKLASKKFIVGGGLKDIEDIKSLKNIYTPQLEGVIAGKAYYVGAINLKDADKLLSAYA

SEQ ID NO: 155629 - protein, 179 aa, Unknown
  Bacterial polypetide isolated from the Sargasso Sea
AALNKNSNKTIILKLLQKFHNSINIQIGGGVRSVEDIKFWIDRGAKRVVISTLAYKNPKSINRIDKKYYKKIAIGLDVRDKKMSVDGWKTDLKDIQPLDVVSKIKSSILDAIIYTDITRDGTLKGSNIKDTIKFANSVNIPVIISGGVSSFNEINKIKSLQNNGIIGVIVGKALYEKKI

SEQ ID NO: 155630 - protein, 69 aa, Unknown
  Bacterial polypetide isolated from the Sargasso Sea
MIIPAIDLIDGRVVRLYQGDYEQKTQYELDPVDVVHDYADQGATWLHIVDLTGAKDTSKRQLSLNQSMV

SEQ ID NO: 155631 - protein, 242 aa, Unknown
  Bacterial polypetide isolated from the Sargasso Sea
MKIIPAIDLMDGKVVRLYKGDPTNKTIYSDNPVEIAKKWESLGGDILHIVDLDATLGSGQNFKTIKEISKNVSIPLQVAGGLRSEEKISEVLDFASRAVIGTIAMQLKESEQDNILSDFVQTFGSERIVISIDHVDGKIVTHGWQNNTGIDLYDATNEFVRYGFTEFLTTNVSKDGTLEGPDIESLKKICQIKNCNVIASGGISKMQDVHNVNEINPFGVILGKALYEGLVSIEEAKKIGSN

SEQ ID NO: 155632 - protein, 36 aa, Unknown
  Bacterial polypetide isolated from the Sargasso Sea
MIIPAIDLINGQVVRLYQGDYGQKTAYSDSPQARFD

SEQ ID NO: 155633 - protein, 225 aa, Unknown
  Bacterial polypetide isolated from the Sargasso Sea
PAIDLKDNKCVRLSKGKDDTSVVYNEDPEKQAIYFEQIGCKKLHLVDLDAAFGRSNVNFETIKKIRKSISIPIQLGGGVRSLDLAKKYFEVGINNLIIGSMSVEKPNEVIILSNIYADKVYISLDILEDNIMIKGWDKNSGKKIQDILDIYTNSKIKGYVITDIQNDGMLKGLNLDFVSNFIKKINLIKKFNKKIIIAGGLTDYSDLTNLKKLNTKNIEGIISGK

SEQ ID NO: 155634 - protein, 97 aa, Unknown
  Bacterial polypetide isolated from the Sargasso Sea
MKDNFFTLYPAIDIKDGKCVRLLFGEMEKETVYNNNPLDQAMWFVDQGAEWLHIVDLDGAVAGENINRKVIEEILHKLQNKVKIQLGGGIRNINDID

SEQ ID NO: 155635 - protein, 104 aa, Unknown
  Bacterial polypetide isolated from the Sargasso Sea
MIIFPSIDIKDGKCVRLIKGNLEQMISYENTPFNQAKMYFENGFKNIHVVDLDGAFKGKSSNSNIVKEILKNLNLKIQIGGGIRTIEDVEDWIKNGVDKVIMGT

SEQ ID NO: 155636 - protein, 101 aa, Unknown
  Bacterial polypetide isolated from the Sargasso Sea
MSNLKFRAEDLVKKFASVEVSAIIYTDISRDGILMGPALEETLKFSDKTNIPIIISGGVSSEKDIIEIKKRANDKILGVISGRAIYDNRLNVHNCNKILGN

SEQ ID NO: 155637 - protein, 180 aa, Unknown
  Bacterial polypetide isolated from the Sargasso Sea
NLDIIKQIVSKYDLKIEIGGGVRSLDSIKKYIEAGVEKVILGSGAIKNKEFLKDACQKFKDQIALGLDAKEGNLAVSGWKENLNIKTTDFLKEVNSYGVSRIIYTDISRDGMKTSPNFEETIKIAELANCPVVISGGVSSINDIKKAKELNNNKIEGIIVGKAIYDGDIKLEELAKEISA

SEQ ID NO: 155638 - protein, 85 aa, Unknown
  Bacterial polypetide isolated from the Sargasso Sea
VYTDIARDGMMKGCNIEATVELARQSSIPIIASGGIAKLADIVDLKAATKTEVGANIVGAITGRAIYEGKLDLMAAQRYCNREVS

SEQ ID NO: 155639 - protein, 184 aa, Unknown
  Bacterial polypetide isolated from the Sargasso Sea
MDFVIYPAIDIVNGKCVRLHQGNYDLEKVYNEDPVSQALHFASAGARWIHVVDLDAARTGNPENREIISQIASSAPIPIQVGGGIRSIDSAKALYGSGVERVVIGTAAVENPNLIEGLTRQGYRVAVGLDGRNGRIATRGWKDDTGFQVTEMAKQFEDSGVDAVIVTEIERDGTLLDLILKAER

SEQ ID NO: 155640 - protein, 90 aa, Unknown
  Bacterial polypetide isolated from the Sargasso Sea
MAKKFENDGVSAVIYTDIERDGAMMGPNLSATAEIANAVSIPVIASGGVSSLKDLKALRDCGAKLNGVISGRALYDHKFSIEQALDVLNA

SEQ ID NO: 155641 - protein, 149 aa, Unknown
  Bacterial polypetide isolated from the Sargasso Sea
MKIFPAIDIKGGKCVRLLKGDFDKSTEYKKSPIDQAKEFSDSGFRDLHIVDLDGALKGEPVNGKLIEEICKLTKIRVQIGGGIRSIDHIKKLIDIGVDRVVIGTMAVEDTKFLENICSKFKNKIAVALDVRNGFIALRGGKNKQKFWRQ

SEQ ID NO: 155642 - protein, 135 aa, Unknown
  Bacterial polypetide isolated from the Sargasso Sea
AVGNPSLVRLAANKYPGNIAVGIDARNGRVATDGWAKSTDIWATELAKKYENYGVSAIIYTDIDRDGAMMGPNVSATAEMASAVSIPIIASGGVSSLKDLKALKECGAQLNGAISGRALYDQKFTVQEALEVLNA

SEQ ID NO: 155643 - protein, 160 aa, Unknown
  Bacterial polypetide isolated from the Sargasso Sea
MIKIFPAIDIKDGKCVRLAKGNYQQVTHYYDDPVMVAKNWISEGSNNLHIVDLDGARSGTTTNYDVITKIRKIYPEVFMQVGGGIRNVETITKYLNIGIDKIVIGTKVVSDPSFLEEITSDLKSKIIVDIAIKNSKLAIHGWNSSSKYTIENYIKILEDQ

SEQ ID NO: 155644 - protein, 122 aa, Unknown
  Bacterial polypetide isolated from the Sargasso Sea
HKKIALGIDVRDNRVSINGWKEDLLNIDPLEMVKLINPCILDGIIYTDIFKDGTLKGANIKDALKCASLTNLPVIVSGGVSTLQEIKQIKNLRKKGLIGVIVGKALYEKKVSLNELIKEVYS

SEQ ID NO: 155645 - protein, 103 aa, Unknown
  Bacterial polypetide isolated from the Sargasso Sea
MKIFPAIDIKGGKCVRLLKGKFSEITEYANSPLEQAKIFINHGFYNLHIVDLDGALEGKSVSKNIIKEISKLNGASIQVGGGIRTSEQIHELLDFGVDKVILG

SEQ ID NO: 155646 - protein, 43 aa, Unknown
  Bacterial polypetide isolated from the Sargasso Sea
MKLIPAIDLMNGKCVRLFKGDFNKRKDFSREPYEQAKYWENEG

SEQ ID NO: 155647 - protein, 167 aa, Unknown
  Bacterial polypetide isolated from the Sargasso Sea
MIFFPAIDLKDGQCVRLVKGNMEKVTIFHKSPTEQARLFQNSGCNWLHLVDLDGAVKGQNINSKSVKEVIHNTDLKIQLGGGIRKREQVETWLESGVKKVVLGTVAAREPTVVRELAKAYPKMIAVGIDALNGTVAIEGWTKNSEIKAIDLCKLYEDSGVASIIYTD

SEQ ID NO: 155648 - protein, 115 aa, Unknown
  Bacterial polypetide isolated from the Sargasso Sea
VGIDARNGRVATNGWVKDTDISAPELAKQFENDGVSAVIYTDIERDGAMMGPNLSATAEMANAVSIPVIASGGVSSLKDLKALRDCGAKLNGVISGRALYDHKFSIDQALDVLNA

SEQ ID NO: 155649 - protein, 231 aa, Unknown
  Bacterial polypetide isolated from the Sargasso Sea
MKIFPAIDIRNGKCVRLIKGNYDEEIIFNDDPIIVAKNFEEIGTKYVHIIDLDGAKDGESRIRDNIAKIINNTKLKIQIGGGIRTFERAESFFNLGVEKIIFGTAALENKKEVIKSIDKYKSKIIVSIDASKGKIKTKGWLNNSDVKIDDLVNELEEIGCKNFIYTDIDKDGTLSHPNFDYIKKFRKICNSELYIAGGISTIDDVIKLRDIGVDGAILGMSIYTGNIDLKK

SEQ ID NO: 155650 - protein, 110 aa, Unknown
  Bacterial polypetide isolated from the Sargasso Sea
MIIFPAIDIKGGKCVRLLKGDFNQITQYNKSPIDQAKEFSNLGFNNIHLIDLDAALEKKSSNENIIKEISKIKKIKIQTGGGIRSLEHIKKLLDFGVDRVILGNCCSSKC

SEQ ID NO: 155651 - protein, 242 aa, Unknown
  Bacterial polypetide isolated from the Sargasso Sea
MKIIPAIDLMDGNVVRLYKGDPKNKIIYSDNPVEIAKKWESSGADILHIVDLDATLGRGENLKIIQEISKNTSVPLQIAGGLRNEEKISEVLDFAFRAVIGTIAMQLKESEQDNILGDFIQTFGNERIVISIDHIDGKIVTHGWQNNTGIDLYDATNEFVKYGFTEFLTTNVSKDGTLEGPDIQSLKKICQIDNSNVIASGGISKMQDIRDVNEINPFGVILGKALYEGLVSIEEAKKIGSN

SEQ ID NO: 155652 - protein, 84 aa, Unknown
  Bacterial polypetide isolated from the Sargasso Sea
MNFYPAIDLKEGSCVRLKRGDLDTAVVYNNDPIAQASLFQKEGCEWLHIVDLDGAVLGSKKNFKTIQEIRKSTSLKIQVGGGIR

SEQ ID NO: 155653 - protein, 56 aa, Unknown
  Bacterial polypetide isolated from the Sargasso Sea
MDLIPAIDLMNGKCVRLFKGDFNKRKDFTKEPHEQAKFWESEGAKYIHIVDLDAAK

SEQ ID NO: 155654 - protein, 73 aa, Unknown
  Bacterial polypetide isolated from the Sargasso Sea
MDLIPAIDLMNGKCVRLFKGDFNTRKDFTKEPHEQAKFWESEGAKYIHIVDLDAAKTGSPTNDKSIKRIAKTV

SEQ ID NO: 155655 - protein, 90 aa, Unknown
  Bacterial polypetide isolated from the Sargasso Sea
MIIPAIDLIDGRVVRLYQGDYEQKTQYELDPVDVVHDYADQGATWLHIVDLTGAKDTSKRQLSLIKSMVDTKRMQFPAGGGIRSEEEVAQ

SEQ ID NO: 155656 - protein, 187 aa, Unknown
  Bacterial polypetide isolated from the Sargasso Sea
MSFRIPNKRLKLMNFFKHTIFCLIILSNACIGKEFSKLFVVFEPIEPSSNIEKSINNSFNTMVHRLSGNSAPSNIWKIINAGNARKDFVKSYSIKNYENENFIQVNFDKDLLIKKFKELNIPFVGISRPVILMIINIDSGIEEPYILNTNDSTKEMDVLIKNYLKKVSDSRAIFLEIPAIDLKAQSS

SEQ ID NO: 155657 - protein, 242 aa, Unknown
  Bacterial polypetide isolated from the Sargasso Sea
MKIIPAIDLMDGKVVRLYKGDPKNKTIYSDNPVEIAKKWESLGGDILHIVDLDATLGSGQNFKTIKKISENTSIPLQVAGGLRTEEKISEVLDFASRAVIGTIAMQLKESEQDNILSDFIQTFGSERIVISIDHVDGKIVTHGWQNNTGIDLYDATNEFVNYGFTEFLTTNVSKDGTLEGPDIESLKKICQIEKCNAIASGGISKMQDIQDVNEINPFGVILGKALYEGLVSIEEAKKIGSN

SEQ ID NO: 155658 - protein, 234 aa, Unknown
  Bacterial polypetide isolated from the Sargasso Sea
MIIFPAIDIKGGKCVRLLKGDFENLTEYKNSPFDQANIFSKIGFKNLHLVDLDGALEGKLINKNSIQSITKINGVKIQVGGGVRSLEQIDELVKLGVDKVILGTKAIEDPSFLKKACIKFDKKIVLAIDVRNGFLSLSGWKRQTDILATDFIKKVNDFNISRIIYTDIDRDGTKSGPNIDSTVAFSKSSKFPIVVSGGISSIEDVKSLKSENAKEIEGVIIGKAIYDQNININE

SEQ ID NO: 155659 - protein, 245 aa, Unknown
  Bacterial polypetide isolated from the Sargasso Sea
MNLIPAIDLLDQKCVRLLRGDFDKVTFYDKDPLQLATHYESLGCKHLHLVDLNGTRDGVSKNKSIIDSIISQTNLKVQMGGGIRSIESINYWLNSSLDKIVIGSYAIEGTEEFISSIKPGMRSRIVIALDVLIRDGEPSIRIHGWQKDSKMSLIPTMKLFIDNGFRNFLITDIRKDGTLEGPNINLYDEINSQFNEINIIASGGVSIFDDLIKLDKISLSSVVVGKSLLENKITEKEVVQFLQRG

SEQ ID NO: 155660 - protein, 239 aa, Unknown
  Bacterial polypetide isolated from the Sargasso Sea
MKIIPAIDIQDGKCVRLTKGDLNSTVKYFDDPVQAAEYWYSFGIDRIHIVDLDGAKKGQSLILNIIDSIKKKLPKVSLQVGGGFRNKETIERALNSGIDQIILGSLAVKDSILFNDIVSSYPDKIIFGLDTKNDHVKSEAWTEDSGVYWIDLVKKFNDLPLNSIIFTDIDRDGMLNGPNLEKITELTANTSLPVIASGGVSSLEDLIQLKKIKGVSGVISGKALYENTFSLDEALNLIS

SEQ ID NO: 155661 - protein, 225 aa, Unknown
  Bacterial polypetide isolated from the Sargasso Sea
MNIIPAIDLKKGKVVRAIQGDRASYEPIDLVTTYSSNPIAFIKALIIRYKPSTIYLADLDLLDGYGDNIDIIYKIANMFRNKIFWVDVGSKKIKKLSIKNITPILCSESCEDIRLINYVYKDHIHSYDYKNRFLGTQYFKKFHSSYKKKVIFMNISDVGSKKGPDFRYLRGMPKNSDTEYYVGGGVNSILDLYKLSKMNISGALVSSLLMSKKISNYIIKKRASD

SEQ ID NO: 155662 - protein, 165 aa, Unknown
  Bacterial polypetide isolated from the Sargasso Sea
MKILPAIDIKNGQCVRLQKGNFDKIDVYSDSPLDQAKLFKENGFNFIHIIDLDGALEGKRINTKIINQIVDMDIKLQIGGGIRTILDIKNLLNLGVERVILGTAIVENNEFLLEVLSKFDNNRITFALDFRIEKNIPLIATNGWTSQTSINLCEFIKIHNFVNVL

SEQ ID NO: 155663 - protein, 240 aa, Unknown
  Bacterial polypetide isolated from the Sargasso Sea
MIFFPAIDLKDGKCVRLAQGDKSRMTTYNENPLDQAKIFEGHGIKWIHCIDLDGAFEGDSKNVRFVSQILESTDLKVQFGGGVRDEKKVQQLIEIGVSNIIIGTRAYEDKSFFRDLVVKYPNNISLALDIKNGLVSTKGWVEQLELDLDELFEELNELPLNSVICTDILRDGMKQGVNIDMLEKIMNLSKAPCVASGGIAKIENLIELKNKNYAKLKGVISGKAIYDNEISLTEALKVLK

SEQ ID NO: 155664 - protein, 239 aa, Unknown
  Bacterial polypetide isolated from the Sargasso Sea
MRVLPALDLKNGNCVRLIKGNFNDVTNYNNDPINQAKIFLENNFNYLHVVDLDGAQTGNQLNRSVIQKLLEISGLKIQVGGGIREVEDVYNMLELGVSRVIVGTAIFKEKFLDKIKENFDPDQIILAVDFNSLDGIPYIYTHGWQDNSNIKLFDFISDNSYFKNLLATDISLDGVLQGASFETYEQILRLFPASNLIASGGVSSMSDLAKLENLQIQECIVGKAIYEKKISLSDLSNDY

SEQ ID NO: 155665 - protein, 255 aa, Unknown
  Bacterial polypetide isolated from the Sargasso Sea
MDFVIYPAIDIVNGKCVRLHQGNYDLEKVYNEDPVSQALHFASAGARWIHVVDLDAARTGNPENREIISQIASSAPIPIQVGGGIRSIDSAKALYGSGVERVVIGTAAVENPNLIEGLTRQGHRVAVGLDGRNGRIATRGWKDDTGFQVTEMAKQFEDSGVDAVIVTEIERDGTLLGPDTKGLKEVLASTSLEVIASGGVGSLDDIKALLELESDDRKLGGVIIGKSLYENKVDLLSALHACHPTDRIKEKNEDC

SEQ ID NO: 155666 - protein, 234 aa, Unknown
  Bacterial polypetide isolated from the Sargasso Sea
MKIIPAIDLMDGKVVRLYKGDPKNKTIYSNNPIEIAKNWESAGADILHIVDLDATLGNGENLKTIQAISKNTSVPLQVAGGLRSEEKISEVLDFASRAVIGTIAMQLKESEQDDILGDFINTFGNERIIISIDHIDGKIVTHGWQTNTGIDLYDATNEFVKYGFTEFLTTNVSKDGTLEGPDIDSLKKICQIENCNVIASGGISKIQDIADVNQINPFGVILGKALYEGLVSIE

SEQ ID NO: 155667 - protein, 243 aa, Unknown
  Bacterial polypetide isolated from the Sargasso Sea
MKILPAIDLKDGKCVRLSMGDYRQVRNYDFNPLELAMNWADNGVKNLHIVDLDGAKDGKLSNFETIQKIRKQIPNLYIQMGGGIRSLGDVQKYLDIGLDKVIIGTKAMSDRTFLDELDSVTKNKVIIDMAVKDGKMAIQGWNQSSALDIDSFINYIETQQICEVVLTDVSKDGMLSGVNFNLINEVLSKTEIPIIASGGVTTIDDIEKLILLTKKGLSGVIIGKAIYESRIKIKDLIMLESRI

SEQ ID NO: 155668 - protein, 226 aa, Unknown
  Bacterial polypetide isolated from the Sargasso Sea
MVGEFKVIVYPAIDIIGGKCVRLSRGDYSSKTIYSDNLKSVVSSWLSKGTRFLHIVDLDGAKAGRPLNIDSILKIRKSFPDIFIQIGGGIRNIETVNQYLANGINRIILGTKVLKDKEFILSIDQAQRKSLAIDIAIKDGQLAGDGWEITAKNDVGDFIDYFEQNGIELFVVTDINQDGMMQGINSESIERILKLISTKAIISGGVTSINDIQSILRMTTSKIDGF

SEQ ID NO: 155669 - protein, 239 aa, Unknown
  Bacterial polypetide isolated from the Sargasso Sea
MKIFPAIDLKNGSCVRLLKGDFNNLTEYNKDPIDQAKIFLKNNFDYLHVVDLDGAQTGNQSNISIIKELVKIPNLKIQVGGGIRTIDDAVNLIDMGVSRIIIGTSIFAKGFLTEIKNTLNPEQIILAIDFMETEGIPYIYTHGWQDNSHINLFDFMSDNFHFKNYLATDISLDGVMQGPSFKTYEKILAMNPSINLIASGGITSINDLSKLKRIKIKESIVGKAIYEKQISLSELNNDY

SEQ ID NO: 155670 - protein, 229 aa, Unknown
  Bacterial polypetide isolated from the Sargasso Sea
DIRNGKCVRLIKGNYNNEIIFDENPIDVAMKFEEDGSSFIHIIDLDGAKDGDSTIKNIIAQILNKTNLKIQVGGGIRTYEKASSYLNLGVSRIIFGTAAYENKKEVIKAIQNFGKAIVISIDALEGEIKTKGWLENSSLSIENIVQDFEKEGCKSFIYTDIEKDGTLSHPNFDYISKFRSFCSVELNIAGGISSFEDLIQLKNNKIDGAILGMSIYKKNINLKEVLEKL

SEQ ID NO: 155671 - protein, 117 aa, Unknown
  Bacterial polypetide isolated from the Sargasso Sea
GWIEQSDVLATDLARTFSSSGIAAIITTDIATDGTLAGPNLEALRTMAASSSVPVIASGGIGCMADLLSLLPLEPLGVSGVIVGRALYDGRVDLAEAVRALAEPRLQDITAVAADLA

SEQ ID NO: 155672 - protein, 239 aa, Unknown
  Bacterial polypetide isolated from the Sargasso Sea
MIVIPAIDIKGSNCVRLIKGDFSKETVYSKSPLEVASRWFEEGAECIHLVDLDGALKGKSINSDIFFEISNAFKDKLIQVGGGIRDLGIASQYLDNGIDRIIIGTRAIEDPSFITSLCNLYPDRIILGVDSDEGFVKTKGWQKKTSIRTLDLIRRYNQYPLAGFIFTDISKDGMMAGPNLKATLEVASNTQLPVIASGGVASLDHIKELSESGSIYGTITGKALYEKAFTLEEAIEAAS

SEQ ID NO: 155673 - protein, 256 aa, Unknown
  Bacterial polypetide isolated from the Sargasso Sea
MEIIPAIDLLNGKCVRLNQGNYNEVTKFNSDPVKQAQIWESKGAKRLHLVDLDGAKTGEPINDLTIKEIKKSITIPIQLGGGIRSIDRAKELFDIGIDRIILGTIAIENPELVKDLSKEYPKKVAVGIDAKEGMVATRGWLKQSEISSLDLAKQLNDLDLAAIISTDIATDGTLKGPNVQALREIAEISINPVIASGGIGSIADLISLADFADEGIEGIIVGRALYDGSIDLKEAILTLKNLLLQDAFNAKDKFLV

SEQ ID NO: 155674 - protein, 214 aa, Unknown
  Bacterial polypetide isolated from the Sargasso Sea
MNLIPAIDLLDQKCVRLLRGDFDQVTFYDKDPLQLAAHYESLGCKHLHLVDLNGTRDGASKNKSIIDSIISKTNLKVQMGGGIRSIESINYWLNSNLSKVVIGSYAIEETEEFISLLDPGMRSKIIIALDVLIRDGEPSIRIHGWQKDSKMSLIPTMKLFIDNGFRDFLITDISKDGTLEGPNIDLYDEINNQFKEINIIASGGVSIFDDLIKL

SEQ ID NO: 155675 - protein, 164 aa, Unknown
  Bacterial polypetide isolated from the Sargasso Sea
MQIIPAIDLLQGSCVRLHQGDYNQVTCFSEDPVAQALEWQSQGASRLHLVDLDGARSGEPTNDSAVRAITAALSIPVQLGGGVRSLERAEALLSFGLDRVILGTVALEQPELVEQLAARYPGRIVVGIDARNGKVATRGWITDTDTRATSLAKRFEGLGLAAIV

SEQ ID NO: 155676 - protein, 62 aa, Unknown
  Bacterial polypetide isolated from the Sargasso Sea
ATINLASNISIPVIASGGVSCLEDIQEISLHSKLGITGIIIGRALYEKKFNIKDAKDLFKKI

SEQ ID NO: 155677 - protein, 56 aa, Unknown
  Bacterial polypetide isolated from the Sargasso Sea
MLVIPAIDLKEGKCVRLREGKMEEETIFSDDPISTAASWFTQGAELLHMVDLDGAV

SEQ ID NO: 155678 - protein, 254 aa, Unknown
  Bacterial polypetide isolated from the Sargasso Sea
MKIFPAIDIKNGKCVRLLKGDFDKSTIYEKTPLDQAKEFSNQGFRDLHIVDLDGALKGEPVNGKLIEEICKLTNLNVFGLKMRIQVGGGIRSIDHIKKLIDAGVDRVVLGTIAVEDIKFLEKACNKFKNKIAVGLDVRNGFIALKGWKEQTKILASDFLMKIKDIGVSRIIYTDIERDGTLTVPNIPETLKFAKLLNYNERIPVVVSGGVSNINHLVAIKRHTSPPELEGVIVGKAMYDGNLKGFNLVSLLRDY

SEQ ID NO: 155679 - protein, 177 aa, Unknown
  Bacterial polypetide isolated from the Sargasso Sea
MKPIGKIISALNIPVQVGGGIRTPEDVETKLKLGAASVIIGTMAVKNPKHFEQTLETHGGDSVLLGIDARNRRVAVEGWKEGTDLEDVEFAQLWKSKGVKRVIFTDIARDGMLSGPNLEALEDFTIRSGLNVTASGGVSSFEDLKNLRKLETRGVDQVIVGKAIYDGRINLKEALEC

SEQ ID NO: 155680 - protein, 97 aa, Unknown
  Bacterial polypetide isolated from the Sargasso Sea
MLLIPAIDLKQGKCVRLLQGQEEEQTVYSDDPVSQALEFQKAGAQRLHLVDLDGAFRGRGENHETIGKIISALNIPVQVGGGIRTPEDVETKLKLGV

SEQ ID NO: 155681 - protein, 131 aa, Unknown
  Bacterial polypetide isolated from the Sargasso Sea
CHSKKFLEDFGKDHVCLAADVIPENGNYKIAISGWQETSTITLEALIEDYLPQGIIHILCTDISRDGTMGGCNFELYEKVQFLFPDLSIQASGGINSLNDLKKLQTSGAIIGKALYEGLFTLEQALEAISC

SEQ ID NO: 155682 - protein, 38 aa, Unknown
  Bacterial polypetide isolated from the Sargasso Sea
MLIIPAIDLKDGACVRLRQGLMDDATVFSDDPVAMAAK

SEQ ID NO: 155683 - protein, 239 aa, Unknown
  Bacterial polypetide isolated from the Sargasso Sea
MNFYPAIDLKEGQCVRLERGDLDTAVIYNDDPIAQAKLFQKEGCEWLHIVDLDGAVSRSKKNVKTIEDIRSSTSLKLQVGGGIRSLDEIEFWKSRDIDRVILGTLAVSDPTLVRKACRLFDGILIALDSRKNKVATSGWKNISNRNTLDLAKSFEDCGVDAIVFTDIDRDGLMEGLNSSDTKKLAEYVSIPVIGSGGINGPENLSSVKKSIPNLEGIIAGKALYTGALNIKDALRILKK

SEQ ID NO: 155684 - protein, 119 aa, Unknown
  Bacterial polypetide isolated from the Sargasso Sea
RIAVGIDAKDGMVATHGWVEVSEWQAVELAKAVIDLGVQTIIYTDIATDGMFTGPNLSAQQEMLEQASVPQLIASGGVGSVEDVMNLNQIENIYGVIIGKALYDDKLNLKTAARQLHTE

SEQ ID NO: 155685 - protein, 109 aa, Unknown
  Bacterial polypetide isolated from the Sargasso Sea
MIFFPAIDLKDGQCVRLLRGEMDAATVFNENPARQAATFELKGSKWLHLVDLNGAFEGRPVNGSAVDAILQEISIPVELGGGIRDRETIAMWLDKGVARVILGTGRCPR

SEQ ID NO: 155686 - protein, 242 aa, Unknown
  Bacterial polypetide isolated from the Sargasso Sea
MRVLPAIDIKDGKCVRLAKGDYSKVTHYSDNPLVVAESWLDKGATSIHIVDLDGAKDGETPNFDIIQKIRSAYKDIFIQVGGGIRSNSIIKKYVNIGINKVIIGTKALSDPSFLKTIPLYFKNKIIIDLAVKNMKLAVHGWESESEHTIEDYLKILEDNDIAEIVYTDVDKDGMLNGMNFDELNKLLKITNIPIIASGGVTSIEDIKNLSEICKHGISGVIIGKALYENRINLSDVFNIIGD

SEQ ID NO: 155687 - protein, 162 aa, Unknown
  Bacterial polypetide isolated from the Sargasso Sea
MIILPAIDIKDGKCVRLIKGDFEQMTAYKNTPFDQAKIYFQSGFKNIHIVDLDGALKGKSSNSNIIKEIVKNIKLKIQIGGGIRTIDDVDNWIKSGVDKVIIGTAAVENKNLLKTACEKFKNKIAISLDVKDGFIFLSGWKKQTNILATDFVKEIENFGVSR

SEQ ID NO: 155688 - protein, 118 aa, Unknown
  Bacterial polypetide isolated from the Sargasso Sea
GADVRDGKIASHGWKNQSDIMAVELIKTFKSSVVNSVIYTDISKDGSLQGVSLDQTVNFAKSIQHSVIASGGVSSLKDISKLSEEFSNGIQGVIIGRALYDKKFTFTEALKIIKKVKN

SEQ ID NO: 155689 - protein, 177 aa, Unknown
  Bacterial polypetide isolated from the Sargasso Sea
MKCLPAIDILDGKCVRLTRGDFDKSKIYNKSPLDQAKIFEDAGFKEIHIVDLNGAKSGNRLNLSIISKIASNTCLKVQLGGGIRSIDSIREVFDLGINKIILGTSILYKEFAREVMHRFNPNKIIFGLDVELKNNIYCLASHGWNEISDINIFDFVDEIKPIHVLVTDISKDGMMTG

SEQ ID NO: 155690 - protein, 126 aa, Unknown
  Bacterial polypetide isolated from the Sargasso Sea
MLLIPAIDLKQGKCVRLLQGQEKEETIYSDDPVSQALEFQKAGAHRLHLVDLDGAFRGRGENHETIGKIISALNIPVQVGGGIRTPEDVETKLKLGATSVIIGTMAVKNPKHFEQTLETHGGDSVL

SEQ ID NO: 155691 - protein, 239 aa, Unknown
  Bacterial polypetide isolated from the Sargasso Sea
MKKEQFILYPAIDIKDGKCVRLLFGDMKRETVYNNNPIDQAMWFIDQGAKWLHIVDLDGAIEGKSVNKTIIQKLSKTFQNRVNIQLGGGIRNLENIDFWLQNSVERLILGTLALENPDFFKELENEYYKKIVIGADVRDGMIASHGWKKQSNISAHDLIKKFNPSIISSVIYTDISRDGSLKGVSLKETLKFAKSISHPVIASGGVSSLNDIVRLSDQYSNGIEGVIIGRALYDKKFTS

SEQ ID NO: 155692 - protein, 160 aa, Unknown
  Bacterial polypetide isolated from the Sargasso Sea
MKDNIFTLYPAIDIKDGKCVRLLFGEMEKETVYNNNPLDQAMWFVDQGAEWLHIVDLDGAVTGKTINKSAIQSILHKLHNKVKIQIGGGIRNINDIDFWIQKSVNRVILGTLALEKPNFINELDKEYSKKIVVGADVRNGKLASHGWKKQSDIIATDIIK

SEQ ID NO: 155693 - protein, 246 aa, Unknown
  Bacterial polypetide isolated from the Sargasso Sea
MINNFHIYPAIDIKNGQCVRLVHGSIKNETVYKNNPLTQVEHFIENGCKWVHIVDLDAALNIGNNEQLILNILNTFSKDIKIQLGGGIRSYQKIKKWLDDGISRVVIGTLAYENPDIINSLGKDCHDKISLAIDVKDNKVAIHGWKKELTLSPIDLVDKIDRHLLNSIIYTDIDRDGTMQGVNLKKILNFCKNISLPVIASGGVSNIQDVKNLYNLHKFGIVGIIIGKAIYEKTLCLKEINQMVNI

SEQ ID NO: 155694 - protein, 136 aa, Unknown
  Bacterial polypetide isolated from the Sargasso Sea
GTVAVENPLLVKEAAKEFPGKIAVGVDARDGIVATEGWAKSTNISATELAKSFEDAGVCSIIYTDINRDGAMQGPNVQATAELANEVSIPIIASGGVSKMDDIIALKSCGAELNGVISGRALYDGAIDLKKALEIL

SEQ ID NO: 155695 - protein, 86 aa, Unknown
  Bacterial polypetide isolated from the Sargasso Sea
MLLIPAIDLKHGKCVRLLQGQEEEQTVYSDDPVSQALEFQKAGAHRLHLVDLDGAFRGRGENHETIGMIISALNIPVQVGGGIRTP

SEQ ID NO: 155696 - protein, 217 aa, Unknown
  Bacterial polypetide isolated from the Sargasso Sea
MKIFPAIDIRGGKCVRLLKGDFEKSTEYKKTPTDQAKEFLDLGFKDLHIVDLDGALKGKTVNLDIIRVIISNYNLKIEVGGGIRSLESIKQYIDTGVEKVILGSGAIKNKEFLKDACIKFKNKIALGLDSKDGFLSISGWKENSNIKTIDYLKEVNNFGISRIIYTDINKDGMKIGPNFEETVKIAEISNCPVVISGGVSTISDVVKCKNLNNKKIE

SEQ ID NO: 155697 - protein, 244 aa, Unknown
  Bacterial polypetide isolated from the Sargasso Sea
MKIFPAIDIKGGKCVRLLKGDFEKSTEYKNSPLDQAKEFSESGFKDLHIVDLDGALKGEPVNGKIIEEICKIKKMKVQIGGGIRSIDHINKLISIGVDRVVLGTVAFQDVEFLENVCNKFKNKIAVAIDVRNGFIALKGWKEQTKILASDFLMKIKNIGVSRIIYTDIDRDGTLTQPNLTETLKFAKLLDINERIPVVLSGGVGSIEDVINIKQAKGDLEGFVVGKALYDGKISFNSIKKLLLN

SEQ ID NO: 155698 - protein, 236 aa, Unknown
  Bacterial polypetide isolated from the Sargasso Sea
MLPIPAIDIQSGKCVRLKMGNLDSAKIYYENPLEAAEFWIEKGTKRLHIVDLDGALKGASVNFSVILEIRNSFPDIEIQLGGGIRSYETVESYVKNKIDFLILGSAAIKNKAFFKEACTNYPNQIILGLDAKKGFISTEAWTESSEIRAKDLINEYSSLPINSIIYTDISKDGMLEGPNVEETKELADFSNIPTIASGGVRNLNDLIKLEKTKKIFGAICGRALYEGTLDLEEAMN

SEQ ID NO: 155699 - protein, 51 aa, Unknown
  Bacterial polypetide isolated from the Sargasso Sea
MIIIPAIDLKEGKCVRLKQGVMDDSTIFSEQPAQMAKKWLKEGAKRLHLVD

SEQ ID NO: 155700 - protein, 176 aa, Unknown
  Bacterial polypetide isolated from the Sargasso Sea
GGGIRSQERIEELFSYGIEKVIMGTSAIENKELVKDLSNKFPGRIIVGIDAKDGKVSTRGWLEQSNILAKDLVKEFSSFKIANFIVTDINTDGTLEGTNEEFIKSILEITDIPVIASGGVGSISDLLSLVKFENSGLFGVIVGKALYENKFTINEANNVLSSERLNDFNLNRNHYA

SEQ ID NO: 155701 - protein, 156 aa, Unknown
  Bacterial polypetide isolated from the Sargasso Sea
VIMRTSAIENKELVKDLSNKFPGRIIVGIDAKDGKVSTRGWLEQSNILATDLVRDFSSFKIASFIVTDINTDGTLEGTNEKFIKSILEITDIPVIASGGVGSISDLLSLVKFENSGLFGVIVGKALYENKFKISEANNVLASERLSDFDLNSNYYA

SEQ ID NO: 155702 - protein, 223 aa, Unknown
  Bacterial polypetide isolated from the Sargasso Sea
VAQALSWQQQGATRLHLVDLDGAKRGEPVNDAAVQAITSALDIPVQLGGGVRSLERAEQLLACGLDRVILGTVAIEQPDLVRSLAERHPDRIVVGIDAKDGRVATRGWIEQSDVLATDLARTFSSSGIAAIITTDIATDGTLAGPNLEALRAMAASSSVPVIASGGIGCMADLLSLLPLEPLGVSGVIVGRALYDGRVDLAEAVRALAEPRLQDITAVAADLA

SEQ ID NO: 155703 - protein, 222 aa, Unknown
  Bacterial polypetide isolated from the Sargasso Sea
EQAKFWESEGAKYIHIVDLDAAKTGSPTNDESIKKIAKTVNIPIQIGGGIRSQERIEQLFSYGIEKVIMGTSAIENKELVKDLSNKFPGRIIVGIDAKDGKVSTRGWLEQSNIFANDLVKEFSSFKIASFIVTDINTDGTLEGTNEEFIKSILEITDIPVIASGGVGSISDLLSLVKFEKSGLFGVIVGKALYENKFTINEANNVLSSERLNDFDLNRNYYA

SEQ ID NO: 155704 - protein, 221 aa, Unknown
  Bacterial polypetide isolated from the Sargasso Sea
QAKLWESEGAKYLHIVDLDAAKTGSPTNDKSIKEIAKTVNIPIQIGGGIRSKERIEQLFSYGIEKVIMGTSAIENKELVKELSNKFPKKIIVGIDAKDGKVSTRGWLEQSNILATDLVKEFSTFKIASFIVTDINTDGTLEGTNEEFIKSILEITDIPVIASGGVGSISDLLSLVKFENSGLFGVIVGKALYENKFKISEANNVLSSERLSDYDLNNNYYA

SEQ ID NO: 155705 - protein, 125 aa, Unknown
  Bacterial polypetide isolated from the Sargasso Sea
DNFFEKKIALAVDVKDGRIATHGWKNHLDLTPLSLIKKLDKSLIDAIIYTDISRDGTLNGLNITDTLKFSQSVAMPVIASGGISKVEEIDRLFNLKNMGIIGVIVGKALYENRFTINDVNQIIYT

SEQ ID NO: 155706 - protein, 226 aa, Unknown
  Bacterial polypetide isolated from the Sargasso Sea
KEPHQQAKFWESEGAKYIHIVDLDAAKTGSPINDKSIKKIVETVNIPIQIGGGIRSQERIEQLFSYGIEKVIMGTSAIENKELVKDLSNKFPGRIIVGIDAKEGKVSTRGWLEQSNILATDLVKEFSSFEIASFIVTDINTDGTLEGTNEEFIKSILEITDIPVIASGGVGSISDLLSLVKFENYGLFGVIVGKALYESKFTINEANNVLSSERLTDFDLNKNFYA

SEQ ID NO: 155707 - protein, 124 aa, Unknown
  Bacterial polypetide isolated from the Sargasso Sea
DDCKNKICLAIDVRDNKIAVNGWKEQLKLSPLELINKIDKSLLNSIIYTDITRDGTLKGINKKQTVDLSKKVSLPIIASGGVSSIKDVKDLYSLKKFGIIGVIVGKALYENILSISEINKVISK

SEQ ID NO: 155708 - protein, 233 aa, Unknown
  Bacterial polypetide isolated from the Sargasso Sea
MIIFLAIDIKEGKCVRLLKGDFKQLKEYRKSPLEQAKVFINYGFHNLHIVDLDGALKGKSFSKEIIKEISMLNRANVQVGGGIRTLDQIDELLDFGVEKIILGTRAIEDKSFLEIACKKFKDKIVLSIDAKNGYIALSGWTKKTNIKATDFIADIKDLSISRIIYTDIDKDGTKTGPNLKETLSLSNLTKIPIVISGGISSIKDVLNIKNKKFKNIEGVIIGKAIYDGNINLK

SEQ ID NO: 155709 - protein, 222 aa, Unknown
  Bacterial polypetide isolated from the Sargasso Sea
MQLIPAIDLKNGSCVRLLQGEFDKETVYSNDPAAMAFKFEEAGAKRLHLVDLDGSFDGVGANISSIRSILKNISIPVQIGGGLRTEEDIDTMMDMGVSAVIVGTMAVKSPSVLEKLLNKYTDEQIILGVDARNRKVSIEGWKENTQIKDVKFALKWKNFGIKRVVFTDISRDGMLGGPNLVALREMAEDTGLKIVASGGVSSLEDLEELKKLEPYGVDQVIS

SEQ ID NO: 155710 - protein, 239 aa, Unknown
  Bacterial polypetide isolated from the Sargasso Sea
MNFYPAIDLKEGQCVRLQRGDLDTAIVYNDDPIAQANIFQEAGCNWLHVVDLDGAVSGSKKNVKTIEEIRSSTSLKIQVGGGIRNLKQIEFWKSKGIDRIILGTVAVSNPTVVQEACRLFDGILIALDSRSNKVATAGWKTTSNKNTLDLAKSFEDCGVDAIIFTDIDRDGLMKGLNSNATKRLSDNVSIPVIGSGGINGPENLKNIKKNIPNLEGVIAGKAIYTGALRIEEALRILKD

SEQ ID NO: 155711 - protein, 239 aa, Unknown
  Bacterial polypetide isolated from the Sargasso Sea
MKIIPAIDLLDGQCVRLLQGDYKKVTSYNISPINQANYFFKEGFRYLHIVDLDSAKNANNKNLNIIKSINKIKNLKIQVGGGIRDIQKVKDLLDIGIDRLIVGTEAIKNKNFLNALKNEVDVKKIVFGLDFKIIENEAVLYTNGWLEKSRYKLFDFIEKNSWMFNILATDISSDGMLSGPNIKIYEMILNKSNSNLIASGGISAVSDINNLKKIGIQECVVGKAIYENIIPIEDIRNAN

SEQ ID NO: 155712 - protein, 85 aa, Unknown
  Bacterial polypetide isolated from the Sargasso Sea
VALGVVDFLCTDISKDGTMTGPSFALYEDLTNHNSEIKVQASGGVSSLDDIAKLKKLGVGGVILGKSLLDGAFNVEEALACYQNA

SEQ ID NO: 155713 - protein, 239 aa, Unknown
  Bacterial polypetide isolated from the Sargasso Sea
MNFYPAIDLKEGQCVRLQRGDLDTAVVYNDNPVAQAKIFQEAGCRWLHVVDLDGAVSRSKKNVKTIEEIRSSTSLKIQVGGGIRNLKEIDFWKSKGIDRVILGTVAVSNPSVVQKACRHFDGILIALDSRANKVATAGWKTTSNKNTLDLAKSFEDCGVDAIIFTDIDRDGLMKGLNSNDTKRLSDHVSIPVIGSGGINGPENLENVKKDIPNLEGVIAGKAIYTGALRIEDALRILED

SEQ ID NO: 155714 - protein, 187 aa, Unknown
  Bacterial polypetide isolated from the Sargasso Sea
GKDPQNRQIDLIANIINSTGLLVQTGGGVRSADDVATLLDAGAARVVIGSLAVHDPDVVKQLMHMHGPDKICLAADVILQNDAFYIAVSGWQEASDLSLFDFLDMFAPAGLTHVLCTDIDRDGTLRGFNRALYTNVKLKFSYLQLQASGGASRLEDLKHLDADGVIIGKALYEGRFSVAEALEATAC

SEQ ID NO: 155715 - protein, 97 aa, Unknown
  Bacterial polypetide isolated from the Sargasso Sea
AVDLIKKFNPSIINSIIYTDISRDGSLLGVNIDQTINFAKCIPHPVIASGGVSSLNDIIKLSDQVSNGIEGVIIGRALYDKKFSFFEAVKEIKKRKI

SEQ ID NO: 155716 - protein, 247 aa, Unknown
  Bacterial polypetide isolated from the Sargasso Sea
MVGEFEVIVYPAIDIIDGKCVRLSRGDYSNKTIYSDNLESVVSSWLSKGTRFLHIVDLDGAKAGRPLNIDSILKIRKSFPDIFIQIGGGIRNIETVNQYLANGINRIILGTKVLKDREFIRSIDQAHRKSLAIDIAIKDGQLAGDGWETTANNDVGDFIDYFEQNGIELFIVTDINQDGMMQGINSESIEKILKFISTKAIISGGVTSTNDIQSILKMTRSKIDGFIIGKALYENTIDLKEAINECS

SEQ ID NO: 155717 - protein, 173 aa, Unknown
  Bacterial polypetide isolated from the Sargasso Sea
MDLIPAIDLMNGKCVRLFKGDFNKRKDFTKEPHEQAKFWEGEGAKYIHIVDLDAAKTGSPTNDKSIKKIAKTVNIPIQIGGGIRSQERIEQLFSYGIEKVIMGTSAIENKELVKDLSNKFPGRIIVGIDAKDGKVSTRGWLEQSNIFATDLVKEFSSFKIASFIVTDINTDGT

SEQ ID NO: 155718 - protein, 179 aa, Unknown
  Bacterial polypetide isolated from the Sargasso Sea
MNVIIPAIDLIQGKTVRLYQGSYDKTTEYQQTPLQLRDLYAKAGAGILHLVDLTGAKNAADRQLELLTSLMKNAPLPVQVGGGVRTAADVEQLLAAGASRVVVGSVAIREPETVQGWLRSYGGDKIVLALDVAINAKGDKTLPSHGWIEESTITLEQVLDGFIAARCQTMCFAPDISKD

SEQ ID NO: 155719 - protein, 246 aa, Unknown
  Bacterial polypetide isolated from the Sargasso Sea
MILFPAIDLKGGHCVRLLKGDMNESTVFNTSPVDQATIFQSAGCQWLHVVDLDGAIAGHSINNEAILSIIRGVECPIQLGGGIRDLQSVEYWINEGVSRVILGTAAMKDPNLVKLSCREFPERIVVGIDARDGFVAVEGWAKHSNINSQELANRFQDCGVSAIIYTDINRDGILAGVNIEATLALASSVNIPIIASGGLSSMDELTVLSDQAEGRIAGVICGRALYENRINLKDALKLLRDRIDEC

SEQ ID NO: 155720 - protein, 54 aa, Unknown
  Bacterial polypetide isolated from the Sargasso Sea
MIVIPAIDLKDGKCVRLRGGKMDEVTVFSDDPLETSRIWFSEGAELLHIVDLDG

SEQ ID NO: 155721 - protein, 240 aa, Unknown
  Bacterial polypetide isolated from the Sargasso Sea
MILFPAIDLKDGKCVRLIQGDFKQSTTYNESPLEQAKIFEDSGVEYLHCVDLDGALKGNFENIKSIEQIKKNTNLKIQFGGGVRNIERVERLINIGVNNVIIGTSAFENKTFFEKSVCNYPNRISIALDIKQNQIATKGWKEVKDLQISDFLKSIEDLNINSIIITDVMRDGMKQGINFEMLENVMVQTKIDCVASGGVSNISDLINLKKKNYSQIKGVIVGKAIYDKNIDIAEALKIVR

SEQ ID NO: 155722 - protein, 240 aa, Unknown
  Bacterial polypetide isolated from the Sargasso Sea
MKIFPAIDIRGGKCVRLLKGDFEKSTEYKKSPTDQAKEFLDLGFKDLHIVDLDGALKGKTVNLDIIRVIISNYNLKIEVGGGIRSLESIKQYIDTGVDKVILGSGAIKNKEFLKDACIKFKNKIALGLDSKDGFLSISGWKENSNIKTIDYLKEVNNFGISRIIYTDINKDGMKIGPNFAETIKIAEISNCPVVISGGVSTMSDIIKCKKLNNKKIEGIIVGKAIYDGDIKLDELVKEID

SEQ ID NO: 155723 - protein, 89 aa, Unknown
  Bacterial polypetide isolated from the Sargasso Sea
MIKKFEDDPIAAIIFTDISKDGKMIGPNIEATSDLANQTKIPVIASGGVSSLDHITQLEDKKNISGVICGRALYEKAFTYADVLEVLGK

SEQ ID NO: 155724 - protein, 191 aa, Unknown
  Bacterial polypetide isolated from the Sargasso Sea
MIIIPAIDIKGGNCVRLLKGNFSKETVYSNNPLEVASMWFEGGAECIHLVDLDGALEGKSINSDIFLEISSAFKDKTIQVGGGIRDLDIATQYLESGIDRIIIGTRAIEDPGFIVNLCDLYPNRIILGVDSEEGFIKTKGWQQETSIRTLDLIRRFNKFPLAGFIFTDISKDGMMEGPNLKATLEVASNTQ

SEQ ID NO: 155725 - protein, 239 aa, Unknown
  Bacterial polypetide isolated from the Sargasso Sea
MKIFPAIDIKGGKCVRLLKGDFGKLTQYKKSPFDQANIFSNLGFKNLHLIDLDGALEGKSINKEIIQNIAKIKNIKIQVGGGVRSLEQVDDLLNIGADKVILGTKAIEDINFLEKASQKFKGKIALAIDVRNGFIALSGWKKQTDILASEFIKKVDRLEVSRIIYTDISRDGTKTGPNIVETIKFSSLTKIPVIVSGGVSSLQDVINLKKNKSERIEGIIVGKAIYDESIDLNELSKVS

SEQ ID NO: 155726 - protein, 181 aa, Unknown
  Bacterial polypetide isolated from the Sargasso Sea
PLNQEIIFNIASKFPDKRIQIGGGIRNFQSASQYLDQGIERVIMGTSAVENPEMLREFCNLYPNRLVLGVDALDGQVKTQGWLKGSSISPLELIKKFDGEPIAAVIFTDISKDGMMSGPNVKATLELAQQTDIPVIASGGVSSLEHIRQLARENILAGAICGRALYESAFSYLEAVEATST

SEQ ID NO: 155727 - protein, 136 aa, Unknown
  Bacterial polypetide isolated from the Sargasso Sea
MILYPAIDLKKGKCVRLLQGNMNKQTIFNHDPLMQAKLFVNKGCEWLHVVDLDGALTQSLVNQKIIKDIIKNVAIPVQLGGGIRHIETIEDWISNGVQRIILGTIALKDPQLVKEACKYFPNKIAVGIDAKNSKVM

SEQ ID NO: 155728 - protein, 179 aa, Unknown
  Bacterial polypetide isolated from the Sargasso Sea
NQEIIFDIASQFPEKRIQIGGGIRNFQSASQYLEQGIERVIMGTAAVEDPEMLREFCNSYPNRLVLGIDALHGQVKTQGWLKGSSITPLELVKDFDGEPIAAVIFTDISKDGMMSGPNVIATLELAKQTDIPVIASGGVSSLEHLKQLSNENILFGAICGRALYESAFTYSEALEVIGR

SEQ ID NO: 155729 - protein, 246 aa, Unknown
  Bacterial polypetide isolated from the Sargasso Sea
MILFPAIDLKGGNCVRLIKGDMNESTVFNTSPGGQATIFQSAGCEWLHVVDLDGAFAGRSINNEAIGSIIDSVKCPIQLGGGIRDLKSVEHWINRGISRVILGTAAMKNPEFVKESCKEFPERIVVGIDAREGFVSVEGWAKHSDMNILELADRFEDSGVSAIIYTDIDRDGVLSGVNIEGTLALASKVEIPVIASGGLSSIQELKNLLDEARGKIDGIICGRALYENRINLEDALEILSHGGREC

SEQ ID NO: 155730 - protein, 241 aa, Unknown
  Bacterial polypetide isolated from the Sargasso Sea
MILFPAIDLKDGKCVRLVQGDFNKSTTYNNSPLDQAKLFEDLGITWLHCVDLDGALAGQSENAKSIEEIASKTNLKLQFGGGIRNIKSVETLINIGIQNVILGTAAFEDYELFQTAIQKYPNKMSIALDIKNEQVALRGWREVKSINLEKFLLSIEGLKINSIICTDVMRDGMKKGINFDMLENVMKMTSFLCVASGGVSSIDDIKNIKGKNYSQMKGVIVGKAIYDKNIDIKEALKILSK

SEQ ID NO: 155731 - protein, 160 aa, Unknown
  Bacterial polypetide isolated from the Sargasso Sea
MILFPAIDLKDGKCVRLTQGDFNKSTVYNSSPIDQAKIFEDLGVEWLHCVDLDGALHGVSENLKFIEQIANETNLKIQIGGGIRTMEKVRLLIDLGVSNLILGTAVFKDREFFDKTVNLYPKSISIALDIKNNQIATQGWSEVHEIDLISFLTSLNNMKI

SEQ ID NO: 155732 - protein, 236 aa, Unknown
  Bacterial polypetide isolated from the Sargasso Sea
MKIFPALDIRNGKCVRLIKGNYNNEIIFDENPIDVAMKFEQDGSSFIHIIDLDGAKDGDSTIKNIIAQILNKTNLKIQVGGGIRTYEKASSYLNLGVSRIIFGTAAYENKKEVIRAIQNFGKAIVISIDALEGEIKTKGWLENSSLSIENIVQDFEKEGCKSFIYTDIAKDGTLSHPNFDYISKFRSFCSVELNIAGGISSFEDLIQLKNNKIDGAILGMSIYKKNINLKEVLEKL

SEQ ID NO: 155733 - protein, 245 aa, Unknown
  Bacterial polypetide isolated from the Sargasso Sea
MKLIPAIDLLDQKCVRLLRGDFDRVTFYEKDPLQLAKHYESLGCEHIHLVDLNGTRDGKSENKSIVDSIISKTNLKVQMGGGIRSKDSINYWLDSDLEKLVIGSFAVEEYDQFISLLSPNTRSRIVIALDVLIVANIPQIQIHGWQKDSELTLLPTIKTFIDQGFDEFLITDISKDGTLKGPNIELYKQINLEFSPINVIASGGVSSLDDLIKLDNISIQSAVVGKSLLENKITDQEVMQFLQKG

SEQ ID NO: 155734 - protein, 195 aa, Unknown
  Bacterial polypetide isolated from the Sargasso Sea
MDLIPAIDLMNGKCVRLFKGDFNKRKDFTKEPHEQAKFWESEGAKYIHIVDLDAAKSGSPTNDESIKKIAKTVNIPIQIGGGIRSQERIEQLFSYGIEKVIMGTSAIENKELVKDLSNKFPGRIIVGIDAKDGKVSTRGWLEQSNIFATDLVKEFSSFKIASFIVTDINTDGTLEGTNEEFIKSILEITDIPVVA

SEQ ID NO: 155735 - protein, 240 aa, Unknown
  Bacterial polypetide isolated from the Sargasso Sea
MELWPAIDLRGGCCVRLQQGDYGRETVFGEDPVETVKQFTSAGSRRLHIVDLEGAKDGAAIQSDLIRQMVATAGVPCQVGGGIRSRKIIESYLEAGVSRLVMGSVAIEQPDLFAELAHAYPDTLVLGLDAREGKLAARGWLETSTQQAVDVAAQSAELPLAAIVYTDIARDGMLQGPNLPALEAMVQASPHPVVASGGIAEADDLRAVAATGASGCIVGRALYDGGLTLSAAIEASGESL

SEQ ID NO: 155736 - protein, 81 aa, Unknown
  Bacterial polypetide isolated from the Sargasso Sea
QIIYTDISTDGMMKGPNLKGTTNLAKSLNIPVIASGGISSENDVMNYLSNEKHGINGVIIGRALYENKISFSKLINKLHKK

SEQ ID NO: 155737 - protein, 132 aa, Unknown
  Bacterial polypetide isolated from the Sargasso Sea
IIVGIDAKDGKVSTRGWLEQSNIFATDLVKEFSSFKIASFIVTDINTDGTLEGTNEEFIKSILEITDIPVIASGGVGSISDLLSLVKFENSGLFGVIVGKALYENKFTINEANNVLSAERLNDFDLNTNYYA

SEQ ID NO: 155738 - protein, 245 aa, Unknown
  Bacterial polypetide isolated from the Sargasso Sea
MNLIPAIDLLDQKCVRLLRGDFDQVTFYDKDPLQLATHYESLGCKHLHLVDLNGTRDGASKNKSIIDSIIAKTNLKVQMGGGIRSIESINYWLNSNLSKVVVGSYAIEETNQFISSLDPGMRSKIIIALDVLIRDGEPSIRIHGWQKDSKMSLIPTMKLFIDNGFRDFLITDISKDGTLEGPNIDLYDEINIRFNEINIIASGGVSIFDDLIKLDKISLSSVVVGKSLLENKITEQEVVQFLQKG

SEQ ID NO: 155739 - protein, 135 aa, Unknown
  Bacterial polypetide isolated from the Sargasso Sea
SAVEEPDMLKDFCVKYPNRLVLGIDALDGVVKTQGWLKGSGISPAELVKKFEDEPIAAIIFTDISKDGMMMGPNIEATSDLANQTKIPVIASGGVSSLDHIIQLEDKKNISGVICGRALYEKAFTYADVLEVLGK

SEQ ID NO: 155740 - protein, 245 aa, Unknown
  Bacterial polypetide isolated from the Sargasso Sea
MKLIPAIDLLDQKCVRLLRGDFDRVTFYEKDPIQLAKHYESLGCEHIHLVDLNGTRDGKSKNKSIVDSIISKTNLKVQMGGGIRSKDSINYWLDSDLEKLVIGSFAVEEYDQFISLLSPNTRSRIVIALDVLIVANIPQIQIHGWQKDSELTLLPTIKAFIDQGFEEFLITDISKDGTLKGPNIELYKQINLEFSPINVIASGGVSSLDDLFKLDNISVQSAVVGKSLLENKITDQEVMQFLQKG

SEQ ID NO: 155741 - protein, 45 aa, Unknown
  Bacterial polypetide isolated from the Sargasso Sea
EIAIASPSWSIHSGVGTTNYSFIWAMGGENQEFDDMDHIEISSLR

SEQ ID NO: 155742 - protein, 226 aa, Unknown
  Bacterial polypetide isolated from the Sargasso Sea
GPVSLPRQTEPSSAAGHAFLERRELGVINVGSGSGTVTVDGTVYTLGPKDGLYVAMGSEEVAFASDDAANPAQFYLASTPAHARFETKALSIKDAVALDRGALETSNERTIYQYIVPATCQSSQLLLGLTVLKPGSVWNTMPPHLHDRRSEVYFYFDLGQNDRVYHFMGEPDAQRHIVIQNNEAVVSPPWSIHMGAGTSNYAFIWAMGGENLDYTDMHVLDICQLK

SEQ ID NO: 155743 - protein, 262 aa, Unknown
  Bacterial polypetide isolated from the Sargasso Sea
MTNAELEEGFTIPELFVVDEITLTYTDVDRAVVSGVMPVSKTIDLPTHKELASAYFCERREVGVINIGDEGVVTVDGETFNMTNKDSLYIGRGSEKVSFASKDGSTPAKFYLVSYPAHTAYPTKLVAQENANKLALGEQDQSNKRTIYQSLCPKTLESCQLVMGITEIESGNVWNTKPPHTHARRTEVYMYFDMPSHERVFHFMGEPSNVRAVVMKPETAIASPTWSIHSGVGSTNYTFIWAMGGENQEFDDMDHLTLADIS

SEQ ID NO: 155744 - protein, 93 aa, Unknown
  Bacterial polypetide isolated from the Sargasso Sea
MLLHRTRIKLCGLTQPADVDHAVAIGADAIGLVFYPPSPRYVTIERAAELAHRAGPFVTVTGLFVNASADDVARVLDQVPLTLLQFHGDEPAE

SEQ ID NO: 155745 - protein, 218 aa, Unknown
  Bacterial polypetide isolated from the Sargasso Sea
MTVPRVKICGITRIEDGLAAANAGADAIGLVFYGPSPRAVTARQAAEICASLPPFVTTVALFVDASRAEIEGVLARVPVDLLQFHGNENPQFCDSFNRPWIKAVRMKDDVDLHHYAQIYRNAAGLLIDSYVAGVPGGTGETFNWGRVPKTLPLPVVLAGGLHPGNVAAAVTQVQPWAVDVSGGVEQKNVQGGRSGGIKDASAIRVFINSVKTRGVAGV

SEQ ID NO: 155746 - protein, 203 aa, Unknown
  Bacterial polypetide isolated from the Sargasso Sea
KDSVEVAFKLNVDYVGLVFFPLSPRNISLDKAQKLINFKNSNTKIVALTVNAKDCFLNKVINEIKPDYFQFHGSESPNRCKEIRDKYNIKIIKALEVRDICSLQNDINKYKRFVDEFILDAPKSFLPGGNGEKFDWELLKNNEIKVDWLIAGGLNISNIKNALLITKAKGVDVSSGVEISKGKKSPKLIEEFVLKCKDIEKVF

SEQ ID NO: 155747 - protein, 205 aa, Unknown
  Bacterial polypetide isolated from the Sargasso Sea
MSKFAGLNNKETVEVAVKAGASHLGFIFYPPSPRSLTPKEAGYIASTTPNHIKRVAVIVDARDDLINDIIQSLSPHILQLHGSETTNRIQEIKEKFKLPIMKAIKVANFDDIKSSQQYNDSSDFLLFDAKPPSTSINSLPGGNGISFDWALLRSVKIGKPWFLSGGIHIDNVQKAIKTTGNRSIDISSGVEDQPGVKSSQKIEMF

SEQ ID NO: 155748 - protein, 244 aa, Unknown
  Bacterial polypetide isolated from the Sargasso Sea
MDRASETMKSTENLAAEAHAGASQHAVPHRTRIKLCGLSKPEDVAYAIDLGADAIGLVFYPPSARSVSVAQAVELVHDVPPFVSVVGLFVNPTQDWIREVVSNVGLTLLQFHGDETVAQCESLASLAGLPWLRALRVAADTQPADLVKSALNYSAANGLLFDTHVEGYGGGGKVFDWSLIPAELARRAVLSGGLNAQNVSDAIHRVRPYAVDVSSGIEVPGARGVKDHARMAAFVRAVRAADAE

SEQ ID NO: 155749 - protein, 191 aa, Unknown
  Bacterial polypetide isolated from the Sargasso Sea
MPIRATHSGCWCKICGVTSADEAASIADLGADSIGLNFYSQSPRYLLKKDAAEIAASVKNCSIIALFVNPSVEEVESIISDIEIDGLQFHGDEDSEFCESFGVDYIKAISMKDNYSPKELEEYHPNAWALLLDSYVKGLPGGTGEIFDWNNWPVANERKLILAGGLTPENVASGIKATMPYGVDVSSGVEG

SEQ ID NO: 155750 - protein, 207 aa, Unknown
  Bacterial polypetide isolated from the Sargasso Sea
MTHFIKICGITSKEDALMVEEEGADALGFIMHKQSHRYIEIEKVLDIIGGLKGELDIFLVFVNKKAEFVENCLNEIPHAIPQFHGDEDPQFCEKFNKDFVKAVRVNSNTDFENINYSYGKAKMLLLDSHEEGSYGGTGKPFDWDLISNQLKIPFLLAGGIDTINVEKALASVSCRGIDVSSGVESIPGKKDPNKVRDLIKKVRRFNV

SEQ ID NO: 155751 - protein, 218 aa, Unknown
  Bacterial polypetide isolated from the Sargasso Sea
MPPRTRIKLCGLSRPEDVLHAAALGADAIGLVFYPKSPRAVSIAQAAELARLAPPFVSVVGLFVNATEAEIEAVVRDVPLTLLQFHGDETPEQCDALGRAARLPWLRAVRVGPSTQSADLVESGLHYSKARGLLFDTLVPDYGGSGKVFDWSLIPAELAHRAVLSGGLSAQNVGDAIRQLRPFAVDVSSGIEVEGAKGVKDHARMAAFVRAVREADAG

SEQ ID NO: 155752 - protein, 207 aa, Unknown
  Bacterial polypetide isolated from the Sargasso Sea
MNHFIKICGITSKEDALMVEAEGADAIGFILHEESDRFIEIEKVADIVECLNNDLDIFLVFVNKAEEFVANCLDKIPRAIPQFHGDEDAEFCSKFSEDFVKAVRVNAETDFDNINNCFAGAKLLLLDSYEEGSYGGTGKSFDWGLIGTQLKIPFLLAGGIDTINVEKALSSVSCKGVDVSSGVESAPGKKDPIKVRDLIKKVRRFNV

SEQ ID NO: 155753 - protein, 160 aa, Unknown
  Bacterial polypetide isolated from the Sargasso Sea
MKPKLKICGMKNLENIQEISTLEPDFIGFIFWEPSKRYCTLNSLPILPKLIKKVGVFVNAYYYDILEKVKQYELDIVQLHGNESPTLCKDLKDEKITVIKAFSIDEDFDFSILKRYKNHVDFFLFDTKRKLPGGNGKTFNWKVLENTMVINHFFLVAELD

SEQ ID NO: 155754 - protein, 309 aa, Unknown
  Bacterial polypetide isolated from the Sargasso Sea
GNPQLAKMGLEEQAQGHGAIASGFQGQRQWTDHFPNGDFLEAILNTSFDWNGKRSPYIVATENDALNAATMLFGHLLTNSAQIFADLRTYWSPEAVATACDGYTLQGDAADGLLHLINSGPAALDGTGQQVSQDGRPTMKPFWDITDDEVTKCLKATTWHPSITEYFPGGGLSTRYRTLGQMPATMTRINLVAGLGPAIQIAEGQTVELPDSVHDVLDQRTNPTWPTTWFAPNITGRGAFTSTYEVMNHWGANHCVMTAGHVGHLFITLASILRIPVYMHNVSDERVFRPSAWNAFGTDGSRRSGLSCL

SEQ ID NO: 155755 - protein, 161 aa, Unknown
  Bacterial polypetide isolated from the Sargasso Sea
MEAGNNLVLGAHMLEVCPSIAADKPVLDAQHLGIGKKADPARLLFAAPAGKAVNASLIDLGNRFRLVVNQLEVVDLPEAMPKLPVASALWQPMPDLQTSAEAWILAGAAHHSVFTQSVDIEQLRTFADLMGIECVVIDEHTRIPELKQTLQWNEVYYKLCH

SEQ ID NO: 155756 - protein, 116 aa, Unknown
  Bacterial polypetide isolated from the Sargasso Sea
NTKTGPAVVASLIDLGDRYRLLVNCIDTVPTPHELPKLPVANALWKAQPDLPTASEAWILAGGAHHTVFSHALDLNDMRQFAEMHDIEIAVIDNDTRLPAFKDALRWNDAYYGFKR

SEQ ID NO: 155757 - protein, 131 aa, Unknown
  Bacterial polypetide isolated from the Sargasso Sea
DTDQFPNNPLDLLMPFYHIFSNGGFKQGGLNFDAKIRRQSIDPEDLFYAHIGGMDVAARALLAVEKMINDKEISTYIDNRYKKWNQDLGQYIHSNKSDLESIANKVIQEDIEPDPESGQQEYLENVLNKYI

SEQ ID NO: 155758 - protein, 178 aa, Unknown
  Bacterial polypetide isolated from the Sargasso Sea
ENDFKINIENNHATLAGHTFAHEIQTAYNFNAFGSLDINQGDPHNGWDTDEFLNNIYDAVHIMLIILSEGGLKSGGMNFDAKTRRSSTDLEDIFIGHIHAMDTLARGLMIADDILQNSEYQNLKNQRYKSFDGNKGLLFSDGKLNLEELASLASNQNEPSLSSGKQELFESIINKHIK

SEQ ID NO: 155759 - protein, 120 aa, Unknown
  Bacterial polypetide isolated from the Sargasso Sea
IDNVILFYFQNGGLGQGGMNFDAKIRRQSIDPEDLFYAHIGGMDVCAKTLIALEKLINDNVIPKYIDDRYSDWNNDFGKFIHDKNTGLDHIHKKVLDNNIEPKPRSGQQEYLENILNKYL

SEQ ID NO: 155760 - protein, 134 aa, Unknown
  Bacterial polypetide isolated from the Sargasso Sea
MTTIGNKEFFKGINKIEFEGKDSKNPLAFKYYNPNQIVAGKTMRDHFKFAVAYWHSFCGQGADPFGVGTQNFPWDKSKDPFLASKDKADAAFEFISKMGFDYFCFHDFDLIEESDDFSESEDRLNFITDYVQTR

SEQ ID NO: 155761 - protein, 145 aa, Unknown
  Bacterial polypetide isolated from the Sargasso Sea
MSIVLGNKEYFKDVKKIKFEGKDSKNPFSYRFYDENKIVLGKKMSEHFKFAVAYWHSFVNPGNDPSGIGTRFFPWSKSSDPFQNACDKMDAAFEFISKLGLNYFCFHDFDLIEEGSSLSESEKRLGKITNYAKEKIKASDINVLW

SEQ ID NO: 155762 - protein, 153 aa, Unknown
  Bacterial polypetide isolated from the Sargasso Sea
TAAAAGALGSIYANMGHPHLGWDTDHFPTDIYLTTRIMRIVLGMGGLGQGGLNFDAKRRRGSFEPVDLFHSHIAGMDAFARGLKIAAAIREDRRLDEAVQNRYSSWDSDLGTGIESGRVTLEELESHARSAGEPILSSGREEMLESLLNDFIR

SEQ ID NO: 155763 - protein, 99 aa, Unknown
  Bacterial polypetide isolated from the Sargasso Sea
MSINLTLGQKEYFPNIKQIEYEGRDSDNPLAFKFYDSEKIVSGKPMREHLKFAVAYWHTFCGTGSDPFGTGTKHFPWNVSQHQIESAYARLDAAFEFFR

SEQ ID NO: 155764 - protein, 89 aa, Unknown
  Bacterial polypetide isolated from the Sargasso Sea
PEDLCYAHIGGMDTCAKTLLATEKLLNDKILPEYIKKRYQNWEKDLGSFIHSKEASLESIQKKVIDDNIEPKPRFGNQEYLENILNKYL

SEQ ID NO: 155765 - protein, 158 aa, Unknown
  Bacterial polypetide isolated from the Sargasso Sea
MTDFFHGIPKCTFEGTETNNEFAFRHYNPNQIVLGKRMEDQLRFAVAYWHSFAWPGGDPFGGQTFDRPWFGDTMEHARWKADAAFEMFEILGVPYFCFHDLDVRPEGNSFAESLSNLEEITDYIAEKMDSTGTKLLWGTANLFTHRRFMSGAATNPDP

SEQ ID NO: 155766 - protein, 154 aa, Unknown
  Bacterial polypetide isolated from the Sargasso Sea
AYATSNSALGSIDINRGDTLIGWDTDQFPNNPADLIMSFYFIFKNGGLGQGGMNFDAKIRRQSIDAEDLFHAHIGGMDVCAKTLIAVEKLMNDNVIPKFIEDRYEDWNKNLGQFIHNKDTGLDDINKKVIDDNIEPEPRSGRQEYLENILNKYL

SEQ ID NO: 155767 - protein, 123 aa, Unknown
  Bacterial polypetide isolated from the Sargasso Sea
MSDYFKNINEIIYEGPDSDNPLSFKYYDESRKVLGKTMKEHLRFATCYWHTFTWPGLDPFGGATFERPWMSGEEPLKMAEMKLEEAFDFFTKIKTPFFCFHDRDISPEGISYKETQKNFLHII

SEQ ID NO: 155768 - protein, 168 aa, Unknown
  Bacterial polypetide isolated from the Sargasso Sea
MAGHSGEHDVEACASRGKLGSIDANRNEAMLGWDTDMFPTDPLLSTYIMKRVIEQGGLAPGGLNFDAKVRRESTDVEDLFIGHINGMDCYARGLRAAAAMIADGTFDKMRAARYAGFAEGLGKKFADGQASLAELAAAAAAVPAGGEAAPPSGKHERLESIFNAFALG

SEQ ID NO: 155769 - protein, 179 aa, Unknown
  Bacterial polypetide isolated from the Sargasso Sea
MRGDKTHVRSWDKDDTLETYLERVHVAFEFFTKLGVEYYCFHDVDVAPQGASQEEFFKNLDIITDLMLQKQKDTGIKLLWCTQNMFSHNRYKDGASTSPDLNVFAFACAQTKKSLEISKKLGAENHVFWGGREGFQTPLNTDVRKELDHMAAFMKMAVEYKDKIGHKECQFLIDPKPRE

SEQ ID NO: 155770 - protein, 132 aa, Unknown
  Bacterial polypetide isolated from the Sargasso Sea
MQDYFKNIPEINFEGENSNNPLAFKFYDEDKIILGKPMKEHFRFATCYWHTFTWPGLDPFGGQTFERPWMKSGDPIKMAEEKLHCAFDFFKKIKTPFFCFHDRDIAPEGSNYKETQKNFIHIIDLMEKKIQE

SEQ ID NO: 155771 - protein, 129 aa, Unknown
  Bacterial polypetide isolated from the Sargasso Sea
MSDYFKNINEIIYEGPDSDNPLSFKYYDENREVLGKTMKENLRFATCYWHTFTWPGLDPFGGATFERPWMSSGDPLKMAEMKLDEAFDFFNKIKTSFFCFHDRDISPEGSNYKETQKNFLYIIDLIQSK

SEQ ID NO: 155772 - protein, 170 aa, Unknown
  Bacterial polypetide isolated from the Sargasso Sea
EVNHATLSGHNFEHEIAYATSNSALGSIDINRGDTLIGWDTDQFPNNPADLIMSFYFIFKNGGLGQGGMNFDAKIRRQSIDAEDLFHAHIGGMDVCAKTLIAVEKLMNDNVIPKYIEDRYSDWNKELGQFIHNKDTGLDDINKKVIDDNIEPEPRSGRQEYLENILNKYL

SEQ ID NO: 155773 - protein, 108 aa, Unknown
  Bacterial polypetide isolated from the Sargasso Sea
GGFTTGGLNFDAKRRRDSHEPIDLMHAHIGGMDAFARGLKIAHAIREDGRLAKFVDERYSSFDRDIGAKVEAGTASFQELEEFAMSNGEPTIASGRQEMLENLINEFI

SEQ ID NO: 155774 - protein, 112 aa, Unknown
  Bacterial polypetide isolated from the Sargasso Sea
MSKYFKKINQIKFEGKESNNPLSFKYYDENKIVFGKTMKENLRFATCYWHTFTWPGLDPFGGATFERPWMVKGDPVEKAEEKLEEAFDFFEKITTPFFCFHDRDISPEGASY

SEQ ID NO: 155775 - protein, 202 aa, Unknown
  Bacterial polypetide isolated from the Sargasso Sea
HEPTKHQYDFDSATCLAFLRKAGLENEIKLNVEVNHATLSGHNFEHEIAYATSNKALGSIDINRGDTLLGWDTDQFPNNPADLLMSFYFIFKNGGLGQGGMNFDAKIRRQSIDPEDLFHAHVGGMDVCAKTLIATEKLINDNVIPKFIEDRYSDWNENLGQFIHNKDTGLDDINKKVINDNIEPEPRSGRQEYLENILNKYL

SEQ ID NO: 155776 - protein, 197 aa, Unknown
  Bacterial polypetide isolated from the Sargasso Sea
RGDILLPTVGHAIAFIDQLQYPDMVGLNPETGHEQMAGLNYVHAIAQALWSGKLFHIDLNGQRGIKYDQDLVFGHGDLTNAFFLVDLIERSDYSGPKHFDYKPMRTEDLDGVWASAEANMRMYLMLRDRARSFREDPAVQQALRASGLESLAEPTLTSGETIDDLTFSAEAAERLSDRGYGYVQLSQLAVEHLLGAR

SEQ ID NO: 155777 - protein, 134 aa, Unknown
  Bacterial polypetide isolated from the Sargasso Sea
MIDYFKNIPEIKFEGKDSNNQLAFKYYDENKVVLGKSMKEHFRFATCYWHTFTWPGLDPFGGKTFERPWMRLGDELQLAELKLNVAFDFFKKIKTPFFCFHDRDISPEGSNYKETQKNFLHIVDLIEKKNRLHW

SEQ ID NO: 155778 - protein, 178 aa, Unknown
  Bacterial polypetide isolated from the Sargasso Sea
EKDFKINIEVNHATLAQHTFQHELTVAAKSGMLGSIDANRGDYQNGWDTDQFPINIQETTEAMLVFLNAGGLQGGGVNFDAKLRRNSTDLEDLFIAHIGGADTFARALIIADNLLKNSPLPEMLKNRYKSFDSGKGKSFEDGKLVLEDLYKLAKGNGKLKLTSAKQELIENILFNYIK

SEQ ID NO: 155779 - protein, 181 aa, Unknown
  Bacterial polypetide isolated from the Sargasso Sea
PVLKVKLNLTIEANHATLSGHNYEHEIAYAIANNALGSLDINRGDTLIGWDTDQFPNNPAELIMAFYFIFTNGGLGKGGLNFDAKIRRQSIDPEDLFYAHIGGMDVCAKTLIAVEKMINDNIIPKFIKDRYSGWDKELGKYIYNENTTLDSIQQKVIDEEIEPKTISGRQEYLENIINKYL

SEQ ID NO: 155780 - protein, 115 aa, Unknown
  Bacterial polypetide isolated from the Sargasso Sea
MTEYFSKIPEIKFEGEESTNPFAFKFYDENKKVLGKSMKEHLRFATCYWHTFTWPGLDPFGGQTFDRPWMQAGDEMKMAEMKLDAAFDFFTKIKTPFFCFHDRDISPEGSNYAET

SEQ ID NO: 155781 - protein, 225 aa, Unknown
  Bacterial polypetide isolated from the Sargasso Sea
MSFDDAIKALSLDALKNVKDGHVIGLGSGRAATALVKSLSKYIKTKKITVKCVPTSMQIKLIAEKGGLELIDADQIDKIDLVFDGADQIDKNKFLIKGGGGALLKENILISAAKKVIIMADSSKFVKDFNRTIPIEVQPSARQIVWKKIEKIDGKPELRTLDRGYPFFTENSNIILDCGFGVIKNPKILQQKLLNIPGVIEVGIFTRKPDIIYKAKANGKFEILT

SEQ ID NO: 155782 - protein, 95 aa, Unknown
  Bacterial polypetide isolated from the Sargasso Sea
MNQQKKRAADSALEYIKPGMIVGVGTGSTVNFFIDALSEIKNKIEGTVASSLATAKRLKNHGIPVYELGAAGKVDIYIDGADEFTQHKHLIKGGG

SEQ ID NO: 155783 - protein, 218 aa, Unknown
  Bacterial polypetide isolated from the Sargasso Sea
MNADELKRAAAAEALKSVESGMALGLGTGSTVRHLVDLLGEEIRSGRLSDIVGVPTSVKTENQAVEVGIPLIELGSRTELDLTIDGADEVAPGLDLIKGLGAALLREKMVAQASRRLIIISDDSKIVSKLGTRVPLPVEVVDWSLEALKTFIESTGAEAQLRLDSSGKAVRSDNGNVFLDARYPVGLEDAVALEAELLHRAGIVDTGLFLGMAEAAVI

SEQ ID NO: 155784 - protein, 146 aa, Unknown
  Bacterial polypetide isolated from the Sargasso Sea
DPGFQLIKGGGACHVREKLVASKADQLLIVVDETKLVQNLNQSFPLPIEVLPNAWKQVQGMISEMNGSSSLRMATKKAGPVVTDQGNLILDVLFNDGIKNPKEIEMTINNIPGVLENGLFIDLTDKVLVGKIENNTPMVYSPSRAS

SEQ ID NO: 155785 - protein, 225 aa, Unknown
  Bacterial polypetide isolated from the Sargasso Sea
MSFDDAIKALSLDALKNVKDGHVIGLGSGRAATALVKSLSKYIKTKKIAVKCVPTSMQIKLIAEKGGLELIDADQIDKIDLVFDGADQIDKNKFLIKGGGGALLKENILISAAKKVIIMADSSKFVKDFNRTIPIEVQPSARQIVWKKIEKLDGKPELRTLDRGYPFFTENSNIILDCGFGVIKNPKILQQKLLNIPGVIEVGIFTRKPDIIYKAKANGKFEILT

SEQ ID NO: 155786 - protein, 224 aa, Unknown
  Bacterial polypetide isolated from the Sargasso Sea
ALKSVESGMALGLGTGSTVRHLVDLLGEEIRSGRLTDIVGVPTSVKTENQAVEVGIPLIELGSRTELDLTIDGADEVAPGLDLIKGLGAALLREKMVAQASRRLIIISDDSKIVSKLGTRVPLPVEVVDWSLEALKTFIESTGAEAQLRLDSSGKAVRSDNGNVFLDARYPVGLEDAVALEGELLHRAGIVDTGLFLGMAEAAVIASPEGVYTLTPESHIPLLP

SEQ ID NO: 155787 - protein, 95 aa, Unknown
  Bacterial polypetide isolated from the Sargasso Sea
MVDKTKMVEKLGDFPLPIEVIPEARSSVARKIVALGGLPIYREGFSTDQGNHIIDVKEIDISEPEALEILLNNIPGVVDNGIFAFNKPKVVLVSD

SEQ ID NO: 155788 - protein, 48 aa, Unknown
  Bacterial polypetide isolated from the Sargasso Sea
NLKILDPIDLENHINNIPGVVTNGIFAKRSADVMIIGSESGPETKIKN

SEQ ID NO: 155789 - protein, 132 aa, Unknown
  Bacterial polypetide isolated from the Sargasso Sea
MKNVKDGQVVGLGSGRAATTLVKSLSKYIKTKKITVKCVPTSMQIKLIAEKGDLELIDADQIDKIDLVFDGADQIDKNKFLIKGGGGALLKENILISAAKKVIIMADSSKFVKDFNRTVPIEVQPSARQMLE

SEQ ID NO: 155790 - protein, 137 aa, Unknown
  Bacterial polypetide isolated from the Sargasso Sea
DSELNMIKGGGGALLRVKIVASSAKRYLIIIDSSKQVDALGTFPLPLEVIPFGWQVVSRKVKEMDASPELRKSGPKPFVTDEGNYILDCRFNSILEVEQLETELNRIPGVVENGLFVAMCDQMIMGKGDQVILKEGR

SEQ ID NO: 155791 - protein, 106 aa, Unknown
  Bacterial polypetide isolated from the Sargasso Sea
MNLEFKLPVEVLPSAWKQVQKTLKDLEGEGNLRMAQKKAGPIVTDQGNLILDLSFRNGIEKPELLESQINNIPGVLENGLFVNMTDQVLVGKVENDAVGVESLNKI

SEQ ID NO: 155792 - protein, 113 aa, Unknown
  Bacterial polypetide isolated from the Sargasso Sea
MKAEAGIAACTFVKDGMTIGIGTGSTVKYTILELGRRIREEGLNVSGIPTSEATEKLSIEQGIPLVNWTECSSLDLVIDGADEFDSDLHLIKGGGGALLREKIVAESSAAMVV

SEQ ID NO: 155793 - protein, 200 aa, Unknown
  Bacterial polypetide isolated from the Sargasso Sea
MQVNSTNVEPETAFHMLVSLNGILQKPGSSFTISGSTITFASNLVTNDVIDFIILLGDVLNIGTPSDDTVTASTVNNDFISGQTALTAAPDDTDEFLVSDAGTIKRIDYSLIKGGGITVADQFRVTSNITANAVISSNIERVDTSGQAGLTDNQMSESSGVFTFPLTGIYLVSAGGSADTPNSADNVSLSINVTTDNSFI

SEQ ID NO: 155794 - protein, 114 aa, Unknown
  Bacterial polypetide isolated from the Sargasso Sea
TKLVERLNLGFLLPVEVLPGAWRQVQQQLASMGGSAELRMAQRKAGPVVTDQGNLVLDVKMNDGIGDPAALELAINNIPGVLENGLFVNLTDEVLVGEINDGVAGVRSLEKRLS

SEQ ID NO: 155795 - protein, 217 aa, Unknown
  Bacterial polypetide isolated from the Sargasso Sea
MDQDDKKNLVAEAALDYIQSGDILGIGSGSTVNKFINLLGSVKNKIEACVSSSQKSTELLHKMKIPVIDLKECDRIPLYIDGADEANSHKELIKGGGGALTREKILAQSSEKFICIIDESKVVDKLGKFPLPIEVMQLAQSKISLEMIKIGGRPVYRNQFITDNGHIIIDVHDLDINEPMALEKKINHMPGVITNGIFSIRSADEILIATDSGVIKR

SEQ ID NO: 155796 - protein, 129 aa, Unknown
  Bacterial polypetide isolated from the Sargasso Sea
KLVASKANQLLIVVDETKLVQNLNQSFPLPVEVLPNAWKQVQEVISEMNGSSSLRMAIKKAGPVVTDQGNLILDVLFNDGIKNPKDIEMKINNIPGVLENGLFVDLTDKVLVGKIEDNIPMVYSPSRAS

SEQ ID NO: 155797 - protein, 221 aa, Unknown
  Bacterial polypetide isolated from the Sargasso Sea
MSFDDAIKALSLDALKNVKDGHVIGLGSGRAATALVKSLSKYIKTKKITVKCVPTSMQIKLIAEKGGLELIDADQIDKIDLVFDGADQIDKNKFLIKGGGGALLKENILISAAKKVIIMADSSKFVKDFNRTIPIEVQPSARQIVWKKIEKIDGKPELRTLDRGYPFFTENSNIILDCDFGVIKNPKILQQKLLNIPGVIEVGIFTRKPDIIYKAKANGKI

SEQ ID NO: 155798 - protein, 151 aa, Unknown
  Bacterial polypetide isolated from the Sargasso Sea
MSEAKIRASQKALDFILPKITQQTVLGIGTGSTVNCFIELLATHKNAFKGVVSSSKASSDLIANCDIEEFELNDVNSVSFYIDGADEVSMEKNLIKGGGGAHTREKIVAAASESFICIADQSKFVDQLGQFPLPIEVAKVARSYVSRRIVG

SEQ ID NO: 155799 - protein, 214 aa, Unknown
  Bacterial polypetide isolated from the Sargasso Sea
LDALKNVKDGHVIGLGSGRAATALVKSLSKYIKTKKITVKCVPTSMQIKLIAEKGGLELIDADQIDKIDLVFDGADQIDKNKFLIKGGGGALLKENILISAAKKVIIMADSSKFVKDFNRTIPIEVQPSARQIVWKKIEKIDGKPELRTLDRGYPFFTENSNIILDCGFGVIKNPKILQQKLLNIPGVIEVGIFTRKPDIIYKAKANGKFEILT

SEQ ID NO: 155800 - protein, 213 aa, Unknown
  Bacterial polypetide isolated from the Sargasso Sea
SAKAAFELIKPNLNKDTVLGIGTGSTTNYFIEALNESDIEIKGAVCSSISSEKNLNPSIKVIELNEVHSIDFYVDGADEFNDRFELIKGGGGALTREKILAYSSDKFLCIVDDSKHTDLLGKFPLPIEVLEIARSAISREMMKMGGKPVFRNDFITDNGNQIIDIHNLIIEVPFELEEKINNIPGVVENGIFSNRKADVIIKAKSEEVEILEL

SEQ ID NO: 155801 - protein, 167 aa, Unknown
  Bacterial polypetide isolated from the Sargasso Sea
PLIDLASVSQIDLAIDGAYEVDPGFQLIKGGGACHVREKLVASKADQLLIVVDETKLVQNLNQSFPLPVEVLPNAWKQVQEVISEMNGSCSLRMATKKAGPVVTDQGNLILDVLFNDGIKNPKDIEMKINNIPGVLENGLFVDLTDKVLVGKIKDNIPVVYSPSIAS

SEQ ID NO: 155802 - protein, 195 aa, Unknown
  Bacterial polypetide isolated from the Sargasso Sea
EFAVKKLGELVRKGLSIRGIPTSNRTKEIAEEEGIPLIDFSETMFVDLTIDGADEIDGKLNMIKGGGAALLQEKIVASVSKVEIIVVNRTKLVDHLGTFPLPVEVIPFGWQVVFNQLESLHGNPDLRIINGQPLVTDQGNYIIDCNFRKIENPKLLENQLNTIPGVVENGLFINMCTKMILADGEELLIKDRKNK

SEQ ID NO: 155803 - protein, 184 aa, Unknown
  Bacterial polypetide isolated from the Sargasso Sea
SVVGVPTSEATRELAESLNIPLVPLAEAGVLDLIIDGADEFDSDFALIKGGGGALTREKIVAQSSNAMVVVADDRKQVEILGDFDLPIEVLPFEWKRTADRIAEICPGPVVRRGGDEPFISDNGGYILDCSFGSTITNPRELESALLSIAGVVEVGLFVAICDAVVMAASGGVVTLVKKGGRLA

SEQ ID NO: 155804 - protein, 232 aa, Unknown
  Bacterial polypetide isolated from the Sargasso Sea
MIADLSPSDRSKYACALQASKLVDSGMKVGLGTGSTAYWLVHHLAKRVRDEDLKFVGVPTSTRTRDQAHAEGIRLISMDDAGKLDITIDGADEFDQSMNLIKGGGGAHLQEKIVAFGSDLMVVIADESKKVEKLGRFPLPVEVLKFGSASSQMKIEELLIARKFKDFDVKMRMKDEKPFITDEGNYIFDLKLNEIEDPRGLCGDLNIIPGVVENGLFIDVCSAVIVGYSDGT

SEQ ID NO: 155805 - protein, 140 aa, Unknown
  Bacterial polypetide isolated from the Sargasso Sea
NDVYQIDFYIDGADEVTPENFLIKGGGGAHTKEKIVAAAAKEFICIIDESKLVDKLGSFPLPIEVIPESRSLVSRRIIALGGVPQYREGFITDQGNQIIDVKNLNIEEPEALEALLNNIPGVVDNGIFAFNKPRVVLVAD

SEQ ID NO: 155806 - protein, 163 aa, Unknown
  Bacterial polypetide isolated from the Sargasso Sea
MIPEKQLSAEAACDYIKDGMIVGLGTGTSAEFAVRKLGSLVREGLSIRCIPTSNRTKKLAEAEGIPLIDFSESMFIDLTIDGADEIDGNLNMIKGGGAALLQEKIVASVSRKEIIVGSKTKMVDRLGSFPLPVEVVPFGWQVIFNQLESLNGNPDLRLNNGQP

SEQ ID NO: 155807 - protein, 124 aa, Unknown
  Bacterial polypetide isolated from the Sargasso Sea
MKEKVAEAAFERVAAEHSDKLLLGIGTGTTAECFIRLLPQLKSRIEATVASSERSAALLSELGLPVVDLNSVGPLDVYIDGADEANSQLHLIKGGGAALTREKIVAAASRQFICIADESKKVET

SEQ ID NO: 155808 - protein, 129 aa, Unknown
  Bacterial polypetide isolated from the Sargasso Sea
GADEVSPNNFLIKGGGGAHTREKIVAAAAQEFICIVDKTKMVDKLGAFPLPVEVIPEARSSVARKIVALGGKPIYRENFITDQGNHIIDVEEIDISEPEALEVLLNNIPGVVDNGIFAFNKPEVVLVSD

SEQ ID NO: 155809 - protein, 176 aa, Unknown
  Bacterial polypetide isolated from the Sargasso Sea
MSDAKVQVAKKAFEEMAPQINKESILGIGTGSTVNCFIEILKQSNIQFKGAVSSSEASTLLLQEFNVEIFSLNDVNEIQFYIDGADEVDPSHNLIKGGGGAHTTEKLVASASNQFICIVDQSKHVECLGDFGVPVEVLIESRSFVSREIAKLGGVPTYRSGVITDQSNHIIDVSKL

SEQ ID NO: 155810 - protein, 143 aa, Unknown
  Bacterial polypetide isolated from the Sargasso Sea
MNSKYNAALGAYEKVKSLEIDDLRIGIGTGSTSDIFTGSFLKELSSSIGKIYSSSDRTTDRIKRIGLTAEDAIPKDKSIDVYIDGADEVDKDLNLIKGGGGAHTREKMLADASKYFICIVDETKIVQQLGSFGIPIEIMSFGF

SEQ ID NO: 155811 - protein, 102 aa, Unknown
  Bacterial polypetide isolated from the Sargasso Sea
MKQIVADAAINEVQSDMILGLGSGSTAALMIKSLADEISSGKLRNIRGVATSFQSEVLALQLDIPLIDLGSVSKIDLAIDGADEVDPRFQIIKGGGACHVRE

SEQ ID NO: 155812 - protein, 215 aa, Unknown
  Bacterial polypetide isolated from the Sargasso Sea
ARSAVDQIEDGMLVGLGTGSTAAFAISYLGEKIRSGLTISAIPTSEASKKQSQSEGIPLIDFETSPSIDICIDGADEIDSELNMIKGGGGALLREKIVASSAKRYLIIIDSSKQVETLGTFPLPVEVIPFGWQVVSRKLKEMNASPELRKSGPQPFVTDEGNYILDCRFNSIPEVEQLEAELNRIPGVVENGLFVAMCDQMIMGKGDQVILKERR

SEQ ID NO: 155813 - protein, 175 aa, Unknown
  Bacterial polypetide isolated from the Sargasso Sea
MSAAKISVAKKAIDYIEKKLSIETVLGIGTGSTVNYFIKELDSYKNLFRGAVSSSEASSKLLREKNIEVFSLNDVNQIDFYIDGADEVSPNNFLIKGGGGAHTREKIVAAAAREFICIVDKTKVVDKLGAFPLPVEVIPEARSSVARKIVSLGGKPVYRESFITDQGNHIIDVKK

SEQ ID NO: 155814 - protein, 222 aa, Unknown
  Bacterial polypetide isolated from the Sargasso Sea
MNQDSKKKNAAEAAFDLIKPKLNKDTVLGIGTGSTTNFFIHALNSLNVEIKGAVCSSISSEKSLSSSLKILSLNEVHSIDFYIDGADEYNDRFELIKGGGGALTREKILASSSDKFICIVDDSKHVDLLGKFPLPIEVLEIARSAISRQLMKMGGKPVYRNNFKTDNGNQIIDVHNFPIQVPFELEEKLNNIPGVVENGIFSNRKADIIIKAKDTSIEVLER

SEQ ID NO: 155815 - protein, 129 aa, Unknown
  Bacterial polypetide isolated from the Sargasso Sea
MNSEEQKKQAALKSLEFIADDCILGVGTGSTVNHLIAALPSVKNKIEAVTSSSKASTQLLEENGFRVDDLSSVGSPDLYIDGADEITEHFHMIKGGGGALTREKIIAEASRMFVCIIDDSKLVDLLGKF

SEQ ID NO: 155816 - protein, 127 aa, Unknown
  Bacterial polypetide isolated from the Sargasso Sea
DEVSPDNFLIKGGGGAHTREKIVAAAAKEFICIVDDSKLVEVLGSFPLPVEVIPESRSMVSRKIVAIGGRPVYRSGFVTDQGNQILDIHDIRINNPEEMEILLNNIPGVVDNGIFAFDKPEIVLVGD

SEQ ID NO: 155817 - protein, 229 aa, Unknown
  Bacterial polypetide isolated from the Sargasso Sea
MKKNVISEKQFSAEAACDHVKDGMIVGLGTGTTAEFAVKKLGKLVREGLSIKGIPTSNRTKKLAKAEGIPLIDFSESMFIDLTIDGADEIDGNLNMIKGGGAALLQEKIVASVSRKEIIVGSKIKMVDHLGAFPLPVEVIPFGWQVVFNQLESLHANPDLRLNDGQPLVTDQGNFIIDCSFRKITKPKLLEHQLNMIPGVVENGLFINLCTKMILADGDQLIVKNSKIR

SEQ ID NO: 155818 - protein, 98 aa, Unknown
  Bacterial polypetide isolated from the Sargasso Sea
MSNSKLNASIEAIEYIKPKIDMNSIIGVGTGSTVNYFIEELAKIKHMFKGAVSSSEASTELLEKSGIEVFELNDVNEILVYVDGADEVDTSNNLIKGG

SEQ ID NO: 155819 - protein, 121 aa, Unknown
  Bacterial polypetide isolated from the Sargasso Sea
MDQNTKKQRVAEAVLDYIDNGESLGIGSGSTVNILIENLSKVRNKIRNVVSSSVKSTQLLESNGFEVSELRDVGRLTKYIDGADEVNKHLQMIKGGGGALTREKILAHNSNQFICIVDDSK

SEQ ID NO: 155820 - protein, 156 aa, Unknown
  Bacterial polypetide isolated from the Sargasso Sea
MNEILKRQVAQHALKYIKHGDIVGVGTGSTVNFFIDQLVQIKNDIEGVVASSEVSKSLLLNAGIRVFDANAVAEISVYIDGADEVDKRGYCIKGGGGALTREKILAALANNFVCIVDQSKIVSILGANFPVAIEVLAEARSYVARACVALGGNPVY

SEQ ID NO: 155821 - protein, 175 aa, Unknown
  Bacterial polypetide isolated from the Sargasso Sea
MNQETKKKSAAKAAFDLIEPNLNKDIVLGIGTGSTTNYFIDELNASNIEIKGAVCSSISSEKNLNPSINILSLNEVHSIDFYVDGADEFNDRFELIKGGGGALTREKILAYSSSKFICIVDDTKHADLLGKFPLPIEVLEIARSAISREIMKMGGRPVYRNKFITDNGNQIIDVH

SEQ ID NO: 155822 - protein, 131 aa, Unknown
  Bacterial polypetide isolated from the Sargasso Sea
MNEKFNAAKGAFDLISKHNESIKIGIGTGSTSDFFTKNFLPKLRDKIKSIYSSSLKTSGYLEELGFVVDDLDLNPELDFYVDGADEVDTNHFLIKGGGGAHYMEKRVASKANKFICIVDSSKHVNKLGAFP

SEQ ID NO: 155823 - protein, 159 aa, Unknown
  Bacterial polypetide isolated from the Sargasso Sea
MSQEKQNAARTAVDQIEHGMLVGLGTGSTAAFAISYLGEKVRSGLTISAIPTSEASKKQAQSEGIPLIDFETSPSIDICIDGADEIDSELNMIKGGGGALLREKIVASSAKRYLIIIDSSKQVETLGTFPLPVEVIPFGWHVVSRKLKEMNASPELRKA

SEQ ID NO: 155824 - protein, 213 aa, Unknown
  Bacterial polypetide isolated from the Sargasso Sea
MTQDIKKKNSAKAAFEIIKPNLNKDTVLGIGTGSTTNYFIEVLNESDINIKGAVCSSISSEKKLNPSIRVIELNEVHSIDFYVDGADEFNDRFELIKGGGGGALTREKILAYSSDKFICIVDDSKHTDLLGKFPLPIEVLEIARSAISREMMKMGGKPVFRNDFITDNGNQIIDIHNLLIEIPFELEKKINNIPGVVENGIFSNRKADVIIKQ

SEQ ID NO: 155825 - protein, 152 aa, Unknown
  Bacterial polypetide isolated from the Sargasso Sea
DGADEVDTKFQLIKGGGSCHVREKLVASRAKKLLIVVDETKMVTNLNKVFPLPVEVLPNAWKQVKDIISEMKGRSTLRMATKKAGPVVTDQGNLILDVLFDNGIQNPKNIEMIINNIPGVLENGLFVDLTDKVLVGKIENNMPLVYSPTKAS

SEQ ID NO: 155826 - protein, 212 aa, Unknown
  Bacterial polypetide isolated from the Sargasso Sea
MSASKISVAKKAISHIEKKLTSEVVLGIGTGSTVNFFIEELGKFTSHFRGAVSSSEASTRLLKAKNIEVFSLNDVNEIEFYIDGADEVSPDNFLIKGGGGAHTREKIVAAAAKEFICIVDDSKLVEVLGSFPLPVEVIPESRSMVSRKIVAIGGRPVYRSGFVTDQGNQILDIHDIRINNPEEMEILLNNIPGVVDNGIFAFDKPEIVLVGD

SEQ ID NO: 155827 - protein, 225 aa, Unknown
  Bacterial polypetide isolated from the Sargasso Sea
MILEKQLSAEAACDYIKDGMIVGLGTGTSADFAVRKLGSLVREGLSIRGIPTSNRTKKLAEAEGIPLIDFSESMFIDLTIDGADEIDGNLNMIKGGGAALLQEKIVASVSKKEIIVGSKTKMVDHLGSFPLPVEVVPFGWQVVFNQLESLNGNPDLRLNNGQPLLTDQGNYIVDCHFRKISNPKLLENQINMIPGVVENGLFINLCTKMILADGEKLIVKDRKIR

SEQ ID NO: 155828 - protein, 212 aa, Unknown
  Bacterial polypetide isolated from the Sargasso Sea
MNTPKINVAKQAVKLIEKKITPETIIGIGTGSTVNFFIDELKKYKNLFKGAVSSSNASTKLLNDSGIQTYNLNEVLEIEFYIDGADEVSKDNYLIKGGGGAHTREKIVASAANYFICIVDSSKLVNQLGAFPLPIEVIPESRSLVSRKIVSMGGIPLYRSGFLTDQGNEIIDVKNLDISDPMNLEMELNNIPGVVENGIFAVNKPSEILVGK

SEQ ID NO: 155829 - protein, 210 aa, Unknown
  Bacterial polypetide isolated from the Sargasso Sea
EAFLVLLEKDIKKDSVIGIGTGTTTNFFIEELNKARLHIKGVVCSSDASEKLIDRSYKVLSLNEVHSIDFYIDGADEYNDRKELIKGGGGALTREKILAYSSDIFVCIVDESKYTDLLGKFPLPIEVIEIARSAISRELMKMGGKPIFRNGFISDNGNQIIDIHNLPIDIPYDLEAKLNNIPGVVENGIFANRKADVIICSTDSSIEIIQ

SEQ ID NO: 155830 - protein, 220 aa, Unknown
  Bacterial polypetide isolated from the Sargasso Sea
MSAAKISVAKKAIDYIEKKLSIETVLGIGTGSTVNYFINELDAYKNLFRGAVSSSEASSQLLREKNIEVFSLNDVNQIDFYIDGADEVSPNNFLIKGGGGAHTREKIVAAAAQEFICIVDKTKMVDKLGAFPLPVEVIPEARSSVARKIVALGGKPIYRENFITDQGNHIIDVEEIDISEPEALEILLNNIPGVVDNGIFAFNKPELCWYLTRDYKSSSI

SEQ ID NO: 155831 - protein, 219 aa, Unknown
  Bacterial polypetide isolated from the Sargasso Sea
MSEKYNAALGAFETIKHIDGPLDIGIGTGSTTDIFTENFLPKLRENINSIYSSSVRTTNLLKALNFKVEENRPSKMLDLYIDGADEVDKTLNLIKGGGGAHTNEKMIASFSNRFICIVDTSKLVEVLGKFPLPIEVFAANKQSVTDECKKYTNKITYRENLSDNGNLLLDLHDMEILDPLKIEKEIKNIPGVIEVGIFAVDKPQLVIVGEEDGYNSIES

SEQ ID NO: 155832 - protein, 221 aa, Unknown
  Bacterial polypetide isolated from the Sargasso Sea
MNQDLKKEKSAKEAFSFIEKDIKKDSVIGIGTGTTTNFFIEELNKARLHIKGVVCSSDASEKLIDSSYEVLSLNEVHSIDFYIDGADEYNDRKELIKGGGGALTREKILAYSSDIFVCIVDESKYTDLLGKFPLPIEVIEIARSAISRELMKMGGKPIFRNGFISDNGNQIIDIHNLPIDIPYDLEAKLNNIPGVVENGIFANRKADVIICSSDSSIEIIQ

SEQ ID NO: 155833 - protein, 223 aa, Unknown
  Bacterial polypetide isolated from the Sargasso Sea
MSQEKQNAARTAVDQIEDGMMVGLGTGSTAAFAISYLGEKVRSGLTISTIPTSEASKKQAQTEGIPLIDFETSPRIDICIDGADEIDSELNMIKGGGGALLREKIVASSAERYLIIIDSSKQVETLGTFPLPVEVIPFGWQVVFRKLKEMNASPELRKLGPQPFVTDEGNYILDCRFNSIPEVGQLETELNRISGVVENGLFVAMCDQMIMGKGDQVILKERR

SEQ ID NO: 155834 - protein, 212 aa, Unknown
  Bacterial polypetide isolated from the Sargasso Sea
MSAAKISVAKKAVKYIESKISKETVLGIGTGSTVNFFIEELGNLKHHFKGVVSSSNASSEILNNKGIEVFSLNDVNEVEFYIDGADEVTPENFLIKGGGGAHTREKIVAAASNEFICIIDKTKLVSKLGAFPLPLEVIPESRSMVARKIIAMGGRPVYRNNFLTDQKNHILDIHDIDISDPVKLEKILNNIPGVVDNGIFANNKPEIVLISD

SEQ ID NO: 155835 - protein, 222 aa, Unknown
  Bacterial polypetide isolated from the Sargasso Sea
MDQNEKKESAAKKALELIENSLNEESVLGIGTGSTTNLFIEKLLELEIKIKGVVCSSLASEDQFIGSSYDILSLNEVYGIDFYVDGADEFNDRLELIKGGGAALTREKILAHSSNNFFCIVDDSKKVEKLGKFPLPIEVIEIARSAISREILKMGGKPVFRQGIITDNGHQIIDVHNLNIEIPYDLEGFLNNIPGVVENGIFAKRKADKIILSTNDGIEILD

SEQ ID NO: 155836 - protein, 219 aa, Unknown
  Bacterial polypetide isolated from the Sargasso Sea
MSEKYNAALGAFEKIKNIDGPLDIGIGTGSTTDIFTENFLTKIRGKIGSIYSSSKRTTNLLNALDFYVEVGKPNKVLDLYIDGADEVDKNLNLIKGGGGAHTNEKIIAASSRSFICIVDTSKLVEVLGKFPLPVEVILKNKDSVIKACKKYTQQITIREKLSDNGNILLDLHGIEILEPLKIEKEINNITGVVEVGIFAINKPELVIVGKEDSYNSIES

SEQ ID NO: 155837 - protein, 223 aa, Unknown
  Bacterial polypetide isolated from the Sargasso Sea
MSQEKQNAARTAVDQIEDGMMVGLGTGSTAAFAISYLGEKVRSGLSISAIPTSEASKNQAQSEGIPLIDFETSPSIDICIDGADEIDSELNMIKGGGGALLREKIVASSAKRYLIIIDSSKQVQTLGTFPLPVEVIPFGWQVVSRKLKEMDASPELRKSGPQPFVTDEGNYILDCRFNRIPEVEQLEAELNRIPGVVENGLFVAMCDQMIMGKGDQLILKERR

SEQ ID NO: 155838 - protein, 220 aa, Unknown
  Bacterial polypetide isolated from the Sargasso Sea
MNQDLKKENSAKEAFNLIEPKLRKDSVIGIGTGSTTNFFIQELNQAKIQIKGVVCSSNASEDLIDNSYDKFSLNEVHTIDFYIDGADEFNDRKELIKGGGGALTREKILAYSSDQFICIVDESKHVGLLGEFPLPIEVIELARSAVSRELMKMGGKPIYRNGFITDNGNQIIDIHNLPIEVPYELEAKINNIPGVVENGIFANRKADTIICAKANSIEII

SEQ ID NO: 155839 - protein, 234 aa, Unknown
  Bacterial polypetide isolated from the Sargasso Sea
MYQKDQDKQKSLLAKSAIDYLEKGMVLGLGTGSTVDLFISELSKFENLFSSLKIVATSKVSAKKAIDNRMNVVGPDKWIEPDICIDGADEVDRSLSMIKGGGGALLWEKIIAYRASKRIYLADESKQVARLGAFPLPVEIIEYGHEWTAAAIEPLFKSVQLRKETTGNIFKTDSNNVIYDCFIKDEEDTANLDFNLSAVPGVVTSGLFCSFIDILLTCRDGEVAEIGGKENVFW

SEQ ID NO: 155840 - protein, 229 aa, Unknown
  Bacterial polypetide isolated from the Sargasso Sea
MSKEKKIIAAKKAFEYVEEGMKLGLGTGSTADEFTKILSDNVKDGFQITCVPTSENTKKLAESLEIPLGTLEDYNILDLTIDGADEIDDNLSLLKGGGGALLREKIIAFNSKKMIVIADDSKKVSKLGDFKLPIEIITFEHDTTIKRVLEKLDAIGYSGTANLRMENDKPFQTDSKNLIYDLSIGLIKEPSIINDLLNSIPGVVENGLFVDMANIVILGEMDGVKIIEK

SEQ ID NO: 155841 - protein, 212 aa, Unknown
  Bacterial polypetide isolated from the Sargasso Sea
MSAAKISVAKKAIKYIESKISKETVLGIGTGSTVNFFIEELGSLKHHFKGAVSSSNASSELLNNKGIEVFSLNDVNEVAFYIDGADEVTPENFLIKGGGGAHTREKIVAAASNEFICIVDKTKLVNKLGAFPLPLEVIPESRSMVARKIIAMGGRPVYRNNFLTDQKNHILDIHEIDISDPVKLEEILNSIPGVVDNGIFANNKPEMVLISD

SEQ ID NO: 155842 - protein, 109 aa, Unknown
  Bacterial polypetide isolated from the Sargasso Sea
MYQRDQDKQKSLLAKAAIKYLEKGMVLGLGTGSTIDIFILELSKFESLFSSLKIVATSKISAKKARDNRMNVVAPDKYLELDICIDGADEVDRNLSMIKGGGGALLGKK

SEQ ID NO: 155843 - protein, 219 aa, Unknown
  Bacterial polypetide isolated from the Sargasso Sea
MSEKYNAALGAFEKIKNIDGPLNIGIGTGSTTDIFTENFLPKLRENIGSVYSSSIRTTNLLKALDFTVEKGKPNKMLDLYIDGADEVDKNLNLIKGGGGAHTNEKMIAASSNQFICIVDTSKLVEILGKFPLPVEALLKNKESVIQACKKYSQQITSREGLSDNGNILLDLHGIEILEPLKIEKEINNIPGVIEVGIFAINKPELVIVGKEDGYNLIES

SEQ ID NO: 155844 - protein, 212 aa, Unknown
  Bacterial polypetide isolated from the Sargasso Sea
EGAFDEINDSNGKINIGIGTGSTTTIFINEFLPNLKNRINTIFSSSNESTELLENLQFEVTQGAPENFFLDYYIDGADEIDKNYYLIKGGGGAHTKEKILAAASKKFICIVDDSKRVEILGTFPLPIEVIPFAEHSVRRNLGKMSEKITKRSVSSDSGNIILDMHGMLISDPEKMEAELISVPGIVEVGIFAKNKPTSIKIGRDSYYESIDC

SEQ ID NO: 155845 - protein, 233 aa, Unknown
  Bacterial polypetide isolated from the Sargasso Sea
MSDVELLKEQAGIAACRFVKDGMLLGLGTGSTVRYSIIEIARLITEEGMNLVGVPTSEDTRMLSEELGIPLLKIEDSRTLDLTIDGADEFDQNFDLIKGGGGALTREKVVALKSKSMVVVADHTKKVEVLGSFDLPVEVDSDLWEGVGEAISRICPGQVSLRTNGSEPFETDNHGFILDCSFGPTISDPTSLERAISDIPGVVEVGLFVGICDAVIVASSDGIEELIKSDGRI

SEQ ID NO: 155846 - protein, 212 aa, Unknown
  Bacterial polypetide isolated from the Sargasso Sea
MSDAKISVSKKAIGHIEKKLTKDMVLGIGTGSTVNFFISELAKYKGHFYGAVSSSEASTKLLQEIGIDVFSLNDINEVAYYIDGADEVSPENYLIKGGGGAHTREKIIASASNKFICIVDKSKLVKKLGEFPLPVEVIPESRSLVARKITSLGGTPIYRKGFTTDQGNQILDVKDIDISQPESLEALINNIPGVVDNGIFAFNKPELVLVSD

SEQ ID NO: 155847 - protein, 219 aa, Unknown
  Bacterial polypetide isolated from the Sargasso Sea
MSEKYNAALGAYELIAKEESPLVLGIGTGSTTDYFTKNFLPNLSNKLKCIYSSSYRTTSLLNDLGFMVKDYDQNAVIDIYVDGADEVDENLNLIKGGGGAHTNEKRLAKIANQFICVVDESKIVKTLGNFPLPVEIRTSHKEEALLELKKYSENITVRDSLSDNKNYIFDIHNFKITEPQKTEKDMLAINGVIDVGIFSDNKPQIVIVGNESSYRLIES

SEQ ID NO: 155848 - protein, 171 aa, Unknown
  Bacterial polypetide isolated from the Sargasso Sea
NNLKHHFKGAVSSSNASSELLSNKGIEVFSLNDVNEVEFYIDGADEVTPENFLIKGGGGAHTREKIVAAASNEFICIVDKTKLVNKLGAFPLPVEVIPESRSMVARKIIAMGGRPVYRNNFLTDQNNHILDIHEIDISDPTKLEEILNNIPGVVDNGIFASNKPEIVLISD

SEQ ID NO: 155849 - protein, 193 aa, Unknown
  Bacterial polypetide isolated from the Sargasso Sea
LHAQYPGDVGVFCVYLLQHVVLQPGEAMYLAANEPHAYICGDCAEVMATSDNVVRAGLTPKLRDVDTLVEMLTYTDGDVHRVEPTQREGEPNVWRYRTPAPEFMMDRMELPAGGRAMLPAVAGLSVMVVVEGEAVVEQVPQGSSSAEALPGTGLTRTLKPGTVELICPGTALRVEPRSQRPLLLYRSAVREDE

SEQ ID NO: 155850 - protein, 263 aa, Unknown
  Bacterial polypetide isolated from the Sargasso Sea
MCRLLPSGFLGLIAVENSTLKQGLIMQKLINSVQNYAWGSKTALTELYGIANPTQQPMAELWMGAHPKSSSQVLGADGQTVALRDVIEHDKSALLGDAVAQRFGELPFLFKVLCAAQPLSIQVHPNKHNSEIGFAKENAAGIPMDAAERNYKDPNHKPELVFALTPFLAMNAFREFSDIVALLQPVSAAHPAIAHFLEEPSAERLSYLFASLLNMQAEEKSHALAILKSALNSQQGEPWQTIRLIADVYPNDSGLFSPLLLNV

SEQ ID NO: 155851 - protein, 399 aa, Unknown
  Bacterial polypetide isolated from the Sargasso Sea
MSSRDLPSFLSMQNPIQGYDWGSHDALTTLFGIPNPAGKPQAELWMGAHPNGCSEVVLAGQAQKLSTLIESAPAAVLGEATRARFGSLPFLFKVLCAEKALSIQVHPSKAQAEAGFAKEEAAGISPKAANRNYKDPNHKPELVFALTPYQAMNGFRAIPAILALFERVKLPALAELVAALAASQNEAGLQHFFHQLLVLEGARKAEALAGLLAYAGEYQDEETFALITCLAAQYPGDVGLFSPLLLNVVTLQPGQAMYLDACTPHAYVRGTGLEIMANSDNVLRAGLTPKYIDVAELLACTRCLPKPDDQILLIPRMEGAVQHFEVPVPDFTFSVYPAGEHQLTTASAEILFAIDEAVILKRDDDTLRLEKGQSAFIPAATGRYQLLAEGRVARAGNRC

SEQ ID NO: 155852 - protein, 333 aa, Unknown
  Bacterial polypetide isolated from the Sargasso Sea
KKNAEPGDVVTTKKAGGLTFDFSFQRFSETYLDSFIEHVKEAKVIERFDAIYSGQQANTTENKPVDHFGYRKEDSAREQRVLDEQEKALVLSEHINKQEYEAIIFFGIGGSQLGPELIQQTLCYNKNKKIVFITGSDPLEAEFKTKGLNLDACAFILASKSFSTIETLKSFELVTQKTHMQNTYAITSNIAGAEAFGVSRKNILTFSEATGGRFSIWSPINLLFLIQLGEQSIEEFYLGGREADESLLNTRTPDTPASVYLSAQDILHNNILDNETTAILAYDWPLRGFYKYAQQLEMESNGKRVDQNGNNIDYQTNPIVWGGYGPVSQHSLP

SEQ ID NO: 155853 - protein, 313 aa, Unknown
  Bacterial polypetide isolated from the Sargasso Sea
AITRENSQLAKLASKENWLACFPMWDWVGGRTSILSAVGLLPAALLGENVSSILKGAKIMDELTKCTKIKENPAAILAWMLHHAGEGKGKKSMVILPYKDRLISLSPYLQQLFMESLGKEKDLKGKTVNYGLTVYGSKGSTDQHSIGQQLLDGPDDFFVTFIEVLKDRENESIEVEPQVTSGDYLQGFMLGTRDALFQKGRASLTITLEELNSQTLGALIALFERAVGLYANLIGLNAYHQPGVEVGKHAAGDVIKLSVKIQNYLKSNSGQKFDSVTISGALGESGKEETVYKILQHLAANRRILKFPGNDQF

SEQ ID NO: 155854 - protein, 264 aa, Unknown
  Bacterial polypetide isolated from the Sargasso Sea
MQKIYWDLLKKNHKESKKRRIESLFESDENRFRKFSLNIEDLYFDYSKTNIDPLTLSNLIKFAENSEIIKNVNAMFDGDKINVTENRSVLHTALRNFKTKKFNNLDSINKKLQVRFKSISNFCNQIRSGKKKSCSGDYFTDVVNIGIGGSELGPKLVTSALSEYHDGPKIHFVSNIDSSDINKIVKKLDPRKTLFVLSSKSFTTIETIYNSKTAIEWVCSKLGSDGMKHFVAVCTSKEKALDLGVFEENIFEFEEWVGGRFSVW

SEQ ID NO: 155855 - protein, 151 aa, Unknown
  Bacterial polypetide isolated from the Sargasso Sea
MSFPVQGGGTSYDNGNSISSLSDGSSIVTGYFSGTATFGSTTLTSAGSDDVFIAKLNADGSYAWAKSAGGTGDDYGSGISSLSDGSSIVTGYFSGTATFGSTTLTSSGNADVFIAKLDADGSYAWAKRAGGTSDDNGNSISSLSDGSSIVT

SEQ ID NO: 155856 - protein, 106 aa, Unknown
  Bacterial polypetide isolated from the Sargasso Sea
MGKPGRSSIPSVGVHHQGPMSFPDFSASDAQIQWQRFCDLLWYHEDLGIWLDISRMHVNPSHLEQLQPGFDKAFAAMAELEAGAIANPDEQRQVGHYWLRTPQLAP

SEQ ID NO: 155857 - protein, 88 aa, Unknown
  Bacterial polypetide isolated from the Sargasso Sea
SFAGNRPSTMFLFKQLTPNILGQLIAIYEHKAFVQGALWNINSFDQWGVELGKELTKEILPLLQNKTLASNLDPSTANLMEEVFRLRK

SEQ ID NO: 155858 - protein, 303 aa, Unknown
  Bacterial polypetide isolated from the Sargasso Sea
MSLGMGGSALGPQLINSALGPQNESMRFYFLDNTDPEGIDRVIASIDTGLAETLILIISKSGSTVETRNSMIEVREYYRKVGLDFARHAVAITRENSQLAQLASKENWLACFPMWDWVGGRTSILSAVGLLPAALLGENVSSILKGAKMMDELTKCTKIEENPAAILAWMLYSAGGDKGNKSMVILPYKDRLIFLSPYLQQLVMESLGKEKDFKGKTVNNGLTVYGSKGSTDQHSIGQQLLDGPNDFFVTFIEVLKDREHGSIEIEPQVTSGDYLQGFMLGTRDALFQKGRASLTITLEELNL

SEQ ID NO: 155859 - protein, 159 aa, Unknown
  Bacterial polypetide isolated from the Sargasso Sea
LRSLPNYFQQLEMESLGKRLNPDSEFKKTGQIVFGGYGPTAQHSYFQLMHQGTQDLCADIIASAEDLDNLAYVQAITQAKILSSGESEIKLENESKINGNVPINLFILNELNSYSLGYLIATWEYRTYVTAVILGINPFDQFGVNAGKIYTKKYLAEKD

SEQ ID NO: 155860 - protein, 253 aa, Unknown
  Bacterial polypetide isolated from the Sargasso Sea
RENSQLAQLASKENWLACFPMWDWVGGRTSILSSVGLLPAALLGENVSSILKGAKIMDELTKCTKIKENPAAILAWMLHHAGEYKGKKSMVILPYKDRLISLSPYLQQLFMESLGKEKDLKGKTVNNGLTVYGSKGSTDQHSIGQQLLDGPDDFFVTFIEVLKDREHDSIEVEPQVTSGDYLQGFMLGTRDALFQKGRASLTITLEELNSQTLGALIALFERAVGLYANLIGLNAYHQPGVEVGKQAAGDVIK

SEQ ID NO: 155861 - protein, 217 aa, Unknown
  Bacterial polypetide isolated from the Sargasso Sea
CLLAALIGVWERSILGYQAKAIIPYNSSLSRFVAHLQQVDCESNGKRVCVEGKELNYETAPIIFGEPGTNAQHAFFQMLHQGTTITPVQFIGVKKSHQEDPLSQEAQTLLNHNLVAQMIALAQGKEDLDPNKYFPGNRPSTLVLLDAITPESIGALLAFYENVIMFQGFLWNINSFDQEGVQLGKTLASSLGGDTSESDSNSKSCSDLLFALSKIFL

SEQ ID NO: 155862 - protein, 258 aa, Unknown
  Bacterial polypetide isolated from the Sargasso Sea
SKNLNFAGQAVAVTGEGSLLAQLAHTEEWLEVFPMWDWVGGRTSVTSAVGLLPALLQGIDIDAFLEGARIMDGHTRNPDIRKNPAAMLALMWHHAGAGRGDRAMVVLPYRDRLDCLARYLQQLVMESLGKEKDLMGKIVEQGMTVFGNKGSTDQHAYVQQLREGRSDFFSTFIEVQEEGVEDSIEVEPGIHSGDFLQGFLLGTREALSEKKRPSLTLTLERLNAKTLGSLIALFERSVGLYAFLIGINAYYQPGVESG

SEQ ID NO: 155863 - protein, 246 aa, Unknown
  Bacterial polypetide isolated from the Sargasso Sea
FNINFVSSSDTKELLDAIKDLDLEETIFIFSSKSFVTKEILINLDYIKGVLKSKFASSDIVSRHLFAITSDKSTAMKKGIDASKILIFSKNIPGRFSVTSALSFIILIQIGKANFKKFYKGIIKMDNHFKRTKISNNIPMILALISIWNINFFSIRNFCVCPYNYRLKDAIEYIQQIEMESNGKSSDIHSSEINIDTSPIVFGQSGTDCQHSFFQMIHQGSQDIALDFIGVIDSNDNKVSSNFLIS

SEQ ID NO: 155864 - protein, 178 aa, Unknown
  Bacterial polypetide isolated from the Sargasso Sea
MSYPLAIAVSSVQAALNDSQWDALIIIASDFTAVPELQFEINAAAAIDSRIGKETVLLLSAKAPGQRLVLSPTGPLDRDYDDIRSFYDAAKQGITQVKAAGAKSPALYVIAPETDAYQYAAEVAYLGACQALWQPLEGREARGEATIEPVTQIGVIGVSEHQSRYMEAVEAGKRVARD

SEQ ID NO: 155865 - protein, 164 aa, Unknown
  Bacterial polypetide isolated from the Sargasso Sea
MTLPNKNPTELKAWEKLISHYNSISNKSIYSHFKNEKDKRDYCFINWEDFYVDVSKNRWNKKTFDLLIDLAKEAGLKEAIEKYFNGTKINETENRAVLHTAIRKKSNSEILIDNKNIIEIIKYNKSKMYSFCDEVISGKWKGFSGKKIKSIVNIGIGGSDLGPS

SEQ ID NO: 155866 - protein, 290 aa, Unknown
  Bacterial polypetide isolated from the Sargasso Sea
GDDTISINTNANSNGGWWRWNRGGNADSVGIDNNSSINTGAGNDSVVVNSFASGANTNAWAIRDSSIDVGKGDDYVSLNATTFQTQRRYDPAYGSENSSIDLGSGNDRLNINANASGQGDIRAFGALDSTIDASSGDDSVNINASANSWGWNDPATAKGLANSDVDLGTGNDRLSVNASSSGGNSQATAVENSDIDTGSGNDSVSINANSNSNGGGWWWGGGGSADAKGLDNSNLDTGAGDDTISINTSATSNGGWRWWNRGGNADSVGIDNNSSINTGAGNDSVSSTPS

SEQ ID NO: 155867 - protein, 28 aa, Unknown
  Bacterial polypetide isolated from the Sargasso Sea
MPYAAGEFIFGEPGTNGQHSFYQLLHQV

SEQ ID NO: 155868 - protein, 139 aa, Unknown
  Bacterial polypetide isolated from the Sargasso Sea
MTHSLAVRRMQGRPANCEFIGYAKSPQPMSVDGCVANHDELMSNFFAQPVRQLDIAIATEQDTCVPKLARSDCLTISRRHQHSLRRLRPQHQLLTVLIVFRCRMRLRSVRRKRSVWRRVCHQSSFLTRFLRATALQRNF

SEQ ID NO: 155869 - protein, 173 aa, Unknown
  Bacterial polypetide isolated from the Sargasso Sea
ENNFLNFNNRILLSYSWPLRSFPNYAQQLEMESLGKPANPKSIFKKTSQTIFGGFGPKAQHSYFQQLHQGTENYSVDFFSNIEDRVDKKLISKQLQAQLTLFKNCPEELKGSKEEVKANVNLNHFELAKIDPFHLGYLIALWEYRTFITAKILQINPFDQFGVEAGKKLTEKL

SEQ ID NO: 155870 - protein, 154 aa, Unknown
  Bacterial polypetide isolated from the Sargasso Sea
MALSKINPTRLSSWKKLIQQFDKENNHHISDFFKEGDNRLDEFTINWNNFYVDFSKNRLSKNTFKLLTSLCKETNLKDNIDKYFNGAIINETEGRSVLHTALRSSGNDEVDKTLDKIINISDELNNAKRLGYTGKKITDVVNIGIGGSHLGPEI

SEQ ID NO: 155871 - protein, 179 aa, Unknown
  Bacterial polypetide isolated from the Sargasso Sea
MQLADNPITKIILEKLKRKDFRNLNHLIFNEKRSSEFQYELKDLKIDITRQSLDNEIKEDLIDLAKEINIKSKISELLSGAKVNLSENRSVDHFNLRKEERFKTQEWKKLRNFVQNISSKNNFKHIVNIGIGGSDLGPLMVNKALKSFYKDPDILYVSNIDPTKIYEIFIKCNPKETLL

SEQ ID NO: 155872 - protein, 130 aa, Unknown
  Bacterial polypetide isolated from the Sargasso Sea
TFQWLMQGKTETTCDFIGINDGHYDNIDSHEMLLSQVLAMTYGLDDKKNPYKSVKGNNPCNIMQLHSLDLKSLGFLLALYEHKIFIEALILGINPFDQWGVQLGKKLASDIKGNQEFLKDYFSSSVLPKS

SEQ ID NO: 155873 - protein, 220 aa, Unknown
  Bacterial polypetide isolated from the Sargasso Sea
GIGGSFEGPKLLLESLNDPISSVKSIFDTVNYEFITGSDPNEFVNKTKPLHPGNTFFIVSSKSFKTDETIINLRKAFKWSGDKDKFIAISANPDEVKKYDIEHVISFDKEIGGRYSIWSPITQFHLYGENRNFFLKGGHQADLDILENEDYINFIKRISFTDIFLNNSGRNVRAVLSYIWNLRSLPTYFQQLEMESLGKQRSPSSNYKNTGQIIFGGYGP

SEQ ID NO: 155874 - protein, 280 aa, Unknown
  Bacterial polypetide isolated from the Sargasso Sea
DEIDLSLDLSRVDFADDFFEQKTESINKAFAAMAELEQGAIANPDENRMVGHYWLRNPELAPSAEISQQITSTIENVKAFAAAIHSGEVSGADGLFENVIVIGIGGSALGPQFVSHALGKPKGDRMKMWFFDNTDPDGIDKVLDKIESNLDKTLCIVISKSGGTKETRNGMMEAKVAYERAGLNFGEHACAVTGEGSALDQVAESEGWLKRFPMWDWVGGRTSETSAVGLLPAALQGLDIDQLLAGAAACDELTRQPDAGANPAARLALAWMHCCNGKGK

SEQ ID NO: 155875 - protein, 263 aa, Unknown
  Bacterial polypetide isolated from the Sargasso Sea
IKESNQFLLLDSLGGRYSIWSSISLPAFINSDFSSYLDLLEGAQLADRHTNSASWESNIPVIMALLSIWNTSALNINNHGIFTYNFRLRSLTKYIAQMSMESNGKSINFESQPSPFLTSPLIWGGYGIESQHSTFQWLMQGKTETSCDFIGLNSGEKETVDSYKMLLSQVLALSHGNEDKVNPYKSVKGNNPCSILKLNSLDIKSLGFLLAIYEHKVFIEASILGIDPFDQWGVQLGKKLALEAESNKEFLKDYFSSILLSKS

SEQ ID NO: 155876 - protein, 250 aa, Unknown
  Bacterial polypetide isolated from the Sargasso Sea
ALINENIFEFIKGASLMDEATRSSDFKNNPAALLSSAWYLTGDGLGKRDMVVLPYRDRLQVFSKYLQQLVMESLGKKFNRNGEIVNQGISVFGNKGSTDQHAYVQQLRDGIDNFFCIFIELLDSPTTNIFDEKENPKEYLSGFLQGTRSALSSENRQSITITLDKLNCLSLGALIALFERAVSFYAELVNINAYDQPGVEAGKKAAANIIKYQQKIRNLLDEGGEYSMSDLTSLFDNSVNEPIFFIIREM

SEQ ID NO: 155877 - protein, 250 aa, Unknown
  Bacterial polypetide isolated from the Sargasso Sea
FGTLETLSSYKEVCGNNFYHNSFAITANKSKALDFGIHEENIVSFDSSTGGRFSIWSPINLVLCLLEGEQGYKDFLKGGKEMDNACLKSPEDNPAFQLSVQDIIYNNLLNVETTLVANYDYKLRNFIRFAQQVEMESNGKSINSSNNKVDYQTGSIIWGGYGPESQHSFFQHVFQGTKQSNKYFICSQSNKLNYKQMVAQIESLVQGNEQETDNHKKTNISGATKIELKDLSPYSIGQLLSLWENKTIFN

SEQ ID NO: 155878 - protein, 162 aa, Unknown
  Bacterial polypetide isolated from the Sargasso Sea
MAITDIFQMNNNDKWGRYCDLLYSDDSLGFWLDISRMDVAINDFEDFNEIYSKAFDALDSLENGSIANIDEGRQVGHYWLRNPKVAPSAEISDSITMEIQNISKFGASILNGELTNSDGKKYTDVFWIGIGGSGLGPLLIKESFKRESIGLNLHFLDNVDPE

SEQ ID NO: 155879 - protein, 155 aa, Unknown
  Bacterial polypetide isolated from the Sargasso Sea
MSLTKLDPTELNAWKKLSSQFKNEKLTTIEKLMGEPDRLENFSVEWESFILDFTKNRISKGTLDQLVNLCHESKLKNNIECYFNGDEINETEKRSVLHTALRSPKHESNEINKTVKEIREKIINIADEINSGVRTGYTGRKITDIVNIGIGGSHL

SEQ ID NO: 155880 - protein, 260 aa, Unknown
  Bacterial polypetide isolated from the Sargasso Sea
MTSIIATDAWRALAGHRDTTASDTIADLFAADRDRFKNNSWELDGVLLDLSKNRIDYAAWDGLLALAEDARVAAARDAMYAGETINTTEGRKVLHVALRDGTGIADAGVAEDVTATMARLAAFAQAVHDGSLTGKTGKPFRHVINIGIGGSHLGPMLTAEALGRSACPEVRFAANVDGHDLAAALADVDPEKTLFLVGSKSFTTQETLTNAASAARWLTEAVGSNAVSDHFAALTAKPDAAKALGIAAQHIFPHLGLGRR

SEQ ID NO: 155881 - protein, 249 aa, Unknown
  Bacterial polypetide isolated from the Sargasso Sea
MVRKTFEALGATYVKLGQFIASAPSVFPKEYVDEFQKCLDATEPTDFSVIKRTIEKDLGRSIDDVFATIDPVPLASASVAQVHRATLLKSDKQVVVKVLKPNVEDTLKADLSFVLIVSKVLQFLNPELSRTSLVDIVGDIRESMLEETDFRKEAANVDAFRRYLEDSNLTSIAKAPYVYKQFSGKRVMVMEYFSGVPLTDLDAIRSVSRDANPETTLVDALNVWFGSVLACESFHADVHAGNLIVCDDG

SEQ ID NO: 155882 - protein, 298 aa, Unknown
  Bacterial polypetide isolated from the Sargasso Sea
LYESNLKNLKEAANKIRDKKTIIFFGIGGSYLAPSLLNEVFSSLDKEIIFVTGSDPDEYKDLESNTLKDAAFILASKSLSTTETLTSYESVTKREFLLDTYAITSNIDGAKNYGISDENIIPMDISMGGRFSIWGPINLLFYLIHGESKYKEFLKGAEKSDKLSLSNNVNENPSLSLSIQDVIMNNVFEIESTLVINYDWKLRNFYQYVQQLEMESTGKSVDQNGKELNYQTGMIVWGGFGPRSQHSFFQQVYQGTKDYNLYFITTKSDQLNYKQFLGQSKSLKDGNDKESDLNKRVQ

SEQ ID NO: 155883 - protein, 174 aa, Unknown
  Bacterial polypetide isolated from the Sargasso Sea
SITKYIAQMSMESNGKSINFESQLSPFLTSPLIWGGYGIESQHSIFQWLMQGKTETSCDFIGLNSEEKGSLDSYEMLLSQVLAMSHGKEDKQDPYKSVKGNNPCSILKLNSLDLKGLGFLLAIYEHKVFIEALILGIDPFDQWGVQLGKNLALETKSNKQFLGDYFSETFLPKS

SEQ ID NO: 155884 - protein, 240 aa, Unknown
  Bacterial polypetide isolated from the Sargasso Sea
MNGDLNSWDKFCNYLWFDKKLNIWLDISKINFTSKEIKNLEDKFIDVFSSIKELENGAISNIDENRQVGHYWLRNPSISPSSKIGEEIRADINAISEFGKQILNGDIKNKNSQHYTDVLWIGIGGSGLGPLLITESLQKCSRGLNFSYIDNVDPFLISEKLEELSEKLSTTLFVVVSKSGGTPEPRIAMEIIKSHCENNSLEWNSNAIAITMKDSKLFKKAISENWLKIFNLQDWVGGRT

SEQ ID NO: 155885 - protein, 283 aa, Unknown
  Bacterial polypetide isolated from the Sargasso Sea
MKSFSSIYLGEQANTTEKKAADHFSYRKTDISRDQKVLEEQERMSTVSDQINKQNYETIIFFGIGGSQLGPELIQQTLCYGSNQKIIFITGSDPKEIENKTKGLCLEECAFILASKSFSTIETLRSYEIVTKKEYMENTYAITSNKSGAEALGVPSKNILTFSKATGGRFSIWSPINLLFLIQMGKKAVQDFYLGGHEADENILSSGRLEDVASIYMCAQDIMHNNILDNQTSAILAYDWPLRGFYKYAQQLEMESNGKQVDQNGERVDYQTNSIVWGGYGPV

SEQ ID NO: 155886 - protein, 273 aa, Unknown
  Bacterial polypetide isolated from the Sargasso Sea
QDWTGFAGDNRNLPASLAPFYENSDFVSFLSGTFDQLLDAGRNFGGQWAPVNESLPANFGVDFTYGNNYENNFGRFGVLFSAGYDSSNSFIPDIERTNFVRGSGETLVPYDTYIGEKSNKQIDSNLLATIGWDLDGLNYLQFTNLTVRKTDNRLTLLQGRNPEADFFASNTKMEWVERQINSATLSGNHDLTSGLTIDWRISHADGKRQSPFEREYFYECGASIISDCDGQYEFSRRSDSNATQFSWLDDNSDELAIDFVYPFSTTARNYEIK

SEQ ID NO: 155887 - protein, 241 aa, Unknown
  Bacterial polypetide isolated from the Sargasso Sea
GPQLLYQALEGIPEKEKSSSGLETYFIDNTDPEGMARIFKKMGDSLKETLVLVISKSGGTVETRNGMLETRNVFKSKNLNFAGQAVAVTGEGSLLAQLAQTEEWLEVFPMWDWVGGRTSVTSAVGLLPALLQGIDIDAFLEGARIMDGHTRNPDIRKNPAAMLALMWHHAGSGRGDRAMVVLPYRDRLDCLARYLQQLVMESLGKEKDLMGKIVEQGLTVFGNKGSTDQHAYVQQLREGRS

SEQ ID NO: 155888 - protein, 280 aa, Unknown
  Bacterial polypetide isolated from the Sargasso Sea
NLKSKIKKLFLNKHRSISENKLVSFIYNRHDKKNYEKKISEMYLLHDGIKSGEIVSCSNEKFKHIVHIGIGGSILGSKALSHALASYSDHLLDIHYVSSADSSEINYVLGKCDISRTLFIFMSKSFQTREVLLNYEYIKNKLQKLNYGNKIYKNFFAVTANVSNALKYKIPKNNIITFSKNIPGRFSITSPISFTLLLEVGKKNYRQFINGVLKIDSHFKNKKIEKNIPILLGLLSVWNINYLNITTHCVNAYAYKLRSLSDYIQQIEMESNGKSVNNNN

SEQ ID NO: 155889 - protein, 241 aa, Unknown
  Bacterial polypetide isolated from the Sargasso Sea
MGKPGRSSIPSVGVHHQGPMSFPDFSASDAQIQWQRFCDLLWYHEDLGIWLDISRMHVNPSHLEQLQPGFDKAFAAMAELEAGAIANPDEQRQVGHYWLRTPQLAPNEAGRDQIATEIDQIDQFGRDVISGEIKAPGGQPFTDVLWIGIGGSGLGPLLMIRALQGHGSGLPFHFFDNVDPNGMSAVLAELDDRLATTLVVTVSKSGGTPEPHLGMEQARHRVESRGGRWADQAVAITMVDS

SEQ ID NO: 155890 - protein, 108 aa, Unknown
  Bacterial polypetide isolated from the Sargasso Sea
GQVMMSGVHAEDPRQSIAGNTPSNTIVMKDLSPYSLGALLALYEHKVFVQGELLGINVFDQWGVERGKHVANQLRCRFAGQSLVHVDDVATQGLLNYIDESTITEGLI

SEQ ID NO: 155891 - protein, 237 aa, Unknown
  Bacterial polypetide isolated from the Sargasso Sea
MGKPGRSSIPSVGVHHQGPMSFPDFSASDAQIQWQRFCDLLWYHEDLGIWLDISRMHVNPSHLEQLQPGFDKAFAAMAELEAGAIANPDEQRQVGHYWLRTPQLAPNEAVRDQIATEIDQIDQFGRDVISGVIKAPGGQPFTDVLWIGIGGSGLGPLLMIRALQGHGSGLPFHFFDNVDPNGMSAVLAELDDRLATTLVVTVSKSGGTPEPHLGMEQARHRVESRGGRWADQAVAIT

SEQ ID NO: 155892 - protein, 133 aa, Unknown
  Bacterial polypetide isolated from the Sargasso Sea
MTACVAPGYYGAQPGYPQQQQYATPGYAQPAYSQPGYVQQQQPYPNQAPQPYDQYGNQQQYGSQPYDQYGNQQQYGNQYGNGYGTQYGTVSNIQPVNGSVGPSGVAGTVVGALVGGLVGNQFGRGHGRDAATV

SEQ ID NO: 155893 - protein, 374 aa, Unknown
  Bacterial polypetide isolated from the Sargasso Sea
MAEENAVIQKFKNIVIGEIANFTEKKSVTHFEYKKRSKKNFVEDQRNILYIAEKIKRNFKRVIIFSIGGSNLGPSLMNDIFNKHDLEIIFITGSDPDEYSNIQIQDKDALVISSKSFETLETLSSYKEVCGNDFYHNTFAITANRFNALDFGVHEENIASFCSSTGGRFSIWSPINLVLCLLEGEKGYKDFLQGGKEMDDACLKSPKDNPAFQLSVQDIIYNNLLNVETTLVVNYDYKLRNFISFAQQVEMESNGKSIDSNNNKVDYQTGSIIWGGYGPESQHSFFQHVFQGTKQSNKYFICSRSNKLNYKQMVAQIESLVQGNEQETDIHKKTNISGATKIELKDLSPYSIGQLLSLWKNKTIFNSIFWNTTC

SEQ ID NO: 155894 - protein, 334 aa, Unknown
  Bacterial polypetide isolated from the Sargasso Sea
MPSFRNIIADKKYAKKGEATPVKKIGGLTIDFSAQRFSQEYLDSFLGHIEQEKIIERFSSIYLGEQANTTEKKAADHFSYRKKDISRDQKVLEEQERMSKVSEHINKQNYEAIIFFGIGGSQLGPELIQQTLCYDSNQKIIFITGSDPIEIENKTKGLCLEGCAFILASKSFSTIETLRSYEIVTKKEYMENTYAITSNKSGAEALGVPSKNILTFSKATGGRFSIWSPINLLFLIQMGKKAVQDFYLGGHEADENILSSGRLEDVASIYMCAQDIMHNNILDNQTSAILAYDWPLRGFYKYAQQLEMESNGKQVDQNGERVDYQTNSIIWGGY

SEQ ID NO: 155895 - protein, 338 aa, Unknown
  Bacterial polypetide isolated from the Sargasso Sea
KAGLNYDFGLSYNNQSDDRQRFMNDSGLKKGQVMGQNENYDNISLYFFGSKSIEKLNFSTGARLEKNSISLDNYFGSTDEKIKKINSFNPSLNISYEFDKIDFFTNFSTGYETPTLNELSATSSQSGFNDDLNSIKSITFEFGVANFDKESKLNFSLRLFNILTKNEITPYQTSTGLVLYNNAGKTIKKGLELELKTTIFKNLNIDYTLTSGSYKFDSFKFLENDYSKNYMPGIPKSNQNLKFSYSNNNNLNIIFNLKSVGKIYADNANNTEIAGYNSIGFKMSKDLTLFQQNVTPFISIDNLLNEDYFDNIRINAFGSRFYEPASGINFICGLKLQL

SEQ ID NO: 155896 - protein, 904 aa, Unknown
  Bacterial polypetide isolated from the Sargasso Sea
MRIVALLLTVTMSMLPIHTYATDGQNPDISSVGKEAQTFGQDLANSFRANSGSVQNGTISMPTLKDGQFQMNGGSQINVNDLFPGTSGGDGQPDSYYFPDANKPDVGGLQGIYDSGDNMDSVGNTAKGSLWNDANSANPSISGAAYKVLLDASNRSRPDFSNDPILNLSNKTYEDMDLIADGFGDCSAETTISEGTINAHVPEYERCQRVIKPTGDCDIIHSLGVSSTVENVYVASKGRTWYTVQFDLKNGSWKAISPSDGEQKVAQIPTVDYNAMCSGAVNFRTDLIGSWDWPEHGIPGKIDSTVIYRVKQYPSCDNGLVGIVQIQDTTASDDLDWVLGGRFSFRFTKQEEDKWIPQSCIDDAQKLQDGFCTGSMNVVEGAQNDVDCIVVNGATICPGDSFYNTLKPSPLPGVPRLAQKVRLSKLQCDFNVGQMECWTDPQGVEHCPSNDGSNLNSCAALESNPQCGFISSECVDGAAGSSGQCYVFKDTYDCGTDIDVPTLEKNTEFQCGGPIRCMGDDCLDVTKSQSTDFARATALLNAAQFLTQDMSCTDSATEEGGDGNVDQGCTVFGGEPGECKIAVGGVSDCCEKPTNISLADYLNLIMAVPKLDGAIMALGSDSNPSAVKGAYQILREPVLDGWTEVTQPFTSYVENLSGAVDSFTQPVEQFVDEFIQQLKDQVKDVMMDILKSTGEDAATEAAAESAASKAAESMMNTATTWLSTAMTVYTVYVVAMVMIQMIYACEEEEFTMNAKRALKNCSYVGSYCKTKVLGACIEERESYCCFNSPLSRIVQEQIRLQLGESFGNPQAPQCGGIPLEKVAEIDWSKVNLDEWLGILQQNGKFPNPSSLNLDSLTGAGNDFNIDGSRKNAQERTLERLNGIDVDKARRDLASEIFPDWDGKQ

SEQ ID NO: 155897 - protein, 342 aa, Unknown
  Bacterial polypetide isolated from the Sargasso Sea
PHLGMIQSREQLERIGCRWSQHAVAVTMKDSKLDQEAAAEGWLNRFDMFDWVGGRTSITSAVGLLPAVLAGIDSDAFLRGAAVMDAATRRPSLRENPAALMAASWYVAGDGKGKRDMVVLPYRDRLEVFSRYLQQLVMESLGKRLDRQGRVAHQGIAVYGNKGSTDQHAYVQQLRDGVDNFFATFIEVLEDPTEIPVLEDSLPGDFLDGFLQGTRAALAEGGRQSMTLTLRQFNPTTLGALIALFERAVGFYGELVDINAYHQPGVEAGKKAAAAILDLQKQVEQLLSDGNARSVQQIAQELGDSAHQEAVFFILRHLSGNPRGIQASGNWADPLSLQFRKV

SEQ ID NO: 155898 - protein, 302 aa, Unknown
  Bacterial polypetide isolated from the Sargasso Sea
MKRDDRPSCVFKNDKVNFRSYINEFTNDLYKAFDLSAKKIGLDSKIDDLFDGKLVNFTEDLAAWHPKYRAQYNPKKSDTFSHKMQQNELTSFYDLCARAKNIVTIGIGGSYEGPKMFLEIMDLTNTVTNFLFITGSDLSEFRMKINNIVPKDTIFIVSSKSFKTLETLTLLREALKWSGDISKFVAITANKDEAQKHNINCIIEFDQEIGGRYSIWSEISTLFYWLNQENFNDFMAGGRQADIDLQSDEAYLKFVKNLSYSDIWLHNFNNKNSRAVLSYIWTWRSLPDYIQQLEMESLGKQP

SEQ ID NO: 155899 - protein, 272 aa, Unknown
  Bacterial polypetide isolated from the Sargasso Sea
MSKTISWNYYQQHCLQMPELRMSIDTSRMNVPDKLSDSLKAKFSVAFKKMQELEKGAIANPDENQMVGHYWLRNPDLAPTKKFQNQIKNTLQKIQQFAADIHQKKIKPQKSVQFRNVLSIGMGGSALGPQLIQSALAPQEEHIRFYFIDNTDPDGMDRVINSIGKGLSETLILIISKSGSTVETRNTMIEVRECYSKLGLDFARHSVAVTGENSQLAKLASKENWLGCFPMWDWVGGRTSILSSVGLLPAALMGENISSFLNGAKVMDELTR

SEQ ID NO: 155900 - protein, 324 aa, Unknown
  Bacterial polypetide isolated from the Sargasso Sea
QWAGQAVAITMLDSKLDVEARQQGWLQRFDMFDWVGGRTSITSAVGLLPGALIGCDIREFLGGAAQMDEATRVADLRRNPAALMAASWFVAGDGKGKRDMVVLPYRDRLEVFSRYLQQLVMESLGKRLDRDGNVVHQGIAVYGNKGSTDQHAYVQQLRDGVDNFFATFIECLEDVEDIPEIKEERPGDFLDGFLQGTRSALTEGGRQNMSITMRRFDARRLGALIGLFERAVGFYGELVNINAYHQPGVEAGKKAAAAVLDLQSRVEGVLKDGASRSVTEIRQALGEGSDESVFWIMRHLTGNKRGYTAEGDWSSPASMRFSKV

SEQ ID NO: 155901 - protein, 320 aa, Unknown
  Bacterial polypetide isolated from the Sargasso Sea
MQLADNPITKIILEKLKHKDFRNLNHLIFDEKRPSEFQYELQDLKIDITRQSLDKEIKEDLINLAKETKIKKKISELISGVKVNLSENRSVDHFSLRKEERFKTQEWKKLRNFVQNISSKNNFKHIVNIGIGGSDLGPLMVNKALKSFYKVPDILYVSNIDPTKISEIFIKCNPKETLFIVTSKSFSTLETLENAKIVAEWLSKHKVSLNYSMVAVTSVRKKALDWGFKDSNIFEISENVGGRYSLWSSVGMSIFIGLGEDNYKNFLLGARTMDEHFINEEVENNIPIILALLRIWNRNFLNRNNHCIVPYTDNLSKFPA

SEQ ID NO: 155902 - protein, 152 aa, Unknown
  Bacterial polypetide isolated from the Sargasso Sea
VEAVHYPPEGIRGVGLARAQEYGTNLESYMKWLKDESIIIVQIEDISAVENLEEIFSVSNIDGYIIGPYDLSASMGMPGEFDNPEFIDVVNKIKSTASQCKVCGGIHIIEPKPEELEKRIDDGYRFLAYSLDIRMLDVSCKNGIQHIKELKI

SEQ ID NO: 155903 - protein, 358 aa, Unknown
  Bacterial polypetide isolated from the Sargasso Sea
MKNRSIKNIFSELKKLSKSEATERKLSFKFQSELLNYQPYLKDFSASHYELFDELASQLDLQGSINDLFDGKIINKTENREALHHQYRFNHKASEFDFKKITEPFINRIKKDGFKNIITFGIGGSYEGPKLLQEFTDKQSLKLNYYFISGPDRDEFDSILKPLRGAKNFYIFSSKSLSTDETLLCLKWLGRERNSKNSIVITANSKKAIAIGFSENCIVPFPESVGGRYSIWSPISLSVGIENNFSTFLKGGSTADKMILGASREDKQYQKFIKILAFSDLWFSNFKNKKNRIILSYNWKLRSLTNYIQQLEMESLGKQPNPKSMFKETGQSIFGGFGSTAQHSYFQLLHPRYSRVLY

SEQ ID NO: 155904 - protein, 197 aa, Unknown
  Bacterial polypetide isolated from the Sargasso Sea
MTACVAPGYYGAQPGYPQQQQYATPGYAQPAYSQPGYVQQQQPYPNQAPQPYDQYGNQQQYGSQPYDQYGNQQQYGNQYGNGYGTQYGTVSNIQPVNGSVGPSGVAGTVVGALVGGLVGNQFGRGHGRDAATVIGALGGAVAGNQIGQQMGAAQGPSSYRIDVQVSDGSMRSFDVQSPGNLRPGDRVQINGNQLARY

SEQ ID NO: 155905 - protein, 60 aa, Unknown
  Bacterial polypetide isolated from the Sargasso Sea
RSLGFLIALYEHKTFIESLILGIDPFDQWGVELGKKLASRSEDNQNFFSKFFARDILPKN

SEQ ID NO: 155906 - protein, 320 aa, Unknown
  Bacterial polypetide isolated from the Sargasso Sea
RCHHLKTLVDDKKNAEPGDVVTTKKAGGLTFDFSFQRFSETYLDSFIEHVKEAKVIERFDAIYSGEQANTTENRPVDHFGYRKEDNAREQRVLDEQEKALVLSEHINKQEYEAIIFFGIGGSQLGPELIQQTLCYNKNKKIVFITGSDPLEAEFKTKGLNLDTCAFILASKSFSTIETLKSFELVTQKTHMQNTYAITSNIAGAEAFGVSRKNILTFSEATGGRFSIWSPINLLFLIQLGEQSIEEFYLGGREADENLLNARTLDTPASVYMSAQDILHNNILDNETTAILAYDWPLRGFYKYAQQLEMESNGKRVDQNG

SEQ ID NO: 155907 - protein, 325 aa, Unknown
  Bacterial polypetide isolated from the Sargasso Sea
GIGGSGLGPLLITESLQKCTEGLNFSYIDNVDPFLISEKLEELSEKLSTTLFVVVSKSGGTPEPRIAMEIIKSHCENNSLEWNSNAIAITMKDSKLFKKATSENWLKIFNLQDWVGGRTSITSSVGLLPLALINENIFEFIRGASLMDEATRTRDFKNNPAALLSSAWFLTGDGSGKRDMVVLPYRDRLQVFSKYLQQLVMESLGKKFNRNGEVVNQGISVFGNKGSTDQHAYVQQLRDGIDNFFCVFIELLDSPSTNIFDEKENPKEYLSGFLQGTRSALSSEKRQSITITLEKLNCFSLGALIALFERAVSFYAELVNINAYD

SEQ ID NO: 155908 - protein, 136 aa, Unknown
  Bacterial polypetide isolated from the Sargasso Sea
FFQLMHLGTKLIPADFIAFKKPLYNDTEQHKILTSNFLAQTNALLVGNKKSGDEIHKNIDGNRPSNTILINKLTPHNLGSLIAMYESKIFVIGSILNIYSFDQWGVELGKSIAKQILNNGKSNLDESSSQIYDKLQ

SEQ ID NO: 155909 - protein, 241 aa, Unknown
  Bacterial polypetide isolated from the Sargasso Sea
MAKKFKIKKIIEFDKEIGGRYSIWSEISILMHWLNIDGFNKFMAGGKQADIDLNENSSYINFIKNLSYSDIWFHNYKNKNARVILSYIWNLRSFADYAQQLEMESLGKQPSKESEFKKTGQIIFGGYGPTAQHSYFQLLHQGTQNICADIIVSSKDIKSLSYAQAISQTKLLSEGTNELKGYESINGGTPTNLFIINKPDLYDLGYLIATWEHRVYITALMLDINPFDQFGVNAGKIYTKK

SEQ ID NO: 155910 - protein, 256 aa, Unknown
  Bacterial polypetide isolated from the Sargasso Sea
MTSIIATDAWLAVMGHRDTTASDTIADLFASDGCRFKTNSWELEGILLDLSKNRIDDAAWDYLLALAEHAGVAAARDAMYAGEPINITEGRKVLHVALRDSTGIADSSVADDVTATMARLAEFTKAVRDGSLTGKTGKPFRHVINIGIGGSHLGPMLTAEALGDAACPEVRFAANLDGHDLAAALADADPETTLFLVCSKSFTTQETLTNATSALRWLTGALGSDAVFGHFAALTAKPEAAKAFGIAAQHIFPMWD

SEQ ID NO: 155911 - protein, 282 aa, Unknown
  Bacterial polypetide isolated from the Sargasso Sea
LKKATSENWLKIFNLQDWVGGRTSITSSVGLLPLALINENISEFIRGASLMDEATRISDFKNNPAALLSSAWYLTGDGIGKRDMVVLPYRDRLQVFSKYLQQLVMESLGKKFNRNGQVVNQGISVFGNKGSTDQHAYVQQLRDGIDNFFCIFIELLDSPSTNIFDEKENPKEYLSGFLQGTRSALSSENRQSITITLEKLNCFSLGALIALFERAVSFYAELVNINAYDQPGVEAGKKAAANIIEYQQKVSNLLDEGGEYSINDITSLFDNSVSEPIFFILR

SEQ ID NO: 155912 - protein, 311 aa, Unknown
  Bacterial polypetide isolated from the Sargasso Sea
MKGPKLLIESLGHGEVLSTYKHHFVTGSDRIELDETLKKLDPKKTVFIVSSKSFTTDETIESLKDAIHWSGDINKFIAITANKNEAQKYNFKHISEFDKEIGGRYSIWSRISFAAAFYAMRADSENTFDNFCLGGSIADSYLSDVEDYQKFVKMLAFSDIWFHNFKEKNTRAILSYDWKLRSLPNYFQQLEMESLGKRPNKNSEFKKTGQIIFGGYGPTAQHSYFQLLHQGTQNICADIILNKDNEFNGLAYSQGITQARLLSEGASTLLKNEEIINGNVPVNLFIFDGIDAKKKGFLIATWEHQSFYNLQ

SEQ ID NO: 155913 - protein, 166 aa, Unknown
  Bacterial polypetide isolated from the Sargasso Sea
MSRLSLDFSNLKTFISEKDLEDIYPKVLSCHEMLENGRGIGSRFLGWKKPETSKTVLTEINEVAKSVRELCQVFIVIGIGGSYIGSQAGITFLKPSFPNQLYKEGLPEIYFSGHNISSDYHSDLLDLVEKYDVCLNVISKSGTTTEPAIAFRLFKQLIEKKYGGGW

SEQ ID NO: 155914 - protein, 288 aa, Unknown
  Bacterial polypetide isolated from the Sargasso Sea
IGGSFEGPKMLIEIAELANEETNFIFITGSDSSEFMVKTKKLNPKDTIFIVSSKSFTTLETISLLKDAIYWSGEMSRFIAITANRKEAEKYSINNIIEFDQEIGGRYSIWSEISVLMLCLKKDEYDAFMAGGKQADLDLKQNDHYLKFVKTLAYSDIWLHNSKNKNSRVVLSYIWNLRSFPDYIQQLEMESLGKQPPKNSEFRKTGQIIFGGYGPTAQHSYFQLLHQGIQDICVDIIASKEDKKSLAYAQAITQSKLLSKGAEDLKNQEKINGNMPTNLFLINRTSSY

SEQ ID NO: 155915 - protein, 221 aa, Unknown
  Bacterial polypetide isolated from the Sargasso Sea
IWSPINLVLCLLEGEKGYKDFLKGGKDMDDACLKRPQDNPAFQLSVQDIIYNNLLNMETTLVVNYDYKLRNFIGFAQQVEMESNGKSIDSNNNKVDYQTGSIIWGGYGPESQHSFFQHVFQGTKQSNKYFICSQSNKLNYKQMIAQIESLVQGNEQETDIHKKTNISGATKIELKDLSPYSIGQLLSLWENKTIFNSIFWNTNAFDQWGVELGKINTKKQL

SEQ ID NO: 155916 - protein, 85 aa, Unknown
  Bacterial polypetide isolated from the Sargasso Sea
KPSNTLMFDSLTPKTLGALVAMYEHKVFVQGVIWNLNSFDQWGVELGKVLGNQVLAGIQGNAKEDSFDASTQQLIARFRAANAPK

SEQ ID NO: 155917 - protein, 281 aa, Unknown
  Bacterial polypetide isolated from the Sargasso Sea
PIIQRIKKGGFKNIITFGIGGSYEGPKLLQEFTKNQSSSFNYYFISGPDKDEFNSVIKPLIGQKNFYIFSSKSLSTDETLLCLKWIAQERSPNNSIVITANIDKAISLGFERDSIVPFPDSIGGRYSIWSPISLSVALENNFSSFLKGGSIADKMMLGNSKEDKRYQKFIKILAFSDIWFSNFKGKKNRIILSYNWKLRSIASYIQQLEMESLGKQSNPISLFDETGQSIFGGFGSTAQHSYFQLLHQGTAQFCTDIIYHPVKHSPLSSAQAIAQAKLLAL

SEQ ID NO: 155918 - protein, 160 aa, Unknown
  Bacterial polypetide isolated from the Sargasso Sea
VVNYDYKLRNFISFAQQVEMESNGKSIDSSNKKVDYQTGSIIWGGYGPESQHSFFQHVFQGTKQLNKYFICSKSNKLNYKQMIAQIESLIQGNEQEVDIHKKTNISGVTKIELSDLSPYSIGQLLSLWENKTIFNSIFWNTNAFDQWGVELGKINTKKQL

SEQ ID NO: 155919 - protein, 159 aa, Unknown
  Bacterial polypetide isolated from the Sargasso Sea
GTDEVCSDIILAARPTSWDGQSGGQIADQHDVLVAHALAQASVLSVGLTREELAAAGVSEALVPHKVMPGNRPVSVIMMDQLTPFALGALLAAYEHSVFVQAAVWQINPFDQWGVELGKKVASGIVDDIHQRQVDDPALDPSTRASLAAILQRRDQPRF

SEQ ID NO: 155920 - protein, 186 aa, Unknown
  Bacterial polypetide isolated from the Sargasso Sea
MNNFNHKHIRVILSYFWKLRSFPAYAQQLEMESLGKPASASSKYKNTGQVIFGGYGPKAEHSYLQLLHQGTQEICADIIACDKDKNDLEYIKAITQTRLLSKGAEDLEEKEKINGNVPVNLFIVKEGGLERIGQKNIVESLGYFIATWEHRTFITATMLGINPFDQFGVNAGKKYTLARQFIKDSS

SEQ ID NO: 155921 - protein, 225 aa, Unknown
  Bacterial polypetide isolated from the Sargasso Sea
GIGGSDLGPLMINQALKSFYKGPKVFYISNIDPITLIEVFEKCDPKTTLFIITSKSFGTLETLENAKIIYNWLTESNVSLNDAMVAVTSSEKKAKKWGFKKSNIFHISENVGGRYSLWSSVGMSILCGLGEDNYKKFLNGAEIMDQHFVNEEIESNIPIILALLRIWNRNFLNLNNHCIVPYTDSLSKLPAWAQQLEMESNGKSVDVEGQPLQMPASPIIWGEVG

SEQ ID NO: 155922 - protein, 269 aa, Unknown
  Bacterial polypetide isolated from the Sargasso Sea
ANPDENRMVGHYWLRDSKLAPNAELSSAIRETLDKVKEIARQVHTGELQAPQGRFTDLLVIGIGGSALGPQFVGKALGHPETDRLRVHFFDNTDPDGIDLTLAEIGKALPTTLALVISKSGGTPETRNGMLEAVHAFSEKGLDFSKQAIAVTGDGSKLHQYSQENQWLDFLPMWDWVGGRTSETAAVGLLPAALQGLNIDELLAGAKQMDGLTRSSEFRNNPAAMLALAWYYLTGGKGSKDMVILPYKDRLDLFAKYLQQLIMESLGKE

SEQ ID NO: 155923 - protein, 272 aa, Unknown
  Bacterial polypetide isolated from the Sargasso Sea
MNNPIVAENFTKPIKVNFDFITGSDPSEFDYKTKFLESENTVFIVSSKSFTTDETIINLKKAFEWSGDKSKFIAITANPDEADKYGIKNIVTFDKEVGGRYSIWSPITQFHLYGEKRCAFLSGGHQADIDIIENQDYIDFVKRLSFKDILMNNKGRNVRTILSYIWHLRSLPCYLQQLEMESLGKHSNPNSNYKNTGQIIFGGYGPTAQHSYFQLLHQGTQNLCADIITTLEDKKSLAFAQAITQSELLAVGESEIQLKNESKINGNVPVNL

SEQ ID NO: 155924 - protein, 318 aa, Unknown
  Bacterial polypetide isolated from the Sargasso Sea
GNFSIEWEEFILDFSKNRISKGTLDQLVNLCNESKLKHNIESYFKGDIINETEKRSVLHSALRSQKHESNEISQIVNELRGQIINTADKINSGDKVGYSGKKFTDVVNIGIGGSHLGQEMVVEALSFCSKSIKPHFISNIDPDYTSQVLEELDPETTLFIIVSKSFKTIETIENAKKSKEWFVAESKGQNIKDNFIGISNNTSAAKEFGIDGDSIFRIPEWVGGRFSLWGSAGLIIAISIGSENYRELLNGANSMDRHFRESSFENNIPVLLALISIWYNNFFKCETEAIIPYSELLNKLPKYLQQASMESNGKSTDK

SEQ ID NO: 155925 - protein, 254 aa, Unknown
  Bacterial polypetide isolated from the Sargasso Sea
LPDWVGGRTSITGAVGLLPAALIGADINKFLNGASQMDELTRVKDIKNNPAALLSLAWFKSGNGKGLRDMVVLPYRDRLEVFSRYLQQLVMESLGKKFDRDENQVNQGIAVYGNKGSTDQHAYVQQLRDGIDNFFVNFIEILHDPLEIVEVKNKRPGDYLSGFLQGTRSALTEGGRQNMTITFKSFDESSLGALIALFERAVSLYAELINVNAYNQPGVEAGKKAATKIIKLQKEIEELLDDGKQRTLNEINDA

SEQ ID NO: 155926 - protein, 264 aa, Unknown
  Bacterial polypetide isolated from the Sargasso Sea
MNGLGDKSKFIAITANPDEADKYGIKNIVTFDKEVGGRYSIWSPITQFHLYGEKRCAFLSGGHQADIDIIENQDYVGFVKRLSFKDILMHNKGRNVRAILSYIWHLRSLPSYLQQLEMESLGKHSNPNSNYKNTGQIIFGGYGPTAQHSYFQLLHQGTQNLCADIITTIEDKKSLAFAQAITQSELLAVGESEIQLKNESKINGNVPVNLFLLNNFNAFNLGYLIATWEYRTFITAAILGINPFDQFGVNAGKIYTKKYLSNND

SEQ ID NO: 155927 - protein, 237 aa, Unknown
  Bacterial polypetide isolated from the Sargasso Sea
ILTFSEATGGRFSIWSPINLLSLIQLGEQSIEEFYLGGREADESLLNARTLDTPASVYMSAQDILHNNILDNETTAILSYDWPLRGFYKYAQQLEMESNGKRVDQNGNNIDYQTNPIVWGGYGPVSQHSFYQQIFQGTKDMNLYFLASTENEKKLNTAQYQGQTHSLSEGTKTNVPPHKQVSTRRFTTIEMESISPRTVGNLIATWENKTILNSLLWNVNAFDQWGVELGKANTKKY

SEQ ID NO: 155928 - protein, 147 aa, Unknown
  Bacterial polypetide isolated from the Sargasso Sea
GGRYSLWSSVGLSVMIAIGSENFSHMLAGAHAMDCHVRHADLPQNIGVIMGLIRVWCRRYLQLPAYGLIPYDQRLVAFPAWAQQLEMESNGKSVDRQGHTLQLPAGPLIWGAVGTSAQHSFFQWLHQSVDITPIDILVAMKLPVGLD

SEQ ID NO: 155929 - protein, 86 aa, Unknown
  Bacterial polypetide isolated from the Sargasso Sea
EDKENPFKSVKGNNPCSILKIKSIDLKSLGFLIALYEHKVFIEASILGIDPFDQWGVQLGKKLALEAKSNKNLLEDNFSSSLLPKS

SEQ ID NO: 155930 - protein, 167 aa, Unknown
  Bacterial polypetide isolated from the Sargasso Sea
RAVLSYIWKMRSFPDYVQQLEMESLGKQANPTSEFKNTGQIIFGGYGPTAQHSYFQLLHQGTQEVCADIISSKENLKSLAYAQAITQSKLLSNGAKDLKEEETINGNIPVNLFLLKKVDPFSIGYLLATWEHRVYITSIMLGINAFDQFGVNAGKIHTKKYLKENGG

SEQ ID NO: 155931 - protein, 314 aa, Unknown
  Bacterial polypetide isolated from the Sargasso Sea
FSKDDINTLEHKFIDVFSSIQELENGAISNIDENRQVGHYWLRNPEISPSSKIREEISSEINDISEFGEQILNGNIKNKNNQNYTDVLWIGIGGSGLGPLLITESLQNCTEGLNFSYIDNVDPFLISEKLEELSEKLSTTLFVVVSKSGGTPEPRIAMEIIKSHCENNSLEWNSNAIAITMKDSKLFKKATAENWLKIFNLQDWVGGRTSITSSVGLLPLALINENIFEFIRGAALMDEATRSNDFKNNPAALLSSAWYLSGDGIGKRDMVVLPYRDRLQVFSKYLQQLVMESLGKKFNRNGEVVNQGISGFWQ

SEQ ID NO: 155932 - protein, 121 aa, Unknown
  Bacterial polypetide isolated from the Sargasso Sea
IVWGGYGPRAQHSFFQHLFQGNRETNSYFIASKNDDLNFKQFKGQTKSLRDGTFDESDSHKKVLPKRYTTILLKNLSPGSLGELISIWENKTIFMSMFWNINPFDQWGVELGKLNTKKEIE

SEQ ID NO: 155933 - protein, 196 aa, Unknown
  Bacterial polypetide isolated from the Sargasso Sea
MALSKINPTKLSSWKKLVQQFDKENNLHINDFFKEENNRLDKFCISWENFYVDFSKNRLSNNSFKLLTDLCKETNLKNNIKKYFNGSIINETENRAVLHTALRSSENDEVNKTLNKIINISDEINNAKRLGYSGKKITDVVNIGIGGSHLGPEMVTEALLNYSQGIKPHFISNIDPDFTSILLEKLNPETTIFIIV

SEQ ID NO: 155934 - protein, 269 aa, Unknown
  Bacterial polypetide isolated from the Sargasso Sea
IKRIKKDGFKNIISFGIGGSYEGPKLLQEFTNKQSLKLNYYFVSGPDRDEFDSILKPLRGEKNFYIFSSKSLSTDETLLCLKWLGRERNSKNSIVITANSKKAVSIGFSENCVVPFPESVGGRYSIWSPISLSVGIENDFSKFLKGGSAADKMILGNSREDKQYQKFIKVLAFSDLWFSNFKNKKNRIVLSYNWKLRSLTNYIQQLEMESLGKRPNPKSLLKETGQSIFGGFGSTAQHSYFQLLHQGTAEFCTDIVYSNSKISPLSSAQ

SEQ ID NO: 155935 - protein, 214 aa, Unknown
  Bacterial polypetide isolated from the Sargasso Sea
MGKKAIQDFYLGGHEADENILSSERLDDVASIYMCAQDIMHNNILDNQTSAILAYDWPLRGFYKYAQQLEMESNGKQVDQNGERLDYQTNSIIWGGYGPVSQHSFYQQIFQGTKDMNLYFIASREEENKLNTAQYFGQTQSLLEGTETEKTPYKQTNRRRFTTLEMEKISPRTMGNLIATWENKTILNSLIWKINAFDQWGVELGKANTKKYLK

SEQ ID NO: 155936 - protein, 298 aa, Unknown
  Bacterial polypetide isolated from the Sargasso Sea
QDLKIDITRQSLDKEIKEDLIDLAKETKIKTKISELMSGAKVNLSENRSVDHFSLRKEERFKTQEWKKLLNFVQNISSKNNFKHIVNIGIGGSDLGPLMVNKALKSFYKDPDILYVSNIDPTKISEIFIKCNPKETLFIITSKSFNTLETLENAKIVAEWLSKHKVALNDSMVAVTSLTKKALEWGFNDSNIFEISENVGGRYSLWSSVGMSIFIGLGEDNYKNFLLGARTMDEHFINEEVENNIPIILALLRIWNRNFLNRNNHCIVPYTDNLSKLPAWAQQLEMESNGKGVDINRC

SEQ ID NO: 155937 - protein, 230 aa, Unknown
  Bacterial polypetide isolated from the Sargasso Sea
ENWLKIFNLQDWVGGRTSITSSVGLLPLALINENIFEFIRGASLMDEATRISDFKNNPAALLSSAWYLTGDGVGKRDMVVLPYRDRLQVFSKYLQQLVMESLGKKFNRNGEVVNQGISVFGNKGSTDQHAYVQQLRDGIDNFFCIFIELLDSPSTNIFDEKENPKEYLSGFLQGTRSALSSEDRQSITITLEKLNCFSLGALIALFERAVSFYAELVNINAYDQPGVEAG

SEQ ID NO: 155938 - protein, 174 aa, Unknown
  Bacterial polypetide isolated from the Sargasso Sea
SIDYPTAPVIWGQIGTNSQHAFFQFLHQSNQIIPCEFLLSANCIDDGYYEKHHLQLIINCLAQSEALMLGIKNEEIVEEKRNLHHHCYGNRPSTILVYKQLTPKILGKLLALFEHRTFAEGLLWNVNSFDQWGVELGKKLATKLTEHFNNQNQNQNFSNSTLNLLHEIRKLKNF

SEQ ID NO: 155939 - protein, 295 aa, Unknown
  Bacterial polypetide isolated from the Sargasso Sea
GLNFSYIDNIDPFLISERLDQLSDKLSTTLFVIVSKSGGTPEPKIAMNIIKNHIENKNLDWNSNAIAITMKDSQLYKKAQLEKWLKIFNLPDWVGGRTSITSSVGLLPLTFINQDISEFISGAAIMDELTRKTNIKDNPAALLASAWFFSGDGVGKRDMVVLPYRDRLQVFSKYLQQLVMESLGKKFNRKGEIVHQGISVFGNKGSTDQHAYVQQLRDGIDNFFCIFIELLDSPDINNYFGSENPKEFLSGFLQGTRSALSNENRQSITITLDKLNCLTLGALIALFERASFFLC

SEQ ID NO: 155940 - protein, 297 aa, Unknown
  Bacterial polypetide isolated from the Sargasso Sea
DSKLFKKANSENWLKIFNLQDWVGGRTSITSSVGLLPLALINENIFEFIRGASLMDEVTRKSDFKNNPAALLSSAWYLTGDGAGKRDMVVLPYRDRLQVFSKYLQQLVMESLGKKFNRNGEVVNQGISVFGNKGSTDQHAYVQQLRDGIDNFFCIFIELLDSPSTNIFDEKENPKEYLSGFLQGTRSALSSEKRQSITITLEKLDCFSLGALIALFERAVSFYAELVNINAYDQPGVEAGKKAAANIIEYQQKVSNLLDEGGEYTINDITSLFDHSVNEPIFFILREMCFGNDDYLV

SEQ ID NO: 155941 - protein, 247 aa, Unknown
  Bacterial polypetide isolated from the Sargasso Sea
NVDPFLISEKLEELSEKLSTTLFVVVSKSGGTPEPRIAMEIIKSHCENNSLEWNSNAIAITMKDSKLFKKATSENWLKIFNLQDWVGGRTSITSSVGLLPLALINENIFEFIKGASLMDEATRLSDFKNNPAALLSSAWYLTGDGVGKRDMVVLPYRDRLQVFSKYLQQLVMESLGKKFNRNGEVVNQGISVFGNKGSTDQHAYVQQLRDGIDNFFCIFIELLDSPSTNIFDEKENPKEYLSGFCKE

SEQ ID NO: 155942 - protein, 202 aa, Unknown
  Bacterial polypetide isolated from the Sargasso Sea
GREADENLLNARTPDTPASVYMSAQDILHNNILDNETTAILAYDWPLRGFYKYAQQLEMESNGKRVDQNGNNIDYQTNPIVWGGYGPVSQHSFYQQIFQGTKDMNLYFLASRENEKKLNTAQYQGQTNSLSEGTKTNVPPHKQVSTRRFTTIEMESISPRTVGNLIATWENKTILNSLLWNVNAFDQWGVELGKANTKKYLK

SEQ ID NO: 155943 - protein, 198 aa, Unknown
  Bacterial polypetide isolated from the Sargasso Sea
SYRLRYLPAHLQQLMMESLGKSVSTEGEPLKIKSGVAVLGASGTDAQHSFFQMLHQGTEAIPVDLIGFAHLSDETSQELIANLIAQAETLAFGQDVDEIGNPLLPHKILSGDKPSTVILAPSLSPSILGQLVALYEHRTVSAAVTLGINPFDQWGVEFGKQSAIEIANELATPEIVSNRDSSTKALMARYRHWRDATP

SEQ ID NO: 155944 - protein, 146 aa, Unknown
  Bacterial polypetide isolated from the Sargasso Sea
ILPAKVSHELKDHHHRLAAHCFAQTQALMQGKTFDEAKAEVLASGASEAEAIALAPHKVSPGNKPSNTLLLPELSPYYLGALIALYEQKVFCQGVLWNINSFDQWGVELGKQLSTPIYQVLSDQQKNNFDASTEALIAKFKQLNLG

SEQ ID NO: 155945 - protein, 234 aa, Unknown
  Bacterial polypetide isolated from the Sargasso Sea
MDSSMGGRFSIWGPINLLFYLIHGKDKYKEFLKGAEKSDQLSLNKDINQNPSLTLSIQDVVMNNVCEIESTLVINYDWKLRNFYQYVQQVEMESTGKSVDQNGKELDYQTGMIVWGGFGPRSQHSFFQQVYQGTKNYNLYFVATKSDQLNYKQFLGQSKSLKYGNDQESDINKRVSKRNFTTIELNSLTPETLGELMAMWENKVIFNSFFWDINPFDQWGVELGKTNTKSELDK

SEQ ID NO: 155946 - protein, 438 aa, Unknown
  Bacterial polypetide isolated from the Sargasso Sea
MKFNSFIKSLREKGNSQFSNNQLSTDVICIDQISHPVNNDRRDLFYKYAEANELIQKFNNIVIGEIGNFTEKKSVTHFEYKKGTKKNFVEDQRNVLSITEKIKRNFKRVIIFSIGGSNLGPSLMNDIFNKNDLEIIFITGSDPDEYSSIQIQEDDALVISSKSFGTLETLSSYKEVCGNNFFHNTFAITANKSKALDFGVHEENIVSFDPSTGGRFSIWSPINLVLCLLEGERGYKDFLKGGKEMDDACLKSPEVNPAFQLSVQDIIYNNLLNVETTLVVNYDYKLRNFISFAQQVEMESNGKSIDSSNSKVDYQTGSIIWGGYGPESQHSFFQHVFQGTKKSNKYFICSQSNKLNYKQMVAQIESLVQGNEQETDIHKKTNISGATKIELKDLSPYSIGQLLSLWENKTIFNSIFWNTNAFDQWGVELGKINTKKQL

SEQ ID NO: 155947 - protein, 300 aa, Unknown
  Bacterial polypetide isolated from the Sargasso Sea
KLDPKKTVFIVSSKSFKTDETIESLKNAINWSGDMNKFIAITANKNEAQKFNFKHITEFDKEIGGRYSIWSRISFAAAFFAMPANHEKSFDNFCLGGSIADSYLTDDKDYQKFVKMLAFSDIWLHNVKEKNTRAILSYDWKLRSLPNYFQQLEMESLGKRSNKDSEFKKTGQIIFGGYGPIAQHSYFQLLHQGTQNICADIILNSQNKYDTLAYSQGITQARLLSVGATIPLKDEETINGNVPVNLFIFDGIDAKKLGFLIATWEHRVFITSVMLQINPFDQFGVNAGKIYTKKYLADKD

SEQ ID NO: 155948 - protein, 162 aa, Unknown
  Bacterial polypetide isolated from the Sargasso Sea
MWNLRSLPDYFQQLEMESLGKPANQGSDYDHTGQIILGGYGPIVQHSYFQLLHQGTQEICADIISSKDDEKSLSYAQAMTQSELLANGESDIQLKNEFKINGNIPVNLFLLNKFDAFNLGYLIATWEHRTFVTATLLDINPFDQFGVNAGKIYTKKYLADSD

SEQ ID NO: 155949 - protein, 203 aa, Unknown
  Bacterial polypetide isolated from the Sargasso Sea
IKFLEGGNQADIEIQDSKEYLEFIKKLSFCDLYLNNKGVNSRVILSYIWNLRSLPNYFQQLEMESLGKSANIDSEFKKTGQIIFGGYGPTAQHSYFQLLHQGTQNICADIIACSQNKDSLAYAQAITQSKLLSRGAEDLKKEERINGNVPVNLFLLKSLDPYTLGYLIATWEHRTYITSTMLQINAFDQFGVQAGKHFTRKFH

SEQ ID NO: 155950 - protein, 357 aa, Unknown
  Bacterial polypetide isolated from the Sargasso Sea
MHNIYWNLLKKNRVKSNDRRIETLFHSDKNRFKKFAIEIEDLYFDYSKTNIDSETLKNLIAYAKNLKIMDSINAMFEGEKINVTEKRSALHTALRNFKANNLTNLYQINKKLLVRFKDLSKFCNQIRNGQKKSGSGLKFTDVVNIGIGGSELGPKLVTAALSEYHNGPKIHFVSNIDSSDILKIIKNLDPNKTLFIISSKSFTTTETINNAKKALKWVCEILGSNGLKNFVAVCSAKEKALDFGILKENIFEFDEWVGGRFSVWGPIGLPVMLSIGTDQFKNFLEGASQIDNHFKNEEISYNIPIILALIGFWHSSICQYSSRAILPYDSKLEYLPTYLQQLDMESNGKSVNLKEKE

SEQ ID NO: 155951 - protein, 442 aa, Unknown
  Bacterial polypetide isolated from the Sargasso Sea
MNFLNFIKTIDKNKLFNESEHKIKTSNILIDQSNQNISKETYKNFQKFIDDNNFIGRFQKILEGEICNASENKPATHFQYRAEGNNLYESNLKNLKAVSSKLKDKKIIVFFGIGGSYLAPNLLNEVFGSSNKKIIFITGSDPDEYKDLEKNNLNDAAFILATKSFSTTETLTSYQSVTNGEFLSDTFAITSNIDDAKHYGISDENIIPMDSSMGGRFSIWGPINLLFYLIHGEDKYKEFLKGAEKSDQLSLNKDISQNPSLTLSIQDVVMNNVCEIESTLVINYDWKLRNFYQYVQQVEMESTGKSVDQNGKELDYQTGMIVWGGFGPRSQHSFFQQVYQGTKNYNLYFVTTKSDQLNYKQFLGQSKSLKDGNDRESDINKRVSKRNFTTIELNSLTPETLGELMAMWENKVIFNSFFWNINPFDQWGVELGKTNTKSELDK

SEQ ID NO: 155952 - protein, 135 aa, Unknown
  Bacterial polypetide isolated from the Sargasso Sea
FQLMHQGTKLIPADFIAFKEPLYNDKEQHKILTSNFLAQTNALLVGNIKSGNEIHKNIDGNKPSNTILINRLTPQSLGSLIAMYESKIFVIGSILNIYSFDQWGVELGKSIAKQILNNGKSNLDESSSQTYDKLQ

SEQ ID NO: 155953 - protein, 483 aa, Unknown
  Bacterial polypetide isolated from the Sargasso Sea
MNHKNRKSQKDNLIYKNDHITIDVSRNFIDKQTLSRLFKLLKDIEIKKEITKLFSNKFKSKSENKYVSHIFLRNSQQGAKTINDMCNMYDSIRKNSLKNFTTRKIKNIVHIGIGGSNLGPKFVCNALKDYSTKDFNINFVSSSDTKELDDAIKNLDLEETIFIFSSKSFVTKEILINLDYIKKILISKFASSEIVSRHLFAITSDKSTAIKKGIDANKILIFSKNIPGRFSVTSALSFIILLQIGKANFKKFYKGIIKMDNHFKRTKISNNIPMILAIISIWNINFFSIRNFCVCPYNYRLKDAIEYIQQIEMESNGKSSDIYSNEINIDTSPIVFGQAGTDCQHSFFQMIHQGSQDIALDFVGVIDSNDNKVSSNFLISNLIAQANLCFYGKGSQKNNKKIRGNNPSNIILMNSVNPHSVGNLISMYEHKIFVEGILWNINSFDQWGVEEGKLLASKFINKINQSNRKDTDKIILQLLKTKF

SEQ ID NO: 155954 - protein, 171 aa, Unknown
  Bacterial polypetide isolated from the Sargasso Sea
KKTKIDGSPVNVNTGNVIWGGSGSDGQHSYFQLLHQGSYTIPIDFIVDAGVSDDQMDTYSLANCLAQSESLMAGMQEADPEKSIDGDKPNNVVLVNKISPQSIGQLVSLYEHKVFVQSVIYGINAFDQYGVELGKQIAQSLSKVISKSSRYTGKNLSTRALLSKIREYRKG

SEQ ID NO: 155955 - protein, 166 aa, Unknown
  Bacterial polypetide isolated from the Sargasso Sea
KNRIILSYNWKLRSLTNYIQQLEMESLGKQPNPKSVFKETGQSIFGGFGSTAQHSYFQLLHQGTADFCTDIIYSTSKISPLLSAQARGQASLLSSDLYDSNNLLEKTNSNSPVNMFHLNNLSLASLGFLLATWEHRVFTTACMLEINPFDQYGVSAGKVAAKKFLS

SEQ ID NO: 155956 - protein, 468 aa, Unknown
  Bacterial polypetide isolated from the Sargasso Sea
MQGQSWIPSGGVHHQGPMSFPDFSASDAQIQWQRFCDLLWYHEDLGIWLDISRMHLNPSDLEQLQPKFDKAFTAMAELEAGAIANPDEERQVGHYWLRSPQLAPSDQVRDHIASEIDQIEQFGQDVINGVIKAPGGQAFTDVLWIGIGGSGLGPLLMIRALQKQGAGLPFHFFDNVDPNGMSAVLADLDDRLATTLVVTVSKSGGTPEPHLGMEQARHRLESRGGQWSAQAVAITMVDSKLDREAKQDGWLKRFDMFDWVGGRTSITSAVGLLPGALIGADIRDFLAGAAQMDEATRLADLRRNPAALMAASWFVAGDGKGLRDMVVLPYRDRLEVFSRYLQQLVMESLGKRLDRDGNEVNQGIAVYGNKGSTDQHAYVQQLRDGVDNFFATFIEVLEDVDDIPVIKDEFPGDFLDGFLQGTRSALTEGGRQSLSISMRRFDSRRLGALIALFERAVGFYGDLVNINA

SEQ ID NO: 155957 - protein, 423 aa, Unknown
  Bacterial polypetide isolated from the Sargasso Sea
FIFENENVSFRSYIDEFTQELYKEFDMKAESLGLDSKIEDLLSGKKVNYTEHLAAWHPKYRNKYNPTSTDTPSNKNQQINLSNLYNLCMTAKNVVTIGIGGSYEGPKLLLEAIDLSNFDNSFIFITGSDPSEFQLKTKKLDPKETIFIISSKSFKTDETISLLQDAMTWSGDSSKFIAITANSEEAEKYNLNNIIEFDHEIGGRYSIWSEISSLIYCLKNDEYNAFMAGGKQADKDLKADDSYLNFIKNLSYSDIWYHNSKNKNCRVILSYIWKYRSFANYAQQLEMESLGKQPSKNSEFDKTGQIIFGGYGPTAQHSYFQLLHQGTQNICADIIANKEDEKSLAYAQAVTQMQLLTKGTKSLKGHQKINGNTPTNLFLFNKIGLYELGYLIATWEHRTFITSVILNINPFDQFGVNAGTDLY

SEQ ID NO: 155958 - protein, 343 aa, Unknown
  Bacterial polypetide isolated from the Sargasso Sea
MSLHKINPTETKAWKKLIDEKHNLSTETLNSLFSKESNRLNYLSIKWDCFDVDFSKNILNEKTFNLLTELAEECKISDSIKMLFNGDKINETEGRSVLHTELRNFKTSNSSIVGDREKIKSFSSKIINGTIKGYTGKKFTDVVNIGIGGSDLGPKMAVEALKFYKNSLNIHFISNVDGDHNKEVLKALNPETTFFIVVSKTFTTQETLTNANLAKNWIQKKLDTKEIQNHFCAISTNIDAVKDFGIDEEYIFKMYDFVGGRFSMWGSVGLSISISIGYDNFKKFLIGAEKMDMHFKESPIEKNIPICLALVGIWNSNFLGSHTQGIIPYTEYLNLLPSYLQQS

SEQ ID NO: 155959 - protein, 451 aa, Unknown
  Bacterial polypetide isolated from the Sargasso Sea
MPSFKNLVDDKKNAEPGDVVTTKKAGGLIFDFSGQRFSETYLDSFIQHVKEAKVIERFDAIYSGEQANTTENRPVDHFGYRKEDIAREQRVLDEQEKALVLSEHINKQEYEAIIFFGIGGSQLGPELIQQTLCYNKNKKIVFITGSDPLEAELKTKDLDLDACAFILASKSFCTIETLKSFELVTQKTHMQNTYAITSNIAGAEAFGVSRKNILTFSEATGGRFSIWSPINLLFLIQLGEQSIEEFYLGGREADESLLNARTLDTPASVYMSAQDILHNNILDNETTAILAYDWPLRGFYKYAQQLEMESNGKRVDQNGNNIDYQTNPIVWGGYGPVSQHSFYQQIFQGTKDMNLYFLASRENEKKLNTAQYQGQTHSLSEGTKTNVPPHKQVSTRRFTTIEMESISPRTVGNLIATWENKTILNSLLWNVNAFDQWGVELGKANTKKYLK

SEQ ID NO: 155960 - protein, 462 aa, Unknown
  Bacterial polypetide isolated from the Sargasso Sea
MSNKKSEIKFNFKNHLIDYQSNLKGFDEKIFNKFDKKSKDLNLFEKIKELKDGKKVNLTENKSARHMQQREEYSFPNFGLETFADINDPPELYQRDIKWDSSLDNKKPNTVNHYLSDIDKTYKYKNIIVIGIGGSYEGPKLILEALRGPELNYKIEFITGSDPEEFRYKTYNLKPEETCFFISSKSFTTDETIENLKTAISWSKDITNFIAITSNRTEAAKYGIKNILEFNNDIGGRYSIWSVISQPVFAGTNGEFFSFNEGGHLADKDLLENDKYLEFIKYLSFSDIYFNNELNKNSRVVLSYNWRLRSFADYVQQLEMESLGKTPCKDSEFQKTGQVIFGGYGPIAQHSFFQLMHQGTQELCADIIAVKNDSLAYAQAITQSKLLSEGSDDLKEIEKINGNIPTNLFILKELDPSTLGYLIATWEHRVYVTSVMLQINAFDQFGVNAGKIYTKKYLADKD

SEQ ID NO: 155961 - protein, 171 aa, Unknown
  Bacterial polypetide isolated from the Sargasso Sea
ILDNQTSAILAYDWPLRGFYKYAQQLEMESNGKQVDQNGERVDYQTNSIIWGGYGPVSQHSFYQQIFQGTKDMNLYFIASRAEENKLNTAQYFGQTQSLLEGTETEKTPYKQTNRRRFTTLEMEKISPRTMGNLIATWENKTILNSLIWKINAFDQWGVELGKANTKKYLK

SEQ ID NO: 155962 - protein, 323 aa, Unknown
  Bacterial polypetide isolated from the Sargasso Sea
KLILEALRGPDLNYRIEFITGSDPEEFRYKTYNLKPEETCFFISSKSFTTDETIENLKTAINWSKDLGNFIAITSNRIEAEKYGIENILEFNNDIGGRYSIWSIISQPVFAGTNGEFFSFNEGGHTADKDLLENDKYLEFIKYLSFSDIYFNNQLNKNSRVVLSYNWRLRSFADYVQQLEMESLGKIPFKDSEFQKTGQVIFGGYGPIAQHSFFQLMHQGTQELCADIIAVKDNSLAYAQAITQSKLLSEGADDLKEIEKINGNIPTNLFILNELTPTALGYLIATWEHRVYVTSVMLQINAFDQFGVNAGKIYTKKYLADKD

SEQ ID NO: 155963 - protein, 306 aa, Unknown
  Bacterial polypetide isolated from the Sargasso Sea
MNGDLNSWDKFCNYLWFDKKLNIWLDISKINFTNEEIKNLEEKFVDVFSSIKELENGAISNIDENRQVGHYWLRNPSISPSSKIGEEISADIDSISEFGKQILNGDIKNKNQQNYTDVLWIGIGGSGLGPLLITESLQKCSRGLNFSYIDNVDPFLISEKLEELSEKLSTTLFVVVSKSGGTPEPRIAMEIIKSHCENNSLEWNSNAIAITMKDSKLFKKATSENWLKIFNLQDWVGGRTSITSSVGLLPLALINENIFEFIRGASLMDEATRISDFKNNPAALLSSAWYLTGRWRWEERYGRITI

SEQ ID NO: 155964 - protein, 442 aa, Unknown
  Bacterial polypetide isolated from the Sargasso Sea
MNFIEFLKNIDKDRLFDSSKHKIETSNILIDQSNQSISEETYRSFQKFIDDNNFVQRLKKVQKGEVSNISENKPATHFQYRTEGSSLYTSNLNNLRDISNKLRDRKTIIFFGIGGSYLAPNLLNQVFGSLDKEIIFITGSDPDEYKYLEEKSLEDAAFILATKSFSTTETLNSYESVTNRNFLSNTFVVTSNIDEAKLYGISDENIIPMDSSMGGRFSIWGPINLLFYLVHGEEKYKEFLKGAENSDQLSLNSDINQNPSLTLSIQDVIMNNICGIESTLVVNYDWKLRNFYQYVQQVEMESTGKSVDQNGKDLDYETGMIVWGGFGPRSQHSFFQQVYQGTKNYNLYFIVTRSDQLNYKQFLGQSKSLKEGNEGESNTNKKVSRRSFTTIELNSLTPEAIGELMAMWENKVLFNSFFWNINPFDQWGVELGKTNTKSELDK

SEQ ID NO: 155965 - protein, 287 aa, Unknown
  Bacterial polypetide isolated from the Sargasso Sea
AAFILATKSFSTTETLTSYQSVTNGEFLSDTFAITSNIDDAKHYGISDENIIPMDSSIGGRFSIWGPINLLFYLTHGEDKYKEFLKGAEKSDQLSLNKDISQNPSLTLSIQDVVMNNICEIESTLVINYDWKLRNFYQYVQQVEMESTGKSVDQDGKELDYQTGMIVWGGFGPRSQHSFFQQVYQGTKNYNLYFVITKSDQLNYKQFLGQSKSLKNANDRESDINKRVSKRNFTTIELNSLTPETLGELMAMWENKVIFNSFFWNINPFDQWGVELGKTNTKSELDK

SEQ ID NO: 155966 - protein, 520 aa, Unknown
  Bacterial polypetide isolated from the Sargasso Sea
IQWQRFCDLLWYHEDLGIWLDISRMHVNPSHLEQLQPGFDKAFAAMAELEAGAMANPDEQRQVGHYWLRAPQLAPSESVRDHIATEIDQIEQFGRDVVSGVIKAPGGQPFTDVLWIGIGGSGLGPLLMIKALQGHGAGLPFHFFDNVDPNGMSAVLAGLDDRLATTLVVTVSKSGGTPEPHLGMEQARHRVESRGGRWADQAVAITMGDSKLDREAKQDGWLKRFDMFDWVGGRTSITSAVGLLPGALIGADIRDFLAGAAQMDDSTRLADLRRNPAALMAASWFVAGDGKGRRDMVVLPYRDRLEVFSRYLQQLVMESLGKRLDRDGNEVNQGIAVYGNKGSTDQHAYVQQLRDGVDNFFATFIEVLEDVSDIPLVKDECPGDFLDGFLQGTRSALTERGRQSLSISMRRFDARRLGALIALFERAVGFYGDLVNINAYHQPGVEAGKKAAAAILDLQSRIEAVLKDGAPRTVSEIRQAVGDGSDEAIFWIMRHLAGNDRGYRAEGDWANPASMRFSCS

SEQ ID NO: 155967 - protein, 475 aa, Unknown
  Bacterial polypetide isolated from the Sargasso Sea
ELENGAISNIDENRQVGHYWLRNPSISPSSKIGEEIRADINSISEFGKQILNGDIKNKNNQQYTDVLWIGIGGSGLGPLLITESLQKCSRGLNFSYIDNVDPFLISEKLEELSEKLSTTLFVVVSKSGGTPEPRIAMEIIKSHCENNSLEWNSNAIAITMKGSKLFKKATSENWLKIFNLQDWVGGRTSITSSVGLLPLALINENISEFIRGASLMDEATRISDFKNNPAALLSSAWYLTGDGIGKRDMVVLPYRDRLQVFSKYLQQLVMESLGKKFNRNGEVVNQGISVFGNKGSTDQHAYVQQLRDGIDNFFCIFIELLDSPSTNIFDEKENPKEYLSGFLQGTRSALSSENRQSITITLEKLNCFSLGALIALFERAVSFYAELVNINAYDQPGVEAGKKAAANIIEYQQKVSTLLDEGGEYSINDITSLFDSSVSEPIFFILREMCFGNDNYLVRGDWSNPNSLIIQKINS

SEQ ID NO: 155968 - protein, 451 aa, Unknown
  Bacterial polypetide isolated from the Sargasso Sea
MPAFKNLVDDKKNAEPGDVVMTKKAGGLTFDFSGQRFSEAYLDSFIEHLKEAKVIERFDAIYSGEQANTTENRPVDHFGYRKKDIAREQRVLDEQERALVLSEHINKQEYEAIIFFGIGGSQLGPELIQQTLCYNKNKKIVFITGSDPLEAEFKTKGLNLDACAFILASKSFSTIETLKSFELVTQKAHMQNTYAITSNIAGAEAFGVSSKNILTFSEATGGRFSIWSPINLLFLIQLGEQSIEEFYLGGREADESLLNTRTLDTPASVYMSAQDILHNNILDNETTAILAYDWPLRGFYKYAQQLEMESNGKRVDQNGNNIDYQTNPIVWGGYGPVSQHSFYQQIFQGTKDMNLYFLASRENEKKLNTAQYQGQTHSLSEGTKTNVPPHKQVSTRRFTTIEMESISPRTVGNLIATWENKTILNSLLWNVNAFDQWGVELGKVNTKKYLK

SEQ ID NO: 155969 - protein, 279 aa, Unknown
  Bacterial polypetide isolated from the Sargasso Sea
LSSLFFSIPMGVGSQRIALENQSLEALFHIRKKFPKLYLIANIGISEVIKENGLEKAKKAIDMLEAQALAIHLNVAQECLQEEGSRLFKGFYNALEKLCSQLSIPLLIKEVGCGISPATAIKLKQTGVKAIDIGGKGGTSWPYIESCRSQHEYRELLGESMREWGIPTAYSLATVRQEIGDLDIVATGGIRDGLTIAKACALGATMVGVGLPFMKAALKSEDSSFKLMEALIHGLKTTMITTGSRSLKNLSRKICLGTPLENEFYKLFQNKRSEKKKDS

SEQ ID NO: 155970 - protein, 267 aa, Unknown
  Bacterial polypetide isolated from the Sargasso Sea
GALGSVIEELHNSYKLNFDELYMEVDGNFPNHPADPSDPANLRELRELVISKNKAFGVAFDGDADRAVFLDDKGNLISGSLMTALVSDWLNEKKDNLKIVHNVNVSPSVVNYLKKKGITTIRAKVGHSYIKQIMREEDADFGGEHSAHFYLKENYYADSGIVTLLIFLQILSEKNVKASELIDSYNFPPTSGEINFEVTSVKESLKKIENSFENSFDKLDGISYFADNYWFNVRGSNTEPKLRLNAEAEDEETLNNLINEITNIIKV

SEQ ID NO: 155971 - protein, 273 aa, Unknown
  Bacterial polypetide isolated from the Sargasso Sea
ISNFKILENILINKEVDGNFPNHHPDPTIPKNMEQLIKSVKENNCDIGLAFDGDGDRLGVVDNLGNIVWADQYMLILCSEISHLYKNPKIIMDVKCSKVFFDESKKMGCDPIMERTGHSPIKEKMKELKSPLSGEMSGHVCYGDDFYGYDDAMYVALRLIRILSNQENNLFNIIDQYPKTFSTPETRFDVEEIKKFKIIDDIKERLKNFDGKIIDIDGIRVETDKGWFLMRASNTQNQLTCRVESTSESGLRKLISIVEDQLKLSDINFQFTI

SEQ ID NO: 155972 - protein, 301 aa, Unknown
  Bacterial polypetide isolated from the Sargasso Sea
SLETNNELGLYFEHLKKLVKPEKVNSQIKFGVDGGNGAIGSIFEDLSKIYNFDCEKLYMEVDGNFPNHPADPSNINNLKEIIKLVQEKKLDFGVAFDGDADRAVFIDNNGKVVSGSMMTTLIADYLSEKKNNLKVVYNVNVSPHALSILDSKNISLFRCKVGHSNIKAMMKELEADFGGEHSAHFYYKDNYFADSAILTLLMFMTIISERREKVSMMIDKYNFPPSSGEVNFEVEDVEKSLEKIKNVFTGDFDELDGLSFFDENFWFNVRGSNTEPKLRVNIEAPSQKTLDEVLEKISTTI

SEQ ID NO: 155973 - protein, 315 aa, Unknown
  Bacterial polypetide isolated from the Sargasso Sea
GIASYFSAKSVVVGYDVRSSSVDILNALTKGINSQGAKVYSIGLCGTEEIYFATNHLETDAGVMITASHNPADYNGLKIVGKGAKPVSMDSGLGEIKKIADQSESNLLAEPNMEVVDIKAAYIEKLLEFVDPNTIKPMHIVTNAGNGCAGPILDLLEERLPLNFTKIQNDPDGTFPNGIPNPLLPENRDITSKAVIEHSADLGIAWDGDFDRCFFFDSNGDFIENYYLIGLLSEQLLKLSPGDSIVHDPRLVWNTVEEVNSFGGIPTISKSGHSFIKEVMRANSSIYGGEMSGHHYFRDFYFSDSGMIPWLLLVE

SEQ ID NO: 155974 - protein, 320 aa, Unknown
  Bacterial polypetide isolated from the Sargasso Sea
VMITASHNPADYNGLKIVGKGAKPVSMDSGLAEIKKIADQSESNLVTEPNMEVVDIKAAYIEKLLEFVDPNTIKPMHIVTNAGNGCAGPILDLLEEKLLLKFTKIQNDPDGTFPNGIPNPLLPENRDITSKAVIEHSADLGIAWDGDFDRCFFFDSNGDFIENYYLIGLLSEQLLKLSPGDSIVHDPRLVWNTVEEVNSFGGIPTISKSGHSFIKEAMRENNSIYGGEMSGHHYFRDFYFSDSGMIPWLLLVENVSTSGSNLTHLVKDRINKFPVSGEINRTVSNPEELLEKVKDHYLKLGPNIENLDGYSLDFGDWRFN

SEQ ID NO: 155975 - protein, 337 aa, Unknown
  Bacterial polypetide isolated from the Sargasso Sea
MTADKLDKIKFGTDGWRGIIGFDFNLSNLSRVVVAACQELHYQYYKEVNSKKIIIGYDRRFMACEFAKQIVPFVRGCGFEPILSDSFVTTPSCSFYAKEVGCLGALVITASHNPYNWLGLKIKSFNGCSVDESFTSEVEKRLMLGNSIEKIDGINQLVDIKKFHLNRIKSLFDIDHISKRLKKMKLRIFVDSMHGSAANCMAEIFASNDLEVISEIRKDADPFFGGKPPEPLLNYADDLKQTLMKNSTNEVKTLGIIFDGDGDRIAAIDEKGRYSSTQDLLPYFISYLGEIKNNSYPVLKTVSGSDIIKNISESQNRDVFELPVGFKYIAEKMIKEK

SEQ ID NO: 155976 - protein, 218 aa, Unknown
  Bacterial polypetide isolated from the Sargasso Sea
MEITESIFREYDIRGIYPNQINEEVINHIGLAIAHKCYKEKIRQIFIGRDGRLSGKKLLNSLANSLSDYGIDVIDIGLVTSPLLYYAAKKGESKSGVMITGSHNPKDHNGIKLVINDKPVSGSEILKLIKENKKISASPGKIISKDFKSEYISEVIENIDIEKDKKIKIVVDCGNGAAGCIAPNLFKSLGCEVIELFSEVDGNFPNHHPDPGKIENLL

SEQ ID NO: 155977 - protein, 260 aa, Unknown
  Bacterial polypetide isolated from the Sargasso Sea
CDVDGNFPNHHPDPGKEKNLVDLIEKVKEVSADVGVAFDGDGDRLGAITSSGRLIYPDQMMMLFSKKILSNNGTETIVFDVKCSDFLPQIIKENDGIPFMSPTGHFHIKNNIKKYNAVLGGEMSGHIFFNDIWHGFDDGHYSAIRLLDIMNETGSSLDDLLDSLPVSYSTPELNIDVPEEKKFKIIEDFIENASIDGKKDFTDGLRASFENGWALLRASNTTPKLVLRFEANSQESLEKIQKNFLEELKKFLPNEDINLE

SEQ ID NO: 155978 - protein, 276 aa, Unknown
  Bacterial polypetide isolated from the Sargasso Sea
APDLLRSVGCEVIEIICDVDGNFPNHHPDPGKEKNLVDLIEKVKEVSADIGVAFDGDGDRLGAVTSSGRLIYPDQMMMLFSKKILSNKRGETIVFDVKCSDFLPEIIKENDGIPFMSPTGHFHIKNNIKKYNAVLGGEMSGHIFFNDIWHGFDDGHYSAIRLLDIMNETGSSLDDLLDSLPVSYSTPELNIDVPEERKFKIIEDFIENASIDGKKDFTDGLRASFEDGWALLRASNTTPKLVLRFEANSQESLEKIQKNFLEELKKFLPNEDINLE

SEQ ID NO: 155979 - protein, 330 aa, Unknown
  Bacterial polypetide isolated from the Sargasso Sea
MVCKNQKGNLTLKNGDIISSDIQKKYLSDVHSKIQIKKKLKIAIDAGNGAAGPTAFELYNKLGCEVIPLYCDIDGNFPNHHPNPSEESNLEDLKTAVLKNKCDLGLAFDGDGDRCLIVDDCGNSLWPDKQMMIFSTSILKHHPNAKIIYDVKSSNNLHKIIEENSGIPLICRTGHSFIKKKMKEEKAILGGEMSGHIFFKDKWFGFDDGIYAGARMIEIISEISETSSQFFGKLPNSFSTPEINIPVSEEGEQHKIIELFSEKCNFEGARISKIDGVRADYSFGWGIIRASNTTPNIVARFEANTHKELSVIKNNFYNPVKKNYFNHRES

SEQ ID NO: 155980 - protein, 252 aa, Unknown
  Bacterial polypetide isolated from the Sargasso Sea
MFFKFGLASGTFFRSQKKNKQVAVIAKDTRLSGYMLEPALVSGLTSAGMHVYTLGPLPTNGLAMLTKTMKANMGIMITASHNPHYDNGLKLFGPDGMKLSNKIEKKIEHLIDQHIEKNLSEPEKLGRVKRLETGTRDYIKILKKNFSEEFNLRGLRIVIDCANGAGYKAGPELLKSLGAKVIAIGVEPNGMNINKNCGSVYPQNIKRAVKKYKAHIGISLDGDADRVIMCDEKSNIIDGDQIIAALASRWKN

SEQ ID NO: 155981 - protein, 261 aa, Unknown
  Bacterial polypetide isolated from the Sargasso Sea
FSELGCEVIELFTEVDGNFPNHHPDPGKLENLQDLIAKVKLTKADLGLAFDGDGDRVGLITDKGDVIYPDKILMMFCKEILDKNKGSIIFDVKCTNALPNLIKNLGGTPIMSPTGHFHIKNGIKKHNPLLAGEMSGHIFFNDKWHGFDDGHYSGARIIELISNNKRSISAINNDLPNLFSTPELNITVTDETKFQIIEDFSMKCNLKGEKINIDGLRINFKNGWGLLRASNTTPKLVMRFEGNTEDDLKEIQNNFLHELSR

SEQ ID NO: 155982 - protein, 275 aa, Unknown
  Bacterial polypetide isolated from the Sargasso Sea
ERLLPVAAAAAAELAHSAPPELASQTVVIGYDRRFLAPELAAALAAAVRGVGLEPLLAQEPLPTPACSWVVVERQALGALVITASHNPPEWLGLKIKGHFGGSVEGDFTKRVERRLAAGGITIPEPGETECFDGWAEYLNGLRGAIDTAALRHGLQQSGLKVIVDPMHGSAAGGLPALLGDGVMEIRSERDPLFGGHPPEPLAPYLGQLIESVQAASQDGTPAVGIVFDGDGDRIAAIDEQGRYCSTQLLMPLLIDHLARARQLPGKVIKTVSGS

SEQ ID NO: 155983 - protein, 289 aa, Unknown
  Bacterial polypetide isolated from the Sargasso Sea
TASHNPNGWTGIKMGNEKTLTFGPDLINNLKKVIEDKDKTSNNPGKYIFRNINNEYLIDITSKYKINRKIKAVVACGNGTAGLFAPKALSLLGVEVIPLHCDLDSSFPNYNPNPEDLIMLKDLGKNVLENNADIGFAFDGDGDRVGVVDNNGQEIFADKIGLLIARNLSLENSNSKFVVDVKSTSLFLTDEILKKSNSEIVLWKTGHSYIKRKTNEINATAGFERSGHFFFNNPIGRGYDDGILSAIEILKILDKNKNKKLNDLYNELPITFSSPTMSPKCPEEKKYDV

SEQ ID NO: 155984 - protein, 272 aa, Unknown
  Bacterial polypetide isolated from the Sargasso Sea
MSDIKFGTDGWRAIIAKDFTVDNVARISYATGLWVKENFSDPSVVIGHDCRFGGKLFVETAVKVFVSIGIEVHIAKGFITTPMISLGAKKLNASIGVVMTASHNPPSYNGYKLKGHYGGPLTTDKINEVESLIPNDNPVDLESISIEASVKNGLVKWVDLEQMYVDVVESSFDLNAIKNSGLHFAYDAMYGAGQNVMKRILGDMTFLHCENNPSFYGQAPEPIAKNLTEFSELIIKDGTIAAGLATDGDADRIGLYNSKGEFVDSLSILFYC

SEQ ID NO: 155985 - protein, 277 aa, Unknown
  Bacterial polypetide isolated from the Sargasso Sea
MTIKISSFKAYDIRGRLPHEINSEIAYRVGNATAKYLSAKKMILGRDIRASSKELSESMALGLMDAGVDVIDIGECGTENVYYATGELKSCGGIMVTASHNPSDYNGFKIVSENAKPISSKTGLLDIRKLAESDKRLISETRGNLEQRDFNQSYVKKILSFIDSDSINKLKVVMNPGNGGAGVYAELISKNMPIEIIKQNFDPDSSFPNGIPNPMLEENRASTSQVVIDNKADVGIAWDGDFDRCFFFDEKGNFIEGYYLVGLLAKSFLNKNRNEKV

SEQ ID NO: 155986 - protein, 232 aa, Unknown
  Bacterial polypetide isolated from the Sargasso Sea
CVGRDGRLSGENLLKSLTESLSAYGLNVQNIGLVTTPLLYYAAKKNKSKSGVMITGSHNPKEYNGIKLVINDKPVSGNEILKLIHVDKPIADKSGNVSYIDIKNDYISEVKDNINFDFKNKIKIVIDCGNGAAGCIAPILYKELGCEVIELYSEVDGSFPNHHPDPGKLENLKALIDSVRATNADLGLAFDGDGDRVGLITDKGGVVFPDKILMMLSEDILLTRKGTIIFDV

SEQ ID NO: 155987 - protein, 290 aa, Unknown
  Bacterial polypetide isolated from the Sargasso Sea
MTSLDLEKKYILRLLQNFNQKKKINIVWDSGNGSAGKVMKNLAEKIDGKAELLFTEIDGNFPNHHPDPSEPKNLESCQKKLLELNYDVGFAFDGDGDRLGVIDNKGRIISGDTLLLLLSKELLKKKKSRIVADVKCSQVLFDEIKKLGGEVYMSPTGHSHVKNYVKKLNADLAGEMSGHIFYAYDYFGFDDAFYAAVKVIELINNNSYKLSDLVDQIPRVFNTPEIRIDTDDNKKFGIISKIFDNQKSIKKNIIDIDGLRVTENDGWWLIRAYNTQPAIVVRCESLSKRA

SEQ ID NO: 155988 - protein, 281 aa, Unknown
  Bacterial polypetide isolated from the Sargasso Sea
MFFKFGLASGTYFKSQKKRKQTAIIAKDTRLSGYTLEPALVSGLASAGMHVYTLGPLPTNGLAMLTKEMKANMGIMITASHNPHFDNGLKLFGPDGMKLSDKIEKKIESLIDKKISKNLSHSEKLGRVKRLETGTKNYIKILKKNFTKEFNLRGLRIVIDCANGAGYKAGPELLKSLGAKVIAIGIKPNGLNINKKCGSTFPRNIRSAVKKYKAHIGISLDGDADRIIMCDEKSNIIDGDQIIAALATRWKNKKMLKGGVVGTLMSNYGLEKYFKSIGIKF

SEQ ID NO: 155989 - protein, 292 aa, Unknown
  Bacterial polypetide isolated from the Sargasso Sea
RGLTDSHLTPKISSIYARALHTFLPDGVIMAGRDSRPSGDMILHAMTEELVGLGRTVIQCGIVPTPTVQFMVHNTEAVGGFIVTASHNPVEWNGIKFLRPDSTFFHPEECQDLFNMVDQNVELKKSKEAGIVWPEQNAIQKHVIACASISCIDLNRIQRRKFKVVIDAVNGAGAIALPNMLEALGCEVIELNCEPDGNFTRGTEPLPENLNDLSTMVKNHNADAGFAIDPDADRLAVVNEHGEPLGEEYTLVLAADGYINETGKKERFVVNLSTSLALEKLAHKNGSTVERS

SEQ ID NO: 155990 - protein, 220 aa, Unknown
  Bacterial polypetide isolated from the Sargasso Sea
LPTNGLAMLTKKMIANMGIMITASHNPFYDNGLKLFGPDGLKLSDKIEKKIEKLIDTKISKQLSNPHILGRVKRLENGSNKYIEILKTNFPKQFNLKGLRITIDCANGAAYKVGPQLFRSLGAKVHEIGTSPNGFNINKKCGSTFPNKIKYHTKKNKSHIGISLDGDADRVIVCDEKGNIIDGDKIIAMLATRWKRKKILKGGVVGTLMSNYGLQKYFFE

SEQ ID NO: 155991 - protein, 238 aa, Unknown
  Bacterial polypetide isolated from the Sargasso Sea
ANVKSQNLLKKKIIWDCGNGATGKVLKKIINKLPGVHHILFDEIDGNFPNHPPDPTKKENLLELRNNIEKSDADLGIAFDGDGDRIAIMRKNGELIPGDLLTAFLSLSIKDKTKKIILDVKSSIVAKQAIESIGFKVEIWKTGHSNIKSRMKKTNSLLAGEMSGHIFFSDDYYGYDDAIYSSIRFLKLINEEKEIEIFLANLNKCYSTPEIKISCSENIKFKIMEKITTKLKQKYDLK

SEQ ID NO: 155992 - protein, 277 aa, Unknown
  Bacterial polypetide isolated from the Sargasso Sea
MRGSQLFNSLGCEVIELYSEIDGNFPNHHPDPGKTENLKDLILEVKNNNADLGLAFDGDGDRVGLITNEGEIIFPDKILMMFCQDILLSEKGSIIFDVKCSNALPKIIKDLGGNPIMSPTGHFHIKNGIKKHNPLLAGEMSGHIFFNDKWYGFDDGHYSGARIIELIYKKSESISNINKELPTLYSTPELNIDVTDETKFKIIEDFCSQCLLEGEKITIDGLRINFANGWGLLRASNTTPKLVLRFEGDSKENLNEIKKNFLNELSRICPDIDINLD

SEQ ID NO: 155993 - protein, 288 aa, Unknown
  Bacterial polypetide isolated from the Sargasso Sea
WAVVERRALGALVITASHNPSEWLGLKIKGPFGGSVEGDFTAAVERRLAAAGITPPIQGTFKRFDGRQDHLDGLRRKLDLTALTDGLRSMNLKVIVDPMHGSAAGCVSELLNSSTDGLVEEIRSERDPLFGGHPPEPLAPYLCQLITAVKASHAAGTPAVGLVFDGDGDRIAAVDETGRFCSTQLLMPLLIDHLARARQMPGTVVKTVSGSDLMRLVAEGLDREVLELPVGFKYIAAEMLAGDVLIGGEESGGVGFGMHLPERDALFAAMLVLEALVEGGQPLGARLS

SEQ ID NO: 155994 - protein, 286 aa, Unknown
  Bacterial polypetide isolated from the Sargasso Sea
MTKEISCFKAYDVRGRIPSELNEDVAYRIGVGIASYFSAKSVVVGYDVRPSSIDILNALTKGINSMGAKVYSIDLCGTEEIYFATNHLETDAGVMITASHNPADYNGLKIVGKGAKPVSMDSGLGEIKKIADQSESNLLAEPNMEVVDIKAAYIEKLLEFVDPNTIKPMHIVTNAGNGCAGPILDLLEERLPLKFTKIQNDPDGTFPNGIPNPLLPENRDITSKTVIEHSADLGIAWDGDFDRCFFFDSNGEFIDSYYIISLLGKQLLKSSPGSNIVHDPRLVWDT

SEQ ID NO: 155995 - protein, 202 aa, Unknown
  Bacterial polypetide isolated from the Sargasso Sea
GYTLEPALVSGLVSGGMHVFTLGPLPTNGLAMLTKSMKANMGIMITASHNPYQDNGLKLFGPDGMKLSDKIEKKIERLIDAKSILQLSDPKFLGRVKRLEDGNEKYIKILKNNFPNNFNLKGLKIVLDCANGAGYKAAPKLLRELGAKIISIGTKPNGFNINDKCGSTYPSKIKFAVRKHKAHVGISFDGDADRIIMCEEKG

SEQ ID NO: 155996 - protein, 255 aa, Unknown
  Bacterial polypetide isolated from the Sargasso Sea
IAIDCGNGAASIIAKQIYEKLGCNVTSLFDELDGNFPNHHPDPSKEENMRDLKNAVLDKNLDLGIAFDGDADRLGIVTKKGSIIDADIQMLAFSKEILNQNQGGKIVFDVKCSKLLSEGIEKLGGIPLINPTGHSLIKRRLLEEEALLGGEMSGHIFFNDRWPGFDDAIYAGARMLEIVSEAENKDLLDNLPNSCSTPEINIPVGDKEKFGIVKEFKKRMDFKEAKIIDIDGVRVEFKSGWGLLRPSNTSPVLVL

SEQ ID NO: 155997 - protein, 304 aa, Unknown
  Bacterial polypetide isolated from the Sargasso Sea
TANLEVDGGVMITASHNPPEYNGFKMCRGTAAMAGDEIQELRSVFEAGEFRTGSGNHIDAGDFLTMYMTDVIEKAGLPDRSVKVVIDSANAVPGPFMVELCEKLGCEVYPLHCEWDNTFPNHPPDPTRPKNMVELGAKVVETGAEFGIGIDGDGDRIGVVDERGHFIHPDRLLAVFARDILSRVPADASDAARTVIHDVKCSMALEQTIEAAGGIAHMMRTGHSFLKQALRENPEVPMAGEMSGHFFFHDRWNGFDDSLYATARLIQLVAQDNKPFSSLFDGIPSYPSTGEAKVPLTGGREETM

SEQ ID NO: 155998 - protein, 278 aa, Unknown
  Bacterial polypetide isolated from the Sargasso Sea
MFFKFGLAAGTYFKNQKKSKQIAIIAKDTRLSGYTLEPALVSGLTSAGIHVFTFGPLPTNGLAMLTKKMKANMGIMITASHNPYYDNGLKLFGPDGLKLSDKIEKKIEKIIDSKITDKLSNPKILGRVKRLEDGSEKYIEILKANFPNQFNLRGLKIAIDCANGAAYKVGPKLLRSLGAEVYEIGTSPNGFNINEKCGSTFPNKIKNLTKKNRAHIGISLDGDADRIIVCDEKGNIIDGDKIIAMLAQRWKKKKILKGGVVGTLMSNYGLEKFFKKKK

SEQ ID NO: 155999 - protein, 296 aa, Unknown
  Bacterial polypetide isolated from the Sargasso Sea
SNGKNRFLDIKDDYIDEVKNSFNFKNLKVVVDCGNGAAGIIAPELLRAVGCEVIEIFCDVDGNFPNHHPDPGKEKNLVDLIEKVKEASADVGVAFDGDGDRLGAVTSSGRLIYPDQMMMLFSKKILSNNGSETIVFDVKCSDFLPQIIEENDGIPFMSPTGHFHIKNNIKKYNAVLGGEMSGHIFFNDIWHGFDDGHYSAIRLLDIMNETGSSLDDLLDSLPVSYSTPELNIDVPEERKFKIIEDFIENASIDGKKDFTDGLRASFENGWALLRASNTTPKLVLRFEANSQESLEK

SEQ ID NO: 156000 - protein, 183 aa, Unknown
  Bacterial polypetide isolated from the Sargasso Sea
MKIKISSFKAYDIRGQLPHEINPEIAYRVGNATAEYLSAKKMILGRDIRASSKELSESMASGLMDAGVDVIDIGECGTENVYYATGELKSCGGVMVTASHNPSDYNGFKIVSENAKPLSSETGLLDIRKIAESDKRLISESRGNLEQRDLNQSYVKKVLSFIDPDSLSKLKVVMNPGNGGAGV

SEQ ID NO: 156001 - protein, 289 aa, Unknown
  Bacterial polypetide isolated from the Sargasso Sea
MEQEHNYKIQNFDIEVLREYDIRGVVGVNINENTAYTIGRTFGYTVKSKLETHTIATGYDGRLTSPVLHKALCEGLKDSGSKVLNIGMGPTPMTYFAHYHLNADAVIMVTGSHNPSEYNGFKMVFNNSSFFSEDIQSLQKLIYDNKLELLEGQIINQDITQEYIKRVLLNIRLNRKLKIAWDPGNGAMGKVTREITEKLYNSDNIIINEDVDGNFPNHHPDPTIPKNMVQLIKTVKENDCDIGLAFDGDGDRLGVIDNLGNIVWADQYMLLLCSEIANLYDNPKNYNGC

SEQ ID NO: 156002 - protein, 197 aa, Unknown
  Bacterial polypetide isolated from the Sargasso Sea
MTCFKAYDIRGRLGHDLDADIARAIGRGFAAARSPKSVVIGRDARESSADLAQALAEGLIAGGVDVHDIGLAGTEEVYFATDHLGTDGGLCVTASHNPIDYNGIKLVGAGARPLSPADLDAVRAASEVPHPDAATPGTLIPADPRADYVARVLSFVEPAALKPLKVLVNAGNGAAGPTFDAIAQALAQAGAPVTWVR

SEQ ID NO: 156003 - protein, 261 aa, Unknown
  Bacterial polypetide isolated from the Sargasso Sea
FKFGLASGTYFKNQKKTKQVAIIAKDTRLSGYTLEPALVSGLVSGGMHVFTLGPLPTNGLAMLTKSMKANMGIMITASHNPFYDNGLKLFGPDGMKLSDKIEKKIEKLIDTKSTKQLSNPKFLGRVKRLEDGNDKYIKILKNNFPKNYHLKGTKIVLDCANGACYKAAPKLLRELGAKVVSIGIKPDGLNINKNCGSTFPSKIKAAVKKFKAHVGISFDGDADRIIMCDEKGKIIDGDQIIAMLARRWKLKKILKGGVVGT

SEQ ID NO: 156004 - protein, 217 aa, Unknown
  Bacterial polypetide isolated from the Sargasso Sea
KAVINHRADYGISLDGDGDRVILVDKDGNILDGDDLLYILAFANPNRTGAWSGVVGTLMSNLGLEDGIKKLGYKFLRADVGDKYVTEMLAKKGWMLGGEASGHIICKDLVSTGDGTIAALKVISSLLILEKSPQEVLSNYKKIPQINKAVSVSNKDIVNDKDLKALIKEIESDMTVGRILVRPSGTESKIRIMVEAPEKQVAEKFASDIEKIIRSKS

SEQ ID NO: 156005 - protein, 299 aa, Unknown
  Bacterial polypetide isolated from the Sargasso Sea
MGTDGIRGRVNDSKINGEMFFKFGLAAGTYFKNLKKSKQTAIIAKDTRLSGYTLEPALVSGLASAGMHIYTLGPLPTNGLAMLTKKMKANMGIMITASHNPYHDNGLKLFGPDGLKLSDKIEKRIEKLIDSKITKNLSKPIELGRVKRLEDANENYIKILKQNFPSSFSLKGIKIALDCANGAGYKAGPDLFKSLGAKVYKTGTSPNGLNINLKSGSTHPSLICQMTKKNKAHIGISLDGDADRIIVCDEQGKIVDGDKILAMLGERWKRKKILKGGVIGTQMSNYGLEKFFKNNGIKF

SEQ ID NO: 156006 - protein, 231 aa, Unknown
  Bacterial polypetide isolated from the Sargasso Sea
MIDESIFREYDIRGIVPSQVNEASIRSISNAIAKKCNDENINELALGRDGRLSGENILNLLSKELQSIGINVVNVGIVTSPLLYFAAKQLPSKSGIMITGSHNPKNYNGFKIVINDSPISGLEILSLLSNKPIRKKDAGKEVYKKNLMDEYIEEVLSQSLKKPKKIKVVLDCGNGSAGEIAPKLIRSLGYEVIELYCDIDGNFPNHHPDPGQVENLQDLIQAVKENSADVG

SEQ ID NO: 156007 - protein, 276 aa, Unknown
  Bacterial polypetide isolated from the Sargasso Sea
ITASHNPPEYNGFKMNKGSAAMAGQSIQELLEVFLQSKFKAGEGSISNREILGNHIETIMNKINVPKRRLNVAIDCGNAVAGPAMLELFKNLEVDVVPIFCQWDNQFPNHPPDPTRVENMQHLAKAVRENNCDFGIGIDGDGDRVGLVDEAGNFIHPDKMLALFAIDILSKNKGLSEQQRTIIFDVKCSMAVEKVIKENGGIPLMLRTGHSFQKQALREKPLVPLAGEMSGHIFFNDNWPGFDDALYVSARLVELVSRSLESNGKFSDLISKLPVY

SEQ ID NO: 156008 - protein, 279 aa, Unknown
  Bacterial polypetide isolated from the Sargasso Sea
KDYEVGQGKLRSTDVSNDYIQSILDAIHLNNKPILKIVLDCGNGSAGEIAPRLFNALGCDVVTMFSEIDGNFPNHHPDPSQPENLEDLIIKVKEENADIGFALDGDADRLGVVDASGNIIWPDKQLMLLAKDVLSRNKGKHIIFDVKCTRHLKSIIESNNGIACMWKTGHSFIKQKMYELDAPLAGEMSGHIFFKERWYGFDDALYTAARFIEIFTNYSIKPTELFAALPYGISTPELRMPLEEKYHTNFMKEFSNNIPKLDANIISIDGLRAEYNDGW

SEQ ID NO: 156009 - protein, 220 aa, Unknown
  Bacterial polypetide isolated from the Sargasso Sea
VQKLFKEHRADFGVSLDGDGDRVTIVDRESNILDGDDILYILGFANPNRLGPWSGIVGTQMSNVGLEDGLNKLGYSFKRADVGDKYVSDLLSKEGWLLGGEPSGHIICKDLVSTGDGTIAALKTISSLVMLEKDPKDILSNYNKIPQINESISVINKDIVSDAEVKIAINDIKSDLTINRILVRPSGTENKIRIMIESENKKTAKKYTNDLIKLFESKTR

SEQ ID NO: 156010 - protein, 164 aa, Unknown
  Bacterial polypetide isolated from the Sargasso Sea
FKLKVVIDCGNGAAGCIAPKLFSELGCEVIELFTEVDGNFPNHHPDPGKLENLQDLIAKVKLTKADLGLAFDGDGDRVGLITDRGDVIYPDKILMMFCKEILNINKGSIIFDVKCTNALPDLIKNLGGTPIMSPTGHFHIKNGIKEHNPLLAGEMSGHIFFNDK

SEQ ID NO: 156011 - protein, 267 aa, Unknown
  Bacterial polypetide isolated from the Sargasso Sea
MRLFGTDGIRGEVGKYPLTAENVLKLAKASSFVLRKKNSISRVVINKDTRLSGYIFEPALASGFISMGIDVILVGPLPTPALTVLGKSLRADFSVMITASHNPYKDNGLKFFSGQGLKISTDDENKIEDLFFNYDFDNFKIKPSNYGKAIRLKNALGRYSEALKQSADRNLNYSKLKVTLDCANGASYKVAPEVLFELGLDLHTIGNNPSGININQNCGSLFPLKASELVKKKKCDIGVCLDGDGDRVIIVDEKGKVLSGEELIYIL

SEQ ID NO: 156012 - protein, 243 aa, Unknown
  Bacterial polypetide isolated from the Sargasso Sea
GCNGGVVLTASHNPKEYNGYKAYWSDGGQLISPHDKNVVAEVAKIESIDDVSFEADPSLIEMIGDDMDQAYLKTLKEISLLDTEIIKSSNLKIVFSSIHGTGITLIPRALKALGFQGVAIVEEQADPDGNFPTVVYPNPEEKEAMSMALKQGEAKGADLILATDPDADRVGIAVKNTNGEYQLLNGNQTGSLLIYYLVIKWKEKGLKGNEFVAKTIVTTELIKDIAVKNQIKCYDTLTGFKFI

SEQ ID NO: 156013 - protein, 275 aa, Unknown
  Bacterial polypetide isolated from the Sargasso Sea
AECVSVVRDIRDSSPSYHEAFVEGLISAGANVLDLGISSTGVLYRSTVDLPVDVAVAITASHNPPEYNGFKICKGKLPLGGEDLQDIRRTFESGNFREGIGSYETRNDYEKEYVNSILNTVGKPDRDIRIVLDCGNAVPGPLAVKTLEELGIDVIPLYCDWDNSFPNHPPDPTRPKNMVDLGKAVVEHGAEFGIGMDGDGDRLGVVDEKGDFIHPDRLMGIFVKDVLENLPKDASEEKRTIFYDVKCSMALEDAITDFGGVPRMVRTGHTFMKLE

SEQ ID NO: 156014 - protein, 281 aa, Unknown
  Bacterial polypetide isolated from the Sargasso Sea
MGKVTRAITENLNNSETIFINEEVDGNFPNHHPDPTVPKNMVQLIKTVIENDCDVGLAFDGDGDRLGVIDNLGNIVWADQYMLLLCSEIAHLYDNPKIIMDVKCSKVFFDEAKKINCNPVMSRTGHSPIKEKMKELNSPLSGEMSGHICYGDDFYGYDDAMYVGLRLLRILSNESKPLNDLINIYPKTFSTPETRFDVDESRKFIIIEEVKERLKKEDKKIIDIDGVRVENEDGWFLMRASNTQNQLTCRAESISEKGLHKLIGIIEDQLSLSGISYKFTI

SEQ ID NO: 156015 - protein, 175 aa, Unknown
  Bacterial polypetide isolated from the Sargasso Sea
KKNGEINDVNIIDNYIERILQNIHIKKKLKISWDIGNGAMGVVIDKLIAKLQNTENILLNKDVDGNFPNHHPDPTVPKNMQQLIKSVKENNCDLGMAFDGDGDRLGVIDNFGNIVWADQYMLVLCSEIKNLYKNPKIIMDVKCSKVFFDESKKMGCLPIMERTGHSPIKEKMKEL

SEQ ID NO: 156016 - protein, 250 aa, Unknown
  Bacterial polypetide isolated from the Sargasso Sea
FGIRGTVNLGNINGEKFFKFGLAAGTYFKNLKKKKQIAIIAKDTRLSGYTLEPALVSGLASAGMHIFTLGPLPTNGLAMLTKKMKANLGIMITASHNPFHDNGLKLFGPDGMKLSDKIEKKIESLIDKKTIYQLSKPDFLGRVKRLEDGNDKYIEILKSNFPSNFSLKGMRIVLDCANGAGYKSAPKILSNLGAKVFSIGIKPNGLNINLKCGSTYPELLKKYVKKFKADIGISLDGDADRVIMCDENLK

SEQ ID NO: 156017 - protein, 248 aa, Unknown
  Bacterial polypetide isolated from the Sargasso Sea
GIVEETLSTDDAYAIGRAFGTEISLNGGATACVGYDGRLSSPEMEQAVVDGLKDSGIDAVRVGLGPTPMLYFAVNIVGADGGIMVSGSHNPPEYNGFKMMHGTKPFYGDAIQNLGKIAAAADYADGSGQDRQEPMLDRYVSRVGQDYTGGKELKVAWDAGNGSAGEAMVRLAEALPGEHLLLNEKIDGTFPVHHPDPTVVENLEQLRDVVLKEGCDLGIAFDGDGDRIGVIDGEGEILWGDQLMVVWS

SEQ ID NO: 156018 - protein, 274 aa, Unknown
  Bacterial polypetide isolated from the Sargasso Sea
VVITGSHNPGNYNGFKILFNNNSTSSEEIQSIKKRIKEQDFLSGAGRIESLDVVESYVEEVKNNIKLSRPLNISIDCGNGAAGVVAEKVYKGIGCEVEGLYCDLDGNFPNHHPDPSKPENVEDLIESVLKNKSEIGLAFDGDADRLGVISPSGEMIFPDMQMILFSEHVLKKKPNSKIVFDVKCSKLLEEAILKSNGIPIMSKTGHTFIKSMIRGHGAILGGEMSGHIFFNDRWPGFDDGVYAGARMLEILSHSEGEDIFRTLPKLVSTPEINI

SEQ ID NO: 156019 - protein, 244 aa, Unknown
  Bacterial polypetide isolated from the Sargasso Sea
QKLGHFASKGYSRTYNGFSKSVAINTHYVDEIIKPLQNIKRQLDDKTIVWDCGNGASGPSLEMITTKIPGKHVILYSKVDGNFPNHHPDPTDESTLKILRNKMKEVDAELGIAFDGDGDRIGVVDKQGRPIPGDLLTAFLANSIATNDKIIQTIILDIKSSYVAYENIISLGFKAEIGKTGHSNIKKRIKEIKSPLAGEMSGHIFFGDTYFGYDDALYAAIRLLTLTANNFELDKFISTLPETF

SEQ ID NO: 156020 - protein, 264 aa, Unknown
  Bacterial polypetide isolated from the Sargasso Sea
FKFGLASGTYFKSQKKKKQTAVIAKDTRLSGYSLEPALVSGLASAGMHVFTLGPLPTNGLAMLTKSMKANMGIMITASHNPHYDNGLKLFGPDGMKLSDKIEKKIENLIDKKINKNLSNPENLGRVKRLESGTKDYIKILKKNFTKDFNLKELRIVIDCANGAGYKAGPDLLRSLGAKVFAIGVNPNGLNINKYCGSTFPSNIKNAVKRHKADLGISLDGDADRIIMCDEKSNIIDGDQIIAALATRWKNKKMLKGWSGWYFNV

SEQ ID NO: 156021 - protein, 155 aa, Unknown
  Bacterial polypetide isolated from the Sargasso Sea
KIVNKYVQRILKNISIKRKLKIWWDIGNGAMGVIIDKVLGNLNNTENIVLNKVVDGNFPNHHPDPTVPENMKQLINSVVKNKCDIGLAFDGDGDRLGVVDNLGNIVWADQYMLVLCSEIVNLYKNPNIIMDVKCSKVFFDESKKLGCVPIMERIG

SEQ ID NO: 156022 - protein, 296 aa, Unknown
  Bacterial polypetide isolated from the Sargasso Sea
VRGCELEPLLTETPVPTPACSWAVVERKALGALVITASHNPPEWLGLKIKGPFGGSVEGDFTAAVERRLAAGGITPPIAATTSRFDGRGEHLEGLRRKLDLTALVTGLKAMNLKVFVDPMHGSAAGCVSDLLGPEASELVDEIRSTRDPLFGGHPPEPLAPYLSDLITAVQHSTAAGTPAVGLVFDGDGDRIAAVDENGRFCSTQLLMPLLIDHLARARQLPGTVVKTVSGSDLMRLVAEAQGREVLELAVGFKYIASEMLAGEVLIGGEESGGVGFGMHLPERDALFAAMLVLEA

SEQ ID NO: 156023 - protein, 265 aa, Unknown
  Bacterial polypetide isolated from the Sargasso Sea
FMKTAAKVLVSQGIKVYQANSIITTPMISLGAKELNACVGIVLTASHNPPSYNGFKLKGHYGGPLTSDKITEVEQLIPDENIVDLNAVELSEMEQKGLIESVDLEEMYMDKIKSSFDLDAIKNSGLRFAYDSMYGAGQFVMHKLFPDMSFLHCEYNPSFNGQAPEPIAKNLMPFSNFIAGDGGIAAGLATDGDADRIGLFNEKGEFVDSHHILLLLLLYLHKYKSMNGKVVVAASTTPRVVKLAEKWGLEHDTVQIGFKHIAPTN

SEQ ID NO: 156024 - protein, 296 aa, Unknown
  Bacterial polypetide isolated from the Sargasso Sea
GLWGKTFNAAAGIVVTASHNPPQYNGYKVYWENGAQIIPPHDSGIAAQIERAANQAIPFLEHDDAVKQGKLILLQDDFYQSYRHGVQQAEVLQNHTAPEKVSLAYTAMHGVGAEMAETVLKDAGFTQVYSVASQREPDGDFPTVNFPNPEEKGAMDLVIAEAKKHGAMLACANDPDADRFAVAVRRDDGEYQMLTGDQVGVLFGHYLLSHAKDNQRLTGTTIVSSSLLSKIAQGFGTQSFTTLTGFKWLMNVGIAKTSPEDQFLFAYEEALGYTVGSMVWDKDGLSALVAFAQLTA

SEQ ID NO: 156025 - protein, 304 aa, Unknown
  Bacterial polypetide isolated from the Sargasso Sea
NKSFDNGFGKLSKKDIKGEYISELIKYSGPFSNCKVIWDCGNGATGEIVSKIVKRIPGQHKVLFSEIDGNFPNHHPDPTIEKNIQHLKNYIKTEKADLGISFDGDGDRIGVISKNGDLISGDLLTSFLSGGILAKKPNQQIILDVKSSEMAIKSIEKQSGFTVISKTGHSLIKEKIKEINAPLAGEMSGHIFFNDKWYGFDDAIYTALRCLEEINFRNGGLEKFLNLLPESFASPEIRIECKEEEKFKVIENIKHNALSDYSSSDLLLIDGVRVKTKIGWWLIRASNTQAALIARAEGNNKESL

SEQ ID NO: 156026 - protein, 284 aa, Unknown
  Bacterial polypetide isolated from the Sargasso Sea
REYDIRGIVDNDINQNTAYTIGRIFGHIISNKFNEKSIVVGYDGRNTSPNLQKALCVGLIESGSNVKNIGLCPTPMTYYAHHFLNTNAAIMVTGSHNPSEYNGFKMVLDKNPFYAKDIQNFKNLADDNKLVKGRGKFESINIKNHYINRNLKNINFKKKLKVAWDIGNGSMGIVMDSIALKMKNIENILINKEVDGNFPNHHPDPTVPKNMIQLIETVKENSCDVGLAFDGDGDRLGVVDNKGRIIWADQYMLLLSKEISSIYENPKIIMDVKCSKVFFDEVRK

SEQ ID NO: 156027 - protein, 278 aa, Unknown
  Bacterial polypetide isolated from the Sargasso Sea
MREKFFKFGLASGTYFKNLKKNKQVAIIAKDTRLSGYTLEPALVSGLVSGGMHVFTLGPLPTNGLAMLTKSMKANMGIMITASHNPYHDNGLKLFGPDGMKLSDKIEKKIEKLIDAKITRQLSNPKFLGRVKRLEDGNDNYIKILKNNFPNNFNLKGLKIVLDCANGASYKAAPKLLKELGAKVIAIGTNPNGFNINEKCGSTYPSKIRQAVRKFQAHVGISFDGDADRIIMCDERGKIINGDQIIAMLARRWKSKKILKGGVVGTLMSNYGVRKVFE

SEQ ID NO: 156028 - protein, 298 aa, Unknown
  Bacterial polypetide isolated from the Sargasso Sea
VGIASYFSAKSVVVGYDVRPSSIDILNALTKGINSMGAKVYSIDLCGTEEIYFATNHLETDAGVMITASHNPADYNGLKIVGKGAKPVSMDSGLGEIKKIADQSESNLVAEPNMEVVDIKAAYIEKLLEFVDPNTIKPMHIVTNAGNGCAGPILDLLEERLPLKFTKIQNDPDGTFPNGIPNPLLPENRDITSKAVIEHSADLGIAWDGDFDRCFFFDSNGEFIDSYYIISLLGKQLLKSSPGSNIVHDPRLVWDTQEEISNNSGVPTISKSGHSFIKEVMRECNSVYGGEVSGHPLF

SEQ ID NO: 156029 - protein, 244 aa, Unknown
  Bacterial polypetide isolated from the Sargasso Sea
MFFKFGLASGTYFKSQKKRKQIAIIAKDTRLSGYALEPALVSGLASAGMHVYTLGPLPTNGLAMLTREMKANMGIMITASHNPHYDNGLKLFGPDGMKLSDKIEKKIESLIDKKISKSLSKPEKLGRVKRLETGTKKYIKILKKNFTKEFNLRGLRIVIDCANGAGYKAGPELLKSLGAKVIAIGINPNGLNINKNCGSTFPNKIRSAVKKYNAHVGISLDGDADRIIMCDENSNIIDGDQIIA

SEQ ID NO: 156030 - protein, 274 aa, Unknown
  Bacterial polypetide isolated from the Sargasso Sea
VTNNLNNSENILINEEVDGNFPNHHPDPTVPKNMEQLIKSVKDNKCDIGLAFDGDGDRLGVVDNLGNLVWADQYMLLLCTEIANLYNNPKIIMDVKCSKVFFDEAKKLNCDPIMSKTGHSPIKEKMKELKSPLSGEMSGHVCYADDFYGYDDAMYVALRLLRILCNQEKSLNELINIYPKTYSTPETRFDVDEIKKFLIIEEIKERIKNTEGKIIDIDGIRVENDDGWFLMRASNTQNQLTCRAESTSQEGLKSLIAIIENQLSLSGVNYKFTV

SEQ ID NO: 156031 - protein, 267 aa, Unknown
  Bacterial polypetide isolated from the Sargasso Sea
LATATYFKNQKKTKQIAIIAKDTRISGYTLEPALVSGLTSGGMHVFTLGPLPTNGLAMLTKKMKANMGIMITASHNPYNYNGLKLFGPDGMKLSDQIEKKIEKLIDAKNTKQLTNSKFLGRVKRLEDGNDRYISILKKKFPNSFNLKGTKIVLDCGNGAGYIAGPKLLKKLGAKPISIGTKPNGFNINDKCGSTFPFKIQSVVRKYKAHVGISLDGDADRIIMCDEKGKIIDGDQIIAMLAKRWKREKILKRRGNRHPNVELWIRKF

SEQ ID NO: 156032 - protein, 239 aa, Unknown
  Bacterial polypetide isolated from the Sargasso Sea
YTLEPALVSGLVSGGMHVFTLGPLPTNGLAMLTKSMKANMGIMITASHNPYYDNGLKLFGPNGLKLSDQIEKKIEKLIDAKNKKQLTNPNLLGRVKRLEDGNDKYIKILKSNFPKNFNLKGTKIVLDCANGACYKAAPKLLKELGAKVIAIGVKPDGFNINERCGSTYPSKIKTAVKKFKANVGISFDGDADRIIMCDEKGKIIDGDQIIAMLARRWKSKKILKGGVVGTLMSNYGLEK

SEQ ID NO: 156033 - protein, 212 aa, Unknown
  Bacterial polypetide isolated from the Sargasso Sea
MILESIFRENDIRGTYPEELNESVIKEVAKGIAKKCFQEDITSIVVARDGRLSGESLLTTFCEAISQYGIDVKNIGLATSPMLYFAAKKENSKSGIMITGSHNPKNYNGIKMVINDNSVSGSEILNLIKNDEILNDSLTGNIIYSDIKEMYISEILENIKTELSELKVVIDSGNGAAGFVAPELFKRLGCNVIELYSEVDGNFPNHHPDPGK

SEQ ID NO: 156034 - protein, 277 aa, Unknown
  Bacterial polypetide isolated from the Sargasso Sea
KADILDKIKFGTDGWRGIIGFDFNLSNLSRVVVAACQELHYQFYKEVNSKKIIIGYDRRFMACEFAKQILPFVRGCGFEPILSDSFVTTPSCSFYAKEMGCLGALVITASHNPYNWLGLKIKSFKGCSVDELFTSEVEKRLMLGNSIEKIDGVNQLVDIKKLHLGRIKSLFDINYISKRLKKMKLRIFVDSMHGSAANCMAEIFASNDLEFISEIRKDADPFFGGKPPEPLLNYADDLNQILMKNSTNEVKTLGIIFDGDGDRIAAIDEKGRYSSSQ

SEQ ID NO: 156035 - protein, 312 aa, Unknown
  Bacterial polypetide isolated from the Sargasso Sea
LPDGVIVVGRDSRPSGDVILNSMCEELVSLGRTIIHCDIVPTPTVQFMVHNTEAVGGFIVTASHNPIEWNGLKFVREDSTFFYPDDCKKLFELVDKNSTVKSTNEPGIIWPEQNAVQKHIISCVGLKCITLNRIQKRKFKVVIDSINGAGSQALPAVLQALGCEVIELNCEPDGNFTRGTEPLPENLMDLRNMVKRHRADVGFAVDPDADRLAIVSETGEPLGEEYTIVLAADGYLNEMKQSENFVLNLSSSLALDKLAESRGSAVIRSAVGEINVVNKMNEVNSNLGGEGNGGVILRECHLGRDSLVGVTM

SEQ ID NO: 156036 - protein, 252 aa, Unknown
  Bacterial polypetide isolated from the Sargasso Sea
YSGYTLEPALVSGLASAGMHVYTLGPLPTNGLAMLTKEMKANMGIMITASHNPHYDNGLKLFGPDGMKLSDKIEKKIENLIDKKISKNLSQPEKLGRVKRLETGTKKYIKILKKNFTKEFNLRGLRIVIDCANGAGYRAGPELLTSLGAKVIAIGVNPNGLNINKNCGSTFPNKIRLAVKKYKAHIGISLDGDADRIIMCDEKSNIIDGDQIIAALATRWKNKKMLRGGVVGTLMSNYGLEKYFKSEGIKFI

SEQ ID NO: 156037 - protein, 263 aa, Unknown
  Bacterial polypetide isolated from the Sargasso Sea
MTKEISCFKAYDVRGRIPSELNEDVAYRIGAGVASYFGAESVVVGYDVRPSSIDILNALTKGINSKGAKVYSIGLCGTEEIYFATNHLNTDAGVMITASHNPADYNGLKIVGKGAKPVSMDSGLDEIKNIAEASESKTDKEPVIEIIDVKNEYIDKLMEFIDPKKIQPMKIVTNSGNGCAGPILDMLEDKLPIEFIKIQNEPDGSFPNGIPNPLLPENREITSKAVIEHSADLGIAWDGDFDRCFFFDSNGEFIESYYLIALL

SEQ ID NO: 156038 - protein, 303 aa, Unknown
  Bacterial polypetide isolated from the Sargasso Sea
MALTKGINSKGAKVYSIGLCGTEEIYFATNHLNTDAGVMITASHNPADYNGLKIVGKGAKPVSMDSGLDEIKNIAEASESKTDNEPVIEIIDVKNEYIDKLMEFIDPKKIKPMKIVTNSGNGCAGPILDMLEDKLPIEFIKIQNEPDGSFPNGIPNPLLPENREITSKAVIEHSADLGIAWDGDFDRCFFFDSDGEFIESYYLIALLGEQLLKQSPGESIVHDPRLVWNTVEEVDGFGGTPVISKSGHSFIKEAMRENNSVYGGEMSGHHYFRDFYYSDSGMIPWLLLIENASVSGSTLTDLV

SEQ ID NO: 156039 - protein, 242 aa, Unknown
  Bacterial polypetide isolated from the Sargasso Sea
MNKELTCFKAYDVRGELGVNFDSDICYTIGCAFAEIMDPKVVILGRDVRESSPELFNSLSKGLMDHGVNIYDIGIAGTEEVYWATTHFKACGGIMVTASHNPISFNGLKMVKSKSQPLDDSEFIKIKKSAENKIFSIKENKGLLFDKCSESKIAYVNKLFTFIDVKLLPTLNIVINSGNGALGPTFDHFEKKLLKKTKNLNFIKCQYNPDPSFPNGIPNPLLKENHQINKNLVISNKADIGI

SEQ ID NO: 156040 - protein, 262 aa, Unknown
  Bacterial polypetide isolated from the Sargasso Sea
MIIRSISGVRGLTPSHLNIDSMYMYARALHIHLEEGLLFIGRDSRPSGEELLEAFANELIRLGRDVIICGIVPTPTVQFMIERSEAAGGAIITASHNPIEWNGIKFVRSDSTFFNSEDCENLFDLADRNKPIKDSKQPGMVFPDQNSILKHSIKIVELSTIDAKAIRASNFKVVIDAVNGAGSTALPLLLEHLGCDVVKIFCEGNGKFDRGTEPLPDHLEKLKKSVIKNKADVGFAVDPDADRLAVVNEKGVPLGEEYTLVL

SEQ ID NO: 156041 - protein, 288 aa, Unknown
  Bacterial polypetide isolated from the Sargasso Sea
YDARWLFEEDIDIDGIVDLGKGLGTQIVNHLKKVNPRIIVGHDYRSYSEKIKKALIQGLMSTGCNVEDVGLSLSPMVYFAQFKLNSDAIAMVTASHNENGWTGVKMGIKKGLTHAPEEMSELKVITLNKKFIKGKGSVKNIDNFKKVYIEDLIKKNKINKKIKVVVACGNGTAGIFAPQILRGIGCEVIELDCNLNWSFPKYNPNPEDLKMLNAISKVVKHNKADIGFGFDGDGDRCGVIDNKGNEIFSDKIGLLIARNLSSKYKKSKFIVDVKSTGLYSKDKILKEN

SEQ ID NO: 156042 - protein, 276 aa, Unknown
  Bacterial polypetide isolated from the Sargasso Sea
LAAGTYFKNLKKIKQTAVIAKDTRLSGYTLEPALVSGLASAGMHVFTLGPLPTNGLAMLTKKMKANLGIMITASHNPFHDNGLKLFGPDGLKLSDQIEKKIEKLIDSKIVKNLTLPKNLGRVKRLEDANDKYIKILRKNFPKNFSLRGIKIAIDCANGAGYKSAPKLFKSLGAKVYDIGVSPNGLNINDKCGSTFPKKIKNLVSKKNVDIGISLDGDADRIIICDENAKIIDGDQIIAMLASRWKRKKILKGGVVGTLMSNLGLEIFFKKNNIKFL

SEQ ID NO: 156043 - protein, 282 aa, Unknown
  Bacterial polypetide isolated from the Sargasso Sea
VVDCGNGAAGIIAPELLRAVGCEVIEIFCDVDGNFPNHHPDPGKEKNLVDLIEKVKEVSADVGVAFDGDGDRLGAITSSGRLIYPDQMMMLFSKKILSNNGTETIVFDVKCSDFLPQIIKENDGIPFMSPTGHFHIKNNIKKYNAVLGGEMSGHIFFNDIWHGFDDGHYSAIRLLDIMNETGSSLDDLLDSLPVSYSTPELNIDVPEEKKFKIIEDFIENASIDGKKDFTDGLRASFENGWALLRASNTTPKLVLRFEANSQESLEKIQKNFLEELKKFLPK

SEQ ID NO: 156044 - protein, 296 aa, Unknown
  Bacterial polypetide isolated from the Sargasso Sea
GIRGAVNSKHINGDMFFKFGLASGTYFKSQKKRKQTAIIAKDTRLSGYTLEPALVSGLASAGMHVYTLGPLPTNGLAMLTKKMKANMGIMITASHNPHFDNGLKLFGPDGMKLSDKIEKKIESLIDEKISKNLSYSEKLGRVKRLETGTKNYIKILKKNFTKEFNLRGLRIVIDCANGAGYKAGPELLKSLGAKVIATGIKPNGLNINKKCGSTFPRNIRSAVKKYKAHIGISLDGDADRIIMCDEKSNIIDGDQIIAALATRWKNKKMLKGGVVGTLMSNYGLEKYFKSIGIKFL

SEQ ID NO: 156045 - protein, 285 aa, Unknown
  Bacterial polypetide isolated from the Sargasso Sea
MEQGNNYTIQNFDKEVLREYDIRGVVGDNINENTAYTIGRTFGYTVKSKLESHTIATGYDGRLTSPILHKALCEGLKDSGIKVINIGMGPTPMTYFAHYYLNADAVIMVTGSHNPSEYNGFKMVFNKSSFFSENIQNLQKLIDDNKLELLEGQIINKDIIHEYIKRNLLNISLKRKMKIAWDPGNGAMGKVTRAITEKLYNSENIIINEEVDGNFPNHHPDPTVPKNMVQLIKTVIENDCDIGLAFDGDGDRLGVIDNLGNIVWADQYMLLLCSEITNLYENPKL

SEQ ID NO: 156046 - protein, 346 aa, Unknown
  Bacterial polypetide isolated from the Sargasso Sea
MEIENFDKEVLREYDIRGVVGNNINQNTAYTIGRTFAYTVINRLKSNIIATGYDGRLTSPDLHKALCEGLKDSGAKVINIGMGPTPMTYFAHYYLNADAAIMVTGSHNPSEYNGFKMVLNKHSFYAEDIQSLQKLIDQNDLKLVEGEIINEDIKKDYNERLLQNINLNKKIKIAWDIGNGAMGAVIKEVTNNLNNSENILINEEVDGNFPNHHPDPTVPKNMEQLIKSVKDNKCDIGLAFDGDGDRLGVVDNLGNLVWADQYMLLLCTEIANLYDNPKIIMDVKCSKVFFDEAKKLNCDPIMSKTGHSPIKEKMKELKSPLSGEMSGHVCYADDFYGFDDALYVAL

SEQ ID NO: 156047 - protein, 369 aa, Unknown
  Bacterial polypetide isolated from the Sargasso Sea
MSTQLLDKVRYWSEHQCFDSETRDHAKRMLQENNQKEIEECFKNVLEFGTGGLRGPMGIGTNRMNRYTVMQATEGLARVIEAQGSGSKKGNSYSGVVIGYDSRNQSKQFAEAVAEVLCAHKIQVFLFSEIAPTPLVSCELIRRSAQAAVIITASHNPPSDNGYKVYWSHGGQIIPPVDVAIIQEVKKISRIEEIPYMELSEAKKTDLLQYIGEEADQYYINLVAPMALGSKDANKKLGVIYSPFHGTGGRMVPKLLQLRNFERLKTVSEQMVPNGDFPTLPSPNPEDPKAFGLALEKANDDDDMILTNDPDADRLGVMIRGKNRNWQWLNGNLIGVLLLDQMLSSLQKTGGLPTNGVLVTTIVTSPINE

SEQ ID NO: 156048 - protein, 242 aa, Unknown
  Bacterial polypetide isolated from the Sargasso Sea
MQNHNYNKSKIVEITNSIFREYDIRGVYPKEINEEAISHIAKAISIKCEQENIKEICVGRDGRISGQSLLETLSDSLSKYGLKVENIGLVTTPLLYFAAKKSDHKSGIMITGSHNPKNYNGIKLVINDNPVSGSEILKLISSKKEISINPGEIIYKDIKDDYISEVVGNIKINSNRKIKIVIDCGNGAAGCIAPALFKKLGCEVIELFSEIDGNFPNHHPDPGKLENLKDLITAVTSSNADL

SEQ ID NO: 156049 - protein, 394 aa, Unknown
  Bacterial polypetide isolated from the Sargasso Sea
TRISGYMLEAALQAGFLSVGMNVRLLGPLPTPGVAYLTKSFRNQCGIVISASHNNYQDNGIKIFDNSGVKIDRKIEMMIENILSEKITSLPSVEIGKAKRFDESGSRYVEFCKSTVPDDISFTDLRIVLDCANGASYKVSPDVFRELGAETIVVGDQPDGFNINQDCGSTNPELVQKLVKEHRADFGVSLDGDADRVTIVDRESNILDGDDILYILGFANPNRLGPWSGIVGTQMSNVGLEDGLNKLGYSFKRADVGDKYVSDLLLKEGWLLGGEPSGHIICRDLVSTGDGTIAALKTISSLVMLDKDPKDVLSNFNKIPQINESISVKNKDIVSDAEVKIAINDIKSDLTINRILVRPSGTENKIRIMIESENKKTAKKYTNDLIKLFESKTP

SEQ ID NO: 156050 - protein, 345 aa, Unknown
  Bacterial polypetide isolated from the Sargasso Sea
VLNKHSFFSDEIKNLQTLINQNEITSNQGSIHKKSIVQNYISRILHNININKHIKVAWDTGNGAMGSVINQITSQLINTENIIINAEVDGNFPNHHPDPTVPKNMEQLINTVLENKCDIGLAFDGDGDRLGVIDNKGNIVWADQYMLILCSEISKLYKNPKIIMDVKCSKVFFDEAIKMNCDPIMSKTGHSPIKEKMKELSSPLSGEMSGHVCYSDDFFGYDDAMYVGLRLLRILGNTKQSLSELIDVFPKTFSTPETRFDVEEARKFIIIDEVKDRLRNIEGKIIDIDGVRVETKDGWFLMRASNTQNQLTCRAEAISNDGLLSLLSIIEEQLHLSGVSYKFKI

SEQ ID NO: 156051 - protein, 462 aa, Unknown
  Bacterial polypetide isolated from the Sargasso Sea
MEWPVHCFKAYDIRGLSGEELTDSFALRLGQAFATYLECDAVAVGRDIRESSPGFASNLIKGLVSSGVRVLDLGIVSTGCLYHACWTLPVNGGIMVTASHLPMPTHNGFKMCRGTLPLAGEEIQELKEVFLAGNFKTGDGEYVDHPHEDAYLEAIVESSGKLARPVKVAVDCGNAVPGPAMSKLLDMIGAEHIDLYCDWDNTEPNHGADPTREYNMVDLAKAVVDNGCELGLGSDGDGDRIGAVDENGDFVYPDRLIALMADDVVGSEEGKDLLIYDVKCSMNVEKAIIAAGGKPMMAKTGHSFMKRVLAKHPNSLMAGEMSGHIFMSDRGWYGFDCSLYNAARILELWSRRNTKFSSELNRLAPNLPTTGEVKVPCAEADKLPTVAAITEAFADYDCSTIDGVRVRFEKDGQQSGWYLARKSNTEEILVMRVEANDQETLDKILKMIEQRVSPIIDISKLL

SEQ ID NO: 156052 - protein, 309 aa, Unknown
  Bacterial polypetide isolated from the Sargasso Sea
MQASSPTPALAHGIVGRKVDLGVMITASHNPSGDNGFKIFSGKGEKLAIEQERLIESRIELSALPEDGARPPRDSETGKAYLDYVKGVFPDGFLEGRKVVADMANGATSGTSIQVLSHYGAEVFPLHQGEGAINENAGSEHPRLMQAKVSEVGAQLGIAYDGDGDRAVFCDAGGGLIHGDKILGLLALDAQRFSSLDGTALVATEHSNSGLEESLRIEGLALHRAKVGDRNVAEMMRREGCNLGGESSGHVVSSNYLPTGDGLYTSLLVAYAMVRNSKSLKELSGAISLWPSRVGAFPVRRKVPIEDEP

SEQ ID NO: 156053 - protein, 468 aa, Unknown
  Bacterial polypetide isolated from the Sargasso Sea
MEQEHNYTIQNFDQEVLREYDIRGVVGDNINENTAYTIGRTFGYIVKSKLESNTIATGYDGRLTSPKLHKALCEGLKDSGSKVLNIGMGPTPMTYFAHYHLDTDAVIMVTGSHNPSEYNGFKMVLNKTSFFAEDIQSLQKLIDYNKIELGKGQIINQDITAQYIERNLLNINLKKKLKIAWDPGNGAMGKVTRAITEKLHNSENIIINEEVDGNFPNHHPDPTVPKNMVQLINTVIENDCDIGLGFDGDGDRLGVIDNLGNIVWADQYMLLLCSEIANMYQNPKIIMDIKCSKVFFDEAKKINCDPIMSRTGHSPIKEKMKELNSPLSGEMSGHICYGDDFYGYDDAMYVGLRLLRILSNESKPLYDLINVYPKTFSTPETRFDVDESRKFIIIDEVKERLKKEDKKIIDIDGVRVENEDGWFLMRASNTQNQLTCRAESISEKGLHKLIGIIENQLSLSGISYKFTI

SEQ ID NO: 156054 - protein, 380 aa, Unknown
  Bacterial polypetide isolated from the Sargasso Sea
MAQEHNYTIQKFDKEVLREYDIRGVVGDNINENTAYTIGRTFGYIVKSKLESNTIATGYDGRITSPKLHNALCEGLKDSGSKVLNIGMGPTPMTYFAHYHLDTDAVIMVTGSHNPSEYNGFKMVLNKTSFFAEDIQSLQKLIDYNKIELEEGQIINQDITTEYIKRNLLNISLKKKLKIAWDPGNGAMGKVTRAITENLNNSENIIINEEVDGNFPNHHPDPTVPKNMVQLIKTVIENDCDVGLAFDGDGDRLGVIDNLGNIVWADQYMLLLCSEIAHLYENPKIIMDVKCSKVFFDEAKKINCDPVMSRTGHSPIKEKMKELNSPLSGEMSGHICYGDDFYGYDDAMYVGLRLLRILSNESKPLNDLINIYPKTFFNTR

SEQ ID NO: 156055 - protein, 353 aa, Unknown
  Bacterial polypetide isolated from the Sargasso Sea
MKITHQPPSFDPVIFRAYDIRGIFGEQLTSEIVFEIAKAIGTMADKEHQKEFIVGHDGRVSSPELNKALIEGLISTGRDVIDIGIVPTPVTYFASHHFAANNCVMVTGSHNAAEYNGLKTVIGGNSLFGERINSLKKQILSGEYTAGEGSLKNADVSKDYIDRIVSDINIPKNPSLKIVVDCGNGSVGNIATELFKVLNCETIIMYSEIDGNFPNHHPDPSQPENLEDLINRVKKENADIGFAFDGDGDRLGVVDAKGKIIWPDLQLMLLAKDILMRNKGAHIIFDVKCSRHLKREIDLCDGRALMWKTGHSYIKQKMNEVNAPLAGEMSGHIFFKERWYGFDDALYAATRFI

SEQ ID NO: 156056 - protein, 241 aa, Unknown
  Bacterial polypetide isolated from the Sargasso Sea
MTKEISCFKAYDVRGRIPSELNEDVAYRIGVGIASYFSAKSIVVGYDVRPSSIEILNALTKGINSQGAKVYSIGLCGTEEIYFATNHLETDAGVMITASHNPADYNGLKIVGKGAKPVSMDSGLGEIKKIADQSESNLLAESHIEVVDIKAAYIEKLLKFIDSDAIKPMHIVTNAGNGCAGPILDLLEERLPLKFTKIQNDPDGTFPNGIPNPLLPENRDVTSKTVIEHSADLGIAWDGDF

SEQ ID NO: 156057 - protein, 444 aa, Unknown
  Bacterial polypetide isolated from the Sargasso Sea
MIIRSISGVRGITKSSLTPETIKLYAHAFHDLVPDGLIYLGRDARQSGEELLEIFSAELIEIGRDVVLCNIVPTPTIQFMVERSEAAGGIIVTASHNPEEWNGIKFVREDGTFFLPNECNELFEKVDKEVVYQKAKKQGMLFPDQNSILKHVIHVIELSCVDTKRIKNCKFKVAVDSINGAGSKALPLLLEYLGCELIPIHCDGTGKFDRGAEPLPENLGDLSKAVLENNADIGFAIDPDADRLAIVNDHGIPIGEEYTLVIAAESYLKQLKNPEDIVTNLSTTLALDKIAEKYNTKVIRTAVGEINVVKKMIEINSNFGGEGNGGVILKEAHLGRDSLVAAAMVLNRLSQEENLTVSQLHDSLPHYSIIKDKIDLVKVDETVLLKKAKEAYSDSTINSIDGIKFIWDDRWVHLRKSNTEPIMRIYAEAPSKKEATHLIKQIKN

SEQ ID NO: 156058 - protein, 447 aa, Unknown
  Bacterial polypetide isolated from the Sargasso Sea
MLIRSISGIRGLVNSDLTLKLCRDFAIAINQLIPDGVIMICRDTRPSGEEILENVSDQLRKCGRNVISLGIAPTPTIQYMVQTTEAQGGIVITASHNPIEWNGFKFIRNDGTFFRPNECQKLFSKMDKTNNLNKKDELGEILQDVNAVQKHIINIIGLSCINLSQIRKKKFIVVVDAVNGAGYDAVPQLLETLNCEVIRINCDPSGDFVRGPEPLANNLEMLSDTVKKTNADIGLALDPDADRLAVVSNMGKPIGDEYTLALAADGYIRQKKSKETFVINLSTSMILEKIANKNDCKVISTAVGEINVVEKMIEIGAELGGEGNGGVILKESHLGRDSLVACALVLNRLAQTDESIHDIFLGLPQFVIVKDKIELSSNDLDDLISYSKNIFEDAKINIEDGTKFIWKDKWIHLRKSNTEPIVRIYAEAKDKTIAQDLIKKVKLFIDK

SEQ ID NO: 156059 - protein, 228 aa, Unknown
  Bacterial polypetide isolated from the Sargasso Sea
MTKNKLDLIFKSYDIRGVYGDSIDQDIAYKIGKAFAEFVPDDTIIVGHDGRVSNIEMLDAFTSGIKSINKEIIYVGLAPTDTVYSLSGLLKKPGAIITASHNPKNYNGLKLCNAGAIPIGENSGLMDIKKLADRNVEIRIEKFKINDKHLGNEYYEHLKNLVSPESISQKLNFGIDGGNGVFGAIFDTLNNIYKFNVKSIYLEVDGNFPNHPADPSDESNLTDLKNLV

SEQ ID NO: 156060 - protein, 385 aa, Unknown
  Bacterial polypetide isolated from the Sargasso Sea
MLIRSISGIRGLVNEDLKENAIINYANALNEYLPEGVIYAGRDSRPSGEEIAQLMIDELIRLGRTIIYCGIVPTPTVQYMVHISEAVGGFIITASHNPIEWNGIKFLRGDSTFFHKEDCEKLFEIADNFSSMKKYPDEKGMLWEEKNAIYKHSVKCSSLKCVDLDTIRSKKFKVVIDSVNGAGADALPSMLDLLGCEIIELDCEPTGVFNRGTEPLPENLKGLSKEIINNKADVGFAVDPDADRLAVVDEKGNPLGEEYTLVLAADGYINTIGAKDEIFISNLSTSLALDKLALSKNCQVKRAAVGEINVVNKMNEVGSNFGGEGNGGVILRECHLGRDSLVAATMVLNRMAQSISPISEIYNSLPQFEIVKDKVSVEGINSDDF

SEQ ID NO: 156061 - protein, 464 aa, Unknown
  Bacterial polypetide isolated from the Sargasso Sea
MISQSIFKAYDIRGVVGKTLDTDTARAIGRAFGSEVRAQGGDAVVVARDGRLSGPDLVGALADGLRAAGVDVVDVGMVPTPVGYFAANVPLALKGGERRVDSCIVVTGSHNPPDYNGFKMVLRGAAIYGEQIQALYRRIVDERFETGSGSYEQIDVADQYIARIVGDIKPARPMKLVVDAGNGVAGPLATRLFKALGCELVERFTDIDGTFPNHHPDPAHPENLQDVIQALKDTDAEIGFAFDGDGDRLGVVTKDGKIIYPDRQLMLFAEEVLSRNPGAQIIYDVKCTRHLAQWVKSKGGEPLMWKTGHSLVKAKLRETGAPLAGEMSGHVFFKDRWYGFDDGLYTGARLLEILAKTADPSALLNGLPDAMSTPELQLWLDEGENFRLIDKLQKEAKFDGAEEVVTIDGLRVEYPDGFGLARSSNTTPVVVMRFESETQEGLKRIQEDFRRVLTAAKPDVKLPF

SEQ ID NO: 156062 - protein, 350 aa, Unknown
  Bacterial polypetide isolated from the Sargasso Sea
MDINYSNPVNFKLKDYDEKPEIYNLGFREYDARWLYPEQINLAGVQKIGLGLGRLIKQSDNNGKISVGHDFRSYSEEIKEALIGGLIASGVDVYDVGLTISPGAYFSQYFLDCDNVAMVTASHNPNGWTGIKMGNEKTLTFGPDLINNLKKLIEEKDNTSNKNGKYIFRNINNEYLTDLISKYKINRKIKAVVACGNGTAGLFAPKALSLLGVEVIPLHCDLDSSFPNYNPNPEDLIMLKDLGKNVLENNADIGFAFDGDGDRVGVVDNKGQEIFADKIGLLIARNLSLENSNSKFVVDVKSTSLFLTDKILKKNNSEIVLWKTGHSYIKRKTTEINATAGFERSGHFFF

SEQ ID NO: 156063 - protein, 441 aa, Unknown
  Bacterial polypetide isolated from the Sargasso Sea
MNLKFGTDGIRGPVETKVTPEACLRIGHAAGIVFKELGWDTVLIGKDTRVSGYMLEAALQAGFLSVGMNVRLLGPLPTPGVAYLTKSFRNQCGVVISASHNDYQDNGIKIFDNSGVKIDRKIEMMIENILSDKITSLPSVEIGKAKRFDESGPRYVEFCKSTVPEDISFSNLRIVLDCANGASYKVTPDVFHELGAEIIVVGDQPDGYNINQECGSTNPELVQRLVKEHRADFGVSLDGDADRVTIVDRESNILDGDDILYILGFANPNRLGPWSGIVGTQMSNVGLEDGLNKLGYSFKRADVGDKYVSDLLSKEGWLLGGEPSGHIICRDLVSTGDGTIAALKTISSLVMLEKDPKDVLSNYKKIPQINESISVINKDIISDAEVKTAINDIKSDLTINRILVRPSGTENKIRIMIESENKKTAKKYTNDLIKLFESKIA

SEQ ID NO: 156064 - protein, 242 aa, Unknown
  Bacterial polypetide isolated from the Sargasso Sea
MKKEISCFKAYDVRGRIPSELNEDVAYRIGAGVASYFAAESVVVGYDVRPSSIDILNALTKGINSKGAKVYSIGLCGTEEIYFATNHLNTDAGVMITASHNPADYNGLKIVGKGAKPVSMDSGLDEIKNIAEASESKTDNEPVIEIIDVKNEYIDKLIQFIDPKKIKPMKIVTNSGNGCAGPILDMLEDKLPIEFIKIQNEPDGSFPNGIPNPLLPENREITSKAVIEHSADLGIAWDGDFD

SEQ ID NO: 156065 - protein, 295 aa, Unknown
  Bacterial polypetide isolated from the Sargasso Sea
MKLFGTDGIRSEYNNFPMIDKDLIKIGYCFAKSMFGNNYGRIFIGNDGRESSTDILNSLNTGISQQGSDVISVGLLPTPALSSCIYLNNNSKTAGIQITASHNPYFHNGLKFFDNKGQKIDHNMEQLIERYFDDHKTILNTNLNGKKIEHNLTDFQNIYISYIDKYLLSKALNKNTRKLNILVDCANGAASHLVDKIFKNSQINLIPIFNEPNGSNINLNCGATDLTALKDFISSFNSIQAKSTKKEKESILKIDLGVALDGDADRVIFVDEKGNVIDGDKVLFLLSQYYRDKYD

SEQ ID NO: 156066 - protein, 408 aa, Unknown
  Bacterial polypetide isolated from the Sargasso Sea
VDVYDIGLTISPGAYFSQYFLDCDNVAMVTASHNPNGWTGIKMGNEKTLTFGPDLINNLKKFIEEKDSTSNKPGKYNFRNINNEYLTDLISKYKINRKIKAVVACGNGTAGLFAPRALSLLGVEVIPLHCDLDNSFPNYNPNPEDLIMLKDLGKHVLENNADIGFAFDGDGDRVGVVDNNGKEIFADKIGLLIARNLCLENSNSKFVVDVKSTSLFLTDEILKMNNSEIVLWKTGHSYIKRKTTEINATAGFERSGHFFFNNPIGRGYDDGILSALEILKILDNNKNRKLNDLYNELPITFSSPTMSPKCPEEKKYDIVDKIKNIFQNKMENNQPLAGQKILSILTVNGVRIHLEDGSWGLVRASSNSPNLVVVCESTVSEERMKEVFHGLNSEIVKFEEIGDYDQKI

SEQ ID NO: 156067 - protein, 447 aa, Unknown
  Bacterial polypetide isolated from the Sargasso Sea
MLIRSISGIRGLISSHLTKESCINFANAIDQIIPDGVIMLGRDTRPSGEELLENVSTQLQKCGRTVIVLGIVPTPTIQYMVQNTEAQGGIVITASHNPIEWNGFKFIRNDGTFFRPDECDNLFSIMDENNFSNHKNDMGMIMQDVNAVQKHIINVLGLSCIDINKIREKKFSVVVDAVNGAGYDALPKLLEALNCNVITINCNPSGDFVRGAEPLPKNLNMLSETVLKTKADIGLAVDPDADRLAVVSNEGMPIGEEYTLALAADGYIKHKQSEETFVINLSTSMVLEKIANQNNCKVIRTPVGEINVVEKMIEINAELGGEGNGGVILKESHFGRDSIVGCAMVLNRLSQTNESLHDIYVNLPQYTIVKDKIEISKDALGDLINHSKRIFDDVDVNIEDGIKFTWKNKWIHLRKSNTEPIVRIYAEAKDQETAQDLIDKVKSFMSE

SEQ ID NO: 156068 - protein, 454 aa, Unknown
  Bacterial polypetide isolated from the Sargasso Sea
MEISKSIFREYDIRGIYPTQINEQVVHKIAKAISKKCLDEGITEICIARDGRLSGEKLLSALENSLSNNGIDVINTGMTTTPLLYFAAKKSECKSGVMITGSHNPKNYNGIKLIINDKPVSGTEIYSLIDNTNGISRCKGKIATKDFRDEYISEIKKNIVVKEKLKVVIDCGNGASGCVAPRLYSELGCDVINLYTEIDGHFPNHHPDPGKPENLIDLIEKVKETDADLGLAFDGDGDRVGLVTGSGEIIFPDKIMMMLCKDILSSNKGKIIFDVKCTDSLPKLIKDNGGTPLMYPTGHFNIKNGINEHNPLLAGEMSGHIFFNDKWYGFDDGVYSGARIIELILKTKKSISSLNKELPVLYSTPELNVEVSDKKKFEIVKQFIANCSIEGEKIAIDGLRINFDDGWGLLRASNTTPMLVMRFEGDSKESLIKIKDKFINELSRIYPDIDINLN

SEQ ID NO: 156069 - protein, 411 aa, Unknown
  Bacterial polypetide isolated from the Sargasso Sea
MKKLFGTNGVRGVFSEDFTLEFVNDLVMSLAAYFKQGKILVGYDGRHSSPIVAKVVSSALNYSGLDCYMAGLVPTPCLEYATKKLGYDGGLMITASHNPPQYNGIKPVASDGVEISREDERKIEQIFDEKNWIKASTFGKSFEETNVISTYIDGIISLIDIDSIKAKKFKVCLDLGNGAQAVTAKKLCENLGCNVHTINEEIDGDFPGRGSEPTPQNLDELSKLVVDTNSNFGIAFDGDGDRSIFCDETGKILTGDSSALLLCDYLLQQYPNSQVVTCLNSGNIIENIVEKTNSHVVRTKVGSVEVSRRMVNDDALVGYEENGGFMFGNHNHVRDGAMTLALMLDLLSKSQSQLSQNIKNLPPSFTTKTKIECSLEKSKIVISELLKEFPDSNTSDGIKIQVDQDNWVMID

SEQ ID NO: 156070 - protein, 255 aa, Unknown
  Bacterial polypetide isolated from the Sargasso Sea
MKKLFGTNGVRGVFSEDFTLEFVNDLTMSLAAYFKKGKILVGYDGRHSSPIVAKIVSSALNYSGLDCYMAGLVPTPCLEYATKKLGYDGGLMITASHNPPQYNGIKPVASDGVEISRDDEKIIEKIYDDKNWIKGDSFGKTLEETNVVSTYLDGIISLVDTNSIKNKKFKVCLDLGNGTQSVTAKKLCEKLDCDVFTINEEIDGDFPGRGSEPTPQNLDNLSSLVVKTNSNLGIAFDGDGDRSIFCDENGKILTG

SEQ ID NO: 156071 - protein, 385 aa, Unknown
  Bacterial polypetide isolated from the Sargasso Sea
MKIENFDKEVLREYDIRGVVGENINQNTAYTIGRTFGYTVINRLKSNRIATGYDGRLTSPYLHQALCEGLKDAGAKVINIGMGPTPMTYFAHYHLETDAVIMVTGSHNPSEYNGFKMVLAKHSFYAEDIQSLQKLIDQNNLKLIEGEIINQDIKKDYTERLLQNINLNKKIKIAWDIGNGAMGAVIKEVTNNLNNSENILINEEVDGNFPNHHPDPTVPKNMEQLIKSVKENKCDIGLAFDGDGDRLGVVDNLGNLVWADQYMLLLCTEIANLYDNPKIIMDVKCSKVFFDEAKKLNCDPIMSKTGHSPIKEKMKELKSPLSGEMSGHVCYADDFYGYDDAMYVALRLLRILCNQEKSLNELINIYPKTYSTPETRFDVDEQKNF

SEQ ID NO: 156072 - protein, 441 aa, Unknown
  Bacterial polypetide isolated from the Sargasso Sea
MNLKFGTDGIRGPVETKVTPEACLRIGHAAGIVFKELGWDTVLIGKDTRVSGYMLEAALQAGFLSVGMNVRLLGPLPTPGVAYLTKSFRNQCGVVISASHNDYQDNGIKIFDNSGVKIDRKIEMMIENILSEKITSLPSVEIGKAKRFDESGPRYVEFCKSTVPDEISFGDLRIVLDCANGASYKVSPDVFRELGAETIVVGDQPDGFNINQDCGSTNPELVKKLVKEHRADFGVSLDGDADRVTIVDRESNILDGDDILYILGFANPNRLGPWSGIVGTQMSNVGLEDGLNKLGYSFKRADVGDKYVSDLLSKEGWLLGGEPSGHIICRDLVSTGDGTIAALKTISSLVMLEKDPKDVISNYNKIPQINESISVINKDIVSDAEVKTAINDIKSDLTINRILVRPSGTENKIRIMIESENKKTAKKYTNDLIKLFESKTP

SEQ ID NO: 156073 - protein, 363 aa, Unknown
  Bacterial polypetide isolated from the Sargasso Sea
MDINYSKPVNFVIKNYDEKAKIYNLGFREYDARWLYPEQINLAGVQKVGLGLGKLIKKSGNNNKISVGHDFRSYSEEIKEALIGGLIAAGIDVYDIGLTISPSAYFSQYFLNCDNVAMVTASHNPNGWTGIKMGNEKTLTFGPELINQLKKIIEEKDEISDKPGSYTFNNINEEYVSDLISGYQFKRKIKAVVACGNGTAGIFAPEVFNLLGIEVIPLHCDLDASFPNYNPNPEDLKMLKDIGKHVLAHKADIGFAFDGDGDRVGVVDNNGHEIFADKIGLLIARNLAKEVSNSKFVIDVKSTSLFSTDEILKKNNSEIIFWKTGHSYIKRKTSDINATAGFERSGHFFFSNPIGRGYDDGIL

SEQ ID NO: 156074 - protein, 447 aa, Unknown
  Bacterial polypetide isolated from the Sargasso Sea
MKKLFGTNGVRGVFSEDFTLEFVNDLVMSMAAYFKQGKILVGYDGRHSSPIVAKIVSSALNYSGLDCYIAGLVPTPCLEYATRKLGYDGGLMITASHNPPQYNGIKLVASDGVEISREDERKIEQIFDEKNWIKTETFGKSYEETSVISTYIDGITSVIDTDSIKAKKFKVCLDLGNGAQAVTAKKLCENLGCDVYAINEEIDGDFPGRGSEPTPQNLHELSKLVVDTNSNFGIAFDGDGDRSIFCDETGKILTGDSSALLLCDYLLQQYPNSQVVTCLNSGNIIENIVKKTNSHVVRTKVGSVEVSRKMVSDDALVGYEENGGFMFGNHNHVRDGAMTLALMLDLLSKSESHLSHNIKNLPPSFTTKTKIECSLEQSKLVISELLKEFPDSNISDGIKIQVDQDNWVMIRPSGTEPIIRIYGESNSQQNLDSLISNFVEKTKSILA

SEQ ID NO: 156075 - protein, 703 aa, Unknown
  Bacterial polypetide isolated from the Sargasso Sea
MISDSLPERLQGTDGIRGKIGLACDFPETGPLSVWIQKKILTEEFFELYTFSFCQNLIDSGWAELGDSIIVGWDTRDPKGIFSDAAIRGIRKSGLTAVSIGVQPTPCVALYQLSREAAGAVVLTASHNPSDQNGIKIFLGHTGLKLFPADDIRLTKTINSPDFKHLKKTPLQGDVVDEEVLARKFFKNVMLDSFNSWVSDQSLQKTSLVIDVANGAFIPLLEQMIQEFGGANLILCNTSLENGINHNCGVADLEGRHIVEAKELLQEPLCHAEALKRLLEEGRRKREQNSEGLTVGLVLDGDGDRCFMLVYDPQKDRIIIIDGDGLAILQLLWLKQNQKTREGQLYLNTVESSLEASRSALKVGCFVKQCAVGDKWILWDALLKAYQWKCNFFKNHINDPEFSGMLLDLENSFKNMEEKSSFDALELSLKIKNVDEYFQVRIQDPKILEKLSNESNAFSSSDFLIGNEESGHLLSLTRIPNKEGRMIPAYAGNGLKTGLNSLIALESLRPSDPRKLIEWLNEKFPRGYSRSLPVYHVKQELLEPQSLLRNELKGLIEQVLEANGHSIEWHHRSQEPNMLMGLSLKNHLPELCVFVRNSGTEDKLNLYFRSLSNNCEMLESVINLIYGFLLKNFKDPSKSSTQLEQYILKQLKENPLNLSEIQNSTKNDSAFQEIFRLMHSRQPLIDYINNRWELSQWGQLLVN

SEQ ID NO: 156076 - protein, 426 aa, Unknown
  Bacterial polypetide isolated from the Sargasso Sea
MSRSSKTQIEEIRALDHQEQNNIKADIFRAYDIRGIYPSDFNESTAYFIGVALGNKIQGQKKAVVAMDGRLSGPNIKTTLINGLQAAGVEVTDCGMIPTPLLYFATHSLEIPNGFMVTGSHNPRNYNGIKMIINGSPLFDKDIYALRDWIQNNPISVVDSQGPIRKYEMIVDDYIKRVKRDTNISTSKKIVVDCMNGVTGAVVDEILKSFHINADYINSKVDGNFPNCSPDPTKEVNLKNLKSKVSSTNADYGVAFDGDGDRTVIIRKDGSVLWPDELMILFSKSVLMQHAKAKIVYDVKCTRNLKINIINDGGIPLESRTGHSYIKQTIKKESAKLGGEMSGHIFFNDKWYGFDDGIYVFLRFLEILSQENHLLKALEDLPKTHTTPEIDIEFKGNSHFKFIEEFIKLSRFDEYNVSLIDGIKSC

SEQ ID NO: 156077 - protein, 258 aa, Unknown
  Bacterial polypetide isolated from the Sargasso Sea
VDGNFPNLHPDPTVPKNMEQLIKSVKDNKCDIGLAFDGDGDRLGVVDNLGNLVWADQYMLLLCTEIANLYDNPKIIMDVKCSKVFFDEAKKLNCDPIMSKTGHSPIKEKMKELKSPLSGEMSGHVCYADDFYGYDDAMYVALRLLRILCNQEKSLNELINIYPKTYSTPETRFDVDETKKFLIIEEIKERIKNTEGKIIDIDGIRVENDDGWFLMRASNTQNQLTCRAESTSQEGLKSLIAIIENQLSLSGVNYKFIV

SEQ ID NO: 156078 - protein, 275 aa, Unknown
  Bacterial polypetide isolated from the Sargasso Sea
MRCLGALVITASHNPYNWLGLKIKSFNGCSVDESFTSEIEKRLMLGNSIEKIEDANQLVDIKNFHLDRIKSLFDIDFISNRLKKMKLKIFVDSMHGSAANCMADIFASNDSEVISEIRKDSDPFFGGKPPEPLLNYVDDLNQILIKNSTNEVKTLGIIFDGDGDRIAAIDEKGRYSSTQDLLPYFIHYLGEIKNNSYPVLKTVSGSDIIKNISESQNRDVFELPVGFKYIAEKMIKEKIFIGGEESGGVGFGDFMPERDALYAAMVLLNGIASKS

SEQ ID NO: 156079 - protein, 467 aa, Unknown
  Bacterial polypetide isolated from the Sargasso Sea
MVNNFFIEKFNPEVLREYDIRGIVEKDINQNTAYTIGRIFGHIVSNRFNEKTIVVGYDGRNTSPNLQEALCEGLIESGSNVKNIGLCPTPMTYFAHHFLNTNAAIMVTGSHNPSEYNGFKMVLDKNPFYAKDIQNFKNLTDDNKLIKGKGRLESINIKNHYIDRNLENINFKKKLKVAWDIGNGSMGVVMDAITLKMKNIENILINKEVDGNFPNHHPDPTVPKNMIQLIETVKENNCDVGLAFDGDGDRLGVVDNKGRIIWADQYMLLLAKEISSIYENPKIIMDVKCSKVFFDEVRKFNCEPIMYQTGHSPIKEKMKELNSPLSGEMSGHVCYGDDFYGYDDALYVALRLLRILSQEKETLFELINQFPQTISTPETRFDVDEIRKFEIIQEIKERLKNNKEEIIDIDGVRVQNSLGWFLIRASNTQNQLTCRAEALNKADLKTLTNLIEDQLSLSGVNFKFNHE

SEQ ID NO: 156080 - protein, 311 aa, Unknown
  Bacterial polypetide isolated from the Sargasso Sea
MSATKLNSQILREYDIRGIVNKTITIEDAVVVGKSFGTIVAEKGGKSVCIGYDGRISSPALEKAVVKGLQSCGLSVIRIGVGPTPMLYFAVHDLRADAGIMVTGSHNPPEYNGFKMMLNRHPFYGDDILKIGKVAASGSFFIGDGNAEKVLVQTRYVARLRADYGGGRPLKIAWDAGNGSAGPVMCELCSALPGNHILINETIDGTFPSHHPDPTIPECLEQLQGIVKSEGCDLGIAFDGDGDRIGAIDSEGQILWGDQLMMLFATDLLQEFPGSTIIADVKASQGLFDTISQLGGTPLMWRTGHSLIKAK

SEQ ID NO: 156081 - protein, 317 aa, Unknown
  Bacterial polypetide isolated from the Sargasso Sea
MKADKLDKIKFGTDGWRGIIGFDFNLSNLSRVVVAACQELHYQYYKEVHSKKIIIGFDRRFMACEFAKQIVPFVRGCGFEPILSDSFVTTPSCSFYAKEVGCLGALVITASHNPYNWLGLKIKSFNGCSVDESFTSEVEKRLMLGNSIEKIDGVNQLVDIKKFHLDRIKSLFDIDYISNRLKKMKLRIFVDSMHGSAANCMAEIFASNDLEVISEIRKDADPFFGGKPPEPLLNYADVLNQTLMKNSTNEMKTLGIIFDGDGDRIAAIDEKGRYSSTQDLLPYFIKYLGEIENNSYPVLKTVSGSDIIKNISESQNK

SEQ ID NO: 156082 - protein, 344 aa, Unknown
  Bacterial polypetide isolated from the Sargasso Sea
MDYIKKAKFWSENPCFDIETQKEAKKLLKDQNRDLCKDSFGSILEFGTGGLRGIMGVGTNRVNRYTIQTATEGVARIIMKNNFKPDSRKEVIIGYDTRNHSLEFAKVASEVLVGHEIHVFLFAEPSPTPLVSCELLRRNAVAGIIITASHNPPEYNGYKVYWKNGGQIVPPIEGQIINQIRNLKRIDKISVIPFEKGLKDMKIEWIHKDADEFYLNTVSNLSLGNSENNKNLGVVFTPLHGTGGRLVPELLKRNCFEKVKTIKEQMIPDGEFSTLSSPNPEDIGAFKMAVSQASDMDDLILANDPDADRLGVMIRDSEKKWRWLTGNQIGVLILDYILSNLSKK

SEQ ID NO: 156083 - protein, 364 aa, Unknown
  Bacterial polypetide isolated from the Sargasso Sea
AAIMVTGSHNPSEYNGFKMVLNKHSFYSEDIQSLQKLIDQNDLKFIEGEITNEDIKIDYTKRLLQNINLNKKIKIAWDIGNGAMGTVIKEVTNNLNNSENILINDEVDGNFPNHHPDPTVPKNMEQLIKSVKDNSCDIGLAFDGDGDRLGVVDNLGNLVWADQYMLLLCTEIANLYDNPKIIMDVKCSKVFFDEAKKLNCDPIMSKTGHSPIKEKMKELKSPLSGEMSGHVCYADDFYGYDDAMYVALRLLRILCNQEKSLNELINIYPKTYSTPETRFDVDETKKFLIIEEIKERIKNTEGEIIDIDGIRVENDYGWFLMRASNTQNQLTCRAESTSQEGLKSLIAIIENQLSLSGVNYKFTV

SEQ ID NO: 156084 - protein, 279 aa, Unknown
  Bacterial polypetide isolated from the Sargasso Sea
GAASKVAKQIYEELGCKVTSLFDELDGNFPNHHPDPSKEENMEDLKNVVLEKSLDLGIAFDGDADRLGIVTKKGSIIDADIQMLAFSKEILKQNQGGKIVFDVKCSKLLSDGIEELGGVPLINPTGHSLIKKRLLEEGALLGGEMSGHIFFNDRWPGFDDAIYAGARMLEIVSEADNSDLLDNLPKSCSTPEINISIGDKEKFNVVEEFKKRMDFKEAKIIDIDGIRVEFKSGWGLLRPSNTSPVLVLRFEATSNDEIEVIKEKFKKILYSINPNLGEF

SEQ ID NO: 156085 - protein, 301 aa, Unknown
  Bacterial polypetide isolated from the Sargasso Sea
MQIRKSIFREYDIRGIYPEEINEKVIDQIAKAISIKCEQENVSEVCLGRDGRLSGESLLSSLSSSLSNYGIDVEVIGLSTTPLLYFAAKKNKNKSGVMITGSHNPKNYNGVKLIINDKPVSGSEIYELIYKKKDFSDIPGKVNFIDVKDKYISEVLRNINIEGKRKIKVVIDCGNGAAGCIAPRLYNDLGCEVVELYSEVDGSFPNHHPDPGKIENLKELVSTVKSTKADLGLAFDGDGDRVGLVTDKGEVVFPDKILMMMSKEILKKDKGSIIFDVKCTNSLPEIIKKYGGMPIMSATGH

SEQ ID NO: 156086 - protein, 446 aa, Unknown
  Bacterial polypetide isolated from the Sargasso Sea
MLIRSISGIRGLVNEDLGEKTIIKYAHALHDYLQDGVIYVGRDSRPSGEEIVEIMINELIKLGRTIMYCGIVPTPTIQYMVHTTEAIGGVIITASHNPIEWNGIKFVKEDSTFFNLYDCENLFEYADNFSNENIEISEQGMLWEEKNAIHKHTINCASLKCIDLDKIRDRKFKVVIDSVNGAGSDALPAMLGLLGCEVIKINCDSSGVFTRGTEPLPENLSELSKNVISHNADVGFAVDPDADRLAVVDEKGIPLGEEYTLVLAAEGYIKSVKTEETFVTNLSTSLALDKLAIANKCSVERAAVGEINVVNKMNEIDAKFGGEGNGGVILRECHLGRDSLVAVTMVLNRMSQSKNTVSSIYNSLPQYKIVKDRINIEGLDKKKLLSKVNELFNGVENNTIDGLKFIWDDKWIHLRSSNTEPIMRIYAEAASENVAKELVIKVKNLL

SEQ ID NO: 156087 - protein, 375 aa, Unknown
  Bacterial polypetide isolated from the Sargasso Sea
VVPTPTVQFMVHNTEAVGGFIVTASHNPVEWNGIKFLRPDSTFFHPEECQNLFNMVDQNVELKKSKEAGIVWPEQNAIQKHVIACASISCIDLNRIQRRKFKVVIDAVNGAGAIALPNMLEALGCEVIELNCEPDGNFTRGTEPLPENLNDLSAMVKNHNADAGFAVDPDADRLAVVNEHGEPLGEEYTLVLAADGYINETGKKERFVVNLSTSLAIEKLAHKNGSTVERSAVGEINVVNKMNEVNSNLGGEGNGGVILKECHLGRDSMVGATMVLNRMSQTENTLSEIHRTLPIFKIVKDKISVDTIDSDELIDKVSNLFNDADKNDLDGIKFTWDDKWVHLRRSNTEPIMRIYAEAPSEDQALELVSKIRSII

SEQ ID NO: 156088 - protein, 260 aa, Unknown
  Bacterial polypetide isolated from the Sargasso Sea
MNENIFRAYDVRGNSSHDLTDDVVKIIGSVLGEYVKEFGDNSIYLGHDSRLSKDRIKKSLISGIHSVGVDVNYLGLVPTPMVYYATKKGISNHGVMITGSHNPKEDNGLKIVIDGNSISGLEIKKRVKNYKYDKDLTAQTFSQDLTNDYLNEIKRNAPIGKPMKVILDAGNGAAGPLAKRVFENIGIDIISINEEPDGNFPNHHPDPGKEKNLVQLKEEIIRNDADIGFAFDGDGDRVGLVAKSGNQVLSDHIIMLLSKY

SEQ ID NO: 156089 - protein, 352 aa, Unknown
  Bacterial polypetide isolated from the Sargasso Sea
FEHEYNIFRAYDIRGHAEKDLNSSTIEKIGYALGLKIKENNSNSVYIGYDSRLSCEEIKSNLIRGINAAGVKVLNLGLVPTPIVYYATKVGDTSNGIMITGSHNPKDDNGLKMVINDNAISGIEIKESVENLDEIPTNDIEMVENSDLEKKYIEEVANKVKINKKLKVVLDAGNGAAGILAEKMFTALGHEVISINKEPDGNFPNHHPDPSKEKNLIEIKREIDLTNADIGFAFDGDGDRIGLITNKGESVIADQIIMLMAEFYLGQVKGPIVFDVKCSNQLPLLIENFGGEPVMEKTGHFNIKKRIRQTNAVMGGEMSGHIFINHDWYGFDDAIFSAVILTKIITDLDISI

SEQ ID NO: 156090 - protein, 234 aa, Unknown
  Bacterial polypetide isolated from the Sargasso Sea
SEKIIIGHDGRISNKEMLNAVASGVMKKNKSILYIGTVPTDVVYSLSGMENLPGIVITASHNPKEWTGLKFCNKGATPIGIETGLLDIKEKVENLDIDIEIQTEFQEEDIVDAYIEHLNSLVNPEDVKNTISFIIDAGNGALGSVIEKLHNSYNMNFDELYMEVDGNFPNHPADPSDPANLRELKELVISKNKEFGVAFDGDADRAVFLDDKGNLISGSLMTALVSDWLNEKKR

SEQ ID NO: 156091 - protein, 299 aa, Unknown
  Bacterial polypetide isolated from the Sargasso Sea
KVFKIGLCPTPQLYFGVHHLRADGGIMITGSHNPPDYNGFKMMLGHGPFFGQDIKDMAKTPYNRTKIIEGGQQIQLDIQDAYLHRVLEGLRLDTKLSIVWDCGNGVAGPVIDKLTKSLSGEHEVLFADVDGNFPNHHPDPTIEKNLETLITRVKKRNADLGIAFDGDGDRIGVIDDLGKILWGDQLLAILAEDVLLEQPGSTIIGDVKASQGLFDRITALGGKPLMWKTGHSLIKNKMKEVNAPLAGEMSGHIFFSDRYFGFDDAIYAAIRLIDVVNRQGKKLSTIRSALPSVINTPEL

SEQ ID NO: 156092 - protein, 299 aa, Unknown
  Bacterial polypetide isolated from the Sargasso Sea
IGLIAKAIAIKCDQENIKEICIGRDGRLSGESLLKSLEKSLSYYGINIQNIGLVTTPLLYYAAKKNKCKSGVMITGSHNPKNYNGIKLIINDKPVSGKEIYNLLYRNKDKSKVPGKIEFLDIKSNYVEEVKNNIQIDDNVRLKVVIDCGNGAAGCIAPKLFNALGCEVIELFTEVDGNFPNHHPDPGKLENLQDLIKKVKSTKADLGLAFDGDGDRVGLVTDKGDVIYPDKILMIFSKEILNKNKGSIIFDVKCTNALPDLIQNLGGTPIMSPTGHFHIKNGIKEHNPILAGEMSGHIF

SEQ ID NO: 156093 - protein, 253 aa, Unknown
  Bacterial polypetide isolated from the Sargasso Sea
LKSLEKSLSCYGINIQNIGLVTTPLLYYAAKKNKCKSGVMITGSHNPKNYNGIKLIINDKPVSGNEIYKLLDRNKDKSEVPGKIEFFDIKSNYIEEVKNNIQIDENFKLKVVIDCGNGAAGCIAPKLFSELGCEVIELFTEVDGNFPNHHPDPGKLENLQDLIAKVKLTKADLGLAFDGDGDRVGLITDRGDVIYPDKILMMFCKEILNINKGSIIFDVKCTNALPDLIKNLGGTPIMSPTGHFHIKNGIKEH

SEQ ID NO: 156094 - protein, 274 aa, Unknown
  Bacterial polypetide isolated from the Sargasso Sea
FSKLNSNNIAIGYDGRLTSPKLYNALSSGLKDSGSNVINIGMCPTPMLYFADYHLKMDAAIMITGSHNPSEYNGFKMVLNKHSFFSKNIQNFQQIVSENKLEKKDGKIQNIEIIEHYIDRLLKNIVIKKKLKISWDIGNGAMGVIIDKLISKLQNTENILINKEVDGTFPNHHPDPTIPKNMEQLIKSVKENNCDVGLAFDGDGDRLGVVDNLGNIVWADQFMLILCSEISNLYKNPKIIMDVKCSKVFFDESKKMGCDPIMERTGHSPIKEKM

SEQ ID NO: 156095 - protein, 247 aa, Unknown
  Bacterial polypetide isolated from the Sargasso Sea
MEIARSIFREYDIRGIYPEEINEDVIKQIAKAISIKCLKNNVSEICIGRDGRLSGENLLNSLSDSLSKCGINVVNIGLVSTPLLYFAAKKNKYKSGVMITGSHNPKNYNGVKLIINDSPVSGNEIFKLIDEDKPCVKQTGKIIYKDIKKEYIQEVKENININNKIKIVIDCGNGAAGCIAPDLFKTIGCEVIELFSEIDGNFPNHHPDPGKIENLNDLISKVKESNADLGIAFDGDGDRVGLVTDKG

SEQ ID NO: 156096 - protein, 295 aa, Unknown
  Bacterial polypetide isolated from the Sargasso Sea
MNLPKNIFKAYDIRGIYDHELNNKTVKLIAKALSVIYKNKNDKIVIGRDGRLSSETLSNALIEGFLESGKDIIDIGQVPTPLLYYAVNYFKLNSGIIITGSHNPKDYNGLKIIMDGHALAGNEIQKIYENIKLKNYIQSKKNHNAKLENIKIDNIYIDELLKDININKKLKVAIDAGNGAAGPIALEAYRKLGHEVIDLYCDVDGNFPNHHPNPSDPKNLKDLISCVKEDDCDIGIAFDGDGDRCLIIDNLGQVLWPDKQMMVYSKDILSTNKNEKIVYDVKSSKDLANIVKEYE

SEQ ID NO: 156097 - protein, 303 aa, Unknown
  Bacterial polypetide isolated from the Sargasso Sea
QIKSKWSELIKSIFREYDIRGIFPDELNEDSITKIAKSIAHKCHKESVAEVVIARDGRLSGPSLLESLQESLNNYGIDTINIGLATSPLLYYAAKKQASRSGIMITGSHNPKNYNGIKLVIDDKPVSGTEIFELSKTDISLENLNGENRFLDIKGDYITEVKNSFNFKKLKVVVDCGNGAAGIIAPDLLRAVGCEVIEIFCDVDGNFPNHHPDPGKEKNLVDLIGKVKEVSADIGVAFDGDGDRLGAVTSSGRLIYPDQMMMLFSKRILSNEEGKTIVFDVKCSDFLPQIIKENDGIPFMSPT

SEQ ID NO: 156098 - protein, 266 aa, Unknown
  Bacterial polypetide isolated from the Sargasso Sea
MIDESIFREYDIRGIVPVQLNELSVKAIAKAIAIKCNNELVDEVALGRDGRLSGGNLMRSLSSELQCLGINVLNIGIVTSPLLYFAAKKIKSKSGIMITGSHNPKNYNGFKIVINDTPVSGTEILDLISNEFSEVRNSGSEVTREGIMDEYINEVISQASSISNPMKIVIDCGNGSAGEIAPKLIRSLGHQVIELFCKIDGNFPNHHPDPGKIENLQDLIKVVKSESADIGIAFDGDGDRLGVVSRNGEIIYPDQLMMIFSKGGLK

SEQ ID NO: 156099 - protein, 258 aa, Unknown
  Bacterial polypetide isolated from the Sargasso Sea
SVNKIVLYVGMVPTDVVYTLSGIKNLPGLIITASHNPKEYTGLKFCNSGAVAIGQETGLKEIKNLAEKFNDDFNMSELPKVQTMNQLYLEHFKNIVDPSEISDKVKFAIDGGNGVLGAIIEDLSKSFSLNFYGLYIEVDGNFPNHPADPSNEENLKDLKNKVVSQNLDFGVAFDGDADRSVFVDDKGNIISGSMMTCLISDWLFEKKSEIKIVHNVNVQPSVIEYLKNKGIETIRSKVGHSYIKKIMRDNDADFGGEH

SEQ ID NO: 156100 - protein, 307 aa, Unknown
  Bacterial polypetide isolated from the Sargasso Sea
VTTPLLYYAAKKSKSKSGAMITGSHNPKNYNGIKLVINDKPVSGKEIFNLIQHKKDISSSPGKIISKDIKEDYILEVTKNIKINKDKKIKLVIDCGNGAAGCIAPELYKNIGCDVIELYSEVDGNFPNHHPDPGKTENLMDLIQEVEKSNADLGLAFDGDGDRVGLVTNTGEIIFPDKILMMFSQDILSSEKGSIIFDVKCSNALPKIIKDLGGNPIMSPTGHFHIKNGIKKHNPLLAGEMSGHIFFNDKWYGFDDGHYSGARIIELIWKRNESISEINEKLPKSFSTPELNIDVTDEIKFKIMKIS

SEQ ID NO: 156101 - protein, 264 aa, Unknown
  Bacterial polypetide isolated from the Sargasso Sea
MSELIKSIFREYDIRGIFPDELNEDSIAKIAKSIAQKCYQESVAEVVIARDGRLSGPSLLESLQESLNRHGINTINIGLATSPLLYYAAKKQASKSGIMITGSHNPKNYNGIKLVIDDKPVSGTEIFELSKTDISLKDTNGENTLLDIKSNYITEVKNSFNFKNLKVVVDCGNGAAGIIAPDLLRAVGCEVIEIFCDVDGNFPNHHPDPGKEKNLVNLIDKVKEVSADVGVAFDGDGDRLGAVTSSGRLIYPDQMMMLFSKKIL

SEQ ID NO: 156102 - protein, 321 aa, Unknown
  Bacterial polypetide isolated from the Sargasso Sea
FSLGYDGRLTSPKLYNALSTGLKDSGAKVKSVGMCPTPMLYFADYYLNTDAAIMITGSHNPSEYNGFKMVMNKHSFYSENIQKFKSIIKSNKLEKKEGSIEHVDIVDAYVERVLKNISIKNKLKISWDIGNGAMGVIINKLISKLVNTDNILLNKDVDGNFPNHHPDPTVPKNMEQLIQSVKENKCDIGLAFDGDGDRLGVVDNTGNIIWADQYMLILCSEISSLYQKPKVIMDVKCSKVFFDEAKKLGCDPIMERTGHSPIKEKMKEIKSPLSGEMSGHVCYGDDFYGYDDAMYVGLRLLRILSNKNQNLHDLINLYPKT

SEQ ID NO: 156103 - protein, 276 aa, Unknown
  Bacterial polypetide isolated from the Sargasso Sea
IAKAISIKCEYNNVSEICVGRDGRLSGESLLNALSNSLSDFGINVQNIGLVTTPLLYFAAKKNKYKSGVMITGSHNPKDYNGIKLVINDAPVSGTEIFQLISQNKNLSKKPGKINFIDIKEEYISEVKKNIAITGSKKIKVVIDCGNGAAGCIAPALYKALGCDVVELFSEIDGNFPNHHPDPGKPKNLEDLVSKVTSSKADLGLAFDGDGDRVGLITNKGEIIYADKILMLLSKEILKKEKGSIIFDVKCSNALSEIIKEYGGDPIMSRTRSFSY

SEQ ID NO: 156104 - protein, 296 aa, Unknown
  Bacterial polypetide isolated from the Sargasso Sea
SKLYNALSSGLKDSGSNVINIGMCPTPMLYFADYHLKMDAAIMITGSHNPSEYNGFKMVLNKHSFFSKNIQNFQRIVSENKLEKKDGKIQNTQIIEHYVDRLLKNIVIKKKLKICWDIGNGAMGVIIDNLISKLQNTENILINKEVDGNFPNHHPDPTIPKNMEQLIKTVKENNCDVGLAFDGDGDRLGVVDNLGNIVWADQYMLILCSEISNLYKNPKIIMDVKCSKVFFDESKKMGCDPIMERTGHSPIKEKMKELKSPLSGEMSGHICYGDDFYGYDDAMYVALRLIRILSNQ

SEQ ID NO: 156105 - protein, 289 aa, Unknown
  Bacterial polypetide isolated from the Sargasso Sea
IRSSLLESLQESLNMHGINTINIGLATSPLLYFAAKKQGSKSGIMITGSHNPKNYNGIKLVINDKPVSGTEIFELSKTDISLEDSAGENRFLDIKGDYIKEVKNSFNFKNLKVVVDCGNGAAGIIAPELLRAVGCEVIEIFCDVDGNFPNHHPDPGKEKNLVDLIEKVKEVSADIGVAFDGDGDRLGAVTSSGRLIYPDQMMMLFSKKILSNNEGKTIIFDVKCSDFLPQIIKENDGIPFMSPTGHFHIKNNIKKYNAVLGGEMSGHIFFNDIWHGFDDGHYSAIRLLD

SEQ ID NO: 156106 - protein, 257 aa, Unknown
  Bacterial polypetide isolated from the Sargasso Sea
CKIAKSIAQKCNQESVAEVVIARDGRLSGPSLLDSLQESLNRYGINTINLGLATSPLLYYAAKKQASKSGIMITGSHNPKNYNGIKLVINDKPVSGTEIFELSKKDLYLENSNGENRFLDIKDEYITEVKSSFNFKKLKVVVDCGNGSAGIIAPDLLRAVGCEVIEIFCDVDGNFPNHHPDPGKEKNLVDLIEKVKEVSADVGVAFDGDGDRLGAVTSSGRLIYPDQMMMLFSKKILSDEGGKTIIFDVKCSDFLPQ

SEQ ID NO: 156107 - protein, 444 aa, Unknown
  Bacterial polypetide isolated from the Sargasso Sea
MTKNKLDLIFKSYDIRGVYGDSIDQDIAYKIGKAFAEFVSDDTIIVGHDGRISNIEMLDAFTSGIKSINKEIIYVGLVPTDTVYSLSGLLKKPGAIITASHNPKNYNGLKLCNAGAIPIGENSGLMDIKKLADRNVEIRIEKFKINDKYLGNEYYEHLKNLVSPESISQKLNFGIDGGNGVFGAVFDTLNNIYKFNVKSIYLEVDGNFPNHPADPSDETNLTDLKNLVIDNDLDFGIAFDGDADRGVFIDNLGRVISGSMMTVLISEFLSTQKNQFRVVHNVNVSPHALNMMKNNNIELYKCKVGHSNIKKMMRDVDADFGGEHSAHFYYRDNFYADSAILTLLIFMKLLSNNKDQLSLIIDNYNFPPSSGEINFAVEDINESISKIERIFEGEFDHTDGLSCLNKNFWFNVRGSNTENKLRINIEADTQEILDQVLEKISSSI

SEQ ID NO: 156108 - protein, 338 aa, Unknown
  Bacterial polypetide isolated from the Sargasso Sea
MSELIKSIFREYDIRGIFPDELNEDSIAKIAKYIAQKCHQESVAEVVIARDGRLSGPSLLESLQESLNRYGINTINIGLATSPLLYYAAKKQASKSGIMITGSHNPKNYNGIKLVIDDKPVSGTEIFELSQTDISLENANGENSFLDIKDNYITEVKNSFNFKNLKVVVDCGNGAAGIIAPDLLRAVGCEVIEIFCDVDGNFPNHHPDPGKEKNLVDLIEKVKEVSADIGVAFDGDGDRLGAVTSSGRLIYPDQMMMLFSKKILSNKRGETIVFDVKCSDFLPKIIKENDGIPFMSPTGHFHIKNNIKKYNAVLGGEMSGHIFFNDIWHGFDDGHYSA

SEQ ID NO: 156109 - protein, 300 aa, Unknown
  Bacterial polypetide isolated from the Sargasso Sea
MTVFKAYDIRGIAGSELDSEFSERLGRAIATHLDADCVSVVRDIRDSSPDYHEAFVRGLLNSGADVIDLGISTTGVLYRSTVDLPVDVAVAITASHNPPEYNGFKICKGKMPLGGEELQEVRKTFEEGNFREGSGNYRIMDSYEERYVQSIVDSVGRLSRDLRVVLDCGNAVPGPLAVKVLERLGVDVIPLYCDWDNSFPNHPPDPTRQENMEDLGRAVLEHGAEFGIGMDGDGDRLGVVDENGKFIHPDRLMGIFVEEVLSDLPENSTEEQRTIFFDVKCSMALEEAIEELGGVPKMVR

SEQ ID NO: 156110 - protein, 476 aa, Unknown
  Bacterial polypetide isolated from the Sargasso Sea
MQRTFQPHHERPPCVQPTPAIFKAYDIRGIVPSTLNEDVALGLGRAFGTAARAEGQTTVAVGRDGRLSGPAMSAALIQGLVEAGIEVIDVGLVTTPLLYFAASTLCTSGIQVTGSHNPKDYNGFKMVLNGRAIYGDEIQALRRTMEQESWQLVPGGSVRHVDVLPAYRERIVGDVKLARPLKIVVDCGNGIAGASAPAIFRALGCEVTELYSEVDGNFPNHHPDPSKPENLRDLIEALKTSDAELGLAFDGDGDRLGIVTKDGTNIFPDRQMMLFAQDVLSRVPGGEIIFDVKCTQRLAPAIAAAGGVPVMFKTGHSLIKARMKETNSPLGGEMSGHIFFKERWYGFDDGTYAGCRLLEILSRSSDPSGVLNALPTSFSTPELNVACAEGEPHRLTAELQALAAETFAAPAAISTIDGLRVDWPDGFGLIRASNTTPVLVLRFEGHTPEALARIEAAMLALLHRVKPDAHVGAASH

SEQ ID NO: 156111 - protein, 370 aa, Unknown
  Bacterial polypetide isolated from the Sargasso Sea
MTVFKAYDIRGIAGSELDSEFSERLGRAIATHLDADCVSVVRDIRDSSPEYHEAFVRGLLTSGADVIDLGISTTGVLYRSTVDLPVDVAVAITASHNPPEYNGFKICKGKMPLGGEELQEVRKTFEEGNFREGSGNYRIMDSYEERYVQSIVDSVGRLSRDIRVVLDCGNAVPGPLAVKVLERLGVDVIPLYCDWDNSFPNHPPDPTRHENMEDLGRAVLEHGAEFGIGMDGDGDRLGVVDENGKFIHPDRLMGIFVEEVLSDLPENATEEQRTIFFDVKCSMALEEAIEELGGVPKMVRTGHTFMKKELREFPGSPMAGEMSGHFFMNDHWDGFDDSIYCAARLLSIIGMDPSPEQGGPKFSERFNFMP

SEQ ID NO: 156112 - protein, 284 aa, Unknown
  Bacterial polypetide isolated from the Sargasso Sea
MEIAKSIFREYDIRGVYPDQVNENVISLIAKAIAIKCDQENVKEICIGRDGRLSGESLLKSLEKSLSYYGINIQNIGLVTTPLLYFAAKKNKCKSGVMITGSHNPKNYNGIKLIINDKPVSGNEIYKLLYRNKDHSEVPGKIEFLDIKNNYVEEVKNNIQIDDNFRLKVVIDCGNGAAGCIAPKLFNELSCEVIELFTEVDGNFPNHHPDPGKLENLQDLITKVKSTKADLGLAFDGDGDRVGLVTDKGNVIYPDKILMIFSKEILKKNKGSIIYDVKCTNALP

SEQ ID NO: 156113 - protein, 455 aa, Unknown
  Bacterial polypetide isolated from the Sargasso Sea
MEISKSIFRDYDIRGIYPDQINEKIIKRIAKAISVKCLNEGVSEICVARDGRLSGKKLLSTLENALSENGINVINTGLATTPLLYFAAKKSKYKSGVMITGSHNPKNYNGIKLIINDKPVSGVEIYNLMNQSLDISENNNGKIISKDFKEEYISEIKKNISINEKLKVVIDCGNGASGCIAPKLYKALGCEVVNLYTDVDGNFPNHHPDPGKPENLTDLIKKVKETKADLGLAFDGDGDRVGVVTNDGEIVFPDKILMILSKDILATKKGTIIFDVKCTDSLPKLIKENGGNPIMYPTGHFNIKNGIKEHNPLLAGEMSGHIFFNDKWYGFDDGIYSGARIIELILKNKKSISSLNKELPELFSTHELNIEVTDESKFEIVKKFIAQCSLDGNKILIDGLRINFKNGWGLLRASNTTPMLVLRFEGDTEKNLIQIKNKFIKELTRICPDIDINLN

SEQ ID NO: 156114 - protein, 454 aa, Unknown
  Bacterial polypetide isolated from the Sargasso Sea
MNKNIFRAYDIRGHAKKDLKSSTIEKIGYVLGQKIKENNSDSVYIGYDSRLSCERIKNDLIKGVNAAEVKVLNLGLVPTPMVYYATKVGSTSSGIMITGSHNPKDDNGLKMVINDNPISGYEIKESVENLSEVPINDSKMVESVDFEKTYIEEVVNKIKINKKLKVVLDGGNGAAGILADKMFNAIGLDVVSINKEPDGNFPNHHPDPSKEINLLELKHEINLLNADIGFAFDGDGDRIGLITNEGQSIVADQIIMLMAEFYLDKKRGPIVFDVKCSNQLPLLIEKLGGEPVMEKTGHFNIKKRIKQTNAVMGGEMSGHIFINHDWYGFDDAIFSAVILTKIISELDISVSEKMKEIPSTYSTPELNLNVKDEDKFTIVEKFRSKMEFPNADINTIDGIRISIGDSWALMRASNTSPKLVLRFEGDTEDNLNQIKTLFEKNFLRIFPDIKLDYH

SEQ ID NO: 156115 - protein, 456 aa, Unknown
  Bacterial polypetide isolated from the Sargasso Sea
MEITESIFREYDIRGTYPDQINEEVVKKIAVAISLKCQQEQVAEICIGRDGRLSGKSLLNSLSEGLSEHGINVTNLGLVTTPLLYYAAKKSKSKSGVMITGSHNPKNYNGIKLVINDKPVSGKEIFNLVKHKRDISSSPGKIISKDIKEDYILEVTKNIKINKDKKIKLVIDCGNGAAGCIAPELFKNIGCDVIELFSEVDGNFPNHHPDPGKTENLKDLIQEIKKTNADLGLAFDGDGDRVGLVTNTGEIIFPDKILMMFSQDILSSQKGSIIFDVKCSNALPEIIKDLGGNPIMSPTGHFHIKNGIKKHNPLLAGEMSGHIFFNDKWYGFDDGHYSGARIIELIWKKNESISEINEKLPKSFSTPELNIDVTDETKFKIIEDFSSQCSLEGEKITIDGLRINFDNGWGLLRASNTTPKLVLRFEGDSIDSLNKIKDAFLNELSRICPDIDINLV

SEQ ID NO: 156116 - protein, 411 aa, Unknown
  Bacterial polypetide isolated from the Sargasso Sea
MSELIKSIFREYDIRGIFPDELNEDSIAKMAKSIAQKCHQESVAEVVIARDGRLSGPSLLESLQESLNMHGINTINIGLATSPLLYYAAKKQASKSGIMITGSHNPKNYNGIKLVVDDKPVSGTEIFELSKTDISLEDSNGENRFLDIKDGYINEVKNSFNFKNLKVVVDCGNGAAGIIAPDLLRAVGCEVIEIFCDVDGNFPNHHPDPGKEKNLVDLIDKVKEVSADVGVAFDGDGDRLGAVTSSGRLIYPDQMMMLFSKKILSKKGGKTIVFDVKCSDFLPQIIKENDGIPFMSPTGHFHIKNNIKKYNAVLGGEMSGHIFFNDIWHGFDDGHYSAIRLLDIMNETGSSLDDLLDSLPVSYSTPELNIDVPEEKKFKIIEDFIENASIDGKKDFTDGLRASFENGWALL

SEQ ID NO: 156117 - protein, 464 aa, Unknown
  Bacterial polypetide isolated from the Sargasso Sea
MISKSIFKAYDIRGVIGKTLDADAARSIGRAFGSEVRAQGGDAVVVARDGRLSGPELVQALSDGLRAAGVDVVNVGMVPTPVGYFAASVPLQLDGGERRVDSCIVVTGSHNPPDYNGFKMVLRGAAIYGEQILALHQRIVDENFSDGSGTYTEYDIADAYLDRITSDIKLARPIKIVVDTGNGVAGGLAPKLFKKLGCELVELFTEIDGNFPNHHPDPAHPENLQDVIRALKETDAEIGFAFDGDGDRLGVVTKDGQIIYPDRQLMLFAEEVLSRNKGAQIIYDVKCTRNLAKWVKDKGGEPLMWKTGHSLVKAKLRETGAPLAGEMSGHVFFKDRWYGFDDGLYTGARLLEILTRVADPSKLLNSLPNSNSTPELQLKLEEGENFELIARLQQNATFTGADDVVKIDGLRVEYPDGFGLARSSNTTPVVVMRFEADSDEALRRIQEDFRRVIMAEKPDAKLPF

SEQ ID NO: 156118 - protein, 290 aa, Unknown
  Bacterial polypetide isolated from the Sargasso Sea
MSVDRAIFREYDIRGIYPSDLNEKSIEVIADAISKKCFKENIRSVVVGRDGRNSGQSLLKAFSDRLIKNGINVKNIGLVTSPILYFAAKKEVNKSGIMITGSHNPKNYNGLKMILNDEPVSGKEIFNLINEEIKLPLLNAKSEEIDIIDEYIDEVCKNIFIKTRIRVVLDSGNGAAGCVAPKLFKKLGCDVIELFSEIDGNFPNHHPDPGKIENLQDLVKSVRENNADLGIAFDGDGDRLGVVTEKGDIIFPDKIMMLFSKEVLKRKKGKVIYDVKCSRDLEYIIKKYNG

SEQ ID NO: 156119 - protein, 454 aa, Unknown
  Bacterial polypetide isolated from the Sargasso Sea
MEITKSIFREYDIRGEYPNQINEEVVRKIGNAIAGKCINLNIKEICVGRDGRNSGKSLLEAMIGGLSESGIEVINIDLATSPLLYYAAKKNKYKSGIMITGSHNPKNHNGIKLVIDDKPVSGNEILDLLNKDQKFSESVGSIKSLDVKNIYIEEVSESLKINKKLKIVIDCGNGAAGFIAPDLYKNLGCEVIELYSEVDGNFPNHHPDPGKVENLKDLIQAVKTHGADLGLAFDGDGDRVGMVTNNGEIVFPDKILMMLSKDVLHSQKGSIIFDVKCSNALSQIIKENGGSPIMSPTGHFHIKNGIKKHNPLLAGEMSGHIFFNDKWYGFDDGHYSGARIIEMLSKNEKSIAEICNELPMLFSTPELNINVTDDNKFKIIKEFADNCKLEGEKNTIDGLRLDFEDGWGLIRASNTTPKLVLRFEGRSEEILNRIQNDFLNELTRICPDIDINLS

SEQ ID NO: 156120 - protein, 456 aa, Unknown
  Bacterial polypetide isolated from the Sargasso Sea
MINENIFRAYDIRGKADEDLNDDIIRKIGIVLSEKILNTGQNKVYLGTDCRLSANRIKKSLISGLCSNDLEVLDLGMVPTPLVYFATKTGKTNCGIMITGSHNPKEDNGLKMVINGGAVSGFEIKNDVINLKNKTTNIVNISDARDLIEQYENKIFSNCKLAKKIKVVLDSGNGAAGPYAKKVFEKIGAEVISLNTEPDGNFPNHHPDPSKENNLKDLIESVSVNKADLGFAFDGDGDRVGMVDNNSNIVSPDHIIMLLSEYFLQKKKGPVIYDVKCSNQVSKIIEDNGGDPVIEKTGHFNIKNKIRKTNAILGAEMSGHIFINYDWYGFDDGIYSAVILTKIISELEIDLSTKILDFPKVFSTPELTLDVEDSQKFEMVDKFKNEVDFSGYEILDIDGVRFSSSKAWGLLRASNTSPKLVMRFEGDTDQELLNIMAFFKDNFKKIYPNLNFEDHS

SEQ ID NO: 156121 - protein, 441 aa, Unknown
  Bacterial polypetide isolated from the Sargasso Sea
MIDQSIFREYDIRGIVPTQINELSVKAIARAIAIKCNNEQVDEVALGRDGRLSGDNLLRSLSSELQSLGINVLNIGIVTSPLLYFAAKKIKSKSGIMITGSHNPKNYNGFKIVINDSPVSGIEMYDLISNELPSLKNSGRENIKKNLMDEYINEVISQASSDTNAMKIVMDCGNGSASEIAPKLIRSLGHQVIELFCKIDGNFPNHHPDPGKIENLKDLIKAVKSESADVGIAFDGDGDRLGVVSNSGEIIYPDQLMMIFSREVLKNNPGKEIVFDVKCTNLLNKIITDAGGIPFMSPTGHFHIKNMLKKTKSPLAGEMSGHIFFNDKWYGFDDAHYAAFRLIEILKNSKTSLDNLIKDLPKAFSTPEMNINVDENKKFQIVEDFISKADFGTADKITIDGLRVNFEDGWGLLRASNTTPKLVLRFEANSPKRLSEIENMF

SEQ ID NO: 156122 - protein, 369 aa, Unknown
  Bacterial polypetide isolated from the Sargasso Sea
MVPTDVVYTLSGIKNLPGLIITASHNPKEYTGMKFCNVGAVAIGQETGLKEIQKFAETFDDDFIISALPERQTMNQLYLDHFKKIVNPSEISDKVKFSIDAGNGVLGAIIEDLSKTFNLNFEGLYMDVDGNFPNHPADPSDENNLLDLKDKVISQNLDFGVAFDGDADRSVFIDDKGNLISGSLMTCLISDWLFEKKSEIKVVHNVNVQPSVVKYLNDRGIETIRSKVGHSYIKKIMRDKDADFGGEHSAHFYLRENFYADSGILTLLIFLKILSEKNVKSSVLVEDYEFNPSSGEINYVVEDVETSLKKIENSFQGKFDKLDGISYFSDDFWFNVRGSNTEPLLRLNAEAVDQKTLDNIIDEISNIIS

SEQ ID NO: 156123 - protein, 308 aa, Unknown
  Bacterial polypetide isolated from the Sargasso Sea
MSVFKAYDIRGIAGSELDSEFSERLGKAVATHLDAECVSVVRDIRDSSPDYHEAFVRGVLSTGADVIDLGISTTGVLYRSTVDLPVDVSVAITASHNPPEYNGFKICKGKSPLGGEELQEVRRTFEEGDFREGSGNYRIMDSYEESYVQSIIDSVGSLSRDIRVVLDCGNAVPGPLAVKVLERLGVDVIPLYCDWDNSFPNHPPDPTRHENMEDLGRAVLEHGAEFGIGMDGDGDRLGVVDENGRFIHPDRLMGIFVEEVLTDLPENATEEQRTIFFDVKCSMALEEAIEELGGVPKMVRTGHTFMKK

SEQ ID NO: 156124 - protein, 454 aa, Unknown
  Bacterial polypetide isolated from the Sargasso Sea
MEIARSIFREYDIRGIYPKEINENVIEQIAKAISIKCLKNNIPEICVGRDGRLSGESLLDCLSESLSGFGINVINIGLVSTPLLYFAAKKNKHKSGIMITGSHNPKNYNGVKMVINDNPVSGSEIYKLIDKDKPSTKKKGTIVYKDIKKEYIQEVKENVDINNKVKIVIDCGNGAAGCIAPDLFKSMGCEVIELFSEVDGNFPNHHPDPGKIENLNDLISKVKESDADLGIAFDGDGDRVGLVTNEGKVIYPDKIMMILSKDILSSKKGSIIFDVKCSNLLPDIISSHGGKPIMSPTGHFHIKNAIKRHNPLLAGEMSGHIFFNDKWYGFDDGHYSGARIIEIVSKENRKISEIENELPLLYSTPELNIDVTDETKFKIIEDFSKECSLDGEKITIDGLRINFKNGWGLLRASNTTPKLVLRFEGNSVDDLNQIKSNFLNELSRICPNIDINLV

SEQ ID NO: 156125 - protein, 327 aa, Unknown
  Bacterial polypetide isolated from the Sargasso Sea
MEIAKSIFREYDIRGVYPDQVNENAMSLIAKAIAIKCDQENVREICIGRDGRLSGESLLKSLEKSLSCYGINIQNIGLVTTPLLYYAAKKNKCKSGVMITGSHNPKNYNGIKLIINDKPVSGKEIYKLLDRNKDKSEAPGKIEFFDIKSDYIEEVKNNIQIDENFKLKVVIDCGNGAAGCIAPKLFSELGCEVIELFTEVDGNFPNHHPDPGKLENLQDLIAKVKLTKADLGLAFDGDGDRVGLITDRGDVIYPDKILMMFCKEILNINKGSIIFDVKCTNALPDLIKNLGGTPIMSPTGHFHIKNGIKEHNPLLAGEMSGHIFFND

SEQ ID NO: 156126 - protein, 353 aa, Unknown
  Bacterial polypetide isolated from the Sargasso Sea
MGLIITASHNPKEYTGLKFCDSGAVAIGQETGLKEIKNLAEKFNDDFNMSELPEMQTLNQLYLEHFKNIVNPSEISDKVKFAIDGGNGVLGAIIEDLSESFSLNFEGLYMEVDGNFPNHPADPSNQDNLLDLKNKVLSQNFDFGVAFDGDADRSVFVDDKGNLISGSMMTCLISDWLFEKKSEIKIVHNVNVQPSVIEYLKNKGIETIRSKVGHSYIKKIMRDNDADFGGEHSAHFYLRENFYADSGILTLLIFLKILSEKNIKSSELVQNYNFKPSSGEINYIVEDVEISLKKIENSFEGEFDKLDGISYFSDDFWFNVRGSNTEPMLRLNAEAINQKTLDNIIEKISNIIS

SEQ ID NO: 156127 - protein, 389 aa, Unknown
  Bacterial polypetide isolated from the Sargasso Sea
MEIAKSIFREYDIRGVYPDQVNENAISLIAKAIAIKCDQENVREICIGRDGRLSGESLLKSLEKSLSCYGINIQNIGLVTTPLLYYAAKKNKCKSGVMITGSHNPKNYNGIKLIINDKPVSGNEIYKLLDRNKDKSEVPGKIEFFDIKSNYVEEVKNNIQIDENFRLKVVIDCGNGAAGCIAPKLFSELGCEVIELFTEVDGNFPNHHPDPGKLENLQDLIAKVKLTKADLGLAFDGDGDRVGLITDKGDVIYPDKILMMFCKEILNKNKGSIIFDVKCTNALPDLIKNLGGTPIMSPTGHFHIKNGIKEHNPLLAGEMSGHIFFNDKWHGFDDGHYSGARIIELISNNKRSISAINNDLPNLFSTPELNITVTDETKFKIIEDFSMKC

SEQ ID NO: 156128 - protein, 406 aa, Unknown
  Bacterial polypetide isolated from the Sargasso Sea
MKVNSKVFRAYDVRGVVGKELSDELIEKLGKAIGTKLKRNNLNSLNICRDGRLSGPHVSKLFTKGLLSTGCDVYNLDLGPTPLLYFSTFKSSIKNGVMITGSHNPKDYNGFKIVFDQKPLSGESITEIKDLIENEDFLSGEGIEIKTPMLESYKKEIKTKINLNKNLKVVLDCGNGVGGSIAPTLFKDLGIELFELYSEVDGNFPNHHPDPGNPKNLEDLINKVCEINADLGIALDGDADRLGVVDNLGKIIYPDQYMSLLADQVLKKNPGRKVVFDVKCSSKLKESIIKSKGIPVMTRTGHSFIKKEILNQNAILGGEMSGHIFYNDDWYGFDDGIYSALRLIEIISESKSSSSEIFNKFPQLFNTPEINLSTTDDRKFKIIERLKKEFEFNGFEKVLIDGIRLE

SEQ ID NO: 156129 - protein, 424 aa, Unknown
  Bacterial polypetide isolated from the Sargasso Sea
AWLKIKENNSNAVYVGYDSRLSCEEIKSNLITGINAAGVKVLNLGLVPTPIVYYATKVGDTSNGIMITGSHNPKDDNGLKMVINDNAVSGIEIKESVENLGEIPTSDIEMIENLDLKKKYIEEVMNKVKINKKLKVVLDAGNGAAGILAEEMFTALGHEVISINKEPDGNFPNHHPDPSKEKNLIEIKREIDSANADIGFAFDGDGDRIGLITNKGESVIADQIIMLMAEFYLDQVKGPIVFDVKCSNQLPLLIEKFGGEPIMEKTGHFNIKRRIRQTNAVMGGEMSGHIFINHDWYGFDDAIFSAVILTKIITDLDVSISELVNKIPSTHSTPELNLDVKDEEKFNMVEKFKSEMEFPNADINTIDGVRISINNSWALMRASNTSPKLVLRFEGDTEDNLNQIKNLFENNFLKIFPDIKLDYH

SEQ ID NO: 156130 - protein, 168 aa, Unknown
  Bacterial polypetide isolated from the Sargasso Sea
EQLDDYKKVKSAWELNERHYGSLTGLNKDEMKKKLGEEKVHQFRRSWDLRPDPLDKNNSYHPLNINTYKDVPVEKIPDTESLKDTYERVIKYYSEDIKNELKNKNILISAHGNSIRALCKYLFNLDNNQISKLEIPTGNPLLIKFDSDYKILNCGYLDSERAKDLLVY

SEQ ID NO: 156131 - protein, 58 aa, Unknown
  Bacterial polypetide isolated from the Sargasso Sea
MKLILLRHGESEWNLKNRFTGWKDVDLTSNGIKEATAAANKILEENINISSIHTSILE

SEQ ID NO: 156132 - protein, 165 aa, Unknown
  Bacterial polypetide isolated from the Sargasso Sea
MSYLILVRHGQSVWNLENKFTGWVDVDLNENGKAQAKKAGELIKEKQINIDLYYTSFQIRAKNTLKIIQEELKDFKSVKSAWQLNERHYGSLTGLNKDEMRQKLGEEKIHQFRRSWDLRPDPLDKNSSYHPLNINIYKDIPLDKIPDTESLRDTYERVIKFFNEE

SEQ ID NO: 156133 - protein, 234 aa, Unknown
  Bacterial polypetide isolated from the Sargasso Sea
YFIRHGVKVNGNLQNKFTGWVDVELSPQGKLEACKAGELIKELNFKIDYFFSSYQRRSIDTLKLILNTIREKDDQIIKAWELNERHYGALTGLNKDEMKKKLGEEQVHIFRRSWDTPPQPLSKNSPYHPLNIETYKDIPREKVPDTESLKDTYERVIPYYKSQIENKLDNNIVVSAHGNSIRSMCKFLFELDNDEVTKLEIPTGNPLKITFNNEKKLNDAIYLDKSRAKNLIKF

SEQ ID NO: 156134 - protein, 130 aa, Unknown
  Bacterial polypetide isolated from the Sargasso Sea
KKYRRSWDVAPPPMEEKSEYLNLFSPLNASIPMGMTPFTESLKSTYDRVVPFYEDEIKKNLLENKNILISAHGNSLRALCKYLFNISDTKINELEIPTGNPLLIEFGENLKIQKYYYLDESRAKDIIFNQ

SEQ ID NO: 156135 - protein, 63 aa, Unknown
  Bacterial polypetide isolated from the Sargasso Sea
VLISAHGNSLRALCKNLFNLNNNQISDLEIPTGNPLIIELNQELVITNCEYLDKERAKSLLVF

SEQ ID NO: 156136 - protein, 231 aa, Unknown
  Bacterial polypetide isolated from the Sargasso Sea
FDAINSSYLRNEIDEFLNPTIIEEYGYDSFKGIKDNDGLFVANFRSDRIRQLLSSLIEPNFINFERQKKPKFISKLGMVNYFDKSIHGIKCLFPNIIPKNTLGEVISRNNLKQFRVAETEKYPHVTFFFNGGREKKFKGEERFLVPSPKVKTYDECPQMSAGEIAAKVIKSISNQKHDVIIVNFANPDMVGHTGDFGAVVEAVECVDKYLGDIVKKLLKDEGHMILTSDHG

SEQ ID NO: 156137 - protein, 81 aa, Unknown
  Bacterial polypetide isolated from the Sargasso Sea
VGHMNLGSGRVVLQTLPKINKAFANNEIEKNNNSQNFLSNHNKNKTVHLLGLSSDGGVHSHSSHIIEMSNLLEKNNCKTCI

SEQ ID NO: 156138 - protein, 91 aa, Unknown
  Bacterial polypetide isolated from the Sargasso Sea
MSKLILIRHGQSIWNAENKFTGWVDVDLSKKGIEEANRSGQLIKSLNINVDFFFTSFLKRSINTLKIILDNTNMNKKDFVKAWELNERHYG

SEQ ID NO: 156139 - protein, 191 aa, Unknown
  Bacterial polypetide isolated from the Sargasso Sea
KEQLNIDLYYSSFQLRAKNTLKIIQDELNDHKEVKEAWQLNERHYGALTGLNKDEMKIKLGEEKIHQFRRSWDLRPDPLEKTNPFHPINIETYKKIPRDKIPDTESLKDTYERVIEFYKNEIENNKGKNILISAHGNSIRALCKYLFILDNTQISRLEIPTGNPLFIEFENNKISKCKYLHKERAKDLLVF

SEQ ID NO: 156140 - protein, 211 aa, Unknown
  Bacterial polypetide isolated from the Sargasso Sea
MNNLILVRHGQSLWNKERRFTGWADIDLTEQGKLEAKQAGRLIKELNIKLDACFTSHLKRAVNSLEIILEILNNPKIDIFKTESLNERHYGGLTGLNKDETIEKYGNEQVQSWRRSFDIQPPKMEEDHPYKNKIGTKILSESLKDTFNRVIPFYTKNIEPLISSKKNVLIVFHGNSCRALLMEIFSISKEQINKFEIPTGNPLLITYEKNL

SEQ ID NO: 156141 - protein, 46 aa, Unknown
  Bacterial polypetide isolated from the Sargasso Sea
NKDECRQKWGAEQVQIWRRSYDVGPPGGESLKETGERVLPYYLNEI

SEQ ID NO: 156142 - protein, 63 aa, Unknown
  Bacterial polypetide isolated from the Sargasso Sea
MKDQNFLVLVRHGQSKWNARNLFTGWKNPGLTSDGKKEAIKAGSLIKQRNIQFSMMFTSALKR

SEQ ID NO: 156143 - protein, 81 aa, Unknown
  Bacterial polypetide isolated from the Sargasso Sea
IPYYEKEIQKHIQENKNVLISAHGNSLRALCKYLFKISDQKINELEIPTGNPLMVEFDNNLKVKKYYYLDKSRAKNIIFNQ

SEQ ID NO: 156144 - protein, 92 aa, Unknown
  Bacterial polypetide isolated from the Sargasso Sea
MFKLVLLRHGESEWNLENRFSGWADIGLTEKGMSEAKRFGLLLKGQNFRFDVVFTSVLKKAIKNMEICLSEMGPSVFSPFMTGVSTSNTMGL

SEQ ID NO: 156145 - protein, 75 aa, Unknown
  Bacterial polypetide isolated from the Sargasso Sea
MSNLILVRHGQSEWNLENKFTGWVDVDLAPKGKLEACKAGELIKNQKIKIDHYFTSYQKRAINTLKLILNTLRVK

SEQ ID NO: 156146 - protein, 76 aa, Unknown
  Bacterial polypetide isolated from the Sargasso Sea
NELILKDLQNGKGVCISAHGNSLRALCKYLFKIDEREISKMEIPTGNPLLIIFEDKLQISSVTYLDQGRAKNLVAF

SEQ ID NO: 156147 - protein, 152 aa, Unknown
  Bacterial polypetide isolated from the Sargasso Sea
MIKNIEIFFIKKLIINNYSFIYQIILKDKQMSYLILVRHGQSVWNLEKKFTGWVDIDLTDNGKLEAKKAGQLIKQKQIEINLYYSSFQLRAKNTLQIIQKELEDFKDVKSAWELNERHYGALTGLNKDEMKKNLERKKFINLDVRGILDLTL

SEQ ID NO: 156148 - protein, 188 aa, Unknown
  Bacterial polypetide isolated from the Sargasso Sea
IDLYYSSFQLRAKNTLKIIQEQLDDNKKVKFAWELNERHYGSLTGLNKDEMKKKLGEEKVHQFRRSWDLRPDPLDKNNSYHPLNINTYKDVPVEKIPDTESLKDTYERVIKYYSEDIKNELKNKNILISAHGNSIRALCKYLFNLDNNQISKLEIPTGNPLMIKFDSDNKILNCGYLDSERAKDLLVY

SEQ ID NO: 156149 - protein, 198 aa, Unknown
  Bacterial polypetide isolated from the Sargasso Sea
GELIKDQQINIDLYYSSFQLRAKNTMKIIQEQLDDYKKVKSAWQLNERHYGSLTGLNKDEMKKKLGEEKVHQFRRSWDLRPDPLDKSNSYHPLNINTYKDIPIDKIPDTESLKDTYGRVIKYYNEDIKNHLKNKNILISAHGNSIRALCKYLFNLDNNQISKLEIPTGNPLLIKFDTDNKILNCEYLDSERAKDLLVY

SEQ ID NO: 156150 - protein, 101 aa, Unknown
  Bacterial polypetide isolated from the Sargasso Sea
KKLNIEFNAYFTSELKRAVNTLNLILEVLEKPDVKINKAWELNERHYGDLTGKNKDEIIAKYGDKQVSIWRRSYDTRPPPIDIQNPYKDKIKSKILCESLK

SEQ ID NO: 156151 - protein, 136 aa, Unknown
  Bacterial polypetide isolated from the Sargasso Sea
MNDFLENGKLIYERNQSLNERDYGDLVGLNKAETAEKFGKEQVHIWRRSYDTPPPKGESLKDVVERVSPYFKEQIEPLLLAEKNILISAHGNSLRAIMIKVGLYKPEEISSIELPTGCPLCLEYEKGILINNYYLD

SEQ ID NO: 156152 - protein, 217 aa, Unknown
  Bacterial polypetide isolated from the Sargasso Sea
WVDVDLSKKGILEAQKSGQLIKNLNVNIDVSYTSFLKRAIKTLTAILQENGLELKFNTSWELNERHYGSLTGLNKEETKKKIGEEQFKKYRRSWDIPPPPMTENDKNHSLFSPLNPSIPVGMIPFTESLKDTYKRVIPYYEKEIQKNIKENKNVLISAHGNSLRSLCKYLFKISDQKINELEIPTGNPLIIEFDNNLEIEKYYYLDETRAKTIIFNQ

SEQ ID NO: 156153 - protein, 167 aa, Unknown
  Bacterial polypetide isolated from the Sargasso Sea
MSHLILVRHGQSTWNLEKKFTGWVDVELTPEGKLEACKAGELIKALGLEINYFYTSYQKRAVETLNLILNTINVKNDEVVKAWELNERHYGALTGLNKDEMKKIYGEEKIHKLRRSWDISPEPLSKKSPYHPNNIKIYKDIPKEKIPDTESLKDTFERVMPYLKKIY

SEQ ID NO: 156154 - protein, 73 aa, Unknown
  Bacterial polypetide isolated from the Sargasso Sea
MNLVLLRHGESEWNLLNKFTGWTDVGLTENGIDEAKFSGEQILKQNFTIDTIHTSLLVRAIHTAEICSDIIGF

SEQ ID NO: 156155 - protein, 37 aa, Unknown
  Bacterial polypetide isolated from the Sargasso Sea
MIKLVLLRHGQSAWNLENKFTGWKDVDFTKKGEEEAK

SEQ ID NO: 156156 - protein, 146 aa, Unknown
  Bacterial polypetide isolated from the Sargasso Sea
MKKILLCILDGWGLGKQNKHNAIAVAKTDNFDAITKKFGMGKLYASEKKVGLPSGQFGNSEVGHMNIGGGRIILQDILRIDKSLKNGDFEKNSNFLNMLNKSKRIHLLGILSSGGVHGHQDHFMKIIDILVKKKKEALLHCFLDGR

SEQ ID NO: 156157 - protein, 216 aa, Unknown
  Bacterial polypetide isolated from the Sargasso Sea
VDVDLAPQGKLEACKAGELIKDKKINIDYFFTSYQKRAINTLELILNTLRIKNTNIIKAWELNERHYGALTGLNKDEMKKKLGEKKVQVFRRSWDISPDPLNKNNPYHPINIEIYKDIPIKNIPDTESLKDTYERVLPYFKKEIQNKLEKKKNIIISAHGNSLRAICKYLFKLDENKITKLEIPTGNPLFISFNDKIEISKCYYLDNERAKDLIVF

SEQ ID NO: 156158 - protein, 193 aa, Unknown
  Bacterial polypetide isolated from the Sargasso Sea
SKNIKIDFYYTSLQLRANNTLKIIQQELKDKKNFTRAWQLNERHYGALTGLNKIEMSKKIGEDKIYEFRRSWDLRPDPLNKESPYHPLNIDSYKQIPRELLPSTESLKDTYERVINYFEKNVKENLKNNNVLISAHGNSIRALCKNLFNLDNIQISNLEIPTGNPMLIKFRENFEITNCEYLDKERAKDLLIF

SEQ ID NO: 156159 - protein, 48 aa, Unknown
  Bacterial polypetide isolated from the Sargasso Sea
MSKLILVRHGQSVWNAENRFTGWVDIDLSKKGILEAQKSGQLIKDLNI

SEQ ID NO: 156160 - protein, 111 aa, Unknown
  Bacterial polypetide isolated from the Sargasso Sea
MNNLILVRHGQSQWNKERRFTGWMDIGLTDLGKSEAKYAGELIKKLDIDFHTCFTSNLKRAINSLEIILENLNNKDINVIKTDLLNERHYGGLTGLNKDETIKKYGEKQVK

SEQ ID NO: 156161 - protein, 156 aa, Unknown
  Bacterial polypetide isolated from the Sargasso Sea
AFEITEATLARLEKKSFDFGRINFANCDMVGHSGDLEASVTALSVVDLMLGRLIEACKKTGYTLVVTADHGNCDEMFLDGDEKSFPQWKELGRGLRPKAKTSHSLSQVPFYVFEAQKKPRKLLASGEGRLSQVASTLLELMELKGQAHFEPSLFSS

SEQ ID NO: 156162 - protein, 198 aa, Unknown
  Bacterial polypetide isolated from the Sargasso Sea
MIIDGMSDRPVFELNHKTPLQAAYLPNINQLVKEGQCGTADPVKPGIVASTVSGTLAILGYDPLEKTVSRGVVEALGCGMKINVGDVAFRGNWATLDEKGLIIDRRAGRIREGINELALSITGQKIDNVRIDVAAGTEHRIAVVMRGSELQDCVSGSDPGDHFHSGINPRPIKPLNKNNPKCLRTAELLNIFEFKARE

SEQ ID NO: 156163 - protein, 71 aa, Unknown
  Bacterial polypetide isolated from the Sargasso Sea
IVAHGNSLRAIIKILDQISNEHIIKLNIPTGIPLVYELNKKITPIKNYYLGDKQKIKKKISYVANQGKVKK

SEQ ID NO: 156164 - protein, 125 aa, Unknown
  Bacterial polypetide isolated from the Sargasso Sea
MDPHPVFQGCSGPVLVVVADGVGIAPDAPHNAVTQASTPTLDALLASDFSTKLAAHGTAVGLPTDDDMGNSEVGHNAIGAGRIFAQGAKLVNKALESGSIYNTDVWNEAISHGETRYAAFHWASF

SEQ ID NO: 156165 - protein, 104 aa, Unknown
  Bacterial polypetide isolated from the Sargasso Sea
MNASIPVGMTPFTESLKNTYDRVVPFYENEIKKNLLENKNILISAHGNSLRALCKYLFNISDTKINELEIPTGNPLLIEFGDNLKIEKYYYLDKSRARDIIFNQ

SEQ ID NO: 156166 - protein, 187 aa, Unknown
  Bacterial polypetide isolated from the Sargasso Sea
EYYYSSLQLRANNTLEIIKKVLNDKKDFIKAWQLNERHYGILTGLNKTEMSEKLGKKKIHEFRRSWNIKPDALSKESPYHPINIDTYKELPEEIIPDTESLEDTYQRVFKYFKDEIEEKLINKNVLISAHGNSIRALCKYLFKLDNNQISSLEIPTGNPLMIEFDKSLKILNCKYLDVERSKDLLIF

SEQ ID NO: 156167 - protein, 216 aa, Unknown
  Bacterial polypetide isolated from the Sargasso Sea
MIIDGMGDRPVFELDHKTPLQAAILPTINKLTKEGQCGIADPVKPGIVASTVSGTLAILGYDPLEKCLSRGVVEAFGCGMKINIGDVAFRGNWATLDKKGLIVDRRAGRIREGTNELALSITEQKIDNVRIYVAAGTEHRIAVVMRGSELQDCISGSDPGDHFHFGINPRPIKPLKKNNPKCLRTAELLKMFELKAREILTKHPVNIKRVSNNLLP

SEQ ID NO: 156168 - protein, 165 aa, Unknown
  Bacterial polypetide isolated from the Sargasso Sea
MKNKNTVVLCILDGWGVGEDIFSNAIKRANTPNFDYLVNNFPTSRLRADGEFVGLLPGQIGNSEVGHITIGAGRPIPMSLPTINKSIKDDSLKDHPVIRRFVNSLKRTGGVAHLAGLFSSGGVHAHRDHMIYLANALANESINVNLHLFSDGRDVLLKQRFMILN

SEQ ID NO: 156169 - protein, 62 aa, Unknown
  Bacterial polypetide isolated from the Sargasso Sea
MSFLILIRHGQSIWNLEKRFTGWVDVVLTDRGRAEAEKAGLLIKKKNIAIHYYYTSLQLRAN

SEQ ID NO: 156170 - protein, 56 aa, Unknown
  Bacterial polypetide isolated from the Sargasso Sea
MEDLNYLILVRHGQSEWNAKNLFTGWKDPDLTDQGRNEAEKAGKLLLEKKINLDEL

SEQ ID NO: 156171 - protein, 173 aa, Unknown
  Bacterial polypetide isolated from the Sargasso Sea
MIIDGVGDRPVFELDHKTPLQAANLPTINQLAEEGQCGAADPVKPGIVASTVSGTLAILGYDPLEKTVARGVVEALGCGMKINIGDIAFRGNWATLDEKGLIVDRRAGRIREGINELALSITGQKIDNVRIDVASGTEHRIAVVMRGSGLQDCVSGSDPGDNFHSGINPRPVN

SEQ ID NO: 156172 - protein, 98 aa, Unknown
  Bacterial polypetide isolated from the Sargasso Sea
MNSLILLRHGQSQWNLENRFTGWKDVPLTEKGIEEANKAGLLIKENKIKVDIIFSSILQRANKTAELALKKKDFAHLWKDNQLIMTKSQNLNERDYGD

SEQ ID NO: 156173 - protein, 87 aa, Unknown
  Bacterial polypetide isolated from the Sargasso Sea
DRVEQAYHLIVDGAGQFNAASAVAGLQAAYERGESDEFVKATTIGTPVQVEDGDAVVFMNFRADRARELTRAFVEPGFKEFERKRAP

SEQ ID NO: 156174 - protein, 90 aa, Unknown
  Bacterial polypetide isolated from the Sargasso Sea
SLKDTYNRTVPYYNKNIEPLLKKSENVLISAHGNSLRALCKKIFQISDDMIVKLEIPTGNPIHIQFEKDLQLKNYKYLDKTRAKEFIVKK

SEQ ID NO: 156175 - protein, 195 aa, Unknown
  Bacterial polypetide isolated from the Sargasso Sea
MVRHGESEWNREGRIQGQFNSPLTEFGVAQAKVISSFLSDHLSYGQIQIYSSPLGRAQQTAEIIAEGINQSAESIVIEPRLNDFNLGEIAGTYGWDKVAELYPELAHLRLNNPMHFHPPGGESGADFKARLMEFMDEIADHETPKLLVSHGIVNKFIRGIRKNLSGKQMIELGESQDTIYHLNNTQDQEIKVPDW

SEQ ID NO: 156176 - protein, 90 aa, Unknown
  Bacterial polypetide isolated from the Sargasso Sea
MNAFGKIFEQCKKNGYSLILTSDHGNAESMFDEKKNIACTTHSLNLVPFTICEKINYSIKTGKLADIAPTVLKLLGIEIPNVMKGKPLIK

SEQ ID NO: 156177 - protein, 222 aa, Unknown
  Bacterial polypetide isolated from the Sargasso Sea
GLTKRFTGWVDVELTPQGKLEACKAGELIKDLNLNFDHFFCSYQKRAIETLSLILNTLRIKNDNVTKAWQLNERNYGSLTGLNKEEMKKALGEKKIHEFRRSWNIAPEPLNKKNPYHPLNIEAYKDIPKNMIPDTESLKDTYERVVPYYEKNIHPLINKNIIIAAHGNSIRSLCKYLFKIDDSKISRLEIPTGNALALNFENKKLVNAKYLDKERAKDLLVF

SEQ ID NO: 156178 - protein, 138 aa, Unknown
  Bacterial polypetide isolated from the Sargasso Sea
EIIIKGLNIREYSLVKCQELNERDYGDLTGLNKDDARKKWGEEQVHIWRRSFDIPPPNGESLKNTAERVVPFFLSEIFTKLKLEENVFISAHGNSLRSLIMHIENLSSEQILEREIATGKPLVYEFDPSKELYSLKYE

SEQ ID NO: 156179 - protein, 298 aa, Unknown
  Bacterial polypetide isolated from the Sargasso Sea
ALDPSEDSILVDATFGRGGHTRALLDRLGTNGRVYAMDRDPEACAIARDWAQGEHRLTVVHAPFSKLSDELHAAGIAGQVSGIVLDLGVSSPQLDDPGRGFSFMRDGPLDMRMDPSQGVPVQDWLADVSEEDLVDVLRRFGEERYARRIARAIVDARTEAPLTTTGELSSLVDACVPTREPGKHPATRTFQALRLFINQELAELDAVLPQAIEMLEPGGRLVVISFHSLEDRRVKRFFHDTAKADPFPPDLPVRADEISPAILRPAKPQRPSAGEVAANPRARSAILRWAQKTPGGDA

SEQ ID NO: 156180 - protein, 80 aa, Unknown
  Bacterial polypetide isolated from the Sargasso Sea
MNNLILVRHGQSVWNLENRFTGWVDVGLAAKGKLEACKAGELIKELNLELSYFYTSLQTRSIETLNLILNTMRIKDQSGY

SEQ ID NO: 156181 - protein, 53 aa, Unknown
  Bacterial polypetide isolated from the Sargasso Sea
MNKLILLRHGQSQWNLENRFTGWKDVPLTEKGIEEAKKAGELLIKNRIIGDMV

SEQ ID NO: 156182 - protein, 216 aa, Unknown
  Bacterial polypetide isolated from the Sargasso Sea
GWVDVDLTDQGKSEAEKAGLLIKSQNINIDFYYSSFQVRANHTLKIIQKVLKSQKDFVRAWELNERHYGELTGLNKIETAKKIGEDKVFKFRRSWDIRPGKLSKESSYHPLNIETYKKIPKELIPDTESLKDTFNRVLGYFKKEIQPKLINKNILITAHGNSIRALCKYLFNLDNNQITSLEIPTGNPLIINFGENLKINECKYLDKERSKNLLVF

SEQ ID NO: 156183 - protein, 142 aa, Unknown
  Bacterial polypetide isolated from the Sargasso Sea
RETKNKIGEEQFKKYRRSWDIAPPPMEEKSEYQNLFSPLNASIPTGMKPFTESLKNTFDRVVPFYKNEIKKNLIENKNVLISAHGNSLRALCKYLFNISNTKINELEIPTGNPLIIEFGDNLKVEKYYYLDKSRAKDIFFNQ

SEQ ID NO: 156184 - protein, 45 aa, Unknown
  Bacterial polypetide isolated from the Sargasso Sea
GNSLRALVKFIEEISEEEIVKLEIATGEPIFYEFNENKLQRKLNW

SEQ ID NO: 156185 - protein, 99 aa, Unknown
  Bacterial polypetide isolated from the Sargasso Sea
PKNKIPLTESLKNTYERVIPFYDIEINKNLKNGKNILISAHGNSLRALCKYLFKISDTKINELEIPTGNPLIIEFDNQLKIQKYFYLDASRAKKIIFNQ

SEQ ID NO: 156186 - protein, 101 aa, Unknown
  Bacterial polypetide isolated from the Sargasso Sea
EKFGKEQVHIWRRSFDISPPNGESLKNVLDRVSPYFKEKIKPLLDKNKNILIAAHGNSLRALMIELEIYKPEEISSIELPTGSPLCINLDKGKLVDFFYLN

SEQ ID NO: 156187 - protein, 37 aa, Unknown
  Bacterial polypetide isolated from the Sargasso Sea
MSILILVRHGQSTWNLEKRFTGWVDVDLTEIGKSEAE

SEQ ID NO: 156188 - protein, 69 aa, Unknown
  Bacterial polypetide isolated from the Sargasso Sea
KENKNVLISAHGNSLRALCKYLFNISDQKINELEIPTGNPLVIEFDNNLQTLKYYYLDEARAKTIIFNQ

SEQ ID NO: 156189 - protein, 69 aa, Unknown
  Bacterial polypetide isolated from the Sargasso Sea
MPLSTKRRPVVLCILDGWGWRPEVSENAIALASTPIFDRLMSECPTAFLQTCGIDVGLPDDQMGNSEVG

SEQ ID NO: 156190 - protein, 209 aa, Unknown
  Bacterial polypetide isolated from the Sargasso Sea
LTAQGKLEACKAGELIKDLKIEISHFYSSYQARAINTLKLILNTIRVQDRKFIKAWELNERHYGELTGLNKDEMKKKFGEEEIFKLRRSWDYPPRPLSKNNPYHPMNIETYNDIPRDRLPDTESLRDTYNRVVKFYDETIKKNLNTNILIAAHGNSIRALCKYLFNLDNKEISKLEIPTGNPLLIETDNHKVKRARYLDNSRAKDLLKF

SEQ ID NO: 156191 - protein, 102 aa, Unknown
  Bacterial polypetide isolated from the Sargasso Sea
MGEKNRFIFWRRSFDVSPPGGESLKDTAERVLPFFNISILPKIIEGKNILVAAHGNSLRSLVMQLDNLSKEEIVSLEIPTGAPIIYSFEANESPTYKENLFE

SEQ ID NO: 156192 - protein, 186 aa, Unknown
  Bacterial polypetide isolated from the Sargasso Sea
DHYFSSVQLRANNTLKIIQEELKDNKAPTEAWELNERHYGALTGLNKDEMKIKLGEDKVHQFRRSWDLRPDPLNKENPYHPSNIEIYKNIPKDKIPSTESLKDTYERVIDFYKKKIEIVNDKNILISAHGNSIRALCKYLFHLDNGEISKLEIPTGNPLLIELSNEKKITSAKYLDSDRAKDLLVF

SEQ ID NO: 156193 - protein, 65 aa, Unknown
  Bacterial polypetide isolated from the Sargasso Sea
MNKLVLLRHGQSQWNLENKFTGWKDVPLTEKGINEANNAGILLKKNNIKIDKIFSSVLERANKTA

SEQ ID NO: 156194 - protein, 156 aa, Unknown
  Bacterial polypetide isolated from the Sargasso Sea
MNLVFVRHGQSIWNLKNKFTGWVDIGLSDQGIQEAINAGKTLIENNFMPEICFTSYLSRSIETSNNLLNEYEPTLVNEINIFKRWQLNERHYGALQGLDKIDTAKKYGEKQVLEWRRGYKTKPPLIKKDSKFDPNHDKAYEDIEITLPLGESLEDV

SEQ ID NO: 156195 - protein, 29 aa, Unknown
  Bacterial polypetide isolated from the Sargasso Sea
MSYLSLVRHGQSEWNEKNLFTGWENPGLT

SEQ ID NO: 156196 - protein, 70 aa, Unknown
  Bacterial polypetide isolated from the Sargasso Sea
SYLESDIAPFIKSGKNALIVAHGNSLRALIKYLNNISDEDISNFNIPTGIPLILRLNNDLNTTQFFFLDS

SEQ ID NO: 156197 - protein, 186 aa, Unknown
  Bacterial polypetide isolated from the Sargasso Sea
YYYSSIQLRAINTLKIIQKHLNDKKKFKKVWQLNERHYGILTGLNKIEMSKKLGEEKVHQFRRSWDLRPDPLSKESEFHPLNISTYKEIPTKFIPDAESLKDTYDRVMSFFESEITDKIKNANILISAHGNSIRALCKYLFKLDEKQISKLEVPTGNPLLINIDKNFIISECKYLDQERAKDLLVF

SEQ ID NO: 156198 - protein, 219 aa, Unknown
  Bacterial polypetide isolated from the Sargasso Sea
NKFTGWVDVELAPQGKLEACKAGEFIKKLNLDIKHFYTSYQLRSIDTLKLILNTIRVKPDNIIKAWQLNERHYGSLTGLNKDEMRKKLGEEEVHKFRRSWDNPPKPLNINSPYHPKNISIYNDIPRNLIPDTESLKDTYERVVPYFIENIEKNLQDNIIISAHGNSIRSLLKYLFKIDENEISKLEIPTGNPLLLKFEKKNIKEAKYLDQSRSRDLIKF

SEQ ID NO: 156199 - protein, 162 aa, Unknown
  Bacterial polypetide isolated from the Sargasso Sea
MSHLILVRHGQSVWNLEKKFTGWVDVELTPQGKLEACKAGELIKELKMPFGHFYSSYQKRAVETLNLILNTIRIKQEKIVKAWELNERHYGSLTGLNKDEMTKIYGEKKILDFRRSWDKNPEPLNKNNPYHPINIEIYNDIPKDKIPDTESLKDTYERVIPY

SEQ ID NO: 156200 - protein, 202 aa, Unknown
  Bacterial polypetide isolated from the Sargasso Sea
EACKAGELIKELRLNIDFFFCSYQKRAIETLNLVLNTLRIKNNNIIKSWELNERHYGSLTGLNKDEMKRKLGEKKIQEFRRSWDIAPEPLNQNSPYHPLNIEIYKNVPRDKIPDTESLKDTFERVTKYYEEKISDKIEKNIIIAAHGNSIRALCKYLFKISEKDISKLEIPTGNPLLIEFENNSVKNARYLDKERAQDLINF

SEQ ID NO: 156201 - protein, 176 aa, Unknown
  Bacterial polypetide isolated from the Sargasso Sea
MEAKNAGLLLKKNNINIDKVFSSVLERANKTAEIAIKASGIKNLYKNDLLNYQRDKRLNERDYGDLVGLNKDETADKFGKEQVHIWRRSYDIPPPNGESLKDVVDRVSPYFSESIKPFILDKKNILIAAHGNSLRAIMIKVGMYKPEEISSIELPTGSPLCLNYDNGKLKEYYYLD

SEQ ID NO: 156202 - protein, 142 aa, Unknown
  Bacterial polypetide isolated from the Sargasso Sea
KEDMKKKYGEEKIHQFRRSWDVKPGALDRKSPYHPLNIETYKDIPVSDIPDTESLKDTHKRVVDCYNELILKDLQNGKGVCISAHGNSLRALCKYLFKINEREISKMEIPTGNPLLIIFEDKLQISSVTYLDQGRAKNLVAF

SEQ ID NO: 156203 - protein, 173 aa, Unknown
  Bacterial polypetide isolated from the Sargasso Sea
NDRSIDNNKIIRDLVIKLKDNGKKCHLIGLLSHGGVHSKQSHILELAKILSDHNIKTDIHAILDGRDSPPMSAYKLLNEFIDQLPKLTKIVSISGRYFAMDRDNRWERTELYYNSLFGINSNKFKSPLDLIKDFYDKKTYDEFIPPCIHENYVGIQDGDGLLVANFRADRVRQ

SEQ ID NO: 156204 - protein, 122 aa, Unknown
  Bacterial polypetide isolated from the Sargasso Sea
IAPPPMAKDSKYLENFSPLNSGIPQNKIPLTESLKSTYERVIPYYDNEINKNLKIGKNILISAHGNSLRALCKHLFKISDTKINELEIPTGNPLIIEFDNQLKIQKYYYLDNSRSKNIIFNQ

SEQ ID NO: 156205 - protein, 80 aa, Unknown
  Bacterial polypetide isolated from the Sargasso Sea
PFFDDEIKKNLKSGKNILISAHGNSLRALCKYLFEISDTKINELEIPTGNPMVIEFNKKLKIQKYYYLDKSRAKDIIFNQ

SEQ ID NO: 156206 - protein, 56 aa, Unknown
  Bacterial polypetide isolated from the Sargasso Sea
MNLILLRHGESQWNLENRFTGWEDIDLTEKGIEEATFSGHQINLANIQISSIHTSL

SEQ ID NO: 156207 - protein, 139 aa, Unknown
  Bacterial polypetide isolated from the Sargasso Sea
KRKLGEEQFKKYRRSWDVAPPLLAKDSNYLENFSPLNSGIPNNKIPLTESLKNTYERVIPFYDMEINKNLKNGKNILISAHGNSLRALCKYLFKISDTKINELEIPTGNPLIIEFDNQLKIQKYFYLDASRAKKIIFNQ

SEQ ID NO: 156208 - protein, 188 aa, Unknown
  Bacterial polypetide isolated from the Sargasso Sea
LNIDMYYCSFQLRAKNTLKIIQDELNDHKEIKEAWQLNERHYGALTGLNKDEMKIKIGEEKVHQFRRSWDLRPDPLEKTNLFHPLNIETYKEIPRNKIPDTESLKDTYERVIEFYKNEIEINNGKNILISAHGNSIRALCKYLFILDNNKISKLEIPTGNPLLIEFENNKISKCKYLDKERAKDLLVF

SEQ ID NO: 156209 - protein, 321 aa, Unknown
  Bacterial polypetide isolated from the Sargasso Sea
LPTIWPMNTRDLIDQFKERGPLVHVVLDGWGVAPEGPGNAIVQANLPVFQKLRGQSAYTQLWTHGLHVGLPGKKDLGGSEVGHMTMGAGVVMEQGPTLINHLIDSGALFETEAMQMVIGNSIREKVPLHLMGLLSDGNIHSHISHFEAVIRHAFRTGVKQCYVHALLDGRDVLVQSAHEYTERLEALFRELRQQDPECDYAFASGGGRETVTMDRDNNWSKIELGWKIHVEGKHENSFPSISDAIEHFRKLNPQVIDQDLPAFVITQNGKPVGPIEDRHSVIFMNFRADRAIEFSEAMVREDFSHFPRDPFPTCLFCVDDA

SEQ ID NO: 156210 - protein, 239 aa, Unknown
  Bacterial polypetide isolated from the Sargasso Sea
MKTTIFELIKYLKKNNLRFLLHMILDGRDTSPKNALNNLKKIKFFFGDLDFVVSISGRYFAMDRDQRWNRTEKFYRTIVYREGEKFDDPETFIKKQYSKEINDEFVKPSVSINYTGIDYKRDGVIFMNFRSDRMRQITHALCDENFKNFFTDRKPIFISAISLVSYSSSLEKFVETLFPKIDIKNTLGDVLSKMDLKQLRLSETEKYAHVTYFFNCGNEKILKGEDRILINSPKVMTYD

SEQ ID NO: 156211 - protein, 41 aa, Unknown
  Bacterial polypetide isolated from the Sargasso Sea
MKLILLRHGESQWNLENRFTGWKDVDLTKNGVEEAEFAGNQ

SEQ ID NO: 156212 - protein, 100 aa, Unknown
  Bacterial polypetide isolated from the Sargasso Sea
MNLVLIRHGKSVWNLENKFTGWYDIELAPEGVIEAEKAASFLADNELKLDVCFTSYLQRANKTLEIILNHMPVKMVKDIEIIKSWKLNERHYGALQGLNK

SEQ ID NO: 156213 - protein, 114 aa, Unknown
  Bacterial polypetide isolated from the Sargasso Sea
MSYLILVRHGQSVWNLEKKFTGWVDVDLTENGKSEAKKAGELIKQEKIEVNLYYSSFQLRAKNTLKIIQEELQDFKEVRSAWELNERHYGALTGLNKDEMKKKLEKIKFINLDV

SEQ ID NO: 156214 - protein, 54 aa, Unknown
  Bacterial polypetide isolated from the Sargasso Sea
GKNVLISAHGNSLRALRKYLENFSEDEIVNIEIGTGEPIFYTSTNGDIKKYDWV

SEQ ID NO: 156215 - protein, 181 aa, Unknown
  Bacterial polypetide isolated from the Sargasso Sea
MNNLILVRHGQSFWNKERRFTGWADIGLTEQGKSEARYAGQLIKELHIEFDAYFTSVQKRAINTIEIILGVLNKGNSEIKKSWELNERHYGALTGLNKDEMMKKHGKKQVHIWRRSFDVPPPPMEKTNPNHPSKNKAYINIPTNKIPNCESLKNTFDRVIPFYEKNIKPILSSNKNILISA

SEQ ID NO: 156216 - protein, 156 aa, Unknown
  Bacterial polypetide isolated from the Sargasso Sea
MHGELNERHYGALTGLNKDEMKVKLGEEKVHQFRRSWDLRPEPLDKKNPYHPLNIETYKEIPLEKIPDTESLKDTYERVIKFYCKEIECKTNENILISAHGNSIRALCKHLFNLDDNEISKLEIPTGNPLLIELENSKISSCKYLDQERAKDLLVF

SEQ ID NO: 156217 - protein, 39 aa, Unknown
  Bacterial polypetide isolated from the Sargasso Sea
MSHLILVRHGQSEWNLEKKFTGWVDVELTPNGKLEACKS

SEQ ID NO: 156218 - protein, 146 aa, Unknown
  Bacterial polypetide isolated from the Sargasso Sea
MSYLILVRHGQSIWNLEKKFTGWVDVDLTENGKSEAIKAGELIKTKNINIDIYYSSFQLRAKNTLKLIKQTLQDTKVSKEAWQLNERHYGSLTGLNKDEMKLKLGEEKVHQFRRSWDLRPDPLDKKNPHHPINIDAYKEIPIDKIQ

SEQ ID NO: 156219 - protein, 67 aa, Unknown
  Bacterial polypetide isolated from the Sargasso Sea
NKNILISAHGNSLRALCKYLFNISDTKINELEIPTGNPLLIEFGDNLKIEKYYYLDKSRARDIIFNQ

SEQ ID NO: 156220 - protein, 173 aa, Unknown
  Bacterial polypetide isolated from the Sargasso Sea
NTLKIIQEELQDFKEVKSAWELNERHYGALTGLNKDEMKKKLGEEKVHQFRRSWDLRPDPLDKNNPYHPINIVTYKGIPLEKIPDTESLKDTYERVIKFYNKEIKNKTNENILISAHGNSIRALCKHLFNLDNNQISKLEIPTGNPLLIELENSKISNCNYLDKERAKDLLVF

SEQ ID NO: 156221 - protein, 156 aa, Unknown
  Bacterial polypetide isolated from the Sargasso Sea
MNLVFIRHGQSLWNLENKFTGWVDIDLSERGEVEAKTAGVTLIDNNFYPEICFTSYLKRSINTAAHIVESYKKMNITFENVKKWELNERHYGALQGLDKIETAKKYGQEQVQIWRRSFDTSPPMAEKNSEHDPKTHELYNDIESKLPLGESLKDVV

SEQ ID NO: 156222 - protein, 142 aa, Unknown
  Bacterial polypetide isolated from the Sargasso Sea
GLNKKEMEDKFGSDQIFKWRRSWDVAPPDIEADNPYYSKILDSHKNIPEKKIPRSESLKDTFNRSVPYFEEKIYPLIEKNNIIISAHGNSLRALYKKIFNISEQDICELNIPTGNPLLIEFKNLKEIRNFQYLDKNREKKII

SEQ ID NO: 156223 - protein, 144 aa, Unknown
  Bacterial polypetide isolated from the Sargasso Sea
NKEETKKKIGEEQFKKYRRSWDIPPPPMAETDKNQSLFSPLNANIPLGMIPFTESLKDTYKRVIPYYEKEIQKNIKENKNILISAHGNSLRALCKYLFKISDQKINELEIPTGNPLIIEFDNNLEIKKYSYMDQTRAKTIIFNQ

SEQ ID NO: 156224 - protein, 37 aa, Unknown
  Bacterial polypetide isolated from the Sargasso Sea
MSYIILIRHGQSVWNLENRFTGWVDVDLNENGRNQAR

SEQ ID NO: 156225 - protein, 28 aa, Unknown
  Bacterial polypetide isolated from the Sargasso Sea
MSNLILVRHGQSVWNLENRFTGWVDVDL

SEQ ID NO: 156226 - protein, 59 aa, Unknown
  Bacterial polypetide isolated from the Sargasso Sea
MPGCFLAPSDAERASSMSATPKPLVLIILDGFGHSDKPEYNAIHAASTPVYDRLRATYP

SEQ ID NO: 156227 - protein, 101 aa, Unknown
  Bacterial polypetide isolated from the Sargasso Sea
DECLAEILAVVDEHPEWVVLVTADHGNCEVMIDSSGRVQTAHTTTPVDLMFYDPLGGDASLAHEGRLGDVAPTVLGQMKIDQPPEMTGRDLVTRPDILETD

SEQ ID NO: 156228 - protein, 224 aa, Unknown
  Bacterial polypetide isolated from the Sargasso Sea
MSFLILVRHGKSLWNEENRFTGWTDIDLSNAGIIEAKEAAKKIKKKNIQISMAYSSIFSRAHDTCKIILDELGLSSLQIIKDWRINERHYGNLQGLNKKETSDIYGKEQVFEWRRNYTTKPPLLEESRFINDKSLPIFKEIPKNKFPRGESLKDTLGRVEVFCKEIIYNSLENEKNILISAHGNSIRAMIKLFENIDDESIDKLEVPTGEPIFYKYQSKKLLRN

SEQ ID NO: 156229 - protein, 208 aa, Unknown
  Bacterial polypetide isolated from the Sargasso Sea
MTENGKSEAKKAGKLIKQEKIEVNLYYSSFQLRAKNTLKIIQEELQDFKEVKSAWELNERHYGALTGLNKDEMKEKLGEEKVHQFRRSWDLRPDPLDKKNPYHPLNIETYKEIPLEKIPDTESLKDTYKRVLKFYSKEIEYKTSENILISAHGNSIRALCKHLFNLDNNEISKLEIPTGNPLLIELENSKISNCKYLDQERAKDLLVF

SEQ ID NO: 156230 - protein, 77 aa, Unknown
  Bacterial polypetide isolated from the Sargasso Sea
MSKISSKNIKSLSVPQSPVVLAILDGWGYRKEKSDNAIKSASTPIMDSLWHAYPHTLISASGSDVGLPDGQKWAIQR

SEQ ID NO: 156231 - protein, 109 aa, Unknown
  Bacterial polypetide isolated from the Sargasso Sea
MKLEINGGDEQVKLWRRSYDIAPENGESLKDTCNRTIPYSKKNILPKLHDGENVIITAHGNSLRSIIMHVEDLSEEAIVNVEITTGIPIVYEYENKKIIKKTELFVKRY

SEQ ID NO: 156232 - protein, 210 aa, Unknown
  Bacterial polypetide isolated from the Sargasso Sea
LTDQGKIEAEKAGNLIKEKKIVINYFYSSLQLRANKTLEIIQSILNEKKGFTKAWQLNERHYGALTGLNKVEMIRKLGEKKVHEFRRSWNIRPEPLNKESPYHPKNIETYNNIPKEKIPDTESLKDTYERVISFYKQEIRDKLNKNNVLISAHGNSIRALCKYLFKLDEIQISSLEIPTGNPLLINIENDHKIFKSEYLDKSRAKDLLIF

SEQ ID NO: 156233 - protein, 148 aa, Unknown
  Bacterial polypetide isolated from the Sargasso Sea
SILDRAIITAEIIIKGLNIREYSLVKCQELNERDYGDLTGLNKDDARKKWGEEQVHIWRRSFDIPPPNGESLKNTAERVVPFFLSEIFTKLKLEENVFISAHGNSLRSLIMHIENLSSEQILEREIATGKPLVYEFDPSKELYSLKYE

SEQ ID NO: 156234 - protein, 105 aa, Unknown
  Bacterial polypetide isolated from the Sargasso Sea
MNLILIRHGQSEWNALNQFTGWKDPDLTATGIQEAHNAGKIINNLKINFDLAFTSALIRAQNTAEIILKEINQSLSTIKNQALNERNYGDLAGLNKDDARKRWGD

SEQ ID NO: 156235 - protein, 160 aa, Unknown
  Bacterial polypetide isolated from the Sargasso Sea
MSYLILVRHGQSIWNLEKKFTGWVDVDLTENGKLEAKKAGNLIKEKKIKIDLYYSSVQLRAKNTLKIIQEILQDTKFSKKVWQLNERHYGALTGLNKDEMKKKLGEDKVHQFRRSWDLQPEPLNKDNPYHPLNIETYKDVPINKIPDTESLKDTYERVLE

SEQ ID NO: 156236 - protein, 113 aa, Unknown
  Bacterial polypetide isolated from the Sargasso Sea
MQGLNKDECREKWGEEKVQMWRRSYEMGPPGGETLKETGERVIPYFKEEINPLILKGKNILIAAHGNSLRSLIKFLDSVSDEDIVKLEIPTGAPIHYIFNEDGDIIKKQDLID

SEQ ID NO: 156237 - protein, 121 aa, Unknown
  Bacterial polypetide isolated from the Sargasso Sea
MKPTILCIMDGWGVGPNTKYNAIAQANTPIFDRLIKQWPNSLMQASGEYVGLPHGQMGNSEVGHMNIGAGRIVVQDLPKINQVIQSDKLSENNILKKFISDTKKAKGKCHLVGLLSTRWGT

SEQ ID NO: 156238 - protein, 76 aa, Unknown
  Bacterial polypetide isolated from the Sargasso Sea
MISKKNEQTILCILDGWGISKRVKGNAIKLARTPNFDNLVNNCPNATLVTHGPLVGLPENQVGNSEVGHMNLGAGR

SEQ ID NO: 156239 - protein, 180 aa, Unknown
  Bacterial polypetide isolated from the Sargasso Sea
MSYLILVRHGQSVWNLEKKFTGWVDVDLTENGKLEAKKAGQLIKQKQIEINLYYSSFQLRAKNTLQIIQKELRDFKDVKSAWELNERHYGALTGLNKDEMKKKLGEDKVHQFRRSWDLRPDPLDKKNPYHPINIQTYKEIPLEKIPDTESLKDTYERVIKFYNQEIENKTNENILISAHG

SEQ ID NO: 156240 - protein, 91 aa, Unknown
  Bacterial polypetide isolated from the Sargasso Sea
MSHSKKISTLVLVRHGQSHWNKENLFTGWKDPDLTEKGIEEAINAGKKIKQTNINFDLHFTSKLKRAQRTGNLIMKELGEDVPTSENKALN

SEQ ID NO: 156241 - protein, 205 aa, Unknown
  Bacterial polypetide isolated from the Sargasso Sea
GKSEAKKAGELINKNNLLIDLYFSSVQLRAKNTLKIIQEELKDNKVPTEAWELNERHYGALTGLNKDEMRIKLGEDKVHQFRRSWDLRPDPLNKDNPYHPSNIEIYKNIPQDKIPSTESLRDTYERVIDFYKKKIEILNDKNILISAHGNSIRALCKYLFDLNNSEISKLEIPTGNPLLIELSNEKKITSAKYLDSDRAKDLLIF

SEQ ID NO: 156242 - protein, 61 aa, Unknown
  Bacterial polypetide isolated from the Sargasso Sea
MSHLILVRHGQSEWNLENKFTGWVDVELAPQGKLEACKAGEFIKKLNLEIKHFYTSYQLRS

SEQ ID NO: 156243 - protein, 58 aa, Unknown
  Bacterial polypetide isolated from the Sargasso Sea
MHTLVLLRHGESQSNQDNLFTGWSDVDLTEKGAKEAKNSGILLKKHNYQFDKIFTSVL

SEQ ID NO: 156244 - protein, 38 aa, Unknown
  Bacterial polypetide isolated from the Sargasso Sea
MSSLVLVRHGKSLWNLENRFTGWTDVSLSKEGEKEAKL

SEQ ID NO: 156245 - protein, 104 aa, Unknown
  Bacterial polypetide isolated from the Sargasso Sea
FTAAVKAVEVIDTCLKKIINAIKEVNGQLLVTADHGNVEQMLDTTTNQPLTSHTKGPVPLVYVGNKKIKFKALGSLCDIAPTMLALMDMPIPDQMTGTVLVEDT

SEQ ID NO: 156246 - protein, 236 aa, Unknown
  Bacterial polypetide isolated from the Sargasso Sea
MSHLILVRHGQSEWNLENKFTGWVDVELAPQGKLEACKAGEFIKKLNLEIKHFYTSYQLRSIDTLKLILNTIRVKPNNIIKAWQLNERNYGSLTGLNKDEMKKKLGEDEVHKFRRSWDNPPKPLNINSPYHPKNISIYNDIPRNLIPDTESLKDTYERVVPYFIKNIEKNLQDNIIISAHGNSIRSLLKYLFKIDDNEISKLEIPTGNPLLLKFEKKNIKEAKYLDQSRSRDLIKF

SEQ ID NO: 156247 - protein, 90 aa, Unknown
  Bacterial polypetide isolated from the Sargasso Sea
LSDLEIPSTESLKDTLNRLLPIWNQDIAPFIKSGKNALIVAHGNSLRALIKYLNNISDEDISNFNIPTGIPLVLRLNNDLNTTQFFFLDS

SEQ ID NO: 156248 - protein, 105 aa, Unknown
  Bacterial polypetide isolated from the Sargasso Sea
MSKLIILRHGESEWNKLNLFTGWEDVNLTDQGKIEAKLAAFAIQNLKVDVNHAYTSALKRAGKTLEIVLNVLKKDIPIISDPALNERNYGSLTGMNKDEARNKWG

SEQ ID NO: 156249 - protein, 213 aa, Unknown
  Bacterial polypetide isolated from the Sargasso Sea
WVDVDLAPQGKLEACKAGEQIKELNINFNYFFTSFQKRAINTLKLILNTLRIKNKEVIKSWQFNERHYGFLTGLNKDDMKKKFGEDMIFKFRRSWDYPPEALDKRNPYHPINISSYDEVPRKLLPDTESLKDTYNRVIPFFKKNVEILDGNILISAHGNSLRSMCKYLFNIDKNEIPKLEIPTGNPLLIKFKDKKVISANYLDKDRGKDLLVF

SEQ ID NO: 156250 - protein, 179 aa, Unknown
  Bacterial polypetide isolated from the Sargasso Sea
LRAKNTLKIIQKQLDDYKKVKSAWQLNERHYGSLTGLNKEEMKKKLGEEKLHQFRRSWNLRPDPLEKSNSYHPLNINIYKDIPIDKIPDTESLKDTYERVIKYYNEEIENNLKNKNILISAHGNSIRALSKFLFNLDNNQISKLEIPTGNPLLIKFDSDNKILNCEYLDSERAKDLLVY

SEQ ID NO: 156251 - protein, 165 aa, Unknown
  Bacterial polypetide isolated from the Sargasso Sea
GKIINSLGINFDYLYTSALVRAQLTGSIILSEINQKNVNTIENKALNERFYGDLQGLNKDECRKKWGDEKVQMWRRSYDQGPPGGETLKQTGERVVPYFIEEIEPLVKNGSNILIAAHGNSLRSLIKFLDDVTDEDIVKLEIPTGAPIHYVFDSNGKVMQRNNLF

SEQ ID NO: 156252 - protein, 86 aa, Unknown
  Bacterial polypetide isolated from the Sargasso Sea
MSLLILMRHGQSMWNAANLFTGWVDVPLTNKGIEEAIEGGKSIANLPIDEVHVSTLIRSQMTAMLALAQQGTGKVPIFQYPDNSES

SEQ ID NO: 156253 - protein, 128 aa, Unknown
  Bacterial polypetide isolated from the Sargasso Sea
MINFANADMVGHTGNLEAAVQAVESVDQALGPMVEAVKAVNGFMVITADHGNADEMLTKNRVSGETEASTKHSLNPVPFLIYDPLYDGSYRLKDFAANQDLNLSHVAATNLILMGMEVPDDLAPPLFL

SEQ ID NO: 156254 - protein, 418 aa, Unknown
  Bacterial polypetide isolated from the Sargasso Sea
MIDQFKGRGPLVHVVLDGWGVAPEGPGNAIAQANLPVFHILRGKSAYTQLWTHGLHVGLPGKKDLGGSEVGHMTMGAGIVMEQGPTLINHLIDSGALFETEAMQMVIGNSIREQVPLHLMGLLSDGNIHSHISHFEVVIRHAFRTGVKQCYVHALLDGRDVPVQSAHEYTERLEGLFRELKQQDPDCDYAFASGGGRETVTMDRDNNWRKIELGWKIHVEGNHGNGFPSIGDAIEHFRKLDPQVIDQDLPAFVITQNGKPVGPIEDRHSVIFMNFRADRAIEFSEAMVKEDFEHFPRDPLPRVCFASMMQYDLDNGFPEHFLAGTPRVDNPFGKRLVEQGIKQFRLTETQKFPHVTFFYNGGYREPLDPKIEDYHLIPSDKVPTFADAPMMKASEIGKRAVEFIYSGVYGYGLINFAN

SEQ ID NO: 156255 - protein, 84 aa, Unknown
  Bacterial polypetide isolated from the Sargasso Sea
MKGSEGEPWTAHTINKVPLILIEGEKRKIPNMGNEINLRENAGLADIAPTLLQLLNLPIPREMTGKSLIQEIELKGYNKVVQHV

SEQ ID NO: 156256 - protein, 187 aa, Unknown
  Bacterial polypetide isolated from the Sargasso Sea
MVRHGESEWNREGRIQGQFNSPLTEFGLAQAKAISSFLSDHLSYDQIQIYSSPLGRAQQTAEIIAEGINQSVESIIIEPRLNDFNLGEIAGTYGWDKVAELYPELASLRLNNPMHFHPPGGESGADFKVRLMEFMDEIANHETPKLLVSHGIVNKFIRGIRKNLSGKQMIELGESQDTIYHLNNTQD

SEQ ID NO: 156257 - protein, 86 aa, Unknown
  Bacterial polypetide isolated from the Sargasso Sea
MEDLNYLILVRHGQSEWNAKNLFTGWKDPDLTDQGRNEAEKAGKLLFEKKIDLDEMFTSVLIRAINTGNIILDQLGIKSLPITRDQ

SEQ ID NO: 156258 - protein, 100 aa, Unknown
  Bacterial polypetide isolated from the Sargasso Sea
MKNTSLILVRHGQSEWNEKNLFTGWENPGLTKKGTDEAKHAGLLINDLDIEFDHLFTSVLDRAKLTGEIILENIDQKDLDSIENKALNERFYGDLQGLNK

SEQ ID NO: 156259 - protein, 84 aa, Unknown
  Bacterial polypetide isolated from the Sargasso Sea
MKGSEGEPWTAHTINKVPLILIEGEKRKIPNMGNEINLRENAGLADIAPTLLQLLNLPVPREMTGKSLIQEIELKGYNKVVQHV

SEQ ID NO: 156260 - protein, 68 aa, Unknown
  Bacterial polypetide isolated from the Sargasso Sea
ADHGNCERMINDDGSINTSHTINPVPIILVNSENKEINNGVLADIAPTILDILGIETPIEMEGESLLI

SEQ ID NO: 156261 - protein, 102 aa, Unknown
  Bacterial polypetide isolated from the Sargasso Sea
MQERSGEKNKYISERRSFDVPPPGGESLKNTGERVMPYYKKEIAPKIAAGKNVLVVAHGNSLRSLIKEIDKISDQEIVKLEIPTGAPIIYRYSKDEQAFIKD

SEQ ID NO: 156262 - protein, 149 aa, Unknown
  Bacterial polypetide isolated from the Sargasso Sea
MKAREISNKAVELICSGEYQYGLINFANADMVGHTGDFQAALNAVETVDIALDLILKAITEMKGLLVITADHGNADQMLIKNCNGVMEINTKHSLNPVPFIIFDPLYNGNYHLKPFGEDYNNNLSNVAATNFILLGQPVPDDLAPPLFG

SEQ ID NO: 156263 - protein, 136 aa, Unknown
  Bacterial polypetide isolated from the Sargasso Sea
MVRHGESEWNREGRIQGQFNSPLTEFGVAQAKAISSFLSDHLSYDLIQIYSSPLGRAQQTAEIIAEGINQSAESIVIEPRLNDFNLGEIAGTYGWDKVAELYPELAHLRLNNPMHFHPPGGESGADFKARLMELMD

SEQ ID NO: 156264 - protein, 190 aa, Unknown
  Bacterial polypetide isolated from the Sargasso Sea
INIDYSFSSLQIRAINTLKLVHNTMRIKETFTKAWQLNERHYGALTGLNKDEMKKKFGEKKVHEFRRSWNIKPEPLNKNNPYHPINIETYKDIPKENLPDTESLEDTYNRVLPYYKKNIQNKILDGKNVLIVAHGNSIRAICKYLFKLDEKKISLLEIPTGNPLVINFEKNKIVKCKYLDKSRAKDLIAF

SEQ ID NO: 156265 - protein, 154 aa, Unknown
  Bacterial polypetide isolated from the Sargasso Sea
FTSELKRAQETAKIILQNLGQWDFLNNEGKIISNINLNERDYGDLTGLNKKETAEKFGEEQVHKWRRGYSDQPPNGESLEDVVRRVTKYFEEVIQPAIQSDENGNVLIAAHGNSLRALLIVMNIYEPNNINSVELSTGVPIHVILKDNKFSIKD

SEQ ID NO: 156266 - protein, 58 aa, Unknown
  Bacterial polypetide isolated from the Sargasso Sea
AVESDENDNILIAAHGNSLRALLIVMNIYEPININSVELSTGVPIHIILKDNKFSIKD

SEQ ID NO: 156267 - protein, 105 aa, Unknown
  Bacterial polypetide isolated from the Sargasso Sea
RLEKAALEVDATLLITADHGNAETMTDPDSGKPFTSHTTNKVPLILVNASSDITNLKDGKLADVAPTLIELLGLSKPREMTGQSLLETTECITSRRDSNPCTANG

SEQ ID NO: 156268 - protein, 285 aa, Unknown
  Bacterial polypetide isolated from the Sargasso Sea
MSLGSGRIVLQSLPRINLAFKKNIIKENNQLLEFLTKHQTKKTIHVLGLCSNGGVHSHKDHIIELTKILNEKKFKICLHLFSDGRDCAPNEFGNIIQKIMSKLPPEIKISTLIGRYYSMDRDNRWDRIKKCYDLIINAKSAYNFKNVFQAINFAYDRNETDEFVSPTLIGDYEGVKEGDSLLITNFRADRVREILEAFLFPKFFHFKRSKNKPPFKNALGMTEYSDKLNPYIKSIFKNEHIKDTLGEVISRSGLTQLRLAETEKYPHVTFFFNGGKEQKYLKKIE

SEQ ID NO: 156269 - protein, 238 aa, Unknown
  Bacterial polypetide isolated from the Sargasso Sea
MSHLILVRHGQSEWNLENRFTGWVDVDLSPKGKLEACKAGESLKELNININHFFTSYQKRAINTLKLILNTMRIKDDKIIKAWELNERHYGSLTGLNKDEMRKKLGEEQVQIFRRSWDISPEPLSKNNPYHPLNIEIYKNIPNEKIPDTESLKNTYERVIPFFKEKIEKKLSENVIISAHGNSIRSLCKYLFDISNEEISKLEIPTGNPLILKFDENNKLLNAKYLDKERAKNLIKFG

SEQ ID NO: 156270 - protein, 219 aa, Unknown
  Bacterial polypetide isolated from the Sargasso Sea
ENRFTGWVDVELSKKGEEEAIKAGNLIKDLDINIDGIFTSYLTRAIKTLELIMKVNKFKNLPFTKAWELNERHYGALTGLNKDEMKKKLSEDKVHELRRSWDKPPDKLDASSIYHPNNIDIYKNISKDKIPNTESLRDTYERVVPYYKKNINNINKNILISAHGNSIRALCKYLFDLNNDNISKLEIPTGNPLLLEIENDKAKSGKYLDSERAKDLIIF

SEQ ID NO: 156271 - protein, 38 aa, Unknown
  Bacterial polypetide isolated from the Sargasso Sea
MSHLILVRHGQSEWNLEKRFTGWVDVDLAPNGKIEACK

SEQ ID NO: 156272 - protein, 137 aa, Unknown
  Bacterial polypetide isolated from the Sargasso Sea
MSHLILIRHGQSEWNLKNRFTGWVDVELSAQGKLEACKAGELIKGQKLKFDYFYTSYQKRAIETLKLITTTLRVKDVETTKAWQLNERHYGALTGLNKDEMKKKIGEKKVHEFRRSWNISPEPLSKNNPYHPLNIDT

SEQ ID NO: 156273 - protein, 118 aa, Unknown
  Bacterial polypetide isolated from the Sargasso Sea
MTKLILTRHGQSVWNAENRFTGWVDVDLSDKGVQEAEKSGQIIKDLNIKIDFSYTSYLKRAIKTLTTILKKNRLELKFNTAWQLNERHYGSLTGLNKEETKNKIGEEQFKKYRRSWDI

SEQ ID NO: 156274 - protein, 146 aa, Unknown
  Bacterial polypetide isolated from the Sargasso Sea
MSKLILTRHGQSTWNAENRFTGWVDVGLSEKGKEEAKKSGELISELNIKIDINYTSYLKRAIETLTIILKTLNLSMRFNTAWELNERHYGSLTGLNKEETKKKIGEEQFKKYRRSWDVAPPLMAKDSKYLENFSPLNDGIPQIKIP

SEQ ID NO: 156275 - protein, 95 aa, Unknown
  Bacterial polypetide isolated from the Sargasso Sea
MSHLILVRHGQSEWNLENKFTGWVDVELAPQGKLEACKAGEFIKKLNLEIKHFYTSYQLRSIDTLKLILNTIRVKPNNIIKAWQLNERHYGSLTG

SEQ ID NO: 156276 - protein, 236 aa, Unknown
  Bacterial polypetide isolated from the Sargasso Sea
MSHLILVRHGQSEWNLENKFTGWVDVELAPQGKLEACKAGELIKKLNLEIKHFYTSYQLRSIDTLKLILNTIRVKPDNMIKAWQLNERHYGSLTGLNKDEMRKKLGEEEVHKFRRSWDNPPKPLNTNSPYHPKNISIYNDIPRNLIPDTESLKDTYERVVPYFVENIEKNLQDNIIISAHGNSIRSLLKYLFKIDDNEISKLEIPTGNPLLLKFEKKNIKEAKYLDQSRSRDLIKF

SEQ ID NO: 156277 - protein, 238 aa, Unknown
  Bacterial polypetide isolated from the Sargasso Sea
MSHLILVRHGQSEWNLEKKFTGWVDVELAPNGKLEACKSGELIKELNLNLDYFFCSYQKRAIETLNLILNTLRIKNNDVIRAWELNERHYGALTGLNKDEMKKTLGEDKVLEFRRSWDIRPEPLNKNNPYHPINVEIYKNIPKEKIPDTESLKDTYERVIPYFKKNISNKLNKNIIIAAHGNSIRALCKHLFNIDNEKISKLEIPTGNPLLIKFDNNKKVKEASYLDKKRANDLIIFN

SEQ ID NO: 156278 - protein, 50 aa, Unknown
  Bacterial polypetide isolated from the Sargasso Sea
MKHLILIRHGQSEWNQQKRFTGWVDVELTQKGRAEAKRAGELIKEKKVKL

SEQ ID NO: 156279 - protein, 157 aa, Unknown
  Bacterial polypetide isolated from the Sargasso Sea
MNLILIRHGQSEWNALNQFTGWKDPDLTATGIQEAKNAAKIINNLKINFDLVFTSALIRAQNTAEIILKEINQPLSTIKNMALNERNYGDLAGLNKDDARKRWGDEQVHIWRRSYDIPPPGGESLKDTGERVLPFFMKEIHPHVCNGKNVLVAAHGN

SEQ ID NO: 156280 - protein, 92 aa, Unknown
  Bacterial polypetide isolated from the Sargasso Sea
MNKLILLRHGESQWNLENRFTGWTDVSLTKNGEYEAKKAGILLNNNNIHIDIAYISYLQRAVKTYKICQKQLKKTNIKVKYDWRLNERHYGS

SEQ ID NO: 156281 - protein, 231 aa, Unknown
  Bacterial polypetide isolated from the Sargasso Sea
MNSLVLVRHGQSLWNKERRFTGWADIDLTEQGKSEAKYAGELIKNLNVNFDAFFTSELKRAIHSMDLILEVLKKTDVKIIKNSSLNERHYGGLTSLNKDETIKKYGNEQVHTWRRSYEIPPPPMDEDHPYKNKIKSKILSESLKDTFNRVVPYYEKEIKPLISIKKNILIVFHGNSCRALLMRIFNISKEKIIKFEIPTGNPLLIEFDEKLLIKKYKYLDSKRSKKILFNI

SEQ ID NO: 156282 - protein, 199 aa, Unknown
  Bacterial polypetide isolated from the Sargasso Sea
MSHLILVRHGQSEWNLEKKFTGWVDVELAPNGKLEACKSGELIKELNLNLDYFFCSYQKRAIETLNLILNTLRIKNNDVIKAWELNERHYGALTGLNKDEMKKTLGEDKVLEFRRSWDIRPEPLNKNNPYHPINIEIYKNIPKDKIPDTESLKDTYERVIPYFKKNISDKLNKNIIIAAHGNSIRALCKHLFNIDNEKI

SEQ ID NO: 156283 - protein, 111 aa, Unknown
  Bacterial polypetide isolated from the Sargasso Sea
RDYGELTGLNKDEARENFGVDQVQKWRRTYDTPPPGGESLKETYNRVIPYFESEILPLMKEKNVLISAQGNSLRALVKYLDSISEKDIVKLEIATGEPIFYKFTDGKCIKE

SEQ ID NO: 156284 - protein, 161 aa, Unknown
  Bacterial polypetide isolated from the Sargasso Sea
KKAWELNERHYGALTGLNKDEMVKKHGKEQIHVWRRSFNVPPPPMEKTHPNHPSNNEAYIKIPANKIPNSESLKNTFDRVIPYYEENIKPLLSSNKNILVSAHGNSLRALCKKILNISDKKIIDFEIPTGNPLLIIFGKNMKVEKYKYLDPNRAKKIISNL

SEQ ID NO: 156285 - protein, 169 aa, Unknown
  Bacterial polypetide isolated from the Sargasso Sea
MSYLILVRHGQSIWNLENRFTGWVDVDLNDNGRAQAKKSGELIKKKQINIDLYYSSFQLRAKNTLKIIQEQLDDYKKVKSAWELNERHYGSLTGLNKDEMKKKLGEEKVHQFRRSWDLRPDPLDKNNSYHPLNINIYKDVPVEKIPDTESLKDTYERVIKYYSEDIKND

SEQ ID NO: 156286 - protein, 276 aa, Unknown
  Bacterial polypetide isolated from the Sargasso Sea
KQDLVIINEAISSSKFFRNEAILNAITTTKKKNKKNDLHLLGLISFGGVHSHIDHLIAILKMCKAYGVSPKLHLFTDGRDADPKSALEIFEYLNKYLTEYGGEIYTVSGRYYAMDRDQRWDRTELAWDAIVNNKGEKANNFIDAIENSYAKDTTDEFILPTVLKGAKRLKKNDSLLFFNFRNDRTRQIARALNVERFDNFKRTNNNTAYSITTMTEYDPYFSCPVAFRTKAPTTTLGSVVSDLGLKQFHCAETEKYPHVTYFINGGREDPYPGKKE

SEQ ID NO: 156287 - protein, 237 aa, Unknown
  Bacterial polypetide isolated from the Sargasso Sea
MSFLILVRHGQSTWNLEKRFTGWVDVELTEKGKSEAKKAGLLVKTKGIKINLYYSSLQLRANHTMKIIQEILKERKEFTKAWQLNERHYGALTGLNKTEMSKKIGADRVHEFRRSWDVRPEALKRDSQFHPLNIKTYKDVPKELIPDTESLKDTYERVIKYFREEILDKLKENNILISAHGNSIRALCKNLFNLDENQISKLEIPTGNPLIIEFNSQNEIILCEYLDKERAKDLVVF

SEQ ID NO: 156288 - protein, 161 aa, Unknown
  Bacterial polypetide isolated from the Sargasso Sea
MSALILVRHGQSEWNEKNLFTGWKDPDLTSKGEVEAKEAGKSLNKLDIKYDLMFTSVLLRAKRTAQIILNELNQRDIKIIKDKAINERDYGNLSGLNKDEAREKWGEEQVHKWRRSYNIAPPGGESLKDTAERVLPYYRKNILPHVNERKNIIVAAPWKFA

SEQ ID NO: 156289 - protein, 199 aa, Unknown
  Bacterial polypetide isolated from the Sargasso Sea
RLIKNLDIKIDVSYTSFLKRAIKTLTTILKENGLDLKFNTSWELNERHYGSLTGLNKEETKKKIGEEQFKKYRRSWDTRPPPMAESDKNHSLFSPLNASIPLGMIPFTESLKDSYKRVIPYYENEIQKHIKENKNVLISAHGNSLRALCKYLFKISDKKINELEIPTGNPLVIEFDTNLKIEKCYYLDKSRAKTIIFNQ

SEQ ID NO: 156290 - protein, 83 aa, Unknown
  Bacterial polypetide isolated from the Sargasso Sea
MGKLIAIRHGQSTWNAENRFTGWVDVDLSEKGVAEAEKSGKLIKELNIDFDMCFTSYLKRAINTLEIVLEVLGKKYKYHESLG

SEQ ID NO: 156291 - protein, 248 aa, Unknown
  Bacterial polypetide isolated from the Sargasso Sea
MNKLVILRHGESLWNLENKFTGWIDIDLSKNGENEASSAGKLLKKEGFIFDLAYTSLLKRANNTLEICMKNMDIEKSKKLKIIKNWRLNERHYGALQGLNKKKTSEKYGQEQVLKWRRSFDIQPPASKKTINDSELSFEISKKHIPLSESLRDVINRFKPYWKNEILKKLKAGKKILIVAHGNSLRALLMIIKNISKENIVNLNIPTGIPLVIEMDKNQQPIRDYYLGSKDSIAKKIHSVASQGSINT

SEQ ID NO: 156292 - protein, 159 aa, Unknown
  Bacterial polypetide isolated from the Sargasso Sea
METNYLVLVRHGQSTWNQKNLFTGWKDPGLTELGKEEAFKAGQHIKKQNIKFNLLFTSALKRAQDTASIILEVIEDSGINIFKNEALNERDYGDLTGLNKDTARQEFGKEQVQIWRRSYSDGPPNGESLEDTYNRVIPYFENEIMPVLQKNKNVIILLT

SEQ ID NO: 156293 - protein, 135 aa, Unknown
  Bacterial polypetide isolated from the Sargasso Sea
NINQKDLDSIENKALNERFYGDLQGLNKDECRQKWGAEQVQIWRRSYDVGPPGGESLKETGERVLPYYLNEIYPLILQGKNILVSAHGNSLRSLIMHLDKLSSDEIVKLEIPTGAPIQYIFDDQGKVLIKKNLIG

SEQ ID NO: 156294 - protein, 236 aa, Unknown
  Bacterial polypetide isolated from the Sargasso Sea
MSFLILVRHGQSVWNLEKRFTGWVDVDLTVQGKAEAEKAGVLIKERNIEIDFYYSSLQLRANNTLKIIQKILNDEKDFIRTWKLNERHYGSLTGLNKIEMIKKIGEDKIHKFRRSWDIKPGALSKESPFHPLNIETYKEMPKEAIPDTESLKDTYERVVNFFQEEIKAKLMTNNILISAHGNSIRALCKNLFNLDNEQISKLEIPTGNPMLIELNSNTEIKKCEYLDKDRAKDLVV

SEQ ID NO: 156295 - protein, 105 aa, Unknown
  Bacterial polypetide isolated from the Sargasso Sea
MSKLILIRHGQSVWNAENRFTGWVDVDLSEKGILEAQKSGQLIKNLNVNIDVSYTSFLKRAIKTLTTILQENSLELKFNTSWELNERHYGSLTGLNKEETKKKIG

SEQ ID NO: 156296 - protein, 214 aa, Unknown
  Bacterial polypetide isolated from the Sargasso Sea
MSYLILVRHGQSVWNLEKKFTGWVDVDLTENGKLEAKKAGELIKHEQIQVSLYYSSFQLRAKNTLKIIQDELEDHKKVRSAWELNERHYGALTGLNKDKMKKKLGEEKVHQFRRSWDIRPEPLEKKSPYHPINIKTYKEIPLDKIPDTESLKDTYERVIKFYNEEIESNISKNILISAHGNSIRALCKYLFGLNNKEISNLEIPTGNPLLIEFE

SEQ ID NO: 156297 - protein, 38 aa, Unknown
  Bacterial polypetide isolated from the Sargasso Sea
MNKLVLLRHGQSQWNLENRFTGWKDVPLTEKGINEANN

SEQ ID NO: 156298 - protein, 139 aa, Unknown
  Bacterial polypetide isolated from the Sargasso Sea
MNKLVLLRHGQSQWNLENKFTGWEDVPLTEKGIKEANNAGILLKKNNIEIDKIFSSVLERANKTVEIAMKASGIENLHKNGVLIYEKDQRLNERDYGDLVGLNKAETAEKFGKEQVQIWRRSYDTPPPNGESLKDVVDR

SEQ ID NO: 156299 - protein, 91 aa, Unknown
  Bacterial polypetide isolated from the Sargasso Sea
MSKISSKNIKRLSVPQSPVVLAILDGWGYREDNSDNAIKSASTPIMDSLWHAYPHTLISASGSDVGLPDGQMGNSEVGHLTIGSGRIIQQE

SEQ ID NO: 156300 - protein, 296 aa, Unknown
  Bacterial polypetide isolated from the Sargasso Sea
LGSGRVVLQTLPKINKAFDNNEIEKNNNFQNFISNHDKNKTVHLLGLCSEGGVHSHSYHMIEMSKLLKKNNCKTWIHIFSDGRDCSPKQLGQDIKKFEMSLPKNIKIASLVGRYFSMDRDYRWERVKKAFDLIVCGKYDRKFSNVSEGIEEAYKNNETDEFISPTLIGNYKGFEDGDSLIMINFRADRVRELLTALLDPTFRKFEKDFNTPILSNNLGMTEYSTELSKFMNSIFVKENIKDTLGEVISKANLKQLRLAETEKYPHVTFFFNGGEETVYPGETRVMIPSPKISTYDL

SEQ ID NO: 156301 - protein, 236 aa, Unknown
  Bacterial polypetide isolated from the Sargasso Sea
MSHLILVRHGQSEWNLEKKFTGWVDVELAPNGKLEACKSGELIKELNLNLDYFFCSYQKRAIETLNLILNTLRIKNNDVIKAWELNERHYGALTGLNKDEMKKTLGEDKVLEFRRSWDIRPEPLNKNNPYHPINIEIYKNIPKDKIPDTESLKDTYERVIPYFKKNISDKLNKNIIIAAHGNSIRALCKHLFNIDNEKISKLEIPTGNPLLIKFDNNKKVKEASYLDKKRANDLII

SEQ ID NO: 156302 - protein, 144 aa, Unknown
  Bacterial polypetide isolated from the Sargasso Sea
MSHLILIRHGQSEWNLQNKFTGWVDVDLTPKGKLEACKSGELIKDLNLDINYFYTSYQKRAIETLKLILNTCRIKNDKIIKAWELNERHYGSLTGLNKIEMKETYGEKKIHEFRRSWNIRPEPLSKNSPYHPENISTYKDIPRD

SEQ ID NO: 156303 - protein, 162 aa, Unknown
  Bacterial polypetide isolated from the Sargasso Sea
LVPSPKVPTYDLAPDMSAKGIPDQFVNDINKQQHDVIICNFANADMVGHTGKLDATVQAVSTLDQCLERIVKAMTRVDGTLLITADHGNAEQLWDSKRQGPHTAHTRNPVPIVLVNNSVAGRNLKLRDGSLRDVAPTLLHVAGVKTPPEMTGKDLRPWEDKL

SEQ ID NO: 156304 - protein, 162 aa, Unknown
  Bacterial polypetide isolated from the Sargasso Sea
YKARKRVLVPSPDVATYDLKPEMSCQEVSTEVINALKNDEYKLIVVNYANGDMVGHTAKREAIIEAMECLDRNLGDVLKAALENGVATLVTADHGNVDEILDAEGNPNPKHSCNPVPCVVVDRLKKWKMSSSGGLSNIAPTMLDLMNIEKPTAMDRSLIDSD

SEQ ID NO: 156305 - protein, 116 aa, Unknown
  Bacterial polypetide isolated from the Sargasso Sea
MASNEQHYGALEGLSKTKTAEKHGEEQVFIWRRSYEVSPPALDLNDKRHPRFDQRYRGLGDHQFPSTESLKDTLHRLLPLWNESIEPFIKSGKKVLIVAHGNSLRALVKHLNGISD

SEQ ID NO: 156306 - protein, 92 aa, Unknown
  Bacterial polypetide isolated from the Sargasso Sea
MFKLVLLRHGESQWNLENLFSGWADIGLTEKGRSEAKRSGLLLKEQNYRFDLVFTSVLKRAIKTMEICLSEMGSIDIPTIHDWRLTSSTMGL

SEQ ID NO: 156307 - protein, 97 aa, Unknown
  Bacterial polypetide isolated from the Sargasso Sea
MKINKKVLLMILDGWGIADQPEKSAISKAHTPNYDDYLKKYPNAQLLTHGSHVGLPKGQMGNSEVGHMNIGSGRVVMQELAKINHDIENNSFDKDEV

SEQ ID NO: 156308 - protein, 179 aa, Unknown
  Bacterial polypetide isolated from the Sargasso Sea
MSHLILVRHGQSEWNLQKRFTGWVDVELTPQGKLEACKAGELIKNLNLNFDHFFCSYQKRAFETLSLILNTLRIKNDSVTRAWQLNERNYGSLTGLNKEEMKKTLGEKKVHEFRRSWNIAPEPLNKKNPYHPLNIEAYKDIPKNMIPDTESLKDTFERVVPYYKKNISPLINKNIIIAA

SEQ ID NO: 156309 - protein, 226 aa, Unknown
  Bacterial polypetide isolated from the Sargasso Sea
MNLVFIRHGQSLWNLENKFTGWVDIDLSERGEVEAKTAGVTLIDNNFYPEICFTSYLKRSINTAAHIVESYKKMNITFKNVKKWELNERHYGALQGLDKIETAKKYGQEQVQIWRRSFDTSPPMAEQNSEHDPKTHELYNDIESELPLGESLKDVVLRVVKTYEQIIATAKEKSVLVVAHGNSIRAMVKLLDNLSDKDIVAVNIPTGIPLAYNISDNNIEKNWLFR

SEQ ID NO: 156310 - protein, 112 aa, Unknown
  Bacterial polypetide isolated from the Sargasso Sea
MSKLILTRHGQSVWNAENKFTGWVDVDLSEKGILEAKKSGQLIKNLNINLDICYTSFLKRAIKTLTTILQENELELKFNTSWELNERHYGSLTGLNKEETKKKIGEEQFKKY

SEQ ID NO: 156311 - protein, 62 aa, Unknown
  Bacterial polypetide isolated from the Sargasso Sea
MFKLVLLRHGESEWNLENLFSGWADIGLTEKGMSEAKRSGLLLKGQNFRFDVVFTSVLKRAI

SEQ ID NO: 156312 - protein, 195 aa, Unknown
  Bacterial polypetide isolated from the Sargasso Sea
MNKLILLRHGQSQWNLENKFTGWKNVPLTQKGEIEAKKAGELIKKNEIHIDYVFSSVLARANKTAEIAIKEAGISDLLDNDKLIMIRNENLNERDYGDLVGLNKQETADKFGKEQVHKWRRSYDISPPNGESLKNVVDRVSPYFQKNIKPLIDQNKNILIAAHGNSLRAMMIELGIYKPNEISSIEIPTGSPLCI

SEQ ID NO: 156313 - protein, 82 aa, Unknown
  Bacterial polypetide isolated from the Sargasso Sea
MNKKVLLLILDGWGIADNKDASAPDKADTPNFNSLIENYPNNFLITHGEKVGLPKGQMGNSEVGHMNIGSGRIVLQDLLKIN

SEQ ID NO: 156314 - protein, 200 aa, Unknown
  Bacterial polypetide isolated from the Sargasso Sea
MSHLILVRHGQSEWNLEKKFTGWVDVELAPNGKLEACKSGELIKELNLNLDYFFCSYQKRAIETLNLILNTLRIKNNDVIKAWELNERHYGALTGLNKDEMKKTLGEDKVLEFRRSWDIRPEPLNKNNPYHPINIEIYKNIPKDKIPDTESLKDTYERVIPYFKKNISDKLNKNIIIAAHGNSIRALCKHLFNIDNEKIS

SEQ ID NO: 156315 - protein, 30 aa, Unknown
  Bacterial polypetide isolated from the Sargasso Sea
MSHLVLVRHGQSEWNLQKKFTGWVDVDLTP

SEQ ID NO: 156316 - protein, 188 aa, Unknown
  Bacterial polypetide isolated from the Sargasso Sea
MSFLILVRHGQSIWNLEKRFTGWVDVKLTKNGESEAKKAGFLIKDTNIRIDQYYSSLQLRANHTLEIIQEVLNDKKKFSRAWELNERHYGALTGLNKIEMSKEIGEEKVLKFRRSWDIRPDPLDKDNPYHPSNILTYNNLPKEKIPDTESLKDTYQRVTKFFKYEIEKKLITNNILISAHGNSIRALC

SEQ ID NO: 156317 - protein, 180 aa, Unknown
  Bacterial polypetide isolated from the Sargasso Sea
RAIKTLTTILQENDLKLKFNTSWELNERHYGSLTGLNKEETKKKIGDEQFKKYRRSWDIPPPPINENDKNLSLFSPLNPSIPVGMIPFTESLKDTYKRVIPYYEKEIQKNIKENKNVLISAHGNSLRALCKYLFKISDQKINELEIPTGNPLLIEFDNNIEIKKYYYLDEMRAKTIIFNQ

SEQ ID NO: 156318 - protein, 128 aa, Unknown
  Bacterial polypetide isolated from the Sargasso Sea
MGKLIAIRHGQSTWNRENRFTGWVDVDLSDRGVEEAEKSGKLLKELNINFEIFFTSYLKRAINTLEIILKVLKKNEKYTKAWELNERHYGALTGLNKDETKKKLGEEQFKKYRRSWDIPPPILDKNSK

SEQ ID NO: 156319 - protein, 122 aa, Unknown
  Bacterial polypetide isolated from the Sargasso Sea
MSHLFLVRHGQSEWNLQKKFTGWVDVDLAPQGKLEACKAGEVIKSTNVKIDLFFSSYQLRAINTLKLIKNTLRNNSEIIKAWELNERHYGSLTGLNKEEMKIKLGEKQIQEFRRSWDVRPDP

SEQ ID NO: 156320 - protein, 237 aa, Unknown
  Bacterial polypetide isolated from the Sargasso Sea
MGKLIAIRHGQSTWNAENRFTGWVDVDLSNKGVQEAKKSGELIKDLSINFDICFTSYLKRAINTLDIVLEVIGKKYNYTKAWELNERHYGALTGLNKLETKEKIGEEQFKKYRRSWDIPPPILDKDSKYNSEKDPIYKSVKKIPLTESLKNTYDRVVPYFEKNIEKHLILNKNILLSAHGNTIRALGKKIFNISDKNINLLEIPTGNPLLINFDNSGKFIDAKYLDDSRKSKIITNQ

SEQ ID NO: 156321 - protein, 179 aa, Unknown
  Bacterial polypetide isolated from the Sargasso Sea
ETEKYAHVTYFFNGGVEEKFEGEDRILVPSPRVETYDRKPEMSAFEVKDKVLENLQKKKHDLIVTNFANPDMVGHTGDIQATIKAVEVVDKCLGEIYESCKDNGYSLIITSDHGNADNMYDNKKNLACTTHSINPVPFIICDNVNFNVKSGNLADIAPTILKMLNVKIPIEMDGIPLIK

SEQ ID NO: 156322 - protein, 80 aa, Unknown
  Bacterial polypetide isolated from the Sargasso Sea
MIINKLVLLRHGESQWNLENRFTGWTDVDLTKNGINEAKNAGVLLSENNIEFDKVYVSCLKRAIKTLKICLKQLNKSNND

SEQ ID NO: 156323 - protein, 222 aa, Unknown
  Bacterial polypetide isolated from the Sargasso Sea
MSHLILVRHGQSEWNLENRFTGWVDVDLAANGKLEACKAGELIKELNLKFEYFYTSLQKRSIMTLDLILNTMRVKNQDVVNAWELNERNYGALTGLNKDEMKKLYGEEKIHIFRRSWDNPPEALKKTSPYHPLNIDIYKSVPKDKIPDTESLKNTYDRVIPYYKNNIEPKLYKNIIVSAHGNSIRSLCKYLFSLDNIQISSLEIPTGNPLLIETEKGKIKNA

SEQ ID NO: 156324 - protein, 88 aa, Unknown
  Bacterial polypetide isolated from the Sargasso Sea
IPYFESDIKPQIQAGKQVLICAHGNSLRALVKYLGDISDEEIVKLNIPTGVPMVYELDDNLKPIKNYYLGDAEAAAKAAEAVANQGKA

SEQ ID NO: 156325 - protein, 92 aa, Unknown
  Bacterial polypetide isolated from the Sargasso Sea
MNNRLVLLRHGQSIWNLENKFTGWTDVGLTKKGIKEAERAGNVLSKNDYFFDTVYTSFLRRAKDTMRICLGQIDNQPLNIITNWRLNERHYG

SEQ ID NO: 156326 - protein, 104 aa, Unknown
  Bacterial polypetide isolated from the Sargasso Sea
MEIPVAGKLVLCRHGQSKWNLENKFTGWEDVDLTQLGEEEAQKAGMELKSTGIAFDIAFTSLLKRANKTLFSILEQMDLTWIPITHAWELNERHYGALQGKNKA

SEQ ID NO: 156327 - protein, 250 aa, Unknown
  Bacterial polypetide isolated from the Sargasso Sea
MNLIFVRHGQSIWNLENKFTGWVDVELSERGVKEAEEAGRTLLSYKFTPEICATSFLQRSKSTAEIILNKMREEIELNIETKQIWQLNERHYGALQGLDKVETAKQYGEDQVQLWRRSYDVLPPPAKKGSKFDPKTDKKYENINEELPLGESLEKVVERVNSTFTNLLELAKTKQVLVVAHGNSIRAMVKMLDNLSNTEIVDVNIPTGIPLAYKISENENVKIGYLGDTDKIEQLQKEVELQSKVKDEKG

SEQ ID NO: 156328 - protein, 105 aa, Unknown
  Bacterial polypetide isolated from the Sargasso Sea
MSKLILTRHGQSTWNAENRFTGWVDVDLSEKGKEEAKKSGELIRELNIKINISYTSYLKRAIETLTIVLKTLNLPMKFNTSWELNERHYGSLTGLNKEETRKKIW

SEQ ID NO: 156329 - protein, 74 aa, Unknown
  Bacterial polypetide isolated from the Sargasso Sea
MPPVVLCILDGWGLSKDKISNAPLLAKTPNYDHLWQTCPKTKLLTHGVDVGLPKGQMGNSEVGHMNIGAGEDNL

SEQ ID NO: 156330 - protein, 169 aa, Unknown
  Bacterial polypetide isolated from the Sargasso Sea
ENGLELKFNTSWELNERHYGSLTGLNKDETKKKMGEEQFKKYRRSWDIPPPPLSENDKNHSLFSPLNASIPLGMIPFTESLKDTFARVVPYYEKEIKIHIKKNKNVLISAHGNSLRALCKSLFKISDQKINELEIPTGNPLIIEFDNNLEVKKYHYLDETRAKTIIFNQ

SEQ ID NO: 156331 - protein, 169 aa, Unknown
  Bacterial polypetide isolated from the Sargasso Sea
KHAGLLIKELNIEFDRLFTSVLDRAKLTGTIILENINQKDLDVIENKALNERFYGDLQGLNKDECRQKWGAEQIQIWRRSYDVGPPGGESLKETGERVLPYYLNEIHPLILQGKNILVAAHGNSLRSLIMHLDKLSSDKIVKLEIPTGAPIQYIFDDQGEVLTKKNLIE

SEQ ID NO: 156332 - protein, 175 aa, Unknown
  Bacterial polypetide isolated from the Sargasso Sea
MSHLILIRHGQSEWNLENRFTGWVDVDLAPKGKLEACKSGELIKEKGLKIDFYFTSYQKRAINTLNLILNTMRIKDIEIIKAWQLNERHYGSLTGLNKDEMKKKLGEKRVHEFRRSWNIAPEPLSKNNPYHPINIETYKNVPRQNMPDTESLKDTYDRVFPYFKKEILTKLVKKK

SEQ ID NO: 156333 - protein, 121 aa, Unknown
  Bacterial polypetide isolated from the Sargasso Sea
MSHLILVRHGQSEWNLQKRFTGWVDVDLTANGKLEACKAGELIKDLNIEITYFYSSYQKRALNTLKLILNTIRVKNEKIVKAWELNERNYGELTGLNKDEMKKKYGDDKIFKFRRSWDILP

SEQ ID NO: 156334 - protein, 123 aa, Unknown
  Bacterial polypetide isolated from the Sargasso Sea
MSKLILVRHGQSVWNAENRFTGWVDVDLSEKGILEAQKSGQLIKNLNINIDVSYTSFLKRAIKTLTTILKENGLELKFNTSWELNERHYGSLTGLNKDETKKKIGEEQFKKYRRSWDIPPPPI

SEQ ID NO: 156335 - protein, 192 aa, Unknown
  Bacterial polypetide isolated from the Sargasso Sea
MSYLILVRHGQSVWNLEKKFTGWVDVDLTENGKSEAKKAGVLIKQEKIEFNLYYSSFQLRAKNTLKIIQEELKDFKDVKNAWELNERHYGALTGLNKDEMKIKLGEEKVHQFRRSWDLRPDPLDKKNPYHPLNIQTYKEVPTDKIPDTESLKDTYERVIKFYSKEIENKTSENILISAHGNSIRALCKYLFN

SEQ ID NO: 156336 - protein, 95 aa, Unknown
  Bacterial polypetide isolated from the Sargasso Sea
MGKLILIRHGQSTWNAENRFTGWVDVDLSEKGVFEAEKSGKLLKELGLEYEACFTSCLKRAIKTLEIALKIAGKESKYTKAWELNERHYGALTGL

SEQ ID NO: 156337 - protein, 83 aa, Unknown
  Bacterial polypetide isolated from the Sargasso Sea
MSNLILVRHGQSEWNLENRFTGWVDVDLAPRGKLEACKAGELIKKLNININHFYSSYQKRAIDTLELILTTMRIKNDKVIKAW

SEQ ID NO: 156338 - protein, 165 aa, Unknown
  Bacterial polypetide isolated from the Sargasso Sea
MSFLILIRHGQSIWNLEKRFTGWVDVDLTDRGRAEAKKAGFLIKKKNIEIHYYYSSLQLRANNTLKIIQKVLNDKKKFSRAWQLNERHYGALTGLNKIEMSNKIGEDKVYEIRRSWDIKPEPLDKKNPYHPINIETYNSMAKEDLPDAESLKDTYERVTKYLEKK

SEQ ID NO: 156339 - protein, 100 aa, Unknown
  Bacterial polypetide isolated from the Sargasso Sea
MPRRKPPVALVVLDGWGISFERDHNAVMLGSTPSYDELLDRFPHGSLVTSGEAVGLPPGQMGNSEVGHMNLGAGRVVYQDLTRIDHSIRTGDFFKNDAPL

SEQ ID NO: 156340 - protein, 176 aa, Unknown
  Bacterial polypetide isolated from the Sargasso Sea
IGFDKNKIVYDWRLNERHYGALEGLNKSETAGKYGEKQVLIWRRSFSTPPPLLKNNDFRHPKNSMLFKDISIDKLPSGESLKDVIIRLNPFWEKFLKNVKQSSQNHLIVAHSNSLRAIVKILENLSEKEILNVNIPTGIPLVYELDTKFNIIMKNYLIDSNTLKEKQALVENQGKK

SEQ ID NO: 156341 - protein, 218 aa, Unknown
  Bacterial polypetide isolated from the Sargasso Sea
MSHLILVRHGQSEWNLEKKFTGWVDVELAPNGKLEACKSGELIKELNLNLDYFFCSYQKRAIETLNLILNTLRIKNNDVIKAWELNERHYGALTGLNKDEMKKTLGEDKVLEFRRSWDIRPEPLNKNNPYHPINIEIYKNIPKDKIPDTESLKDTYERVIPYFKKNISDKLNKNIIIAAHGNSIRALCKHLFNIDNEKISKLEIPTGNPLLIKFDNNK

SEQ ID NO: 156342 - protein, 211 aa, Unknown
  Bacterial polypetide isolated from the Sargasso Sea
MSHLFLVRHGQSEWNLQKKFTGWVDVDLTAQGKLEACKAGEVIKSTNIKIDLFFSSYQLRAINTLRLIKNTLRDNSEFTKAWELNERHYGSLTGLNKDEMKNQLGEKKIHEFRRSWNTRPDPLNQNSPYHPINIDIYKNIPKENIPDTESLKDTYNRVVNYFSKKINTEIKNEKNILISAHGNSVRALCKFLFKLDEKQIPKLEIPTGNPL

SEQ ID NO: 156343 - protein, 210 aa, Unknown
  Bacterial polypetide isolated from the Sargasso Sea
MTYLILVRHGQSKWNLEKRFTGWVDVDLTKEGKLEAEKAGFLIKKKNISIDLYYSSLQLRANNTLKIIQEVLNDEKNFIKAWQINERHYGALTGLNKTEMSHKLGEDKLHKFRRSWESKPEPLSKESPYHPFNIGAYKNVPKENIPDTESLKDTYERVIKFYDEEIKNQLGNKNILISAHGNSIRALCKYLFKLDNDQISKLEIPTGKPF

SEQ ID NO: 156344 - protein, 127 aa, Unknown
  Bacterial polypetide isolated from the Sargasso Sea
MRHGESQWNLENRFTGWTDINLTETGEKEAVKAGILLRKELFQFDLVFSSVLKRAIDTMQICLSTMNFDDSIPIEYDWRLNERHYGALQGLNKSDTTKKYSEKQVLLWRKRYNTPPPLLDFKDKRHP

SEQ ID NO: 156345 - protein, 40 aa, Unknown
  Bacterial polypetide isolated from the Sargasso Sea
MVHLVLIRHGQSEWNSQNKFTGWVDIDLSEKGKREAITAG

SEQ ID NO: 156346 - protein, 204 aa, Unknown
  Bacterial polypetide isolated from the Sargasso Sea
MSFLILVRHGQSIWNLEKRFTGWVDVDLTDQGKIEAEKAGLLIKNQNINIDFYYSSFQLRANHTLKIIQKVLKSKNDFVRAWQLNERHYGELTGLNKIETAKKIGEDKVFEFRRSWDIKPGKLSRESSYHPLNIETYEKIPKELIPDTESLKDTYNRVFEYFKKEIQPKLINKNILITAHGNSIRALCKYIFNLDNNQITSLEI

SEQ ID NO: 156347 - protein, 121 aa, Unknown
  Bacterial polypetide isolated from the Sargasso Sea
MSHLILVRHGQSNWNLENRFTGWVDVELSSKGKEEAIKAGQLIKELDIKIESFFTSYLIRAIKTLELIMNNSINNNIKVKRAWELNERHYGALTGLNKNEMKKKLSEEKVHELRRSWDQLQ

SEQ ID NO: 156348 - protein, 147 aa, Unknown
  Bacterial polypetide isolated from the Sargasso Sea
MNLIFVRHGQSVWNLENKFTGWVDVGLSENGVKEASNAGDLLVNEKFTPDICFTSFLKRSIDTADILLNKYENKLNNNFQLIRDWRLNERHYGSLQGLDKLETAKKFGEDKVLQWRRSFNIQPPLVNENSEFDPNNDDLYKGIDIEL

SEQ ID NO: 156349 - protein, 271 aa, Unknown
  Bacterial polypetide isolated from the Sargasso Sea
VIFMNFRADRAIEFSEALVKEDFAHFPRDPFPRVCFASMMQYDLDNGFPEHFLAGTPRVDNPFGKRLVEQGIKQFRLTETQKFPHVTFFYNGGYREPLDPKIEDYHLIPSDKVPTFADAPMMKASEIGKRAVEFIHSEAYGYGLINFANADMVGHTGDLEAAVQAVESVDQALGQMVEAVKAVNGFMVITADHGNADEMLTKNRVSGETEASTKHSLNPVPFLVYDPLYDGSYRLKDFAANQDLNLSHVAATNFILMGLEVPDDLAPQLFL

SEQ ID NO: 156350 - protein, 170 aa, Unknown
  Bacterial polypetide isolated from the Sargasso Sea
MKPTILCIMDGWGISSNKKYNAVSQAKTPIFDQLVRQWPNSLMHASGEHVGLPEGQMGNSEVGHMNIGAGRVILQDLPRINQAIKSNKLSKNKVLKDFISATKKSGGKCNLVGLLSDGGVHSHQTHIEALAKTIASSGVPVVLHGILDGRDTAPSSALKFIENFLHTANE

SEQ ID NO: 156351 - protein, 137 aa, Unknown
  Bacterial polypetide isolated from the Sargasso Sea
GDIILSCMDQRNIEVVSDSALNERDYGELTGMNKDEARKNFGESQVQIWRRSYDMPPPGGESLKNTFERVLPYFNKYIHPRLSNGESILITAHGNSLRSLVKHLEEISEEKIVKLEIATGEPIFYEFINGKVQKIVR

SEQ ID NO: 156352 - protein, 123 aa, Unknown
  Bacterial polypetide isolated from the Sargasso Sea
MNKLVLLRHGQSQWNLENRFTGWKDVPLTEKGIKEANNAGYLLKKHNIKIDKVFSSVLERANKTAELAIKASEIENLHKNGKLIYVKNQNLNERDYGDLVGLNKAETADKFGKEQVHIWEKIL

SEQ ID NO: 156353 - protein, 52 aa, Unknown
  Bacterial polypetide isolated from the Sargasso Sea
MSYLILVRHGQSEWNKENRFTGWVDIDLAANGKLEACKAGELIKELRINLDH

SEQ ID NO: 156354 - protein, 182 aa, Unknown
  Bacterial polypetide isolated from the Sargasso Sea
MNYLILIRHGQSTWNLEKRFTGWVDVDLTKNGKSEAKKAGQLIKNEKINIDLYYTSFQLRAKNTLKIIQNELKDNKDVKNAWELNERHYGALTGLSKDKMKIKLGEDKIYQFRRSWDLKPDPLDKKNPYHPLNIETYKEISKDKIPDTESLKDTYERVIKFYKDEIENKNNKNILISAHGNS

SEQ ID NO: 156355 - protein, 202 aa, Unknown
  Bacterial polypetide isolated from the Sargasso Sea
KIKFDLIYVSYLKRAINTHKICLKQLEMEPNETIYHWRLNERHYGNLQGLNKTETAKKYGDNQVLIWRRSYDIPPPKLDLNDKRHPKYDILYKDVDARELPDSESLKDTLKRVNPLWTNQIVPQLKNSKNVMIVAHGNSLRAIVKILKKISDEDIVNVNIPTGIPYIFEFNDDFSVKRDYFLGNQDKILKKIEDISKQGNSK

SEQ ID NO: 156356 - protein, 94 aa, Unknown
  Bacterial polypetide isolated from the Sargasso Sea
MSFLVLVRHGQSTWNLEKRFTGWVDVDLTDQGKIEAEKAGLLIKNQNIDIDFYYSSFQLRANNTLKIIQKILKTKKDFVRAWQLNERHYGELTG

SEQ ID NO: 156357 - protein, 98 aa, Unknown
  Bacterial polypetide isolated from the Sargasso Sea
MSFLILVRHGQSLWNLEKRFTGWVDVDLTDNGKLEAKKAGHLIKESNIDINFYYSSLQLRANNTLKIIQKILKDEKDIVKAWQLNERHYGAFTGLNKI

SEQ ID NO: 156358 - protein, 235 aa, Unknown
  Bacterial polypetide isolated from the Sargasso Sea
MSYLILVRHGQSVWNLEKKFTGWVDVDLTENGQSEAKKAGQLIKQENIEINLYYSSFQLRAKNTLKIIQEELKDFKEVKSAWELNERHYGALTGLNKDEMKKKLGEEKVHQFRRSWDLRPDPLDKKNPYHPLNIETYKKIPLEKIPDTESLKDTYERVIKFYSNEIEQKSSENILISAHGNSIRALCKHLFNLDDNQISKLEIPTGNPLVIELENRKISNCKYLDQERAKDLLIF

SEQ ID NO: 156359 - protein, 141 aa, Unknown
  Bacterial polypetide isolated from the Sargasso Sea
MNKLVLLRHGQSQWNLENKFTGWKDVPLTEQGISEARNAGKLIKKNKIKFDKIFSSVLERANHTAKIAVKEAEMNDFFDNDNLIYTRNQSLNERDYGDLVGLNKAETAEKFGKEQVHIWRRSYDTPPPNGESLKDVVQRVS

SEQ ID NO: 156360 - protein, 124 aa, Unknown
  Bacterial polypetide isolated from the Sargasso Sea
MSHLILVRHGQSEWNLENKFTGWVDVELAPQGKLEACKAGEFIKKLNIQIRHFYTSYQLRSIDTLKLILNTIRVKPNNIIKAWQLNERHYGSLTGLNKDEMKKKLGEEEVHKFRRSWDNPPKPL

SEQ ID NO: 156361 - protein, 93 aa, Unknown
  Bacterial polypetide isolated from the Sargasso Sea
KACRVDAGPDGQAWTAHTTNPVPAILIEGERRKLPGHGNAITLRDNGGLADIAPTLLQILDLPQPAAMTGQSLIAPMSNMDPTPKTARLPLSV

SEQ ID NO: 156362 - protein, 150 aa, Unknown
  Bacterial polypetide isolated from the Sargasso Sea
MSFLILVRHGQSTWNLEKRFTGWVDVDLTDTGKSEAKKAGFLIKEKNIKIHFYYSSLQLRANNTLKIIQNVLNDEKKFTRAWQLNERHYGSLTGLNKVEMSKKIGEDKVYEFRRSWDIRPEALDKKSPYHPQNIETYDSIPREILPDTES

SEQ ID NO: 156363 - protein, 148 aa, Unknown
  Bacterial polypetide isolated from the Sargasso Sea
MCKAKKKSIVLCVLDGFGLREKKRGNAVSLASTPNIDRLLRNYPNSTLTTFGKEVGLPENQMGNSEVGHMHIGAGRIIQSMLPRIDDAISSGALINNNDLLKILSDTKLSGGETHIAGLISDGGVHGHSRHLKSLMKVASKKSSKVNL

SEQ ID NO: 156364 - protein, 154 aa, Unknown
  Bacterial polypetide isolated from the Sargasso Sea
FLFTSALIRAQLTGSKILEKIGQENINIIKNKSLNERFYGDLQGLNKDECRKKWGLDQVQIWRRSYDVGPPGGESLKECGERVLPYFLDKIYPLVLEGKNIIVSAHGNSLRSLIKHLDKLSADEIIKLEIPTGAPIHYLFSDEGLILTKKNLIE

SEQ ID NO: 156365 - protein, 88 aa, Unknown
  Bacterial polypetide isolated from the Sargasso Sea
MNNLILVRHGQSEWNLENRFTGWVDVGLAANGKLEACKAGELIKELNLELSYFYTSLQTRSIETLNLILNTMRIKDQDVVNAGNKREA

SEQ ID NO: 156366 - protein, 205 aa, Unknown
  Bacterial polypetide isolated from the Sargasso Sea
MSHLILVRHGQSEWNLEKKFTGWVDVELAPNGKLEACKSGELIKELNLNLDYFFCSYQKRAIETLNLILNTLRIKNDDVIKAWELNERHYGALTGLNKEEMKKTLGEDKVLEFRRSWDIRPEPLNKNNPYHPINIEIYKNIPKDRIPDTESLKDTYERVIPYFEKNILDKLNKNIIIAAHGNSIRALCKHLFNIDNKKISKLEIP

SEQ ID NO: 156367 - protein, 112 aa, Unknown
  Bacterial polypetide isolated from the Sargasso Sea
ERTVNFASTLGMIEYSDALNSLIEPLFPSIGLKNVFGDILAQSGRKQLRIAETEKYAHVTFFFNGGREQKFAGEERMLVASPDVATYDMKPEMSAPEVTDKLIAAIRSGRFD

SEQ ID NO: 156368 - protein, 153 aa, Unknown
  Bacterial polypetide isolated from the Sargasso Sea
PSPDVATYDLKPEMSCQEVSTEVINALKNDEYKLIVVNYANGDMVGHTAKREAIIEAMECLDKNLGDVLKAALENNVATLVTADHGNVDEILDAEGNPNPKHSCNPVPCVVVDRLKKWKMSNSGGLSNIAPTMLDLMNIEKPTAMDRSLIDSD

SEQ ID NO: 156369 - protein, 236 aa, Unknown
  Bacterial polypetide isolated from the Sargasso Sea
MNNLILVRHGQSEWNLENRFTGWVDVGLAAKGKLEACKAGELIKELNLELSYFYTSLQTRSIETLNLILNTMRIKNQDVVNAWELNERHYGALTGLNKDEMKKHYGEEKIHTFRRSWDNPPEPLKKTSPYHPLNINIYKNVPKDKIPDTESLKNTYERVIPFYKKNIEPKLDKNIIVSAHGNSIRSLCKYLFKLDNENISSLEIPTGNPLLIETEKGKIKNVRYLDKDRAKDLLVF

SEQ ID NO: 156370 - protein, 143 aa, Unknown
  Bacterial polypetide isolated from the Sargasso Sea
MSHLILVRHGQSEWNMQKKFTGWVDVELTPNGKLEACKAGELIKELNLNFDYFFCSYQKRAIETMNLILNTLRIKNDKVIRAWELNERHYGALTGLNKDEMKKTIGEEKVQEFRRSWDVRPEPLNKNNPYHPINIEAYKNIPK

SEQ ID NO: 156371 - protein, 86 aa, Unknown
  Bacterial polypetide isolated from the Sargasso Sea
MQPKKPLVLLILDGWGYREERESNAILQANTPVMDKLWAEYPHTLISGSGLDVGLPDGQMGNSEVGHVNLGSGRVVYQDFTRITKA

SEQ ID NO: 156372 - protein, 167 aa, Unknown
  Bacterial polypetide isolated from the Sargasso Sea
MSHLILVRHGQSEWNLENRFTGWVDVDLAARGKLEACKAGELIKELNISIDFYFSSYQLRAINTLNLILNTIRKKNVNITKAWQLNERHYGSLTGLNKDEMKKKLGEKKVHEFRRSWDIAPEPLSKNNPYHPINIDVYKNIPKNLIPDTESLKDTYERVFPYLKKKY

SEQ ID NO: 156373 - protein, 105 aa, Unknown
  Bacterial polypetide isolated from the Sargasso Sea
MSFLILVRHGQSVWNLENRFTGWVDVDLTKNGMLEAEKAGFLIKNKNIKIDKYFSSLQLRANNTLKIIQKILNDEDDFPRAWQLNERHYGALTGLNKIEMAQQIG

SEQ ID NO: 156374 - protein, 165 aa, Unknown
  Bacterial polypetide isolated from the Sargasso Sea
KIINNLKINFDLVFTSALIRAQNTAEIILKEINQPLSTIKNQALNERNYGDLAGLNKDDARKRWGDEQIHIWRRSYDIPPPGGESLKDTGERVLPFFMKEILPYVCEGKNVLVAAHGNSLRSLIKFLDSISDEDIVKLEIPTGAPIHYVINEDGSVKSKQDFFNE

SEQ ID NO: 156375 - protein, 113 aa, Unknown
  Bacterial polypetide isolated from the Sargasso Sea
MGKLIAIRHGQSTWNAENRFTGWVDVDLSEKGVREAEKSGKLLKELNIDFDMCFTSYLKRAINTLKVVIKILEKNYKYTKAWELNERHYGALTGLNKEETKKKLGENKFNEYR

SEQ ID NO: 156376 - protein, 229 aa, Unknown
  Bacterial polypetide isolated from the Sargasso Sea
MSFLILVRHGQSVWNLEKRFTGWVDVDLTAQGKAEAEKAGVLIKERKIEIDFYYSSLQLRANNTLKIIQKILNDEKDFIKTWQLNERHYGALTGLNKIEMIKKIGEDKIHKFRRSWDIKPEALSKESPFHPLNIETYKEMPKEAIPDTESLKDTYERVVNFFQEEIKAKLTANNILISAHGNSIRALCKNLFNLDNERISKLEIPTGNPMLIELNSDTEIKKCEYLDKD

SEQ ID NO: 156377 - protein, 210 aa, Unknown
  Bacterial polypetide isolated from the Sargasso Sea
MSYLILVRHGQSIWNLEKKFTGWVDVDLTDNGKLEAKKAGQLIKQKQIEINLYYSSFQLRAKNTLKIIQNELGDFKDVKNAWELNERHYGALTGLNKDEMKKKLGEKKVHQFRRSWDLRPDPLDKKNPYHPLNIETYKEVPLEKIPDTESLKDTYERVIKFYSKEIENKTNENILISAHGNSIRALCKHLFSLDDNEISKLEIPQETLFY

SEQ ID NO: 156378 - protein, 162 aa, Unknown
  Bacterial polypetide isolated from the Sargasso Sea
EKKINLDELFTSVLIRAINTGNIILDQLGIESLPTTRDQSLNERNYGDLAGLNKDDARKKWGEEQVHIWRRSYDVPPPGGESLKNTGERVLPYFENKIRPLIAEGKNILIAAHGNSLRSLIKELDNLSDDEIVKLEIPTGAPIIYSFRDGLIENKEELFDNQ

SEQ ID NO: 156379 - protein, 116 aa, Unknown
  Bacterial polypetide isolated from the Sargasso Sea
DDKYSSIQSDILPDGECLKDTVDRFMPYWLDSIKPDIESGKNVLIVAHGNSLRALVKYLDKVSDDDIVELNIPTGVPLVYELDDAMNPVKSYYLGDQEEISKRTAEVAAQGKNRSI

SEQ ID NO: 156380 - protein, 151 aa, Unknown
  Bacterial polypetide isolated from the Sargasso Sea
MSHLILVRHGQSEWNLQKRFTGWVDVELTPQGKLEACKAGELIKNLKLNLNHFFCSYQKRAIETLNLILNTIRIKNNNVIKAWQLNERNYGALTGLNKEEMKKTLGEKKVYEFRRSWNIAPEPLNKNNPYHPLNIEAYNDVPKNKIPDTES

SEQ ID NO: 156381 - protein, 222 aa, Unknown
  Bacterial polypetide isolated from the Sargasso Sea
MNYLILVRHGQSSWNLENRFTGWVDVDLTENGKLEAEKAGLLIKKKNILINLYYSSVQLRANNTLKIIQKILKDKKKFIKAWQLNERHYGSLTGLNKIEMANKLGKEKVHEFRRSWDLKPEPLNKDSLFHPKNIETYKNIPGIIFPDTESLKDTYERVTKYFDEQIKNKLENNNILISAHGNSIRALCKKLFHLDDNQISNLEIPTGNPLVIEFIEKLKIKK

SEQ ID NO: 156382 - protein, 124 aa, Unknown
  Bacterial polypetide isolated from the Sargasso Sea
MSHLILVRHGQSEWNLENKFTGWVDVELAPQGKLEACKAGELIKKLNLEIKHFYTSYQLRSIDTLKLILNTIRVKPNNMIKAWQLNERHYGSLTGLNKDEMRKKLGEEEVHKFRRSWDNPLKTF

SEQ ID NO: 156383 - protein, 237 aa, Unknown
  Bacterial polypetide isolated from the Sargasso Sea
MSYLILIRHGQSTWNLEKRFTGWVDVDLTDNGKLEAKKAGKLIKDLGIKIEYYYSSLQLRANNTLKLIQELLNDKKDFTRAWQLNERHYGALTGLNKIEMSKKLGKEKVFEFRRSWDLKPEPLEKKSPFHPSNIDIYKNLSTDQIPDTESLKDTYVRVINYYDSEIKNNLNNGNVLISAHGNSIRALCKYLLKIDEIQISNLEIPTGNPLLIEINKDQTIKDCKYLDKNRAKDLVVF

SEQ ID NO: 156384 - protein, 172 aa, Unknown
  Bacterial polypetide isolated from the Sargasso Sea
MKNILLIRHGQSEWNKLNLFTGFKNIELSDQGIEEADKAGQNFKNLNIKFDIVFTSKLKRAQETAKIILKNLNQWDHLYEKGKIKTDINLNERDYGDLTGLNKKETADKFGEEQVHKWRRGYSDQPPNGESLEDVVRRVKIYFEESINPAIQSADNNNILIAAHGNSLRALL

SEQ ID NO: 156385 - protein, 167 aa, Unknown
  Bacterial polypetide isolated from the Sargasso Sea
NEAVEAGKSLKAEDMNFDIMFTSDLFRAQETGRLILKEMDQTDIPFVKHQSLNERNYGDLAGLNKDDARERWGEEQVHIWRRSFDIPPPGGESLKNTAERVLPYFESEIMPKIDEGLNVLIAAHGNSLRALVMQLENIGPEEIVKLEIATGDPLIYDCTHQTITRRN

SEQ ID NO: 156386 - protein, 98 aa, Unknown
  Bacterial polypetide isolated from the Sargasso Sea
MNNLILVRHGQSEWNLENRFTGWVDVGLAAKGKLEACKAGELIKELNLELSYFYTSLQTRSIETLNLILNTMRIKNRDVVNAWELNERHYGALTGLNK

SEQ ID NO: 156387 - protein, 236 aa, Unknown
  Bacterial polypetide isolated from the Sargasso Sea
MSYLVLVRHGQSVWNLEKKFTGWVDVDLTENGKSEAKKAGELINKNNLTIDLYFSSVQLRAKNTLKIIQGELKDNKVPSEAWEINERHYGALTGLNKDEMKVKLGEDKVHQFRRSWDLRPDPLDKQNPYHPSNIEIYKNIPVDKIPSTESLKDTYERVIDFYKKKIEIINDKNILISAHGNSIRALCKYLFNLDNDVISKLEIPTGNPLLIKVNGDKKVLSAKYLDSDRAKDLLVF

SEQ ID NO: 156388 - protein, 164 aa, Unknown
  Bacterial polypetide isolated from the Sargasso Sea
MNKLVLLRHGQSQWNLENKFTGWKDVPLTEKGINEANNAGLLLKKNNIKIDKIFSSVLERANKTAEIAIKASEIENLHKNGLLIYEKDQRLNERDYGDLVGLNKTETAEKFGKEQVHIWRRSYDTPPPNGESLKDVVDRVSPYFREIIQPFILDKKNVLIAAHG

SEQ ID NO: 156389 - protein, 79 aa, Unknown
  Bacterial polypetide isolated from the Sargasso Sea
MISSKNINRLNLPQSPVVLTILDGWGDREDASNNAIKSASTPIMDSLWHAYPHTLISASGSDVGLPDGQMGNSEVGHLT

SEQ ID NO: 156390 - protein, 236 aa, Unknown
  Bacterial polypetide isolated from the Sargasso Sea
MSHLILIRHGQSEWNLQKRFTGWVDVELTPQGKLEACKAGELIKNLKINLNHFFCSYQKRAIETLSLILNTLRIKNDNVTKAWQLNERNYGSLTGLNKEQMKKMLGEKKIHEFRRSWDIAPKPLDKNNPYHPLNIQAYKDIPKNMIPDTESLKDTYERVVPYYKKNILPLINENIIVAAHGNSIRSLCKYLFEIDDSKISRLEIPTGNPLALNFENKKLVNAKYLDKERARDLLVF

SEQ ID NO: 156391 - protein, 203 aa, Unknown
  Bacterial polypetide isolated from the Sargasso Sea
MKTNKLVLVRHGQSIWNEKNLFTGWKDIGLTKKGINEAESVGEKIKRIGTKFDAMYTSSLVRAQKTGEIILEFISQKEIEIISDQSLNERNYGELTGLNKDQAKKDFGESQVQIWRRSYDIPPPNGESLKDTYERVVPYFIKIILPRLLHGENILITAHGNSLRSLVKYLEKISEDEIVKLEIATGEPIFYELIDEKVQRIVW

SEQ ID NO: 156392 - protein, 42 aa, Unknown
  Bacterial polypetide isolated from the Sargasso Sea
MSHLILVRHGQSEWNLQKRFTGWVDVDLTPQGKLEACKAGEL

SEQ ID NO: 156393 - protein, 27 aa, Unknown
  Bacterial polypetide isolated from the Sargasso Sea
MKLVLLRHGESQWNLENRFTGWKDVSL

SEQ ID NO: 156394 - protein, 92 aa, Unknown
  Bacterial polypetide isolated from the Sargasso Sea
WRRSYNSGPPGGESLKDTSDRVLPYYLDEIHPLILSGKNILIAAHGNSLRSLVKHLDIISEKEIVELEIPTGAPIHYLFDKNGEVIKKKNLI

SEQ ID NO: 156395 - protein, 120 aa, Unknown
  Bacterial polypetide isolated from the Sargasso Sea
MSNELKNFLVLIRHGQSEWNEKNLFTGWKNPPLTRLGELEAERAGSKIKSLKIDFDIHFTSELIRAQSTGSIIQRVIEKNIDTIKNVALNERDYGDLSGLNKDEARKKWGDEQVYIGADL

SEQ ID NO: 156396 - protein, 235 aa, Unknown
  Bacterial polypetide isolated from the Sargasso Sea
MSYLILVRHGQSLWNLEKKFTGWVDVDLTENGKSEAKRAGKLIKQENIEINFYYSSFQLRAKNTLKIIQEELQDFKDVKYAWELNERHYGALTGLNKDEMKVKLGEERVHQFRRAWDLRPDPLDKKNPYHPINIETYKEVPLEKIPDTESLKDTYERVIKFYSKEIEYKTKENILISAHGNSIRALCKRLLNLDDDEISKLEIPTGNPLLIELENDKISNCKYLDQERAKDLLVF

SEQ ID NO: 156397 - protein, 90 aa, Unknown
  Bacterial polypetide isolated from the Sargasso Sea
VLPYWHDVIRPDIQAGKRVIIAAHGNSLRALVKYLDGMSDEEVLGLNIPTGVPLVYELDENLKPISKEYLGDADAIKAMMDAVAKQGKAK

SEQ ID NO: 156398 - protein, 220 aa, Unknown
  Bacterial polypetide isolated from the Sargasso Sea
MSFLILIRHGQSTWNLENRFTGWVDVDLTENGKLEAKKAGDLIKNSNIKIDYYYSSLQLRANHTLKIIQKSLNDEKDFNRSWKLNERHYGGLTGLNKVEMSNKLGEEKVHQFRRSWDLRPDPLDKNSEFHPLNIETYKSMSSKEIPDTESLKDTYQRVMNFYDSDIKNKIKNKNILISAHGNSIRALCKYLFKLDEKQISKLEIPTGNPLLIEIDESEKI

SEQ ID NO: 156399 - protein, 202 aa, Unknown
  Bacterial polypetide isolated from the Sargasso Sea
MSFLILVRHGQSIWNLEKRFTGWVDVDLTDQGKMEAEKAGLLIKNQNINIDFYYSSFQVRANHTLKIIQKVLKSKKDFEKAWQLNERHYGELTGLNKIETAKKIGEDKVFEFRRSWDIKPGKLSRESSYHPLNIETYEKIPKELIPDTESLKDTYNRVLEYFKNEIQPKLINKNILITAHGNSIRALCKYLFNLDNNQITGL

SEQ ID NO: 156400 - protein, 284 aa, Unknown
  Bacterial polypetide isolated from the Sargasso Sea
NEKPVGPIEDRHSVIFMNFRADRAIEFSEALVQEDFAHFPRDPFPRVCFASMMQYDLDNGFPEHFLAGTPRVDNPFGKRLVEQGIKQFRLTETQKFPHVTFFYNGGYREPLDPKIEDYHLIPSDKVPTFADAPMMKASEIGKRALEFIHSGAYGYGLINFANADMVGHTGNLAAAVQAVESVDQALGPMVEAVKAVNGFMVITADHGNADEMLTKNRFSGETEASTKHSLNPVPFLVYDPLYDGSYRLKDFAANQDLNLSHIAATNFILMGLEVPDDLAPPLFL

SEQ ID NO: 156401 - protein, 187 aa, Unknown
  Bacterial polypetide isolated from the Sargasso Sea
ATKTLSIILDEMNLTWIPVIKSWELNERHYGALQGLYKSEVAKEYGEDQVKIWRRSYDTPPPMMAEDDASHPRFDPKYDGIDELPSSESLKDTLTRVKPYWQDKILPDLLGNKDVLIVAHGNSLRSLVKIIDNISDEEIVNLNIPTGIPLLYEFNENLNPTSKLFLGDEEAIKKATEMVAKQGSIKK

SEQ ID NO: 156402 - protein, 163 aa, Unknown
  Bacterial polypetide isolated from the Sargasso Sea
AGKLLKDKGIKFDIAFTSALKRAQDTLTIILKEIDQTSLKIIKDQSLNERDYGDLSGLNKDEARKKWGEDKVHQWRRSFDIPPPGGESLRNTADRVLPYYKSNIVPRINEGLNILITAHGNSLRSLVMHLDNIRSEDIVKLEIGTGVPLIYEAESSENIKRVN

SEQ ID NO: 156403 - protein, 44 aa, Unknown
  Bacterial polypetide isolated from the Sargasso Sea
MSKLILTRHGQSTWNAENRFTGWVDVDLSEKGKEKAKKSGVLIR

SEQ ID NO: 156404 - protein, 88 aa, Unknown
  Bacterial polypetide isolated from the Sargasso Sea
MKKLVLLRHGESQWNLENRFTGWTNVDLTEKGEDEAREAGELLNQEAIKFSIVHTSLLKRANRTMEICIDEMGLSNVSKKFDWRLNER

SEQ ID NO: 156405 - protein, 158 aa, Unknown
  Bacterial polypetide isolated from the Sargasso Sea
MNNLVLVRHGQSQWNLERRFTGWADIDLTEQGKLEAKKAGELIKKLNIEFHSSFTSNLKRAVNSLDIILKILNNQHIKVLKTQNLNERHYGGLTSLNKDETIKKYGNHQVQLWRRSFDIPPPPMESTHPYKNIINTKILSESLKDTFNRVVPYYEKKY

SEQ ID NO: 156406 - protein, 301 aa, Unknown
  Bacterial polypetide isolated from the Sargasso Sea
FGLVSPGGVHAHQDHMLAVVKGLAQAEVPVVVHGFTDGRDVLPRDAWITLPGFLSQLPENATLGSLTGRYFGMDRDHRWDRTQRAYDAIALGQAEFHADNGLQALQEGYVRGESDEFLQATIVGEYGGMRDGDALVMMNFRADRARQILDCFYRPETTSCKTQPILLSTAFGMTSYSTNLDEFVTPLYPPTEIAETLGEVVAAAGHRQLRLAETEKYPHVTFFFNGGDETMHDGEDRALVPSPKVSTYDQLPQMSAGGVLAEAMASLAAKSHDLLVINFANPDMVGHTGNLAAGISAVETV

SEQ ID NO: 156407 - protein, 184 aa, Unknown
  Bacterial polypetide isolated from the Sargasso Sea
MSHLILVRHGQSEWNLENRFTGWVDVDLAAKGKLEACKAGELIKELNLNFEYFYTSLQKRSIETLDLILNTMRIKNQNVVNAWELNERHYGALTGLNKDEMKKLYGEEKIHIFRRSWDNPPEALKKTSPYHPLNIDIYKSVPKDKIPDTESLKNTYERVIPYYKKNIEPKLDKNIIVSAHGNSI

SEQ ID NO: 156408 - protein, 219 aa, Unknown
  Bacterial polypetide isolated from the Sargasso Sea
EKKFTGWVDVDLTENGQSEAKKAGQLIKQENIEINLYYSSFQLRAKNTLKIIQEELKDFKKVISAWELNERHYGALTGLNKDEMKVKLGEEKVHQFRRSWNLRPDPLDKKNPYHPLNIETYKEIPLEKIPDTESLKDTYERVMKFYSKEIEHKTFENILISAHGNSIRALCKHLFNLDDNEISKLEIPTGNPLLIELENSKISSCKYLDQERAKDLLVF

SEQ ID NO: 156409 - protein, 109 aa, Unknown
  Bacterial polypetide isolated from the Sargasso Sea
MSYLILVRHGQSVWNLEKRFTGWVDVDLTENGKSEAKKAGELIKQEKIEINVYYSSFQLRAKNTLKIIQEELQDFKEVKSAWELNERHYGALTGINKDEMKKKLERKKY

SEQ ID NO: 156410 - protein, 273 aa, Unknown
  Bacterial polypetide isolated from the Sargasso Sea
SKRYSGINTKKDGIIFMNFRSDRMIQISSAFCDDQFQDFSTDTKTIFISPMSLVSYSKRLDKFITPLFPKVKIKNTIGEVVSKTGLKQLRLSETEKYAHVTYFFNCGNEQKFKGEDRILIQSPKIKTYDLQPEMAIEKVTLSLIKELETFKYDFVVVNFANPDMVGHSGNLTAAIKACEAVDNSLKKLIDGVKKTKSNLLIVADHGNCEEMINYKTNQPHTAHTLNLVPIILISNDQNLKIRSGNLSDVAPTLLDLMKINKPREMTGRSLIIK

SEQ ID NO: 156411 - protein, 73 aa, Unknown
  Bacterial polypetide isolated from the Sargasso Sea
MSHLILVRHGQSEWNLENRFTGWVDVDLAPKGKLEACKSGEFIKEQKIKIDYFFTSYQKRAINTLKLILDTLR

SEQ ID NO: 156412 - protein, 157 aa, Unknown
  Bacterial polypetide isolated from the Sargasso Sea
MPNIVLIRHGQSKWNLENKFTGWKDIDLSENGINEAIEAGRLIKKHALTFDVAFASVLQRAKKTMSIILKENNLTNIPIFNTYRLNERHYGGLTGLNKKETAKIHGDEQVYKWRRSYKTKPPKSSKEFTTSLQKDSKYFNLDTIPESESLEDTVNRV

SEQ ID NO: 156413 - protein, 226 aa, Unknown
  Bacterial polypetide isolated from the Sargasso Sea
MQKHSFIDKLLDKYSSAELITNGNHVGLPGNQMGNSEVGHLNISAGRIVYQDLLKIDNSISDKSFRKNKLILNAIDYSKKKNKSIHLMGLLSDGGVHSHISHLEELLLILSESSCKKVYLHLFTDGRDVDPKSGIKYVKKLESFLKKTTGKIVSIIGRYYSMDRDLNFDRTRKAYKLLVNGVGKKTNDFKKDIELSYNKNLTDEFLEPLSIGEESYLIEEGDVVIS

SEQ ID NO: 156414 - protein, 140 aa, Unknown
  Bacterial polypetide isolated from the Sargasso Sea
MRRRRAGRTPSRRSVASSVKRSFHAGWYDCPLSEKGHEEATEAGRLVAAEGFKFDVAFTSTLKRAIRTLDHALEETDHMWIPVTKAWQLNERHYGGLQGLDKQQTVDKHGIEQVTVWRRSYDIPPPDSNKSSEHWPGNDP

SEQ ID NO: 156415 - protein, 237 aa, Unknown
  Bacterial polypetide isolated from the Sargasso Sea
MSFLILVRHGQSTWNLEKKFTGWVDVDLTDKGILEAKKAGFLLKNKNIKIDFYYSSLQLRANNTLKIIQQELDDKKNFTKAWQLNERHYGALTGLNKIEMSKKIGEDKIYEFRRSWDLRPDPLKKESPYHPLNIDTYKQIPRELLPDTESLKDTYERVINFFEEYVKENLKNNNVLISAHGNSIRALCKNLFNLDNKQISNLEIPTGNPMLIEFKENFAIAKCEYLDKERAKDLLVF

SEQ ID NO: 156416 - protein, 237 aa, Unknown
  Bacterial polypetide isolated from the Sargasso Sea
MSFLILVRHGQSAWNLEKRFTGWVDIDLTNKGKLEAEKAGSLIKNKNIIIDYYYSSLQRRAKNTLEIIQKVLNNEKIFTKAWQLNERHYGALTGLNKIEMAKKLGEDKVYKFRRSWDIRPEPLDRESPYHPMNIETYKKISQDIIPDTESLKDTYERVLKYFKQEIQKKLINKNVLISAHGNSIRALCKYLFKLDNNKISNLEIPTGNPLVIELNKELEIKNCEYLDKDRAKNLLIF

SEQ ID NO: 156417 - protein, 230 aa, Unknown
  Bacterial polypetide isolated from the Sargasso Sea
MSYLILVRHGQSVWNLEKKFTGWVDVDLTENGQLEAKKAGQLIKKENIEINLYYSSFQLRAKNTLKIIQEELKDFKKVISAWELNERHYGALTGLNKDEMKVKLGEEKVHQFRRSWNLRPDPLDKKNPYHPLNIETYKEIPLEKIPDTESLKDTYERVMKFYSKEIEHKTFENILISAHGNSIRALCKHLFNLDDNEISKLEIPTGNPLLIELENSKISSCKYLDQERAK

SEQ ID NO: 156418 - protein, 188 aa, Unknown
  Bacterial polypetide isolated from the Sargasso Sea
MNNLILVRHGQSEWNLENRFTGWVDVGLAAKGKLEACKAGELIKELNLELSYFYTSLQTRSIETLNLILNTMRIKDQNIVNAWELNERHYGALTGLNKDEMKKLYGEEKIHTFRRSWDNPPEPLKKTSPYHPLNINIYKNVPKDKIPDTESLKNTYERVIPFYKKNIEPKLDKNIIVSAHGKFNKIIM

SEQ ID NO: 156419 - protein, 234 aa, Unknown
  Bacterial polypetide isolated from the Sargasso Sea
MSFLILIRHGQSTWNLEKRFTGWVDVDLTRNGKLEAEKAGLLIKRRGLKIDFYYSSFQLRANNTLKIIKKILNEKRSFTRAWQLNERHYGALTGLNKIEMNKKIGKDKVHEFRRSWDVRPEALNRDSKFHPLNIETYKNIPRELIPDTESLKDTYDRVVKYYEEEIKDKLKDNNILISAHGNSIRALCKNLFNLDNIQISQLEIPTGNPLIIEMNSLNKIILCEYLDKERAKDL

SEQ ID NO: 156420 - protein, 209 aa, Unknown
  Bacterial polypetide isolated from the Sargasso Sea
MNKLILLRHGQSQWNFENKFTGWKDVPLTEKGQNEAKKAGQLIKKHKIKIDKIFSSNLQRANKTAEIAIKEAEIIDLWEENKLIMSTDDSLNERDYGDLVGLNKKETAKKFGEDQVHIWRRSYDTPPPNGESLKDVVNRVSPYYEREILPYINDNKNVLIAAHGNSLRATMIQVGLYKPEQISSIELPTGSPFCIDFINGILEKSYFLS

SEQ ID NO: 156421 - protein, 236 aa, Unknown
  Bacterial polypetide isolated from the Sargasso Sea
MSHLILIRHGQSEWNLQKRFTGWVDVELTPQGKLEACKAGELIKNLKLNLNHFFCSYQKRAIETLSLILNTLRIKNDNVTKAWQLNERNYGSLTGLNKEEMKKTLGEKKVHEFRRSWNIAPEPLNKNNPYHPLNIKTYKDIPKNMIPDTESLKDTYERVVPYYEKNILPLINENIIIAAHGNSLRTLCKYLFKIDDSKISRLEIPTGNPLALNFENKKLVNAKYLDEERAKDLIVF

SEQ ID NO: 156422 - protein, 530 aa, Unknown
  Bacterial polypetide isolated from the Sargasso Sea
MVHVVLDGWGVAPEGPGNAIAQANLPVFHKLRGQSPYTQLWTHGLHVGLPGKKDLGGSEVGHMTMGAGVLMEQGPTLINHLIDSGALFETEAMQMVIGNSIREQVPLHLMGLLSDGNIHSHISHFEVVIRHAFRTGVKQCYVHALLDGRDVPVQSAHEYTERLEGLFRDLKQQDPECDYAFASGGGRETVTMDRDNNWSKIELGWKIHVEGNHENSFPSMADAIEHFRNVDPQVIDQDLPAFVITENGKPLGPIEDRHSVIFMNFRADRAIEYSEAMVKEDFSHFARDPFPRVCFASMMQYDLDNGFPEHFLAGTPRVENPFGKRLVEHGIKQFRLTETQKFPHVTFFYNGGYREPLDHKIEEYHLIPSDKVPTFADAPMMKASEIGKRAVEFIHSGSYGYGLINFANADMVGHTGNLEAAVQAVESVDQALGLMVEAVKAVNGLMVITADHGNADEMLTKNRVSGETEASTKHSLNPVPFLVYDPLYDGSYHLKDFAANQDLNLSHVAATNFILMGMEIPDDLAPPLFL

SEQ ID NO: 156423 - protein, 207 aa, Unknown
  Bacterial polypetide isolated from the Sargasso Sea
MKKRNLILVRHGQSEWNAKNLFTGWENPGLTETGKAEAKNAGDLINNLDIDFDCLFTSALIRAQLTGTVILKTINQEDIKIIENKALNERFYGDLQGMNKDECKQKWGEELVQTWRRSYELGPPGGETLKETGDRVLPYYLNEIHPMLMQDMNILVAAHGNSLRSLIKYLDKVSDEDIVKLEIPTGAPIHYRFNEDGKVMYKKSLIE

SEQ ID NO: 156424 - protein, 191 aa, Unknown
  Bacterial polypetide isolated from the Sargasso Sea
MSNLILIRHGQSVWNAANRFTGWTDVELSEVGVSEAEEAGRSLSSHRIDVVHTSDLIRAQRTAEIIMSLNESSEGYSTKFDWRLNERNYGSLQGLNKAETAEKFGAEQVHIWRRSFDVAPPDGESLEMTAERTIPYFEEEILPDLQAGKGVLVSAHGNSLRSIVMHIEDISPEDIVSLEIQTGSPMFYEFE

SEQ ID NO: 156425 - protein, 203 aa, Unknown
  Bacterial polypetide isolated from the Sargasso Sea
MSYLSLVRHGQSEWNEKNLFTGWENPGLTDKGLAEAKEAGINLNNLGITYDHYYTSILDRAIITAEIIIKGLNIREYSLVKCQELNERDYGDLTGLNKDDARKKWGEEQVHIWRRSFDIPPPNGESLKNTAERVVPFFLSEIFTKLKLEENVFISAHGNSLRSLIMHIENLSSEQILEREIATGKPLVYEFDPSKEIYSLKYE

SEQ ID NO: 156426 - protein, 204 aa, Unknown
  Bacterial polypetide isolated from the Sargasso Sea
MNLILIRHGQSEWNALNQFTGWKDPDLTAKGIEEAHNAGKIINNLKINFDLVFTSALIRAQNTAEIILKEINQPLSTIKNQALNERNYGDLAGLNKDNARKRWGDEQVHIWRRSYDIPPPGGESLKDTGERVLPFFMKEILPHVCEGKNVLVAAHGNSLRSLIKFLDNISNEDIVKLEIPTGAPIHYVINEDGSVKSKKDFFNE

SEQ ID NO: 156427 - protein, 209 aa, Unknown
  Bacterial polypetide isolated from the Sargasso Sea
MNNLVLLRHGQSQWNLENKFTGWTDVPLTEKGINEAKNAGELLKKNNIKIDQVFSSVLERANKTAEIAIRQAQMKHLLIDNQLNYIKNQSLNERDYGDLVGLNKSETAEKFGKEQVHKWRRSYDIPPPNGESLRDVVERVSPYYVNNIQPLLFNNRNILIVAHGNSLRAILIKIGLYKPEEISDIELPTGQPLCLEYNNKILIKNYYLE

SEQ ID NO: 156428 - protein, 206 aa, Unknown
  Bacterial polypetide isolated from the Sargasso Sea
MKQRNLILVRHGQSEWNEKNLFTGWENPGLTQKGEKEAKDAGKIINGLGINFDYLYTSALIRAQLTGSIILSEINQKNVNTIENKALNERFYGDLQGLNKDECRKKWGDEKVQMWRRSYDQGPPGGETLKQTGERVVPYFREEIEPLVKNGSNILIAAHGNSLRSLIKFLDDVTDEDIVKLEIPTGAPIHYVFDSNGKVMQRNNLF

SEQ ID NO: 156429 - protein, 237 aa, Unknown
  Bacterial polypetide isolated from the Sargasso Sea
MGHLILIRHGQSEWNLQNKFTGWVDVELSPQGKLEACKAGELIKELNFKIDYFFCSYQKRSIDTLKLILNTIRGKDDQIIKAWELNERHYGALTGLNKDEMKKKLGEEQVHIFRRSWDTPPEPLSKNSPYHPLNIETYKDIPREKVPDTESLKDTYERVIPYYKSQIENKLDNNIVVSAHGNSIRSMCKCLFELDNYEVTKLEIPTGNPLKITFNSEKKLNDATYLDKTRAKNLIKF

SEQ ID NO: 156430 - protein, 237 aa, Unknown
  Bacterial polypetide isolated from the Sargasso Sea
MSFLILVRHGQSTWNLEKKFTGWVDVDLTEKGILEAKKAGFLLKNKNIKIDFYYTSLQLRANNTLKIIQQELDDKKNFTKAWQLNERHYGALTGLNKVEMSKKIGEDKIYEFRRSWDLRPDPLKKESPFHPLNIDTYKQIPRELLPDTESLKDTYERVINFFEEHVKENLKKNNVLISAHGNSIRALCKNLFNLDNKQISNLEIPTGNPMLIEFRENFAIAKCEYLDKERAKDLLVF

SEQ ID NO: 156431 - protein, 239 aa, Unknown
  Bacterial polypetide isolated from the Sargasso Sea
MTKLILTRHGQSVWNAENKFTGWVDVDLSDKGVLEAEKSGQIIKDLNIKIDISYTSYLKRAIKTLTTILQKNNLEIKFNAAWQLNERHYGSLTGLNKEETKTKIGEEKFKKYRRSWDIAPPPMEEKSEYQNLFSPLNTSIPLGMTPFTESLKNTYERVVPFYENEIKKNLTENKNVLISAHGNSIRALCKYLFNISDTKINELEIPTGNPMIIEFGENLKVEKYYYLDKSRAKDIIFNQ

SEQ ID NO: 156432 - protein, 236 aa, Unknown
  Bacterial polypetide isolated from the Sargasso Sea
MNNLILVRHGQSEWNLENRFTGWVDVGLAANGKLEACKAGELIKELNLELSYFYTSLQTRSIETLNLILNTMRIKDQDVVNSWELNERHYGALTGLNKDEMKKLYGEEKIHTFRRSWDHPPEPLKKTSPYHPLNIDIYKNVPKDKIPDTESLKNTYERVIPFYKKNIEPKLDKNIIVSAHGNSIRSLCKYLFNLDNKKISSLEIPTGNPLLIETEKGKIKHARYLDKDRAKDLLVF

SEQ ID NO: 156433 - protein, 210 aa, Unknown
  Bacterial polypetide isolated from the Sargasso Sea
MSHLILVRHGQSQWNLEKRFTGWVDVDLAPNGKLEACKAGELIKELKLNLDFFFCSYQKRAIETLDLILNTLRIKNNNVIKSWQLNERHYGALTGLNKDEMKIKLGEKKIKEFRRSWDVAPDPLNQNSPYHPINIETYKNVPRDKIPDTESLKDTFERVTNYYEKNISDKIDKNIVIAAHGNSIRALCKYLFKINENDISKLEIPTGILF

SEQ ID NO: 156434 - protein, 50 aa, Unknown
  Bacterial polypetide isolated from the Sargasso Sea
MGKLIAIRHGQSTWNAENRFTGWVDVDLSEKGVREAEKSGKLLKRIKYRF

SEQ ID NO: 156435 - protein, 165 aa, Unknown
  Bacterial polypetide isolated from the Sargasso Sea
MKERNLLLVRHGQSEWNEKNLFTGWEDPGLTKKGEDEAQNAGLLIKELGINFDHLFTSALIRAQLTGSIILNEIGQNEIPTTKNQALNERFYGDLQGLNKDECREKWGDEKVQMWRRSYEMGPPGGETLKETGERVIPYFKEEINPLILKGKNILIAAHGNSLRS

SEQ ID NO: 156436 - protein, 79 aa, Unknown
  Bacterial polypetide isolated from the Sargasso Sea
GESLKDTYNRVIPYLESEILPLMKDKNVLISAHGNSLRALVKYLDSISEEDIIKLEIATGEPIFYKFTDGKFIKELHRE

SEQ ID NO: 156437 - protein, 236 aa, Unknown
  Bacterial polypetide isolated from the Sargasso Sea
MNNLILVRHGQSEWNLENRFTGWVDVGLAAKGKLEACKAGELIKELNLELSYFYTSLQTRSIETLNLILNTMRIKDQNIVNAWELNERHYGALTGLNKDEMKKLYGEEKIHTFRRSWDNPPEPLKKTSPYHPVNIDIYKNVPKDKIPDTESLKNTYERVIPFYKKNIEPKLDKNIIVSAHGNSIRSLCKYIFNLDNENISNLEIPTGNPLLIVSEKGKIKNAKYLDKDRAKDLLVF

SEQ ID NO: 156438 - protein, 202 aa, Unknown
  Bacterial polypetide isolated from the Sargasso Sea
LKAAQLISKVNLRPTVAFTSYLKRAQETLNIILKNLKLHDIEVNYAWELNERHYGALQGLNKNEVKEKYGEEQFLKWRRGYNTPPPALNTDSEMNPKLDPLYKGISNLPLTECLADTYERVIPYWENNIKPIVLKNTTIISAHGNSLRALCKYLFSVSDKDIVKLEIPTGNPLMITLNNSCKIQSASYLDALRSENLPDIGA

SEQ ID NO: 156439 - protein, 236 aa, Unknown
  Bacterial polypetide isolated from the Sargasso Sea
MNNLILVRHGQSVWNLENRFTGWVDVGLAAKGKLEACKAGELIKELNLELSYFYTSLQTRSIETLNLILNTMRIKDQNVINAWELNERHYGTLTGLNKDEMKKLYGEEKIHTFRRSWDNPPEPLKKTSPYHPLNIDIYKNIPKDKIPDTESLKNTYERVIPFYKKNIEPKLDENIIVSAHGNSIRSLCKYLFNLDNEKISGLEIPTGNPLLIETEKGKIKHARYLDKDRAKDLLVF

SEQ ID NO: 156440 - protein, 237 aa, Unknown
  Bacterial polypetide isolated from the Sargasso Sea
MSYLILVRHGQSVWNLENRFTGWVDVDLNQNGMAQAKKAGELIKGKKINIDLYYSSFQLRAKNTLKIIQEQLDDNKKVKFAWELNERHYGSLTGLNKDEMKKKLGEEKVHQFRRSWDLRPDPLDKNNSYHPLNINTYKDVPVEKIPDTESLKDTYERVIKYYSEDIKNELKNKNILISAHGNSIRALCKYLFNLDNNQISKLEIPTGNPLLIKFDSNNKILNCEYLDSERAKDLLVY

SEQ ID NO: 156441 - protein, 221 aa, Unknown
  Bacterial polypetide isolated from the Sargasso Sea
MSYLILVRHGQSIWNLENRFTGWVDVDLNDNGRAQAKKAGDLIKEQKINIDLYYSSFQLRAKNTLKIIQEQLDDYKKVKSAWELNERHYGFLTGLNKDEMKKKLGEEKVHQFRRSWDLRPDPLDKNNSYHPLNINTYKDVPVEKIPDTESLKDTYERVIKYYGEDIKNELKNKNILISAHGNSIRALCKYLFNLDNNQISKLEIPTGNPLLIKFDSNNKIL

SEQ ID NO: 156442 - protein, 200 aa, Unknown
  Bacterial polypetide isolated from the Sargasso Sea
MSYLILVRHGQSVWNLEKKFTGWVDVDLTENGQSEAKKAGQLIKKENIELNLYYSSFQLRAKNTLKIIQEELKDFKKVISAWELNERHYGALTGLNKDEMKVKLGEEKVHQFRRSWDLRPDPLDKKNPYHPLNIETYKEIPLEKIPDTESLKDTYERVIKFYSKEIEYKTSENILISAHGNSIRALCKHLFNLDDNEISK

SEQ ID NO: 156443 - protein, 237 aa, Unknown
  Bacterial polypetide isolated from the Sargasso Sea
MSFLILVRHGQSVWNLENRFTGWVDVDLTKNGMLEAEKAGFLIKNKNIKIDKYFSSLQLRANNTLKIIQKILNDEHDFPRAWQLNERHYGALTGLNKIEMAQKIGEDKIFEFRRSWDTKPEPLDKKSPYHPFNIETYKNIPKEIIPDTESLKDTYERVLKYFHDEIEKILLNKNVLVSAHGNSIRALCKYLFKLDSSQISKLEIPTGNPLVIEFDDKFKIKNCEYLDKERSKDLLIF

SEQ ID NO: 156444 - protein, 81 aa, Unknown
  Bacterial polypetide isolated from the Sargasso Sea
MSKLILIRHGQSEWNELNLFTGWKNPGLTKKGEKEATDAGKLLREKGIIFDIAFTSALKRAQDTLTIILKEIDQTSLKIIK

SEQ ID NO: 156445 - protein, 124 aa, Unknown
  Bacterial polypetide isolated from the Sargasso Sea
TKSQNLNERDYGDLVRLNKEETSQKFGKEQVHIWRRSYDVSPPGGESLKNVVDRVGPYFEKYIQPHLFIDKNVIIVAHGNSLRAIMIKIGLYKPEEISKIELPTGSPFVVNFSSGNLKDANYLN

SEQ ID NO: 156446 - protein, 149 aa, Unknown
  Bacterial polypetide isolated from the Sargasso Sea
MSHLILIRHGQSEWNLQNRFTGWVDVDLAPKGKLEACKAGESIKELKININHFFTSYQKRAINTLKLILNTMRIKEDRIVKAWELNERHYGTLTGLDKDEMKKKLGEKKVQMFRRSWDISPEPLSKNNPFHPLNIEIYKYVPKEKYQIL

SEQ ID NO: 156447 - protein, 207 aa, Unknown
  Bacterial polypetide isolated from the Sargasso Sea
MKNKNLILVRHGQSEWNQKNIFTGWENPGLTQQGREEAKLAGILINDLEIKFNYLFTSALVRAQLTGSIILENVNQENVKIIKNKALNERYYGDLQGLNKDECRNKWGEDQVQIWRRSYTVGPPGGESLKETGERVMPYFLNEIFPLILKGENIIVSAHGNSLRSLIKYLDKLSSEEIVKLEIPTGSPIHYLFDDDGEILNKKNLIE

SEQ ID NO: 156448 - protein, 130 aa, Unknown
  Bacterial polypetide isolated from the Sargasso Sea
EAIVSNRYDAIICNYANGDMVGHTGNFTAAVKAVEVIDTCLNEIISAIKEVNGQLLVTADHGNVEQMLDTTTNQPLTSHTKGPVPLVYVGNKKIKFKTLGSLCDIAPTMLALMDMPIPNQMTGTVLIEDT

SEQ ID NO: 156449 - protein, 237 aa, Unknown
  Bacterial polypetide isolated from the Sargasso Sea
MSYLILVRHGQSIWNLEKKFTGWVDVDLTENGKSEAIKAGELIKTKNINIDIYYSSYQLRAKNTLKLIKQTLQDTKVSKEAWQLNERHYGSLTGLNKDEMKLKLGEEKVHQFRRSWDLRPDPLDKKNPHHPINIDAYKEIPIDKIPDTESLKDTYERVLEFYTQEIENEISKNNILISAHGNSIRALCKYLFKLDENQISKLEIPTGNPLLINLDKKNNITDCKYLDKERAKDLVVF

SEQ ID NO: 156450 - protein, 199 aa, Unknown
  Bacterial polypetide isolated from the Sargasso Sea
MKERNLLLVRHGQSEWNEKNLFTGWEDPGLTKKGEDEAQNAGLLIKELGINFDHLFTSALIRAQLTGSIILNEIGQNEMPTTKNQALNERFYGDLQGLNKDECREKWGEEKVQMWRRSYEMGPPGGETLKETGERVIPYFKEEINPLILKGKNILIAAHGNSLRSLIKFLDNVSDEDIVKLEIPTGAPIHYIFNEDGNV

SEQ ID NO: 156451 - protein, 236 aa, Unknown
  Bacterial polypetide isolated from the Sargasso Sea
MNNLILVRHGQSEWNLENRFTGWVDVGLAAKGKLEACKAGELIKELNLELSYFYTSLQTRSIETLSLILNTMRIKDQNVINAWELNERHYGALTGLNKDEMKKLYGEEKIHIFRRSWDNPPEPLKKTSPYHPLNIDIYKNVPKDKIPDTESLKNTYERVIPFYKKNIEPKLDKNIIVSAHGNSIRSLCKYLFNLDNEKISSLEIPTGNPLLIETENGKVKNVRYLDKDRAKDLLVF

SEQ ID NO: 156452 - protein, 231 aa, Unknown
  Bacterial polypetide isolated from the Sargasso Sea
HGQSEWNFQKRFTGWVDIDLTAQGKLEAVKAGELIKEKKVKIDFFYSSLQKRAVNTLKLILNTLRIKDEKIIKAWELNERHYGALTGLNKDEMKKIYGDKKILEFRRSWNISPEPLNRNNPYHPINIEVYNNIPRDKIPDTESLKNTYDRVVKYFESNVLPMLKKNNNILISAHGNSLRGLCKFLFEIDDVKISKLEIPTGNPLVINFNEKTEILDASYLDRSRAKDLVVF

SEQ ID NO: 156453 - protein, 145 aa, Unknown
  Bacterial polypetide isolated from the Sargasso Sea
MSHLILIRHGQSEWNLQNRFTGWVDVDLAPNGKLEACKAGELLKEKNLEFDYFFSSFQKRATDTLKLILNTLRLKDDVILNAWELNERHYGNLTGLNKDEMKKKFGEEVIHKFRRSWDNPPEPLNRNNPYHPLNIKAYEKVQKKK

SEQ ID NO: 156454 - protein, 146 aa, Unknown
  Bacterial polypetide isolated from the Sargasso Sea
MKPTILCIMDGWGISSNAKYNAVTQAKTPIFDQLVRQWPNNLMHASGEHVGLPEGQMGNSEVGHMNIGAGRVILQDLPRINQAIQSNKLSKNKVLKDFISATKKSAGKCHLIGLLSDGGVHSHQTHIEALAKTIASSSVPVVLTGF

SEQ ID NO: 156455 - protein, 207 aa, Unknown
  Bacterial polypetide isolated from the Sargasso Sea
MKKRNLILVRHGQSEWNAKNLFTGWENPGLTETGKTEAKNAGDLINNLDIDFDCLFTSALIRAQLTGTIILKTINQESIKIVENKALNERFYGDLQGMNKDECKQKWGEELVQTWRRSYELGPPGGETLKETGDRVLPYYLNEIHPMLMQDKNILVAAHGNSLRSLIKYLDKVSDEDIVKLEIPTGAPIHYRFNEDGKITYKKSLIE

SEQ ID NO: 156456 - protein, 237 aa, Unknown
  Bacterial polypetide isolated from the Sargasso Sea
MSHLILVRHGQSEWNLENRFTGWVDVDLAPKGKLEACKAGELIKELNLEINHFFSSYQKRAIETLKLMLVTMRIKNDKIIKAWELNERHYGSLTGLNKDEMKKKLGEDKIHIFRRSWDKPPEPLNKNNPYHPLNIEIYKDIPKDKIPDTESLKNTYDRVIPYFKKNIEKKISENVMISAHGNSIRSLCKYLFDISNDEISKLEIPTGNPLILEFDNNNLLNAKYLDQERAKDLLKFS

SEQ ID NO: 156457 - protein, 236 aa, Unknown
  Bacterial polypetide isolated from the Sargasso Sea
MNYLILIRHGQSTWNLENRFTGWVDVDLTDKGKTEAKNAGNLIKKENIEINYFYSSFQSRANNTLKLIQEVLGNNKNFTRAWQLNERHYGALTGLNKTEMSEKLGEEQVYKFRRSWDLRPGPLNKNSSFHPSNIDIYKNVPNENIPDTESLKDTYSRVVKYYEKEIKEKLNRENILIAAHGNSIRALCKYLFKLDEVQISKLEIPTGNPLLIEFNNTQINSCRYLDKDKAKNLLVF

SEQ ID NO: 156458 - protein, 125 aa, Unknown
  Bacterial polypetide isolated from the Sargasso Sea
MGKLIAIRHGQSTWNAENRFTGWVDVDLSEKGVQEARRSGKLLKQLDINFDICFTSYLKRAIDTLEIVLKVLGEKYEYTKAWELNERHYGALTGLNKKETEEKIGEEQFKKYRRSWDIPPPILDK

SEQ ID NO: 156459 - protein, 238 aa, Unknown
  Bacterial polypetide isolated from the Sargasso Sea
MSHLILVRHGQSEWNLENRFTGWVDIDLAPKGKLEACKAGELIKELDLDINHYFSSYQKRAIETLKLILNTMRIKNDNIIKAWELNERHYGSLTGLNKEEMKKKLGEDKIHIFRRSWDKPPEPLNKNNPYHPLNIEIYKDIPKDKIPDTESLKDTYNRVIPYFKINIQKKISENVIISAHGNSIRSLCKYLFDISNEEISKLEIPTGNPLILEFDDNIKLLNAKYLDKERAKDLLKFG

SEQ ID NO: 156460 - protein, 237 aa, Unknown
  Bacterial polypetide isolated from the Sargasso Sea
MSHLILVRHGQSEWNLEKKFTGWVDVELAPNGKLEACKSGELIKELNLNLNYFFSSYQKRAIETLNLILNTLRIKNNDVIKAWELNERHYGALTGLNKDEMKKNLGEDKVLEFRRSWDIRPEPLNRNNPYHPINIEIYKNIPKDKIPDTESLKDTYERVIPYFEKNILNKLNKNIIIAAHGNSIRALCKYLFNIDNKKISKLEIPTGNPLLIKFDNNKKVKEALYLDKKRANDLIIF

SEQ ID NO: 156461 - protein, 170 aa, Unknown
  Bacterial polypetide isolated from the Sargasso Sea
MSHLILIRHGQSEWNLENRFTGWVDVDLAPKGKLEACKAGELLKKLNLNINYFFTSYQKRAIDTLKLILNTMRIKDDKITKAWELNERHYGSLTGLNKDEMKKKLGEDKIHIFRRSWDNPPEPLSKNNPYHPLNIETYKDIPKEKIPDTESLKDTYERVIPYFKREIEKK

SEQ ID NO: 156462 - protein, 134 aa, Unknown
  Bacterial polypetide isolated from the Sargasso Sea
LILENMNQLDIPVIKNQSLNERNYGDLAGLNKDDAREKWGEEQVHIWRRSFDIPPPGGESLKDTAERVLPYFHSEILPKVEEGLDVLVAAHGNSLRALVMELEGISSDEIVKLEIATGDPLTYELTEGKITRTN

SEQ ID NO: 156463 - protein, 209 aa, Unknown
  Bacterial polypetide isolated from the Sargasso Sea
MNKLILLRHGQSQWNFENKFTGWQDVPLTEKGEIEAKKAGELIKKHKIHIDYIFSSVLDRANKTAEIAIKEANLTNLIDNNKLIMTRNENLNERDYGDLVGLNKEETANKFGKEQVHIWRRSYDTPPPNGESLKNVVERVSPYFKKNIKPLLDKNKSILIAAHGNSLRAMMIELGMYKPEEISSIELPTGSPLCINLDEGKLVDFFYLI

SEQ ID NO: 156464 - protein, 189 aa, Unknown
  Bacterial polypetide isolated from the Sargasso Sea
MNQFTGWKDPDLTATGIQEAYNAGKIISSLEINFDLVFTSALIRAQNTAEIILKEISQPLPTIKDQALNERNYGDLAGLNKDDARKRWGDEQVHIWRRSYDIPPPGGESLKDTGERVLPFFMKEILPHVCEGKNVLVAAHGNSLRSLIKFLDDISDEDIVKLEIPTGAPIHYVINEDGSVKSKKDFFNE

SEQ ID NO: 156465 - protein, 239 aa, Unknown
  Bacterial polypetide isolated from the Sargasso Sea
MSHLILVRHGQSEWNLENRFTGWVDVDLTPKGKLEACKAGELLKIQKIKINYFFTSFQKRAINTLKLILNTLRVKDSQIIRAWQINERHYGSLTGLNKDEMKKTYGEKEIQEFRRSWDKLPEPLNKNSPYHPLNINAYKDVPTKNIPDTESLKDTYERVFPYFEKEIISKLKQNKNILISAHGNSLRAICKYLFKLDENQINKLEIPTGNPLLINFNNKLEIIKCFYLDKERAKNLIVF

SEQ ID NO: 156466 - protein, 207 aa, Unknown
  Bacterial polypetide isolated from the Sargasso Sea
MKNILLIRHGQSEWNKLNLFTGFKNIELSEQGIEEANKAGQNFKNLDIKFNIVFTSELKRAQETAKIILQNLDQWDFLNNEGKIISNINLNERDYGDLTGLNKKETAEKFGEEQVHKWRRGYSDQPPNGESLEDVVRRVKKYFEEIIQPAIQSDENDNILIAAHGNSLRALLIVMNIYEPNNINSVELSTGVPIHVILIDNRFSIKD

SEQ ID NO: 156467 - protein, 203 aa, Unknown
  Bacterial polypetide isolated from the Sargasso Sea
MSYLSLVRHGQSEWNEKNLFTGWENPGLTEKGLVEAKEAGVKLNNLGIHYDHYYTSTLDRAIITAEIIISGLNINEYNLVKCQELNERDYGDLTGLNKDDARKKWGEEQVHIWRRSFDIPPPNGESLKDTAERVIPFFSSEIFTKLKDQENVFISAHGNSLRSLIMHIENLSSEEILKREIATGKPLVYEFDSFKETYSLKYE

SEQ ID NO: 156468 - protein, 84 aa, Unknown
  Bacterial polypetide isolated from the Sargasso Sea
MKGAEGEPWTAHTTNKVPLILIEGEKRKIPNMGNEINLRDNAGLADIAPTLLQLLNLPVPREMTGKSLIQEIELKGYNKVVQHV

SEQ ID NO: 156469 - protein, 125 aa, Unknown
  Bacterial polypetide isolated from the Sargasso Sea
GLKQYRTAETEKYPHVSYFFNGGVEIPLPGEERHLIPSPRVATYDMEPEMSAEELTISCSKAIKSGNYAFVVINFANPDMVGHTGNMDATIKAIEKVDKCVGQIVNATGEMGGSIVITADHGNAE

SEQ ID NO: 156470 - protein, 119 aa, Unknown
  Bacterial polypetide isolated from the Sargasso Sea
MSKLILTRHGQSIWNAENRFTGWVDVDLSKKGVIEAEKSGELIRKSNINIGVSYTSYLKRAIKTLTTILKQNKKELKIYTAWQLNERHYGSLTGLDKEEIKKKIGEEQLKDIEDRGTRP

SEQ ID NO: 156471 - protein, 236 aa, Unknown
  Bacterial polypetide isolated from the Sargasso Sea
MNYLILVRHGQSEWNLENRFTGWVDVDLAAKGKLEACKAGELIKKLGIELSYFYTSLQSRSIETLNLILNTMRIKNQEIVNAWELNERHYGSLTGLNKDEMKKLYGEEKIHIFRRSWDNPPEALKKTSPYHPLNIDIYKNVPRDKIPDTESLKNTYERVIPFYKRNIEPKLDKNIIVSAHGNSIRSLCKYLFDLDNKKISSLEIPTGNPLLIEIEKGKIKNASYLDKDRAKDLLVF

SEQ ID NO: 156472 - protein, 207 aa, Unknown
  Bacterial polypetide isolated from the Sargasso Sea
MKKRNLILVRHGQSEWNEKNLFTGWEDPGLTKKGSDEAINAGLLIDKLELEFNYLFTSALIRAQITGNIILESIDQDNVDIIINKALNERFYGDLQGLNKDECRKKWGDEQVQIWRRSFDIGPPGGESLKETGERVMPYFLENIHPLILRGENVIISAHGNSLRSLIKHLDKLSAEEIVKLEIPTGAPIHYLFNENGEVLNKKNLIE

SEQ ID NO: 156473 - protein, 221 aa, Unknown
  Bacterial polypetide isolated from the Sargasso Sea
GFRNRFTGWVDVDLTENGKSEAKKAGQLIKNEKINIDLYYSSFQLRAKNTLKIIKNELRDNKNFKSFWELNERHYGALTGLNKDEMKIKLGEEKVHQFRRSWDLKPDPLDKNDPHHPLNIKIYKKISIKKIPDTESLKDTYERVVKFYKNELEKKNNKNVLISAHGNSIRALCKYLFNLDNNEISKLEIPTGNPLLIKFKENKVISGKYLDVKRSKNLLVF

SEQ ID NO: 156474 - protein, 110 aa, Unknown
  Bacterial polypetide isolated from the Sargasso Sea
GNLEAAVKACEAVDAGLGQLMASVKEKNGCLVITADHGNCEVMIDPETKLNHTAHTTHLVPFAIYGVDQDIEIRKHGRLADVAPTVLCLMGLQQPPEMTGKSMIEKKNCD

SEQ ID NO: 156475 - protein, 249 aa, Unknown
  Bacterial polypetide isolated from the Sargasso Sea
MNLVFVRHGQSIWNLENKFTGWVDVGLSDKGIQEAIKAGKTLIENNFKPEICFTSYLSRSIETSNHLLNEYEQALVNEINIIKRWQLNERHYGALQGLDKIDTAKKYGEKQVHEWRRGYKTKPPLIEKDSKFDPRQDEAYEDIDIALPLGESLEDVVARVESTLNEIIELSENKNVLVVAHGNSIRAMLKTIENISDDSIVEVNIPTGIPLAFNINNDKITKIGYLGDQETIEELEKEIEQQSKIEKDN

SEQ ID NO: 156476 - protein, 237 aa, Unknown
  Bacterial polypetide isolated from the Sargasso Sea
MSFLILVRHGQSTWNLEKKFTGWVDVDITETGKSEAKKAGQLIKEQNLKINYYYSSVQLRAKHTIKIIKEILNDEKEFKSAWQLNERHYGALTGLNKIEMAKKIGEKKVHEFRRSWDMKPDALSKESPHHPSNISTYKDVPEELIPSTESLKDTYDRVVKFFEEEIQEKLRDTNILISAHGNSIRALCKKLFELDNNLISNLEIPTGNPLLIKLDNNLKITKCEYLDKKRAKDLLVF

SEQ ID NO: 156477 - protein, 60 aa, Unknown
  Bacterial polypetide isolated from the Sargasso Sea
MNYLILVRHGQSEWNLENRFTGWVDVDLAAKGKLEACKAGELIKKLGIELSYFYTSLQSR

SEQ ID NO: 156478 - protein, 92 aa, Unknown
  Bacterial polypetide isolated from the Sargasso Sea
MSNKVLLLILDGWGIASDKKASAPDIAKTPNYNSLKDKNPFNYLITHGEKVGLPPGQMGNSEVGHMNIGSGRIVPQDLLRIDKSIKNGQFFE

SEQ ID NO: 156479 - protein, 138 aa, Unknown
  Bacterial polypetide isolated from the Sargasso Sea
ILDNINQENVKIIKNKALNERFYGDLQGLNKDECRKKWGENQVQIWRRSYDIGPPGGESLKETGERVMPFFLNEIFPLILKGENIIVSAHGNSLRSLIKYLDKLSSKEIVKLEIPTGSPIHYLFDDSGEILHKKNLIE

SEQ ID NO: 156480 - protein, 235 aa, Unknown
  Bacterial polypetide isolated from the Sargasso Sea
MSYLILVRHGQSLWNLEKKFTGWVDVDLTENGKSEAKKAGELIKQEKIEINVYYSSFQLRAKNTLKIIQEELQDFKEVKSAWELNERHYGALTGLNKEEMKKKLGEEKVHQFRRSWDLRPDPLDKKNPYHPLNIETYKKIPLEKIPDTESLKDTYERVIKFYSNEIEKKSSENILISAHGNSIRALCKYLFNLNNNEISKLEIPTGNPLLIELENNKISNCKYLDQERAKDLLVF

SEQ ID NO: 156481 - protein, 236 aa, Unknown
  Bacterial polypetide isolated from the Sargasso Sea
MSHLILVRHGQSEWNLENKFTGWVDVELAPQGKLEACKAGEFIKKLNLEIKHFYTSYQLRSIDTLKLILNTIRVKPNNIIKAWQLNERHYGSLTGLNKDEMKKKLGEDEVHKFRRSWDKPPKPLNINSPYHPKNISIYNDIPRNLIPDTESLKDTYERVVPYFVENIEKNLQDNIVISAHGNSIRSLLKYLFKIDENEISKLEIPTGNPLLLKFEKKNIKEARYLDQSRSKDLIKF

SEQ ID NO: 156482 - protein, 237 aa, Unknown
  Bacterial polypetide isolated from the Sargasso Sea
MSKLIAIRHGQSTWNAENRFTGWVDVDLSEKGVREAEKSGKLLQELNLNFNICFTSYLKRAINTLEIVLKVLEKDIKYTKAWELNERHYGSLTGLNKSETKKKLGEEQFKKYRRSWDIPPPSQDKDSKYSSYKDPLYKDIKNIPNTESLKDTYDRVVPYFEKHIEKHLQQNKNVMISAHGNTIRALGKKIFNISDTKINLLEIPTGNPLIIDFDSSGNFLNAKYLDETRKTEIISNQ

SEQ ID NO: 156483 - protein, 237 aa, Unknown
  Bacterial polypetide isolated from the Sargasso Sea
MSYLILIRHGQSVWNLENKFTGWVDIDLNDNGRAQAKKAGELIKEQKLNIDLYYSSFQLRAKNTLKIIQEQLDDPKKVKSAWQLNERHYGSLTGLNKDEIKKKLGEEKVHQFRRSWDLRPDPLDKSNSYHPLNINTYKDIPIDKIPDTESLKDTYGRVIKYYNEDIKNHLKNKNILISAHGNSIRALCKYLFNLDNNQISKLEIPTGNPLLIKFDTDNKILNCEYLDSERAKDLLVY

SEQ ID NO: 156484 - protein, 207 aa, Unknown
  Bacterial polypetide isolated from the Sargasso Sea
MNERNLILIRHGQSEWNEKNLFTGWENPGLTEKGKKEAKNAGTLIKSLDINFDYMFTSALIRAQLTGSIILESLNQSEINIIKNKALNERFYGDLQGLNKDECRKKWGEEKVQMWRRSYDKGPPGGETLKETGERVLPYYLEEILPLILKDMNIIIAAHGNSLRSLIKYLDGISDEDIVKLEIPTGAPMHYVFDQSGKVISKKNLIE

SEQ ID NO: 156485 - protein, 66 aa, Unknown
  Bacterial polypetide isolated from the Sargasso Sea
WNESIEPYIKSGKKVLIVAHGNSLRALVKHLNGISDDEIKDLNILTGAPYVFELDSQLKSQKNYYL

SEQ ID NO: 156486 - protein, 168 aa, Unknown
  Bacterial polypetide isolated from the Sargasso Sea
GGNENPYPGEVRCLVPSPKVSTYDLCPEMSSLEVTSKLVKAIESGKYEFIVVNYANPDMVGHSGKIKATVSACEAVDRGLGKILTSLRKVGGQLLLTSDHGNSETMLDEKSGLPHTAHTINRVPIIYFSSEKKLNIMDGTLSDIAPTILQLMGLEKPIEMTGNSLIKL

SEQ ID NO: 156487 - protein, 167 aa, Unknown
  Bacterial polypetide isolated from the Sargasso Sea
KILKGGVIGTLMSNYGLQNYFKEEKIRFIRAKVGDRYVKEKMRKNKFNLGGEQSGHIILGKFATTGDGLLVALEVLFSMRKGKKSSDLFNIFKPTPQVLKNVPVKDKSIINSSKCKKAIKKASKLIQNQGRMLVRKSGTESKIRIMVESNNKLLLFKCLNIVKRSIK

SEQ ID NO: 156488 - protein, 153 aa, Unknown
  Bacterial polypetide isolated from the Sargasso Sea
SDLLKLIFSNEKINFKRSDVGDRYVKEMMKKYSFNLGGEQSGHIILGKFATTGDGLLVSLEVLFAMRKGKLASEMFKVYKSVPQKLLSIKVKDKKVIKSSKCKKAIKLAKKLIKNKGRLLVRPSGTEPKVRIMCESFNTSLINKCINVLKKTF

SEQ ID NO: 156489 - protein, 363 aa, Unknown
  Bacterial polypetide isolated from the Sargasso Sea
TIKQKCDFGIVISASHNSYEYNGIKIINHMGEKIDREIESIIESKLSDAPITNTAESLGKAKISNTSRNLYKSLLMSIFVDIDDHLPLKGFKIVVDASNGAAYKIAPQILLDLGADVIPIACSPNGKNINLDCGSTHPETLRKTVVATEANLGIALDGDADRILMVDENGRILNGDQILYILAKSNISNPSFNNKVVGTITTNSGLEMKLKEMNIDLYRSDVGDKNVYSMMKKTGAIIGGESSGHIINSEYSPTGDALLTALIVIRESIKNDSKISDLADDLELLPALNDNLNTENMSEINENQLKEIADRINSDNKDGRVIIRPSGTEPLIRISIENRDQKTAKKILETIRKNIKDRDKKFY

SEQ ID NO: 156490 - protein, 121 aa, Unknown
  Bacterial polypetide isolated from the Sargasso Sea
MTKKYFGTDGIRGKVNGNKINGDMFFKFGLAVGTYFNNKKKTKQMAIIAKDTRLSGYALEPALVSGLTSAGMHVFTFGPLPTNGLAMLTKKMRANMGIMITASHNPFDDNGLKLFGPNGLK

SEQ ID NO: 156491 - protein, 171 aa, Unknown
  Bacterial polypetide isolated from the Sargasso Sea
WKNKKMLKGGVVGTLMSNYGLEKYFKSKGIKFLRANVGDRYVKEKMQKYNFNLGGEQSGHIILGKFATTGDGLLVALEALFALRKGKKASEFFEQFKKTPQLLENIEVKDKNIINKPEIKKIIKNADKLIKGKGRILVRKSGTESKIRVMGESENKALLYKCVNMITKKIK

SEQ ID NO: 156492 - protein, 235 aa, Unknown
  Bacterial polypetide isolated from the Sargasso Sea
EVKTLGIIFDGDGDRIAAIDEKGRYSSTQDLLPYFISYLGEIKNNSYPVLKTVSGSDIIKNISESQNRDVFELPVGFKYIAEKMIKEKIFIGGEESGGVGFGDFMPERDALYAAMVLLNGIAEKSQYLYETLDEIQEDFGPSFYKRIDIKFPNQSEKNNVKEFIIDNIPENINNHKLKSISKIDGIKLRIDKNFWLLFRFSGTEPLLRLYCEAPKESYLIEVLEWGQEFINLAGK

SEQ ID NO: 156493 - protein, 188 aa, Unknown
  Bacterial polypetide isolated from the Sargasso Sea
MSKKYFGTDGIRGRVNQEKINGEMFFKFGLAAGIYFKNQKKSKQIAIIAKDTRLSGYTLEAALVSGLASAGMHVFTFGPLPTNGLAMLTKIMRANMGIMITASHNPFHDNGLKLFGPDGLKLSDNIEKKIEKLIDSKIADKLSNPKILGRVKRLEDGSEKYIEILKKNFPNQFNLRGLKIAIDCANGA

SEQ ID NO: 156494 - protein, 180 aa, Unknown
  Bacterial polypetide isolated from the Sargasso Sea
YFSELNNLKNNIVVSTVMSNYGFKQAMQKFDFDLIETPVGDKYVAESMNKYDASLGGEQSGHIIIADLLPVGDGLITLIMVLKALEHFGMTLCDFKNENLYEYPQKLTNIELTNKLNDEEIEYINQIALDMSINKDLDGRYLIRNSGTEPLLRVLVEAKSAEAMQDFSDELLTMINKYLN

SEQ ID NO: 156495 - protein, 210 aa, Unknown
  Bacterial polypetide isolated from the Sargasso Sea
MIFWELGADVIVIGDKPNGRNINQDCGSTKTKALRKKVKDENADLGIAFDGDGDRLVIIDENGDQVNGDHLLAMIALSLKKKNLLKSNKIVSTIMANLSLENYLDSIDLKLIRANVGDRYVIEEMVKSGSNFGGEPSGHLIINDFSTTGDAIISSLQVLSLMIEENKSISNLTNLFPLISQKHYEHISDDKNDISNSVLENLSKEMKEKM

SEQ ID NO: 156496 - protein, 134 aa, Unknown
  Bacterial polypetide isolated from the Sargasso Sea
VINQMKKSKSMIGGEQSGHIILSEHSNTGDGILAALKITEILISNKNKASKLFDLYKDFAQEKINLSYKTKNTKLLKILSKLKNDKLYNNKKIRSLVRLSGTEPLVRILVEGQEISDVKKKSLEIKKLVRPYLG

SEQ ID NO: 156497 - protein, 149 aa, Unknown
  Bacterial polypetide isolated from the Sargasso Sea
NYLKSQKIKFIRAKVGDRYVKEKMQNNNFNLGGEQSGHIILGKFATTGDGLLVALEILFSMRKGKRASDIFNTFKATPQILENVKVKDKSIINSQKCKIAISKSEKLIKNHGRMLVRKSGTEPKIRIMGESSNISLLKKCINIVKKSIN

SEQ ID NO: 156498 - protein, 217 aa, Unknown
  Bacterial polypetide isolated from the Sargasso Sea
MSKKYFGTDGIRGRVNQGKINGDMFFKFGLAAGTYFKNLKKNKQTAIIAKDTRLSGYTLEPALVSGLASAGMHVFTLGPLPTNGLAMLTKKMKANLGIMITASHNPYYDNGLKLFGPDGLKLSDIIETKIEKLIDSKIINNLSKPETLGRVKRLEDANERYIKILKSNFPNNFRLKGIKIAIDCANGAGYKSGPKLFKSLGAKIFKTGTSPNEIKYK

SEQ ID NO: 156499 - protein, 223 aa, Unknown
  Bacterial polypetide isolated from the Sargasso Sea
LQQTVKAVGADVGIALDGDGDRVVMVDENGNLLDGDQLLFILAMYCKENNMLKNPVVGTVLSNLGLEESLKSHGIEFMRSKVGDRNILSLLRETGGNLGGEASGHMICMDYVETGDGLITAIQVLEIMKNKNSSLSNLASGMKKYPQVIENIDNKNNFNVSDSKEIETLVDDIKKKLEGKGRLILRPSGTEPLIRIMLEGESRDDLISHMSDLKQNIEKIVSS

SEQ ID NO: 156500 - protein, 142 aa, Unknown
  Bacterial polypetide isolated from the Sargasso Sea
MSNSAPLKVLKSKEALPLRRDRKFGTDGIRGPVDSTMNPLFVTKLGWAAGCVLLEEGITKVLIGKDTRISGYMLESALQAGFISSGMDVTLLGPLPTPGVSFLANSNKQVGVVISASHNLFEDNGIKFFNLNGQKFSAELEK

SEQ ID NO: 156501 - protein, 316 aa, Unknown
  Bacterial polypetide isolated from the Sargasso Sea
MGTDGIRGIPNDTLSKDLISKISASVEQHINPKNIGVISDTRSSSDEILNWISIGFSNKVNIYNHGVLPSGSMPIILNKFNYDLGIIISASHNPAEYNGIKLIQENGSKLDDDVEISIEKNIDSLELPNQHAEIINLSDGHLEYLNFLDDVTDIDFSHFQILIDAANGSASTVIKELFDKKNANYRIINNQPDGLNINKDCGATVPENLQKNIEKGEIGASFDGDADRLIMVDENGDIVNGDLILTILSKYLSEVNQLTNNIVVSTVMSNYGFKQAIEKFNFDLIETPVGDKYVAEAMKKYDAALGGEQSGHIIIS

SEQ ID NO: 156502 - protein, 167 aa, Unknown
  Bacterial polypetide isolated from the Sargasso Sea
MAKKYFGTDGIRGQVNSESINGEMFFKFGLAAGTYFKNQRKSKQTAIIAKDTRLSGYTLEPALVSGLASAGMHVYTLGPLPTNALAMLTKKKRANMGIMITASHNPYSDNGLKLFGPDGLKLSDKIEKKIEKLIDSKIIKNLSIPKDLGRVKRLENANDEYIKILKN

SEQ ID NO: 156503 - protein, 293 aa, Unknown
  Bacterial polypetide isolated from the Sargasso Sea
PKNKKRKYFGTDGIRGRANTYPMTGETALKVGMAAGEYFTRGKHKHNVVIGKDTRLSGYLIEPSLTAGFISMGMNVFLVGPMPTPAISMLTRSMRCDVGVMISASHNSYEDNGIKLFDPNGEKLSDKSELKIESLMDKNHKTNLVDSSKLGRAKRIEDAAGRYLEFVKSTFPDELSLKKLKIVIDCANGAAYQVAPRVLWELGAEVISIGCNPDGTNINYKCGSTYPIHMANMVKKHKADIGIALDGDADRCVLCDEKGNFIHGDKIIGLIAKRYLDQGLLEGKSIVGTKMTN

SEQ ID NO: 156504 - protein, 178 aa, Unknown
  Bacterial polypetide isolated from the Sargasso Sea
KFTKTKKNTVVTTVMSNLGFEIYLKEKLGVKLIRENVGDINVITNMKKNSYNLGGEQSGHIILGQYMNTGDAILAAIKVIESLSKSNTKASNLFNLFKKLPQNKINIKLNTELSKLQQNKIKNISLQYVKKYKNLRFLVRKSGTEPLVRILVEGREKLLVTKITSKLMKELKEIISVK

SEQ ID NO: 156505 - protein, 156 aa, Unknown
  Bacterial polypetide isolated from the Sargasso Sea
MSNYGLEKFFREKKINFFRSNVGDRYVKELMQNKKFNLGGEQSGHIILGNFATTGDGLLVALEILFSLRKGNKASELFSIFRPTPQVLENISVKDKSIISSKKCKSAIRKAEKIIFGKGRLIVRKSGTESKIRIMCESEDKILLNKCIKIVSNSLK

SEQ ID NO: 156506 - protein, 122 aa, Unknown
  Bacterial polypetide isolated from the Sargasso Sea
MGKKYFGTDGIRGKVNQDKINGEMFFRFGLATGTYFKNTKKNKQTAIIAKDTRLSGYALEPALVSGLTSAGMNVYTLGPLPTNGLAMLTKQMKANMGIMITASHNPYFDNGLKLFGPDGLKL

SEQ ID NO: 156507 - protein, 275 aa, Unknown
  Bacterial polypetide isolated from the Sargasso Sea
SGIMISASHNPPEYNGIKIFDYNGQKITNHLENKIQKLIEESNQNISVPKKVIPLNTSKDLMDVYIKGLIQTMGGENLSGLKIILDTCYGSATTCAKKIFQALGAEVIVINNSNNGLKINMNCGSTNLEPLKKALRENPADMGFSFDGDADRVIGMDSKGNVLDGDHMLFLWGRELMEQKMLTNNLLISTQMANLGFESAWKKIGGILHRTNVGDKYVHDAIKEKRADLGGEQSGHILSKINNFSGDGILTALQISKHCKVKNINLNDWLKSSFE

SEQ ID NO: 156508 - protein, 87 aa, Unknown
  Bacterial polypetide isolated from the Sargasso Sea
MARLLKIRKRKHFGTDGIRGSISKETNPEFILKLGWAAGKVFKEQGIKALIIGKDTRISGYMLETALQSGIISAGVDVRLVGPMPTP

SEQ ID NO: 156509 - protein, 251 aa, Unknown
  Bacterial polypetide isolated from the Sargasso Sea
GNALTAGFISAGWNVNLLGPLPTPAVSFLTKSLRADLGIMISASHNPFEDNGIKFFDKDGFKLDDKLEVMISDEVKRPSFLVEPENLGRASRINDVLGRYTEFAKTTVSSDLRLDGLKVLVDCANGAAYKLIPQTISELGAEVIPMSVNPNGYNINLECGSTFPLRAQEAVLAEKADLGVCLDGDADRVLLIDENGKIADGDQVMALIAKSWMTEGSLRNNTVVSTVMSNLAFEIFLKDIGVELIRTNVGD

SEQ ID NO: 156510 - protein, 141 aa, Unknown
  Bacterial polypetide isolated from the Sargasso Sea
MRNKYFGTDGIRGTVNQGIITGEKFFKFGLASGNYFKNQKKTKQIAIIAKDTRLSGYTLEPALVSGLVSGGMHVFTLGPLPTNGLAMLTKSMRANMGIMITASHNPYYDNGLKLFGPDGMKLSDKIEKKIEKLIDQKKTNN

SEQ ID NO: 156511 - protein, 166 aa, Unknown
  Bacterial polypetide isolated from the Sargasso Sea
MSKKYFGTDGIRGTVNSKNINGDMFFKFGLASGTYFKSQRKKKQIAIIAKDTRLSGYTLEPALVSGLTSAGMHVYTLGPLPTNGLAMLTKSMKANMGIMITASHNPHHDNGLKLFGPDGMKLSDKIEKKIEKLIDKKIYKNLSNPNMLGRVKRLESGTKDYIKILK

SEQ ID NO: 156512 - protein, 262 aa, Unknown
  Bacterial polypetide isolated from the Sargasso Sea
FFSESGKKLDSSLEGLISQKLDRDYPMLVSNGIGKVTRINDASGRYVEFCKSCFPTELNLRGVKIALDCANGAAYQVAPKVFSELGADVKSIGVSPDGYNINAGVGSTQPSALVALVKEFGADFGIALDGDGDRLIMVDRTGEILDGDELLYFIALSKLKAGTLPGGVVGTQMSNLGLEEALANLGVPFYRAPVGDRYVLEELTKREWLLGGEASGHILCLDQTSTGDAIVAALQVLSACSNLEQSLEELRKDITKYPQHIV

SEQ ID NO: 156513 - protein, 194 aa, Unknown
  Bacterial polypetide isolated from the Sargasso Sea
GKEVDGDKIIGLLCKSYVKPKKISNQHDVIITVMSNMGLENYLTNKLKLNIKRTAVGDINVINQMKKSKSMIGGEQSGHIILSEHSNTGDGILAALKITEILISNKNKASKLFDLYNDFPQDKINLRYKKKNSKLLKILGKLKNHKLYNNKKIRSLVRLSGTEPLVRILVEGQEITEVKKKSLEIKRLVRPYLG

SEQ ID NO: 156514 - protein, 143 aa, Unknown
  Bacterial polypetide isolated from the Sargasso Sea
MKNKYFGTDGIRGTVNQGNITGEKFFKFGLASGTYFKNLKKNKQIAIIAKDTRLSGYTLEPALVSGLASGGMNVLTLGPLPTNGLAMLTKTMRANMGIMITASHNPYHDNGLKLFGPDGLKLSNKIEKKIEKLIDSKTTKQLS

SEQ ID NO: 156515 - protein, 254 aa, Unknown
  Bacterial polypetide isolated from the Sargasso Sea
GTPAPYLAELITAVQASTTAGTPAVGLVFDGDGDRIAAVAETGRFCSTQLLMPLLIDHLARARQLPGTVVKTVSGSDLMRLVAEAQGHDVLELAVGFKYIAAEMLVGDVLIGGEESGGVGFGMHLPERDALFAAMLVLEALVEGKQPLGARLDALQQQHGGSSHYDRLDLRLADMEARRRLETLLAQSTPSTVAGVEVLEVITTDGIKLRMGPSHWLMLRFSGTEPLLRLYCEGPDADRVDAVLAWARQFAEAA

SEQ ID NO: 156516 - protein, 147 aa, Unknown
  Bacterial polypetide isolated from the Sargasso Sea
FKTIGIKFLRSDVGDRYVKEKMKINKFNLGGEQSGHIILGKFATTGDGLLVALEILFSLRKRKKASELFNKFKPTPQILANIEVKDKSIINSPKCKKAINEANKIIKNKGRILVRKSGTEQKIRIMSESEAPSLNKLCVNIIKKSIQ

SEQ ID NO: 156517 - protein, 235 aa, Unknown
  Bacterial polypetide isolated from the Sargasso Sea
MTKKYFGTDGIRGPINSKNINGDMFFKFGLASGTYFKSQKKIKQTAIIAKDTRLSGYTLEPALVSGLASAGMHVYTLGPLPTNGLAMLTKAMKANMGIMITASHNPHKDNGLKLFGPDGMKLSDKIEKKIESLIDRKIINNLSRPEKLGRVKRLETGTKDYIKILKKNFSKEFNLRGLRIVIDCANGAGYKAGPELLKSLGAKVIAIGVNPNGLNINKNCGSTFPEKIKLAVKKN

SEQ ID NO: 156518 - protein, 106 aa, Unknown
  Bacterial polypetide isolated from the Sargasso Sea
MTKKYFGTDGIRGAINSKNINGDMFFKFGLASGTYFKSQKKKRQIAIIAKDTRLSGYTLEPALVSGLASAGMHVYTLGPLPTNGLAMLTKSMKANMGIMITASHNP

SEQ ID NO: 156519 - protein, 168 aa, Unknown
  Bacterial polypetide isolated from the Sargasso Sea
MTKKYFGTDGIRGPINSKNINGDMFFKFGLASGTYFKSQKKRKQIAIIAKDTRLSGYTLEPALVSGLASAGMHVYTLGPLPTNGLAMLTKSMKANMGIMITASHNPHDDNGLKLFGPDGMKLSDKIEKKIESLIDKNITKNLSKPEKLGRVKRLETGTKDYIKILKKN

SEQ ID NO: 156520 - protein, 245 aa, Unknown
  Bacterial polypetide isolated from the Sargasso Sea
GIIPAGININQNCGSLFPLKASDLVKKKKCDIGICLDGDGDRVVIIDEKGKVLNGEELIYILAKYYLSENKIKKGSIVVTNEIANYGLDNSLKKLGLKLKRVKVGDKNILKQIIDHKYFFGGEPSGHFIFRDDILIGDGMTTAIRLLTLILKKNKKLSELRKGIDLFEVININQRIDREKFYLSQESIYQKLNKLCKNFNIYYNIRPSGTEPLLRVNLQYEKRNIKVSILKKLKTQIIKVISDAC

SEQ ID NO: 156521 - protein, 261 aa, Unknown
  Bacterial polypetide isolated from the Sargasso Sea
MFFAVPNGMSLRGLRVVLDCANGATYQVAPQVFTELGAEVVVMAAEPDGLNINDQCGSTHTEALQQRVLAEKADVGIAFDGDGDRVAMVDAHGALLNGDELLYIIARDRQRREVLHGGVVGTVMSNLGFEQALARLAIPFSRANVGDRNILAQMQQRDWQLGGEPSGHILTLDLATTGDAIVAALQVIVPIIEQGESLQSLARGMDKFPQILENVTVAEPGKLSNDERLLSEIALHETKLADRGRILVRASGTEPLLRIMV

SEQ ID NO: 156522 - protein, 151 aa, Unknown
  Bacterial polypetide isolated from the Sargasso Sea
MPLGKDRRFGTDGIRGPVDTTMNPLFVTKLGWAAGTVLLEEGISRVLIGKDTRISGYMLESALQAGFISSGIDVVLLGPLPTPGVSFLASSNKQAGVVISASHNLFEDNGIKFFNKDGQKFSSELERRIETKLSQEIETVKSINLGKATRM

SEQ ID NO: 156523 - protein, 212 aa, Unknown
  Bacterial polypetide isolated from the Sargasso Sea
DLGICLDGDADRIVLIDERGKTANGDQLMAVIAANWKKNGKLKGNGVVSTIMSNLGFEKYLNSIGLNLKRTPVGDRYVIAGMREGKFNLGGEQSGHVILSDFMSTGDGLVAGLQFLAALLENKVPASKLLNSFNPYPQVIKNIKVINLKDLLKQKVLKRTIMEVEKTLGSEGRLLIRESGTEPVIRIMVEHYDRNLVTQSVDLIMEAFDETK

SEQ ID NO: 156524 - protein, 182 aa, Unknown
  Bacterial polypetide isolated from the Sargasso Sea
MNKYFGTDGIRGTVNQGNITGEKFFKFGLASGTYFKNQKKTKQIAIIAKDTRLSGYTLEPALVSGLVSGGMHVYTLGPLPTNGLAMLTKKMRANMGIMITASHNPYYDNGLKLFGPDGMKLSDKIEKKIEKLIDSNNKKQLTDPKLLGRVKRLEDGNERYIKILKKNFPKNFNLKGTKIVLD

SEQ ID NO: 156525 - protein, 235 aa, Unknown
  Bacterial polypetide isolated from the Sargasso Sea
MIKKYFGTDGIRGRVNGLKINGEMFFKFGLAAGIYFKNLKKNKQTAVIAKDTRLSGYTLEPALVSGLASAGMHVYTLGPLPTNGLAMLTKKMRANMGIMITASHNPYYDNGLKLFGPDGLKLSDKIEKKIEKLIDSKITKNLSKPIALGRVKRLEDANENYIKILKQNFPPSFSLKGIKIALDCANGAGYKAGPNLFKSLGAKVFKSGTSPNGLNINFKIWIHLSKKNLSNNKKK

SEQ ID NO: 156526 - protein, 288 aa, Unknown
  Bacterial polypetide isolated from the Sargasso Sea
SGFTSSGMDVFLTGPIPTPAVAYLTQALRADLGVMITASHNTYEDNGFKLFGPDGLKLTDEKQLEINELMNRSDIMSLQDKNQIGAARRVDDALSRYIEFAKATFPNTMRLDHLKIVIDCANGAAYKVAPMIFWELGADIIVIGDQPNGRNINQDCGSTKTQSLKEEVKSNNADLGIAFDGDGDRLVIIDEKGDEVNGDHLLGMIALSLKNKNLLKNKNIVSTIMATKSLENYLKSIDLKLIRTKVGDRYVIEKMLDIGSNFGGEPSGHLIINDFSSTGDAIVSSLQV

SEQ ID NO: 156527 - protein, 165 aa, Unknown
  Bacterial polypetide isolated from the Sargasso Sea
MSKKYFGTDGIRGRVNKEKINGEMFFKFGLAAGIYFKNLKKNKQTAIIAKDTRLSGYTLEPALVSGLASAGMHVYTLGPLPTNGLAMLTKKMKANMGIMITASHNPYFDNGLKLFGPDGLKLSDKIEKKIEKLIDSKITKNLSKPEILGRVKRLEDANERYTKIL

SEQ ID NO: 156528 - protein, 197 aa, Unknown
  Bacterial polypetide isolated from the Sargasso Sea
MPKKYFGTDGIRGRVNQGNINGEMFFKFGLAAGTYFKNLKKSKQIAIIAKDTRLSGYTLEPALVSGLASAGMHVYTLGPLPTNGLAMLTKKMEANMGIMITASHNPYYDNGLKLFGPDGLKLSDKIERKIEKLIDSKIIKNLSKPETLGRVKRLEDANDRYIKILKTNFPNNFSLSGIKIAIDCANGAGYKSGPKLL

SEQ ID NO: 156529 - protein, 230 aa, Unknown
  Bacterial polypetide isolated from the Sargasso Sea
MGKKYFGTDGIRGKVGQSPITPDWCVRLGWAIGRYFLDSSNEAKILIGKDTRISGYMLESALQSGLISAGANVELLGPMPTPGIAYLTREFEADGAIVISASHNQYEDNGIKIFDGKGEKLQDNDELVIESLLAQPIKTVSAAELGKANRVMVAQEQYSDFCAGHVASPLAIKELKIVVDCANGATYQVAPLVFSKLGLNPIFIGSSPNGLNINKDCGSTDLGFCRKRWR

SEQ ID NO: 156530 - protein, 278 aa, Unknown
  Bacterial polypetide isolated from the Sargasso Sea
RLDHYRDYCVQSVAGGLDLSGLKVVVDCAHGAMFGVAPAVLRALAATVLPLHCAPDGENINTLCGSTQPDALARAVLQEQADVGIAFDGDGDRMIAVDAEGKVIDGDRVLAIVLAMKLACGVACPGVVGTLMSNLGTERYVQSLGSSFVRAAVGDRYVLAELQQRGWRLGGESSGHLIDLDFSTTGDGIVAMLQLMRALQQEQQPLAQLASVVPVMPQVMLNVPMSAPQRCMADEQVKTLVQAVETALGERGRVLVRASSTESCVRVMCEGEDRDDIL

SEQ ID NO: 156531 - protein, 199 aa, Unknown
  Bacterial polypetide isolated from the Sargasso Sea
GDADRIIVCDEKGKIIDGDKILAMLGERWKRKKILKGGVIGTLMSNYGLENFFKNNRIKFLRSDVGDRYVKEKMKKNKFNLGGEQSGHIILGKFATTGDGLLVALEILFSLRKRKKASELFNKFKPTPQMLENVEVKDKSIINTPKCKKAINEANKIIKNRGRILVRKSGTEPKIRIMSESEDSNLNKLCVNIIKKSIQ

SEQ ID NO: 156532 - protein, 264 aa, Unknown
  Bacterial polypetide isolated from the Sargasso Sea
MSKKYFGTDGIRGRVNQGNINGEMFFKFGLAAGTYFKNQKKNKQTAIIAKDTRLSGYTLEPALVSGLASAGMHVFTLGPLPTNGLAMLTKKMRANLGIMITASHNEYYDNGLKLFGPDGLKLSDKIEKKIEKLIDSKIIKNLSEPEILGRVKRLEDANERYIKILKTNFPNNFSLKRIKIAIDCANGAGYKSGPKLFRSLGAKVYDIGTFPNGLNINKKCGSTFPKKIKSLVKKHKVNLGISLDGDADRIMLCDEKGKIVDGDQ

SEQ ID NO: 156533 - protein, 159 aa, Unknown
  Bacterial polypetide isolated from the Sargasso Sea
MLKKYFGTDGIRGRVNKEKINGEMFFKFGLAAGTYFKNQKKNKQIAIIAKDTRLSGYTLEPALVSGLASAGMHIFTFGPLPTNGLAMLTKKMRANLGIMITASHNPYHDNGLKLFGPDGLKLSDLIEKKIEKLIDTNISINLSNPKILGRVQRLENGSE

SEQ ID NO: 156534 - protein, 285 aa, Unknown
  Bacterial polypetide isolated from the Sargasso Sea
MKELGWNTVVIGKDTRISGYMLESALQAGFIAAGVNVNLLGPIPTPGVAYLTKTLRNKFGVVISASHNDFLDNGIKIFNEDGEKISRDIEKRIEKYLSSNLSPVETSQIGKAYRFDESGPRYIEFCKSTVPSEISFSSLRIVVDCANGACYKVSPGIFEELGAEVITIGNEPDGYNINLNCGSTYPDVIKEAVIEHRADYGISLDGDGDRVILVDEKGNILDGDDLLYILAFANPNRTGPWSGVVGTHMSNLGFEEGINKLGYKFVRADVGDKYVSEMLSKKGWL

SEQ ID NO: 156535 - protein, 147 aa, Unknown
  Bacterial polypetide isolated from the Sargasso Sea
MSKKYFGTDGIRGRVNEAKINGEMFFKFGLAAGVYFKNQKKIKQTAIIAKDTRLSGYALEPALVSGLTSAGMHVYTLGPLPTNGLAMLTKKMKANMGIMITASHNPFYDNGLKLFGPDGLKLSDKIEKKIERLIDNSIIKNLSEPKI

SEQ ID NO: 156536 - protein, 258 aa, Unknown
  Bacterial polypetide isolated from the Sargasso Sea
NTGKAIRLDDASGRYSEFLKSTLEKNLKIKKLKIILDCGNGATYEIAPNIFWELGHEIIAINNKPNGKNINQNCGAININQLSKKVLELKADIGFAFDGDGDRLIIVDEKGKEIDGDKIIALFAKHLIKSKKRNQSAFPVITTIMSNLGLEKYLFNKLKIKLKRTSVGDINVINEMRKFNSFLGGEQSGHIIIPEFSKTGDGILAALKVTEIISKINKSTSKVFDLYKSLPQIKLNIPYRKISSNHLKYIKNINKKKF

SEQ ID NO: 156537 - protein, 213 aa, Unknown
  Bacterial polypetide isolated from the Sargasso Sea
MSAFSTLSKDRKFGTDGIRGPVTSTMNPLFVTKLGWAAGSILAEEGMSKVLIGKDTRISGYMFESALQAGFISAGMDVTLLGPLPTPGVSYLANSNNQVGLVISASHNLFEDNGIKFFNKDGQKFSAELEKRIETKLTQEMVAVESINLGKASRMNDAQGRYIEFCKSSFTDLDLNGLSILLDCANGATYSVAPKVFSELGAKVETFGSSPDG

SEQ ID NO: 156538 - protein, 192 aa, Unknown
  Bacterial polypetide isolated from the Sargasso Sea
MTKKYFGTDGIRGAINSKNINGDMFFKFGLASGTYFKSQKKRKQTAIIAKDTRLSGYTLEPALVSGLTSAGMHVYTLGPLPTNGLAMLTKSMKANMGIMITASHNPHYDNGLKLFGPDGMKLSDKIEKKIEKLIDKKIIKSLSHPEKLGRVKRLESGTKSYIKILKKNFTKNFNLRGLRIVIDCANGAGYKA

SEQ ID NO: 156539 - protein, 185 aa, Unknown
  Bacterial polypetide isolated from the Sargasso Sea
MAKKYFGTDGIRGAINSKNINGDMFFKFGLASGTYFKSQKKKKQTAIIAKDTRLSGYTLEPALVSGLASAGMHVYTLGPLPTNGLAMLTKEMKANMGIMITASHNPHYDNGLKLFGPDGMKLSDKIEKEIEALIDKKISNHLSSPEKLGRVKRLETGTKQYIRILKKNFTKEFNLGGLRIVIDCA

SEQ ID NO: 156540 - protein, 127 aa, Unknown
  Bacterial polypetide isolated from the Sargasso Sea
MSKKYFGTDGIRGKVNKGNINGEMFFKFGLAAGTYFKNLKKNKQVAIIAKDTRLSGYTLEPALVSGLASAGMHVYTLGPLPTNGLAMLTKRMKANMGIMITASHNPYFDNGLKLFGPDGLKLSDKIE

SEQ ID NO: 156541 - protein, 116 aa, Unknown
  Bacterial polypetide isolated from the Sargasso Sea
MKNKYFGTDGIRGTVNRGNITGEKFFKFGLASGTYFKNQKKNKQIAIIAKDTRLSGYTLEPALVSGLVSGGMHVFTLGPLPTNGLAMLTKMMKANMGIMITASHNPYHDNGLKLFG

SEQ ID NO: 156542 - protein, 151 aa, Unknown
  Bacterial polypetide isolated from the Sargasso Sea
MTKKYFGTDGIRGAVNSKYINGDMFFRFGLASGTYFKSQKKRKQTAIIAKDTRLSGYTLEPAIVSGLASAGMHVYTLGPLPTNGLAMLTKEMKANMGIMITASHNPHFDNGLKLFGPDGMKLSDQIEKKIEGLIDKKISKNLSHSEKLGRV

SEQ ID NO: 156543 - protein, 180 aa, Unknown
  Bacterial polypetide isolated from the Sargasso Sea
MKKKYFGTDGIRGTVNVGNINGEKFFKFGLAAGTYFKNLKKKKQLAIIAKDTRLSGYTLEPALVSGLASAGMHIFTLGPLPTNGLAMLTKEMKANLGIMITASHNPFHDNGLKLFGPDGMKLSDKIEKKIENLIDTKITNQLANPKLLGRVKRLENGNDKYIKILKNNFPNNFSLKGIRI

SEQ ID NO: 156544 - protein, 199 aa, Unknown
  Bacterial polypetide isolated from the Sargasso Sea
MKKKYFGTDGIRGTVNLGNINGEKFFKFGLAAGTYFKNLKKKKQVAIIAKDTRLSGYTLEPALVSGLASAGMHIFTLGPLPTNGLAMLTKKMRANLGIMITASHNPFHDNGLKLFGPDGMKLSDKIEKKIESLIEKKTIYQLSKPDFLGRVKRLEDGNDRYIEILKSNFPSNFSLKGMRIVIDCANGAGYKSAPKFSQI

SEQ ID NO: 156545 - protein, 181 aa, Unknown
  Bacterial polypetide isolated from the Sargasso Sea
DKIIAMLAERWKRKKILKGGVVGTLMSNYGLEKFFAKNKIKFLRSNVGDRYVKDLMKKKKFNLGGEQSGHIILGKFATTGDGLLVALEILFSMRKGKKASDLFKNFIPTPQLLVNIEVKNKSVIHSIKCKKAIKNANNLVKGKGRMLVRKSGTEPKIRIMCESENKALLNKCVNIVKKSIK

SEQ ID NO: 156546 - protein, 270 aa, Unknown
  Bacterial polypetide isolated from the Sargasso Sea
SIFLNCTYSGQFGVVISASHNPFYDNGIKFFNKFGRKISEELEAEIEKRLNDPIQPVEASDLGKAFRIDSAAGRYIEYCKSTLKGAHNLKDKTILVDGANGANYKITPMLLEELGAKVIRINCNPDGFNINEKSAVLDENLFKEYAKEHEFDFCVAVDGDGDRLVLSDSKGEVCTGDEIIYTLALRNKKQEKDGSNCVVGTDMTNQGVVDALDDLGINFHRAEVGDKFISRELVKQELNLGGESSRHIIQREFSESGDANIALIQTLAAL

SEQ ID NO: 156547 - protein, 233 aa, Unknown
  Bacterial polypetide isolated from the Sargasso Sea
YNINKNCGSTDPENIKNTVAATNSDIGIALDGDADRILIIDENGKIVNGDEILYILAKANLDNPKFNSKVVGTILSNIGLENCLNEINVELHRSDVGDKNVFKMMESIDSNIGGETSGHIIHNDFSPTGDGLLIALLVLKESIKLKLPISTLLKDLKLVHQTNINLEIEDTSIQNNTLESIASEATEKLEDGRVIIRKSGTEPLIRILIESDNKEKSMKVIEFIKEEISKENQ

SEQ ID NO: 156548 - protein, 169 aa, Unknown
  Bacterial polypetide isolated from the Sargasso Sea
NKKMLKGGVVGTLMSNYVLEKFLKYKKIKFIRANVGDRYVKEKMQKNNFNLGGEQSGHIILGKFATTGDGLLVALEVLFAIRKGRKASEFFNKFKKTPQILKNIFVKDKNIINSTEVKKSIKIANKLMKGQGRILVRKSGTESKIRVMGESENKKILSKCIDIISKKIK

SEQ ID NO: 156549 - protein, 149 aa, Unknown
  Bacterial polypetide isolated from the Sargasso Sea
KFFKKLKIKFLRANVGDRYVKEKMKKNKYNLGGEQSGHIILGKFATTGDGLLVALEILFSLRKGKQASKYFNVFRQTPQILENIDVKDKNIINTTNCKSSIKIANKIINGKGRILVRKSGTEPKIRIMVESNNKKLNKKCINIIKKTIT

SEQ ID NO: 156550 - protein, 287 aa, Unknown
  Bacterial polypetide isolated from the Sargasso Sea
MKKKLAEPEHIGRAKRLEDANARYIEFVKNIFPKSKSLEGLKVVIDCANGASYISAPTILYELGAEVVKIGVNPDGFNINKECGSTDTSMLVHTVLKEKADIGFALDGDGDRLIVCDDNGKIIDGDQILGLLAVSMKAENNLREDTVVATAMSNLGLEKKLIEHSIKLIRTSVGDRYIKEEILNKNLSLGGEQSGHIIMRDHGLSGDGMVTALKILSILKDSKGTSSQILNVFEAVPQKLLNFNISDKKVLEKKETKTLIESYKQELSSDGRIFERMSGTEPVLRVM

SEQ ID NO: 156551 - protein, 231 aa, Unknown
  Bacterial polypetide isolated from the Sargasso Sea
VQQEACDLGFCFDGDADRLIAIDEKGEILDGDEIIAICAIYYSQAKRLKDNRVVTTVMSNLGLEKALEKNGITLERTAVGDRYVVEKIKKEGLSLGGEQSGHLIFHDSSTTGDGVLAALCLLEVVLRSKKPLSVLRHSMQKLPQVLESFNVSQKIPLDNLPSLKKLLKDKEKELLGRGRILFRYSGTENKARLMLEGEDKTLIRKMAKEIKTLAISLLTKSSKSRETEASL

SEQ ID NO: 156552 - protein, 276 aa, Unknown
  Bacterial polypetide isolated from the Sargasso Sea
MNNKTEKVFGTDGIRGKVGEYPMTIDFVMRLASSISKVMTPKGGKVAIGKDTRISGYMFESALESAFVAHGLEVILLGPLPSPAIAHYTIKQKCDFGIVISASHNSYEYNGIKIINHLGEKIDREIESVIESKLLDAPITNTAESLGKAKISNTSRNLYKSLLMSIFDDFDDHFPLKGFKIVVDASNGAAYKIAPQILLDLGADVIPIACSPNGKNINLDCGSTHPETLRKTVVATEANLGIALDGDADRILMVDENGRILDGDQILYILAKNNMY

SEQ ID NO: 156553 - protein, 174 aa, Unknown
  Bacterial polypetide isolated from the Sargasso Sea
ALEWKKKKILRGGVIGTLMSNYGLEDFLKKKKIKFIRSKVGDRYVKEMMQKYKFNLGGEQSGHIILGKFATTGDGLLVSLEIVKFLDKKTRASIFFNVFKKTPQILKNINYRNDKILKDKKVLKSIKLAKKLIEGQGRILVRKSGTEPKIRVMGESENKKLLNHCVKLIIKKLN

SEQ ID NO: 156554 - protein, 291 aa, Unknown
  Bacterial polypetide isolated from the Sargasso Sea
MASHNPPEYNGIKIFDNNGEKIKKKLENQIELILETANNLKLSTYKKTSIRENNNLFNIYTEGLINTMGDENLDGMKIVLDTCYGSATTCAGSIFKKLGANVKVINNEQDGLKINLNCGSICLDPIIKAIKENNADMGFSFDGDADRVIGVDSEGNIIDGDHILFLWGRELLEEKLLTNNTIISTKMANLGFENTWNKIGGILHRTEVGDKFIFEAIKKKKALLGGEQSGHILSKINNFCGDGILTAIQISKYCKKKNISLRSWLNSSFSPYPQKLTNILLNFKFKNIDKS

SEQ ID NO: 156555 - protein, 249 aa, Unknown
  Bacterial polypetide isolated from the Sargasso Sea
LYTIGDQPSGTNINYNCGSLFPLKASRLVKRKKCDIGICLDGDGDRVTIIDEKGKVLCGEEIIYILAKYYLAEKKIKKSSIIVTNEVANHGLDMSLKKIGLKTKRVKVGDKNILREIIDNKYFFGGEPSGHFIFKDDLLIGDGMTTAIRLLTLILKENKKLSVLKKGIYLLNVVNINQIIDREKFYLVQESIYQKLNKLCENLDIYYNIRPSGTEPLLRVNLQYDKRNIKVVTLNKLKKQIIKVITDAC

SEQ ID NO: 156556 - protein, 285 aa, Unknown
  Bacterial polypetide isolated from the Sargasso Sea
EYINIIRKNFPKDFSLTGIKIAIDCANGAGYKSAPKLLKSLGAKVYSVGVSPNGLNINDKCGSTFPNKIKRLVSRKRVDLGISLDGDADRIIVCDEKAQIIDGDQIIAMLANRWKRKKILKGGVVGTLMSNFGLENFFKENNIKFLRANVGDRFVKEKMQNNRFNLGGEQSGHIILGKFATTGDGLLVALEILFSMRKGKKASDLFDNFIPTPQALENITVRDKNIINAPRCKKAINKSIKLLKNNGRILVRKSGTEPKIRIMVETNKKELLLKCINIIKRSLIN

SEQ ID NO: 156557 - protein, 227 aa, Unknown
  Bacterial polypetide isolated from the Sargasso Sea
MPLKTNKVLMDTYIKSLIQTMGGENLTGLRIILDTCHGSATTCAKTIFQSLGADVRVINNSKNGLKINVNCGSTNLEPLKKTLRENPADMGFSFDGDADRVIGIDSKGNVLDGDHILFLWGRELMEQKILTNNLLISTQMANLGFEKAWNKIGGILYRTDVGDKYVHDAIKKKRALLGGEQSGHILSKINNFSGDGILTALQISKYCKKKNIKLNDWLKSSFEPFSQ

SEQ ID NO: 156558 - protein, 297 aa, Unknown
  Bacterial polypetide isolated from the Sargasso Sea
EYNGLKFFNADGYKISSILEKKIENIVLNKKKYAKIINSNSNTGKAIRLEDASGRYSEFLKSTLDKKIKSKKLKIVLDCGNGATYEIAPNIFWELGHEVISINDKPNGKNINFKCGAVNTNTLSKKVVDERADIGFAFDGDGDRLIIVDEKGNEIDGDKIIALFAKHLIKFNKSKLKYPVVSTVMSNIGLENYILNKFKVNLKRSSVGDINVIKEMQKYKSLLGGEQSGHIILSDYSKTGDGILAALKVTEIISKLNKSTSKIFNLYENSPQIKINIPYKKISKNTVNYIKNINKKK

SEQ ID NO: 156559 - protein, 188 aa, Unknown
  Bacterial polypetide isolated from the Sargasso Sea
KGNIIDGDQIIATLGTRWKKKKILKGGIVGTLMSNYGLQKYFKDQDIRFIRANVGDRYVKEKMQKNNFNLGGEQSGHIILGKFATTGDGLLVGLEILFSMRKGKKASELLNTFKATPQILVNVKVKDKSIINSKKCKSAIKKSEKLIKNQGRMLIRKSGTEPKIRIMGESNNISLLKRCINIVKRSIK

SEQ ID NO: 156560 - protein, 108 aa, Unknown
  Bacterial polypetide isolated from the Sargasso Sea
MTKKYFGTDGIRGKVNGSKINGEMFFKFGLAVGTYFNNKKKTKQIAIIAKDTRLSGYALEPALVSGLTSAGMYVFTFGPLPTNGLAMLTKKMRANMGIMITASHNPFY

SEQ ID NO: 156561 - protein, 138 aa, Unknown
  Bacterial polypetide isolated from the Sargasso Sea
ANVGDRYVKEKMQKKRFNLGGEQSGHIILGKFATTGDGLLVALEVLFSMRKGKKASELLNVFKPMPQILENIIVSDKNIINGLKCKKAIKKANKLMGLNGRLLVRKSGTEPKIRIMGESHNKKLIIKCVKIIKQSIKN

SEQ ID NO: 156562 - protein, 170 aa, Unknown
  Bacterial polypetide isolated from the Sargasso Sea
KKRKNLKGGVVGTLMSNYGLEKFLEKKKIKFIRANVGDRYVKEVMQKKKFNLGGEQSGHIILGKFATTGDGLLVALEVVQALNKNIKASKFFNVFKKTPQILENIEIKNENILSKLSVKNSIKKAQKLIEGNGRILVRKSGTEQKIRIMGESKNKTLLKKCINTIVKTIN

SEQ ID NO: 156563 - protein, 196 aa, Unknown
  Bacterial polypetide isolated from the Sargasso Sea
MTKKYFGTDGIRGRVNGNKINGYMFFKFGLAAGTYFNNKKKTKQTAIIAKDTRLSGYALEPALVSGLTSAGMHVFTFGPLPTNGLAMLTKKMRANMGIMITASHNPFYDNGLKLFGPNGLKLSDKIEKKIEKLIDSKISKKLSNPEILGRVKRLENGSNKYLEILKTNFPKQFNLRGLRITIDCANGAAYKVGPQF

SEQ ID NO: 156564 - protein, 154 aa, Unknown
  Bacterial polypetide isolated from the Sargasso Sea
NYGLESFLQKEKIKFFRSKVGDRYVKEKMKKLNFNLGGEQSGHIILGKFATTGDGLMVALEVLFSLRKGKKASNLLNVFKPLPQVLDNVVVKDKGMVNKPKCKNAIKNANKLMGNKGRILVRKSGTEPKIRIMAESYDKSLILKCIKIIKRSIK

SEQ ID NO: 156565 - protein, 193 aa, Unknown
  Bacterial polypetide isolated from the Sargasso Sea
MCDEKGKIIDGDQIIAMLARRWKSKKILRGGVIGTLMSNYGLEQFLKKEHIKFFRAKVGDRYVKEKMKKLNFNLGGEQSGHIILGKFATTGDGLLVALEVLFSLRKGIKASKLLNVFKPVPQILENVTVKDKNVLNSIRCRRAIRLANKVMEKNGRILVRKSGTEPKIRIMAESYNQNLISKCIRIIKKSISN

SEQ ID NO: 156566 - protein, 171 aa, Unknown
  Bacterial polypetide isolated from the Sargasso Sea
WKIKKMLKGGVVGTLMSNYGLEKYFKSKGIKFLRADVGDRYVKEKMQKYKFNLGGEQSGHIILGKFATTGDGLLVALEALFALRKGKKASEFFKNFKKTPQLLENILVKDKNIINKPEIKKTIKIADKLIKGKGRILVRKSGTESKIRVMGESENRALLYRCVNIITKKIK

SEQ ID NO: 156567 - protein, 172 aa, Unknown
  Bacterial polypetide isolated from the Sargasso Sea
RWKKKKILKGGVVGTLMSNYGLQKYFSKNKIKFLRTKVGDRYVKEAMQKNKFNLGGEQSGHIILGKFATTGDGLLVALEILFSMRKGKKASEIFENFTPTPQLLENVEVKDKSIINNPKCKNAIKKANSLIKGKGRMLVRKSGTEPVVRIMCETGNKTMLSKCINIVKKSII

SEQ ID NO: 156568 - protein, 230 aa, Unknown
  Bacterial polypetide isolated from the Sargasso Sea
MKNKYFGTDGIRGTVNQGNITGEKFFKFGLASGTYFKNLKKSKQIAIIAKDTRLSGYTLEPALVSGLVSGGMHVFTLGPLPTNGLAMLTKSMKANMGIMITASHNPFYDNGLKLFGPDGMKLSDKIEKKIEKLIDTKNTKQLTNPKLLGRVKRLEDGNDKYIKILKNNFPKNFNLKGTKIVLDCANGACYKAAPKLLRELGAKVFSIGIKPDGLNINENCGSTYPSKIKT

SEQ ID NO: 156569 - protein, 240 aa, Unknown
  Bacterial polypetide isolated from the Sargasso Sea
MSALSTLREDRKFGTDGIRGPVTSTMNPLFVTKLGWAAGSVIKEEGISKVLIGKDTRISGYMFESALQAGFISAGMDVTLLGPLPTPGVSYLAHSNNQVGLVISASHNLFEDNGIKFFNKDGQKFSAELEKRIETKLTQEMVAVQSINLGKASRMTDAQGRYIEFCKSSFTDLDLNGLSILIDCANGATYSVAPKVFSELGAKVQTIGSSPDGININQNCGSTSPDFLKEEIMKGSYDIG

SEQ ID NO: 156570 - protein, 152 aa, Unknown
  Bacterial polypetide isolated from the Sargasso Sea
LEKFLRKEKIRFVRSKVGDRYVKEKMKKLNFNLGGEQSGHIILGKFATTGDGLLVALEVLFSLRKKKVASKLLNIFKPLPQVLENVNVINKEKIIKSSNFKKAVSNATKLMGHKGRILVRKSGTEPKIRIMAESSDKTLIIKCIKLIRNCIK

SEQ ID NO: 156571 - protein, 273 aa, Unknown
  Bacterial polypetide isolated from the Sargasso Sea
MKEQKEKVFGTDGIRGKVGEYPMTIDFAMRLASSIAKVMTPNGGKVAIGKDTRISGYMFESALESAFVAHGLEVILLGPLPSPAIAYYTIKKNCDFGIVISASHNSYEYNGIKIINHQGEKIDREIESIIESKLSDTPITNTAETLGKAKISNTSRSLYKSLLMSIFADIDHHLPLKGFKIVVDASNGAAYKIAPQVLLDLGADVIPIACSPNGKNINLDCGSTHPETLRKTVVATDSNLGIALDGDADRILIVDEEGSILDGDQILYILANA

SEQ ID NO: 156572 - protein, 138 aa, Unknown
  Bacterial polypetide isolated from the Sargasso Sea
RANVGDRYVKEIMKKNNFNLGGEQSGHIILGKFATTGDGLLVALEVLFSMRKGKKASELFHTFKMTPQILENVKVKDKSIVSQKKCRDAIKKSEKLIKNHGRMLIRKSGTEPKIRIMGESNNIALLKRCINIVKRSIN

SEQ ID NO: 156573 - protein, 111 aa, Unknown
  Bacterial polypetide isolated from the Sargasso Sea
MTKKYFGTDGIRGTVNKGNINGEMFFKFGLAAGTYFKNLKKKKQTAIIAKDTRLSGYTLEPALVSGLASAGMHVYTLGPLPTNGLAMLTKKMKANMGIMITASHNPYYDNG

SEQ ID NO: 156574 - protein, 134 aa, Unknown
  Bacterial polypetide isolated from the Sargasso Sea
VLGGEQSGHILSKINNYSGDGILTAIQISKYCKKQQITLKDWLKSSFDPFPQKLTNIKLDFNIKKINQTTKSLIDQTIKNYQAIYSDNCRVFIRPSGTEPLIRVLVEAESQKKVESLSSQITKKLSFEIKKITT

SEQ ID NO: 156575 - protein, 165 aa, Unknown
  Bacterial polypetide isolated from the Sargasso Sea
LKGGVVGTLMSNYGLEKYFKKKGIKFIRANVGDRYVKEVMQKNKFNLGGEQSGHIILGKFATTGDGLLVALESLFALRKGKRASEFFEKFKKTPQLLKNIEVKNKNIINKPEIKKSIRLASKLIKGKGRILVRKSGTESKIRIMGESENKRLLVKCVNIILKKIR

SEQ ID NO: 156576 - protein, 140 aa, Unknown
  Bacterial polypetide isolated from the Sargasso Sea
MTKKYFGTDGIRGKVNGNKINGDMFFKFGLAVGTYFNNKKKTKQIAIIAKDTRLSGYALEPALVSGLTSAGMHVFTFGPLPTNGLAMLTKKMRANMGIMITASHNPFYDNGLKLFGPNGLKLSDKIEKKIEKLIDSKISK

SEQ ID NO: 156577 - protein, 169 aa, Unknown
  Bacterial polypetide isolated from the Sargasso Sea
NKKMLRGGVVETWMSNYGLENYLKKENIKFIRANVGDRYVKEKMQKNKFNLGGEQSGHIILGKFATTGDGLLVALECLFALRKGKRASKFFYKYEKIPQILKNIEVKDKNIINRPDIKKSIKLATKFIKGQGRILVRKSGTETKIRIMGESENRKLLKKCINIIQKKIK

SEQ ID NO: 156578 - protein, 122 aa, Unknown
  Bacterial polypetide isolated from the Sargasso Sea
MLKKYFGTDGIRGRVNKEKINGEMFFKFGLAAGTYFKNQKKNKQIAIIAKDTRLSGYTLEPALVSGLASAGMHIFTFGPLPTNGLAMLTKKMRANLGIMITASHNPYHDNGLKLFGPDGLKL

SEQ ID NO: 156579 - protein, 264 aa, Unknown
  Bacterial polypetide isolated from the Sargasso Sea
EACLKIGHATGVVMKDLGWNTVVIGKDTRISGYMLESALQAGFIASGVNVNLLGPLPTPGVAYLTKTLRNKFGVVISASHNDFLDNGIKIFNEDGEKISRDIEKKIEKNISKKLIPVETSKIGKAYRFDESGPRYIEFCKSTVPPNISFSSLRIVIDCANGACYKVSPQIFKELGADVIEIGTNPDGYNINMGCGSTNPEVVKEAVIKHRADYGISLDGDGDRVIIIDKKGNILDGDDLLYILAFSNPNRTGVWSGVVGTLMSN

SEQ ID NO: 156580 - protein, 194 aa, Unknown
  Bacterial polypetide isolated from the Sargasso Sea
MSKKYFGTDGIRGMVNGQKINGEMFFKFGLAAGTYFKNLKKNKQTAVIAKDTRLSGYTLEPALVSGLASAGMHVFTLGPLPTNGLAMLTKKMKANLGIMITASHNPFHDNGLKLFGPDGLKLSDKIEKKIEKLIDSKIVKNLTLPKNLGRVKRLENATDKYTKILRRNFPKNFSLKGIKIAIDCANGAGYKSAP

SEQ ID NO: 156581 - protein, 171 aa, Unknown
  Bacterial polypetide isolated from the Sargasso Sea
WKSKKILKGGVIGTLMSNYGLEKFLKYEKIRFSRSKVGDRYVKEKMKKLNYNLGGEQSGHIILGKFATTGDGLLVALEVLFSLRKGKKASHLLKVFKPLPQILENVVVNDKNVISNSKCKKAIKIANKIMGQRGRILVRKSGTEPKIRIMAESYDRNLILKCIKLIKGSIK

SEQ ID NO: 156582 - protein, 167 aa, Unknown
  Bacterial polypetide isolated from the Sargasso Sea
MAKKYFGTDGIRGKVNQGNINGEMFFKFGLAAGTYFKNLKKHKQTAIIAKDTRLSGYTLEPALVSGLASAGMHVYTLGPLPTNGLAMLTKRMKANMGIMITASHNPYFDNGLKLFGPDGLKLSDKIEKKIEKLIDSKITKNLSKPNILGRVKRLENANDTYIKILKS

SEQ ID NO: 156583 - protein, 166 aa, Unknown
  Bacterial polypetide isolated from the Sargasso Sea
MAKKYFGTDGIRGTVNQGNINGLKFFEFGLAAATYFKNQKKNKQIAIIAKDTRLSGYTLEPALVSGLASGGMHVFTLGPLPTNGLAMLTKSMKANMGIMVTASHNPYYDNGLKLFGPDGLKLSDKIEKKIEKLIDAKNIKQLTNPSLLGRVKRLEDGNDRYINILK

SEQ ID NO: 156584 - protein, 202 aa, Unknown
  Bacterial polypetide isolated from the Sargasso Sea
LDGDADRIIVCDENAKVIDGDQIIAMLAKRWQDKKILKGGVVGTLMSNYGLESFFKKNNIKFLRANVGDRFVKEKMQKNRFNLGGEQSGHIILGKFATTGDGLLVALEILFSMRKGRKASNLFNNFNPVPQLLENITVKDKNIINSLSCKKAIKKSIKLLKNKGRILVRKSGTEPKIRIMVETNDKVLLLKCINIIKRSLNN

SEQ ID NO: 156585 - protein, 274 aa, Unknown
  Bacterial polypetide isolated from the Sargasso Sea
MLRPQKTQSIFSKRLIVTKKNNILKKYFGTDGIRGRANSSSMNANLALRIGMASAKLFTRGEHKHNVLIGKDTRLSNYTIEPALTSGFLSMGMNVYLTGPLPTPGVASLVTSMRCDVGVMISASHNEYLDNGIKIFCPDGTKLSDEQEIELERLIDNNNLKLAKSENLGRAKRIDDAGGRYIEYLKSRMPSSLRLDGFKIVIDCANGAAYKVGPTILWELGAEVIPINVNPDGTNVNKNGGSTDPSNLISMVKKNKADIGIALDGDADRCVLVD

SEQ ID NO: 156586 - protein, 159 aa, Unknown
  Bacterial polypetide isolated from the Sargasso Sea
GFREFLKKSKIRLHLTKVGDRYVIEKMKQAKLHLGGEQSGHIIFSDNGYCGDGILTAMFIINIVGELKVKLSEFTENLFLKSPQKLINIKTKTNSEKIIKHQEMREVLKNIKNKYKNLDYLIRKSGTENLLRIMVQSKKNTEVNKVLKILVNLVKNLDG

SEQ ID NO: 156587 - protein, 129 aa, Unknown
  Bacterial polypetide isolated from the Sargasso Sea
MIKKYFGTDGIRGTVNKGNINGEMFFKFGLAAGKFFINQKKNKQTAIIAKDTRLSGYSLEPALVSGLSSAGMHVFTLGPLPTNGLAMLTKSMKANMGIMITASHNPYYDNGLKLFGPDGLKLSDKIEKK

SEQ ID NO: 156588 - protein, 208 aa, Unknown
  Bacterial polypetide isolated from the Sargasso Sea
MIKKYFGTDGIRGKVNGSKINGEMFFKFGLAAGTYFKNLKKSKQIAIIAKDTRLSGYTLEPALVSGLASAGMHIYTLGPLPTNGLAMLTKKMRANMGIMITASHNPFYDNGLKLFGPDGLKLSDKIEKKIEKLIDSKITKNLSKPIELGRVKRLEDANEKYIKILKQNFPSSFSLKGIKIALDCANGAGYKAGPELFKSLGAKLYSAG

SEQ ID NO: 156589 - protein, 128 aa, Unknown
  Bacterial polypetide isolated from the Sargasso Sea
MTKKYFGTDGIRGPINSKNINGDMFFKFGLASGTFFKSQKKNKQVAIIAKDTRLSGYMLEPALVSGLTSAGMHVFTLGPLPTNGLAMLTKAMKANMGIMITASHNPHYDNGLKLFGPDGMKLSDKMKR

SEQ ID NO: 156590 - protein, 313 aa, Unknown
  Bacterial polypetide isolated from the Sargasso Sea
GVVVSASHNPYFDNGIKFFNRFGRKISEDLEKRIESKFNDKIDPESPEKLGKAFRIDSASGRYIEYCKSTLRGKSDLKGKTILVDAANGANYKITPMLLEELGAKVIRVNCVPDGKNINEKCAVLDQNLFQDYASKYNFDYCAAIDGDGDRLVLSDHEGNIFSGDEILFLLALKNIREGAKGSNKVVGTEMTNSGIGEALKKFDIELLRADVGDKHISRMLVEEDLVLGAESSGHIIQRQYSESGDANIALIQTIAELNESKNTLQKIRSQINYRPSVLKSFPVKNFLVLKNQDFQNCLNGIKAKNDDIRLSV

SEQ ID NO: 156591 - protein, 114 aa, Unknown
  Bacterial polypetide isolated from the Sargasso Sea
MSKKYFGTDGIRGKVNQGNINGEMFFKFGLAAGTYFKNLKKTKQIAIIAKDTRLSGYTLEPALVSGLASAGMHVYTLGPLPTNGLAMLTKKMKANMGIMITASHNPYFDNGLKL

SEQ ID NO: 156592 - protein, 184 aa, Unknown
  Bacterial polypetide isolated from the Sargasso Sea
NQKILPNNLLISTHMANLGFEKAWNKIGGILHRTDVGDKFVYEAIKNKKTILGGEQSGHILSKINNFSGDGILTALQISKYCKKKNITLNEWLKSSFDPFPQQLTNIDLDFNINKINKKTKRLIYQTIENLQAIYSDNCRLYIRPSGTEPLMRVLVEAKNDKKVHSLSREITNKLSLEIKKILH

SEQ ID NO: 156593 - protein, 186 aa, Unknown
  Bacterial polypetide isolated from the Sargasso Sea
NVIDGDQIIAALATRWKSKKMLRGGVVGTLMSNYGLEKFFKSEKIKFIRANVGDRYVKEKMKKNNFNLGGEQSGHIILGKFATTGDGLLVALESLFAIRKGKKASVFFNKFKKIPQILKNIEVKDRAIIKNPRVKKSIKIAEKLMNGQGRILVRKSGTELKIRVMGESENKKLLKKCINIISKKIK

SEQ ID NO: 156594 - protein, 271 aa, Unknown
  Bacterial polypetide isolated from the Sargasso Sea
NPYYDNGLKLFGPDGLKLSDLIEKKIEKLIDTNISINLSNPKILGRVQRLESGSEKYIEILRSNFPNQFNLRGLKIAIDCANGAAYKVGPLLFESLGAQVYKTGINPNGFNINERCGSTYPNKIRNFTKKNKAHIGISLDGDADRIIICDENGKIVDGDSIIAMLAKRWKKKKILKGGVIGTLMSNFGLEEYFKKNKIKFLRSQVGDRHVKELMKKNKFNLGGEQSGHIILGKFATTGDGLLVALEVLFSMRKGKKASELFNNFKPNTSNY

SEQ ID NO: 156595 - protein, 195 aa, Unknown
  Bacterial polypetide isolated from the Sargasso Sea
RIIMCDEKGKIIDGDQIIAMLARRWKSKKILRGGVIGTLMSNYGLQSFLSNEKIKFFRSKVGDRYVKEKMKKLNFNLGGEQSGHIILGKYATTGDGLMVALEVLFSLRKGKKASKLLNVFKPLPQILENIIVKDKNIINKSKCKNAIKKANKFMNNQGRLLIRKSGTEPKIRIMGESHNKKLILKCIKLIKRSIK

SEQ ID NO: 156596 - protein, 214 aa, Unknown
  Bacterial polypetide isolated from the Sargasso Sea
MAKKYFGTDGIRGAINSENINGDMFFKFGLASGTYFKSQKKRKQTAIIAKDTRLSGYTLEPALVSGLASAGMHVYTLGPLPTNGLAMLTKAMRANMGIMITASHNPHNDNGLKLFGPDGMKLSDKIEKKIESLIDKKIIKNLSKPEKLGRVKRLETGTNDYIKILKKNFTKEFNLRGLRIVIDCANGAGYKAGPELLKSLGAKVIAIGVNPNGL

SEQ ID NO: 156597 - protein, 150 aa, Unknown
  Bacterial polypetide isolated from the Sargasso Sea
MIKKYFGTDGIRGKVNGDKINGNMFFKFGLAAGTYFKNQKKTKQIAIIAKDTRLSGYTLEPALVSGLTSAGMHVFTFGPLPTNGLAMLTKKMRANMGIMITASHNPYNDNGLKLFGPDGLKLSDKIEKKIEKLIDSKISKKLSNPKILGR

SEQ ID NO: 156598 - protein, 237 aa, Unknown
  Bacterial polypetide isolated from the Sargasso Sea
IAKDTRLSGYALEPALVSGLASAGMHVFTLGPLPTNGLAMLTKSMNANLGIMITASHNLFYDNGLKLFGPNGLKLSDKIQKKIESLIDSKVEDHLSKPRFLGRVKRLETGNDDYIKILKKKIPKNFKLKKMKIVLDCANGAGYKSAPKMINSLGAELIIIGNKPNGFNINKNCGSTFPRKLQQAVKKHRADLGFSLDGDADRIIMCDEKGSIVDGDQIIAALAMQWKKKKILKGGVV

SEQ ID NO: 156599 - protein, 188 aa, Unknown
  Bacterial polypetide isolated from the Sargasso Sea
DKIIALFATHLENINKKKSDFPIITTVMSNIGLENYLLNNLKIKLKRSSVGDINVINEMKKYKSILGGEQSGHIILSEYSKTGDGILAALKVMEIISKLKKSVSSIFNLYKDLPQIKINISYKKVSKKCLKYIKDINKKKIKNKNIRVLIRLSGTEPLIRILVEGQDLKSVKAQAKIIEKQIRINLDK

SEQ ID NO: 156600 - protein, 166 aa, Unknown
  Bacterial polypetide isolated from the Sargasso Sea
ILRGGVIGTLMSNYGLEKFLKNEKIRFSRSKVGDRYVKEKMKKLNFNLGGEQSGHIILGKFATTGDGLLVALEVLFSLRKGKKASKLLNVFEPLPQILDNVVVKNKNIISKSKCKNAIKKANKLMGHKGRILVRKSGTEPKIRIMAESYDKSLILKCIKIIKRSIK

SEQ ID NO: 156601 - protein, 248 aa, Unknown
  Bacterial polypetide isolated from the Sargasso Sea
MTKKYFGTDGIRGKVNQNKINGEMFFKFGLAAGTYFKNQKKFKQTAIIAKDTRLSGYSLEPALVSGLASAGMHVYTLGPLPTNGLAMLTKKMKANLGIMITASHNPYYDNGLKLFGPNGLKLSDKIEKKIEKLIDIKIIKNLSEPKILGRVKRLEDANDRYIKILKKNFPNNFSLKGMRIVIDCANGAGYKSGPKLFRGLGAKVFEYGASPNGLNINKNCGSTFPNKIKRLVKKHNAHIGISLDGDAD

SEQ ID NO: 156602 - protein, 134 aa, Unknown
  Bacterial polypetide isolated from the Sargasso Sea
MSKKYFGTDGIRGKVNQGNINGEMFFKFGLAAGTYFKNLRKSKQVAIIAKDTRLSGYTLEPALVSGLASAGMHVFLLGPLPTNGLAMLTKKMKANMGIMITASHNPYYDNGLKLFGPDGLKLSDKIEMRIEKLI

SEQ ID NO: 156603 - protein, 212 aa, Unknown
  Bacterial polypetide isolated from the Sargasso Sea
ICLDGDGDRVVIIDEKGKVLCGEELIYILAKYYLSENKIKKGSIVVTNEIANYGLDISLKKLGLKLKRVKVGDKNILKQIIDHKYFFGGEPSGHFIFKDDILIGDGMTTAIRLLTLILKKNKKLSELRKGIDLFEVININQRIDREKFYLSQESIYQKLNKLCKNLNIYYNIRPSGTEPLLRVNLQYEKRNIKVTILNKLKTQIIKVISDAC

SEQ ID NO: 156604 - protein, 248 aa, Unknown
  Bacterial polypetide isolated from the Sargasso Sea
MKNKYFGTDGIRGTVNQGNITGEKFFKFGLASGTYFKNQKKSKQTAIIAKDTRLSGYTLEPALVSGLVSGGMHVFTLGPLPTNGLAMLTKSMKANMGIMITASHNPYYDNGLKLFGPDGMKLSDKIEKKIEKLIDAKNTKQLTNPKLLGRVKRLEDGNDRYIKILKNNFPNNFNLRGTKIVLDCANGACYKAAPKLLKELGAKVISIGVKPNGLNINEKCGSTYPSKIRSAVKKLKAHVGISFDGDAD

SEQ ID NO: 156605 - protein, 156 aa, Unknown
  Bacterial polypetide isolated from the Sargasso Sea
MIKKYFGTDGIRGKVNGDKINGDMFFKFGLAVGTYFKNQKKFKQIAIIAKDTRLSGYTLEPALVSGLTSAGMHVYTFGPLPTNGLAMLTKKMRANMGIMITASHNPYYDNGLKLFGPDGLKLSDKIEKKIEKLIDSKISRKLSNPEMLGRVKRLEN

SEQ ID NO: 156606 - protein, 155 aa, Unknown
  Bacterial polypetide isolated from the Sargasso Sea
SNYGLENFLKSKKIKFLRSKVGDRYVKEKMKKLNFNLGGEQSGHIILGKFATTGDGLMVALEVLFSLRKGKKASELLNVFKPLPQVLENINVKDKNVINKPKCKKAIKKANKLMNGHGRLLIRRSGTEPKIRIMGESYNKNLILQCIKIIKKSIK

SEQ ID NO: 156607 - protein, 176 aa, Unknown
  Bacterial polypetide isolated from the Sargasso Sea
ALATRWKDKKMLKGGVVGTLMSNYGLEKYFKKKGIKFVRANVGDRYVKEKMQKNKFNLGGEQSGHIILGKFATTGDGLLVALESLFALRKGRKASEFFEKFKKTPQLLKNIDVKDKDIINKTEIKNSIKLAEKMIKGRGRILVRKSGTESKIRVMGESQNKNLLLKCVNIIVNKIK

SEQ ID NO: 156608 - protein, 185 aa, Unknown
  Bacterial polypetide isolated from the Sargasso Sea
MSKKYFGTDGIRGKVNAGNINGEMFFKFGLAAGAYFKNQKRSKQTAIIAKDTRLSGYTLEPALVSGLASAGMHVYTLGPLPTNGLAMLTKKMKANMGIMITASHNPYHDNGLKLFGPDGLKLSDKIEKKIEKLIDSKIKKNLSQNETLGRVKRLENANEEYIKILKKNFPKNFRNEGIRIAIDCA

SEQ ID NO: 156609 - protein, 287 aa, Unknown
  Bacterial polypetide isolated from the Sargasso Sea
MQRPPQPTLEYEAYCQSFVKEPRNFANLSIVLDCANGAAYKVAQRVFEKLGLSPIYMGVDPDGTNINEGCGSTDTTVLQRRVVEEKADLGIAFDGDGDRLIMIDEFGEIVDGDEIVYAIACRKKELGTLIGGVVGTHMTNLGLELALAELNIPFVRADVGDRYIMEALREKQWTLGGETSGHIINLDACHTGDAIISALLILEILGSMKITLSELVKPVKKLPQVLINVSTENPKLVMSSRKLAERIDKFRSELGKEGRILIRPSGTEPLVRVMVEGRDREQSSAIA

SEQ ID NO: 156610 - protein, 281 aa, Unknown
  Bacterial polypetide isolated from the Sargasso Sea
GKASRMNDAQGRYIEFCKSSFTDLDLKGLSILLDCANGATYSVAPKVFSELGANVDTIGASPDGININQNCGSTSPDTLKEAIVKGSYDIGIAFDGDGDRILIVNSDGEVLDGDDILYILSKEISENSGVVGTLMTNKALELHFHNEGIEFIRADVGDKYVLQRLIERSWFLGGEPSGHIICLDSAPTGDAIVAALKLLNATKDNGFSVEKSLEGFQKFPQTLINLKVNNPNKIIISDKFWEKVTEIELQLGEDGRVLIRPSGTEPLIRLMVESKDTAIQK

SEQ ID NO: 156611 - protein, 174 aa, Unknown
  Bacterial polypetide isolated from the Sargasso Sea
ATRWKRKKILKGGVIGTTMSNYGLQNYFKKQKIKFYRANVGDRYVKEKMQKYKFNLGGEQSGHIILGKFATTGDGLLVALEVLFSMRKGNKASNLFNVFKPTPQILENITVKNKLVINSRKSKIAIKKAKKLIKNQGRMLVRKSGTEPKIRIMGESENKKLLLKCIQIVKRSIR

SEQ ID NO: 156612 - protein, 127 aa, Unknown
  Bacterial polypetide isolated from the Sargasso Sea
MKNKYFGTDGIRGTVNQGNITGEKFFKFGLASGTYFKNQKKSKQIAIIAKDTRLSGYTLEPALVSGLVSGGMHVFTLGPLPTNGLAMLTKSMKANMGIMITASHNPYYDNGLKLFGPDGMKLSDKIE

SEQ ID NO: 156613 - protein, 227 aa, Unknown
  Bacterial polypetide isolated from the Sargasso Sea
MSKKYFGTDGIRGKVNEGNINGEMFFKFGLAAGTYFKNLKKNKQVAIIAKDTRLSGYTLEPALVSGLASAGMHVYTLGPLPTNGLAMLTKRMQANMGIMITASHNPYFDNGLKLFGPDGLKLSDKIEKKIEKLIDSKIINNLSKPSILGRVKRLEDANDRYIEILKSNFPPNFRLNKIKIAIDCANGAGYKSGPKLLKSFGAKVYNTGTSPQWFKYQSKLWIYIPKK

SEQ ID NO: 156614 - protein, 143 aa, Unknown
  Bacterial polypetide isolated from the Sargasso Sea
NNNPDGLNINKNCGAVDIKSLSHNVIKEKADIGFAFDGDGDRLIVVDEEGKEVDGDKIIALLCKNYVKPKKKSNQHDVIITVMSNMGLENYLTNKLKLKIKRTTVGDINVINQMKKSKSFIGGEQSGHIILSEHSNTGDGILA

SEQ ID NO: 156615 - protein, 261 aa, Unknown
  Bacterial polypetide isolated from the Sargasso Sea
AYQVGPLVLRELGAEVTGTGIEPDGFNINRESGSTYPQTLCQLVKECGADVGIAFDGDADRVVLSDAQGRLVDGDGILFILSQYRHQRGDCEGVVGTLMTNLGVEVACEAQGIKFVRARVGDRFVLEELLSRNWTLGGETSGHILSLDRSTTGDGLVAALAVLEVMQKTGKSLAELVENLQVFPQELVNVSTEHPRPAELLDQPLVTEAVKSCEKQLGSQGRVVLRASGTEPLIRVMVEGEDSARVGELARVLADQIRAVG

SEQ ID NO: 156616 - protein, 120 aa, Unknown
  Bacterial polypetide isolated from the Sargasso Sea
MKNKYFGTDGIRGKVNQGNITGEKFFKFGLASGTHFKNQKKSKQVAIIAKDTRLSGYTLEPALVSGLVSGGMHVFTLGPLPTNGLAMLTKSMKANMGIMITASHNPYYDNGLKFIWPRRK

SEQ ID NO: 156617 - protein, 158 aa, Unknown
  Bacterial polypetide isolated from the Sargasso Sea
MKKKYFGTDGIRGTVNLGNINGEKFFKFGLAAGTYFKNLKKKKQVAIIAKDTRLSGYTLEPALVSGLASAGMHIFTLGPLPTNGLAMLTKKMKANLGIMITASHNPFHDNGLKLFGPDGMKLSDKIEKKIENLIDTKTVSHLSEPKSLGRVKRLEDGQ

SEQ ID NO: 156618 - protein, 166 aa, Unknown
  Bacterial polypetide isolated from the Sargasso Sea
MLKKYFGTDGIRGRVNKEKINGEMFFKFGLAAGTYFKNQKKNKQIAIIAKDTRLSGYTLEPALVSGLASAGMHIFTFGPLPTNGLAMLTKKMRANLGIMITASHNPYHDNGLKLFGPDGLKLSDLIEKKIEKLIDANISINLSNPKILGRVKRLENGSEKYIEILK

SEQ ID NO: 156619 - protein, 228 aa, Unknown
  Bacterial polypetide isolated from the Sargasso Sea
MSKKYFGTDGIRGSVNTENINGEMFFKFGLAAGTYFKNLKKSKQIAIIAKDTRLSGYTLEPALVSGLTSTGMNVYTLGPLPTNGLAMLTKSMRANLGIMITASHNPYYDNGLKLFGPDGLKLSDKIEKKIEKLIDSKISKNLSKPRFLGRVKRLEDANDKYIKILKNNFPKKFNLKGIKIAIDCANGAGYKSAPKLLRSLGAKVYETGTSPNGLNINYKCGSTFPKKI

SEQ ID NO: 156620 - protein, 216 aa, Unknown
  Bacterial polypetide isolated from the Sargasso Sea
RLEDGNDKYIELLKKNFPKNFHLKGTKIVLDCANGAGYKAAPKLLKELGAQVISIGVKPNGFNINEKCGSMYPSKIRSAVRKFKAHVGISFDGDADRIIMCDEKGNIIDGDQIIAMLAKRWKSKRILKGGVIGTLMSNYGLENFLRDEKIKFYRSKVGDRYVKEKMKKFNFNLGGEQSGHVILGKFATTGDGLMVALEVLFSLRKRKKASKLLNVF

SEQ ID NO: 156621 - protein, 168 aa, Unknown
  Bacterial polypetide isolated from the Sargasso Sea
VTTVMSNLGFEIYLKEKLGVKLIRENVGDINVITNMKKNSYNLGGEQSGHIILGQYMNTGDAILAAIKVIESLSKSNTKASNLFNLFKKFPQNKKNIKLNTELSKLQQNKIKNISIKYVKKYKNLRFLVRKSGTEPLIRILVEGREKFIVNKITNKLMKQLKEIINVK

SEQ ID NO: 156622 - protein, 106 aa, Unknown
  Bacterial polypetide isolated from the Sargasso Sea
MIKKYFGTDGIRGKVNLEKINGDMFFKFGLAAGIYFKNLKKNKQSAIIAKDTRLSGYSLEPALVSGLASAGMHIYTLGPLPTNGLAMLTKKMKANMGIMITASHNP

SEQ ID NO: 156623 - protein, 247 aa, Unknown
  Bacterial polypetide isolated from the Sargasso Sea
NGLKINVNCGSTNLEPLKKALRESSADMGFSFDGDADRVIGIDSQGNVLDGDHILFLWGRELMEQRSLTNNLLISTQMANLGFEKAWNKIGGILYRTNVGDKYVHDAIKEKKAVLGGEQSGHILSKINNFAGDGILTALQISKYCKKKKINLNDWLRSSFKPFSQKLTNINLDFNINKINPETKILIDQTIENFQEIYSDNCRVYIRPSGTEPVMRVLVEANNHKKVHSLSSEITNKLFLEINKIIN

SEQ ID NO: 156624 - protein, 182 aa, Unknown
  Bacterial polypetide isolated from the Sargasso Sea
MSVLSTLSKDRKFGTDGIRGPVTSTMNPLFVTKLGWAAGSILLEEGISKVLIGKDTRISGYMFESALQAGFISAGMDVTLLGPLPTPGVSYLANSNNQVGCVISASHNLFEDNGIKFFNKDGQKFSAELEKRIETKLTQEMVAVESINLGKASRMNDAQGRYIEFCKSSFTDLDLNGLSILL

SEQ ID NO: 156625 - protein, 108 aa, Unknown
  Bacterial polypetide isolated from the Sargasso Sea
MKNKYFGTDGIRGTVNQGNITGEKFFKFGLASGTYFKNQKKTKQIAIIAKDTRLSGYTLEPALVSGLVSGGMHVYTLGPLPTNGLAMLTKSMRANMGIMITASHNPYP

SEQ ID NO: 156626 - protein, 173 aa, Unknown
  Bacterial polypetide isolated from the Sargasso Sea
MKNKYFGTDGIRGTVNQGNITGEKFFKFGLASGTYFINQKKSKQIAIIAKDTRLSGYTLEPALVSGLVSGGMHVFTLGPLPTNGLAMLTKSMKANMGIMITASHNPYFDNGLKLFGPDGMKLSDKIEKRIEKLIDAKNTKQLTNPKFLGRVKRLEDGNEKYIRILKIIFQVIL

SEQ ID NO: 156627 - protein, 195 aa, Unknown
  Bacterial polypetide isolated from the Sargasso Sea
RVIMCDEKGKIIDGDQIIAMLARRWKLKKILRGGVIGTLMSNYGLEKFLNSEKIKFSRSKVGDRYVKEKMKKLNYNLGGEQSGHIILGKFATTGDGLLVALEVLFSLRKGKKASQILKVFKPLPQILENIVVHDKNIISKLKCKNAIKKANKFMGKKGRILVRKSGTEPKIRIMAESYDKSLILKCINIIKRSIK

SEQ ID NO: 156628 - protein, 238 aa, Unknown
  Bacterial polypetide isolated from the Sargasso Sea
MSKKYFGTDGIRGKVNQEKINGEMFFKFGLAAGTYFKNQKKSKQIAIIAKDTRLSGYTLEPALVSGLTSTGMHVFTFGPLPTNGLAMLTKKMKANMGIMITASHNPYYDNGLKLFGPNGLKLSDKIEKKIEKLIDTKINDNLSNPKILGRVKRLEDGSEKYIEILKTNFPNQFNLRGLKIAIDCANGAAYKIGPQLLRSLGAVVYEIGTSPNGFNINEKCGSTFPNKIRHLTKKNKAH

SEQ ID NO: 156629 - protein, 143 aa, Unknown
  Bacterial polypetide isolated from the Sargasso Sea
HEAIVKKRAVLGGEQSGHILSKINNFSGDGILTALQISKYCKKKNITLNDWLKSSFDPFPQKLTNINLGFNINRINPKTKILIDQTIKKFHEIYSDNCRVYIRPSGTEPLMRILVEAKNHKKVDFLSSEITNKLYLEINALII

SEQ ID NO: 156630 - protein, 164 aa, Unknown
  Bacterial polypetide isolated from the Sargasso Sea
MTKKYFGTDGIRGPINSKNINGDMFFKFGLASGTYFKSQKKRKQLAIIAKDTRLSGYTLEPALVSGLASAGMHVFTLGPLPTNGLAMLTKTMKANMGIMITASHNPHNDNGLKLFGPDGMKLSDKIERKIESLIDKKISKNLSNPEKLGRVKRLETGTKDYIKI

SEQ ID NO: 156631 - protein, 169 aa, Unknown
  Bacterial polypetide isolated from the Sargasso Sea
MAKKKYFGTDGIRGRVNQGNINGNMFFRFGLAAGTYFKNQKKFKQTAIIAKDTRLSGYTLEPALVSGLASAGMHVFTLGPLPSNGLAMLTKSMKANMGIMITASHNPYYDNGLKLFGPDGLKLSDRIEKKIESLIDTKIDSQLSKPKKLGRVKRLENGNEEYIKILKKN

SEQ ID NO: 156632 - protein, 264 aa, Unknown
  Bacterial polypetide isolated from the Sargasso Sea
FQSLGADVKVINNSKNGLKINLNCGSTNLEPLKKALRESPADMGFSFDGDADRVIGIDSEGNVLDGDHILFLWGRELMEQKILTNNLLVSTQMANLGFEKSWKKIGGILHRTDVGDKYVHDALKKKRAVLGGEQSGHILSKINNFSGDGILTALQISKYCKKKNINLNDWLKSSFEPFPQKLTNIKLDFNINRLNPKNKILIDESIKHFQAIYTDNCRVYIRPSGTEPVIRVLVEAKNHKKVHSLSSEITNKLFLEIDKITNQR

SEQ ID NO: 156633 - protein, 383 aa, Unknown
  Bacterial polypetide isolated from the Sargasso Sea
MQSIFGTDGIRGRFNEEITYSLAYKVGYALGSILEKKSPIIIGRDTRISGDILLQAITQGINDSGKKFINLGICPTPAIPFLIKQENLSSGIMISASHNPPEYNGIKIFDHNGQKITKYFENKIQKLIEESSHNISVPKKVIPRNTNKDLIDVYIKSLIQTMGGENLSGLRIILDTCYGSAATCAKNIFQSLGADVRVINNSKNGLKINLNCGSTNLEPLKKALRESPADMGFSFDGDADRVIGIDSKGNVLDGDHILFLWGRELLEQKILTNNLLISTQMANLGFEKAWKKIGGILYRTNVGDKHVHDAIKEKGAVLGGEQSGHILSKINNFSGDGILTALQISKFCKKKNINLNDWLRSSFKPYPQKLTNINLNFKSNKLN

SEQ ID NO: 156634 - protein, 436 aa, Unknown
  Bacterial polypetide isolated from the Sargasso Sea
MKFGTDGFRGRADESVTPDFCLKLGFHTGTIIKNKGYDSVILGKDTRVSGYMLESALQAGFISAGVDVKLAGPIPTPAVSFLTATYSGQFGVVISASHNPFYDNGIKFFNKFGRKISEELEKEIEKKLNDPIQSVEASNLGKAFRIDSAAGRYIEYCKSTLKGAHNLKDKTILVDAANGANYKITPMLLEELGAKVIRVNCDPDGFNINEKSAVLDQSLFKDYAKKYEFDFCVAVDGDGDRLVLSDSKGDVCTGDEIIYTLALRNKKQNKTGSGCVVGTDMTNQGVVDALSDLEVDFQRAQVGDKFISRELVDKKLNLGGETSGHIIQREFSESGDANIALIQTLAALEELNLSLADIKTKINYKPQILESFDVKDMQIIETKEFSEQIKSLEKDHSNARISVRKSGTEPKIRVMVESDSKDDIASVMNSVKSLII

SEQ ID NO: 156635 - protein, 395 aa, Unknown
  Bacterial polypetide isolated from the Sargasso Sea
MNLKFGTDGIRGPVESVVTPEACLKIGHATGLVMKELGWNTVVIGKDTRISGYMLESALQAGFIAAGVNVRLLGPIPTPGVAYLTKTLRNRFGVVISASHNDFLDNGIKIFNEDGEKISRDIEKRIEKHLSKDLSPVETSKIGKAYRFDESGPRYIEFCKSTVPPNISFSSLRIVLDCANGACYKVSPEIFEELGAEVITIGNEPDGYNINQDCGSTHPEVIQDAVIKHRADYGISLDGDGDRVILVDEKGNLLDGDDILYILAFSNPNRTGVWSGVVGTHMSNLGLEKGIEKLGYKFIRADVGDKYVSEMLAKKGWMLGGETSGHIICKDLVSTGDGTVAALKVISSLLILEKRPSEVLSNFKKIPQINKAIKVNNKDIINDKELKSFLKEIES

SEQ ID NO: 156636 - protein, 301 aa, Unknown
  Bacterial polypetide isolated from the Sargasso Sea
MKKKYFGTDGIRASSNSDKLNGPTLINLGMALGKYFTKGDHRHKVVIGKDTRLSGYMIEQALSSGLLSMGMDVFLFGPIPTPAVSMLTRSMRADLGIMITASHNQYQDNGLKIFDRLGNKLSDETELEIENLMESKLEETLAKPENIGRAKRLEDANGRYIEYLKNTFPKTQRLDGIKIVVDCANGASYISAPLILWELGAEIIQIGTQPNGININDNCGSTNTDLLAKTVIEEKADIGIALDGDGDRLAIVDEKGNVINGDQILALLALHMSKKNLLQKNKVVGTFMANIGLEILLNENN

SEQ ID NO: 156637 - protein, 183 aa, Unknown
  Bacterial polypetide isolated from the Sargasso Sea
DGDQIIAALASRWKKKKMLKGGVVGTLMSNYGLEKYFKKEKIKFIRANVGDRYVKEKMQKNKFNLGGEQSGHIILGKFATTGDGLLVALESLFALRKGKKASEFFDKFKKTPQLLKNVDVKDKSIINKTEIKQSIKLAEKLIKGQGRILVRKSGTESKIRVMVECENKTLLSKCINIISRKIK

SEQ ID NO: 156638 - protein, 126 aa, Unknown
  Bacterial polypetide isolated from the Sargasso Sea
KSIIGGEQSGHIILAEYANTGDGILAALKITEILISNKNKASKLFDLYDDFAQEKINLRYKTKNIKLLKILGKLKNDKMYNNKRIRSLVRLSGTEPLVRILVEGQEIAEVKKKSLEIKKLVRAYLG

SEQ ID NO: 156639 - protein, 174 aa, Unknown
  Bacterial polypetide isolated from the Sargasso Sea
MSKKYFGTDGIRGKVNQGNINGQMFFKFGLAAGTYFKNLKKNKQTAVIAKDTRLSGYTLEPALVSGLASAGMHVYTLGPLPTNGLAMLTKKMKANMGIMITASHNPYFDNGLKLFGPDGLKLSDKIEKKIEKLIDSKITKNLSKPNILGRVKRLENANNRYIEILKSNFPENFN

SEQ ID NO: 156640 - protein, 173 aa, Unknown
  Bacterial polypetide isolated from the Sargasso Sea
MPKKYFGTDGIRGRVNDSKINGDMFFKFGLAAGTYFKNLKKVKQTAVIAKDTRLSGYTLEPALVSGLASAGMHVFTLGPLPTNGLAMLTKKMRANLGIMITASHNPYYDNGLKLFGPDGLKLSDKIEKKIEKLIDAKINNNLSLPENLGRVKRLENATDRYLSILKNNFPTKF

SEQ ID NO: 156641 - protein, 131 aa, Unknown
  Bacterial polypetide isolated from the Sargasso Sea
MSKKYFGTDGIRGKVNKGNINGEMFFKFGLAAGTYFKNLKKNKQIAIIAKDTRLSGYTLEPALVSGLASAGMHVYTLGPLPTNGLAMLTKKMKANMGIMITASHNPYFDNGLKLFGPDGFKIIRQNRKKNE

SEQ ID NO: 156642 - protein, 198 aa, Unknown
  Bacterial polypetide isolated from the Sargasso Sea
MKNKYFGTDGIRGTVNQGNITGEKFFKFGLASGTYFKNQKKTKQIAIIAKDTRLSGYTLEPALVSGLVSGGMHVFTLGPLPTNGLAMLTKSMKANMGIMITASHNPYYDNGLKLFGPDGMKLSDKIEKKIEKLIDAKNTKQLTNPKFLGRVKRLEDGNDRYIKILKNNFPNNFHLRGTKIVLDCDNGACYKAAPKLLK

SEQ ID NO: 156643 - protein, 346 aa, Unknown
  Bacterial polypetide isolated from the Sargasso Sea
MNLKFGTDGIRGPVESLITPEACLKIGHATGFVMKELGWNTVVIGKDTRISGYMLESALQAGFIAAGVNVQLAGPLPTPGIAYLTKTLRNKFGVVISASHNDFLDNGIKIFNDDGEKISRDIEKRIEKYIASDLIPVETSKIGKAYRFDESGPRYIEFCKSTVPSDISFSSLRIVLDCANGACYKVSPEIFEELGAEVIALGDNPDGYNINQGCGSTHPELIKKEVIKHRADYGISLDGDGDRVILVDEKGSILDGDDLLYILAFSNPNRTGPWSGVVGTLMSNLGLEDGIKKLGYKFKRADVGDKYVSKMLADKGWMLGGETSGHIICKDLVSTGDGTIAALKVI

SEQ ID NO: 156644 - protein, 238 aa, Unknown
  Bacterial polypetide isolated from the Sargasso Sea
MKKKYFGTDGIRGTVNLGNINGEKFFKFGLAAGTYFKNLKKKKQVAIIAKDTRLSGYTLEPALVSGLASAGMHIFTLGPLPTNGLAMLTKKMKANLGIMITASHNPFHDNGLKLFGPDGMKLSDKIEKKIESLIDKKTINQLSKSDFLGRVKRLEDGNDRYIEILKSNFPSNFSLKGMRIVLDCANGAGYKSAPRILSDLGAKVFSIGIKPNGLNINLKCGSTYPELLKKYVKKFKAN

SEQ ID NO: 156645 - protein, 245 aa, Unknown
  Bacterial polypetide isolated from the Sargasso Sea
MAKKYFGTDGIRGAVNSKYINGDMFFKFGLASGTYFKSQKKRKQTAIIAKDTRLSGYTLEPALVSGLASAGMHVYTLGPLPTNALAMLTKEMKANMGIMITASHNPHFDNGLKLFGPDGMKLSDKIEKKIEYLIDKKISKNLSHSEKLGRVKRLETGTKNYIKILKKNFTKEFNLRGLRIVIDCANGAGYKAGPELLKSLGAKVIAIGIKPNGLNINKKCGSTFPRNIRSAVKKYKAHIGISLDG

SEQ ID NO: 156646 - protein, 363 aa, Unknown
  Bacterial polypetide isolated from the Sargasso Sea
MSKIFGTDGIRCLVNEEPLSAETCLKISKTVAFLLKKKNSKNSRVVICKDTRLSGYLYEPLVTAGFISMGMDVILVGPLPTPAVPLMIKTLRADIGVMITASHNTYQYNGLKFFDSTGTKLSSLIEQKVEKIVLDNKKYSKVTNNTFVSGNARRLEDASGRYSEFLKSTLNKTSSKKKLKIILDCANGATYNIAPNLFWELGHNIIAINNEPDGLNINKNCGAVDVKSLSQNVIKEKADIGFAFDGDGDRLIVVNEKGQEVDGDKIIALLCKNYIKPKKKSNQHDVIITVMSNMGLEKYLINKLKLKIKRTSVGDINVINQMKKSKSIIGGEQSGHIILSEHSNTGDGILAALKITEILISNK

SEQ ID NO: 156647 - protein, 268 aa, Unknown
  Bacterial polypetide isolated from the Sargasso Sea
MKKYFGTDGIRGIPNDTLSQDLISKISASVEQHINPKNIGVISDTRSSSDEILNWISIGFSSKVNIYNHGVLPSGSMPIILKKFNYDLGIIISASHNPAEYNGIKLIQENGSKLDDDVEISIEKNIDSLELPNQHAEIINLNDGHLEYLNFLDDVTDIDFSHFQILIDAANGSASTVIKELFDKKNANYRIINNQPDGLNINKDCGATVPENLQKNIEKGEIGASFDGDADRLIMVDENGDIVNGDLIFNILSKYLSEVNQLTNNICC

SEQ ID NO: 156648 - protein, 163 aa, Unknown
  Bacterial polypetide isolated from the Sargasso Sea
GGVIGTLMSNYGLEKFLKNEKIRFSRSKVGDRYVKEKMKKLNYNLGGEQSGHIILGKFATTGDGLLVALEVLFSLRKGKKASQILKVFKPLPQTLENIIVKDKNIISKFKCKVAIKKAKKIMDQKGRILVRKSGTEPKIRIMAESYDKSLILKCIKIIKKSIK

SEQ ID NO: 156649 - protein, 436 aa, Unknown
  Bacterial polypetide isolated from the Sargasso Sea
MKFGTDGFRGPADSVITPDFCLRLGFHTGVVIKEKGYDSVIIGKDTRVSGYMLEAALQAGFISAGIDVKLAGPIPTPAVSFLTATYAGQFGVVISASHNPFYDNGIKFFNRHGRKISADLEQEIEKRLETPNEPVKAKHLGKAFRIDSASGRYVEYCKSTLKGNYSLQNKTILVDAANGANYKITPMLLRELGAKTININCDPDGFNINVDSAVLKQELFAEYAKNYEFDYCVAVDGDGDRLVLSDAKGTIFTGDDILYTLASRNKMIGKEQSDSVIGTTMSNQGVVEALGNLGISFLRTDVGDKYISRELVKRDLNVGAEPSGHIIQREFSESGDANIALIQTLAALQELDTTIEEIKKNINYKPLSLRNFSVADKKVLESQIFIESIEKLQKNYPDARISVRKSGTEPIIRAMVEAETENDKDSILNEIESLIL

SEQ ID NO: 156650 - protein, 155 aa, Unknown
  Bacterial polypetide isolated from the Sargasso Sea
MLKKYFGTDGIRGRVNSGNINGDMFFKFGLAAGTYFRNLNKKKQTAIIAKDTRLSGYTLEPALVSGLASAGMHVFTLGPLPTNGLAMLTKKMKANLGIMITASHNPYYDNGLKLFGPDGLKLSDKIEKRIEKLIDSKLRKNLLNPKVLGRVKRLE

SEQ ID NO: 156651 - protein, 234 aa, Unknown
  Bacterial polypetide isolated from the Sargasso Sea
KDCGSTNINFLKDEVLSKNADFGIALDGDGDRLIIIDSDGRELDGDDILYVIAKNKFESKIHLGVKGVVGTLMTNKGLEKAFNDEGIELVRSDVGDKYVLQKLNELNWTLGGEQSGHILCLDKSNTGDGIIAAIQFLQSIVVLNKTIPELLSEFKKYPQILTNVKVKDGNKVLKNKKLQKAQKKSEELLETFDGRVLIRKSGTEHKIRIMVESNSQDATSEQSVLLTELVESIS

SEQ ID NO: 156652 - protein, 407 aa, Unknown
  Bacterial polypetide isolated from the Sargasso Sea
SIIKEKGYDSIILGKDTRVSGYMLESALQAGFISSGIDVKLAGPIPTPAVSFLTATYSGQFGVVISASHNPFYDNGIKFFNKFGRKISEELEAEIEKRLDDPIQPVEASDLGKAFRIDSAAGRYIEYCKSTLKGAHNLKDKTILVDGANGANYKITPMLLEELGAKVIRINCNPDGFNINEKSAVLDENLFKEYAKEHEFDFCIAVDGDGDRLVLSDSKGEVCTGDEIIYTLALRNKKQEKDGSNCVVGTDMTNQGIVDALDDLGINFHRAEVGDKFISRELVKQELNLGGESSGHIIQREFSESGDANIALIQTLAALEELDLSLADIKAKIKYKPQTLKSFAIKDMKVIETDEFNNQIESLKNDYGSARISIRKSGTEPKIRVMVESDSKEDVANIVNCVEKLIV

SEQ ID NO: 156653 - protein, 274 aa, Unknown
  Bacterial polypetide isolated from the Sargasso Sea
MKFGTDGFRGRADKAVTPDFCLKLGFHTGSIIKEKGYDSIILGKDTRVSGYMLESALQAGFISSGIDVKLAGPIPTPAVSFLTATYSGQFGVVISASHNPFYDNGIKFFNKFGRKISEELEAEIEKRLNDPIQPVEASDLGKAFRIDSAAGRYIEYCKSTLKGAHNLKDKTILVDGANGANYKITPMLLEELGAKVIRINCNPDGFNINEKSAVLDETLFKEYAKEHEFDFCIAVDGDGDRLVLSDSKGEVCTGDEIIYTLAQRNKKQEKDGSD

SEQ ID NO: 156654 - protein, 288 aa, Unknown
  Bacterial polypetide isolated from the Sargasso Sea
MKKYFGTDGIRGIPNKNLTKEIVSNVACSVEDILKPTSVAVILDTRDSSLEILDWICEGFSENIEVINYGILPSGSMPVLLDNFGHNLGIIISASHNPSEYNGIKLINENGSKLQDEIEIEIEANIENISLPSAHTSYKDSAEGFKVYFEFLNRDLDFELSNFDLLIDSANGSAYKIIEELLKDNNSKFKMIANEPNGENINLASGATHTENLIKNLKKGEIGAAFDGDADRLIMVDEDGITCNGDILILLIAKYLSSTNQLNNDIVISTVMSNFGFKNAMEKNNLKI

SEQ ID NO: 156655 - protein, 197 aa, Unknown
  Bacterial polypetide isolated from the Sargasso Sea
DEKGNEIDGDKIIALFAKHLIKFNKSKSKYPIVTTVMSNIGFENYILNKFKVNLKRSSVGDINVIKEMQKYNSLLGGEQSGHIILSDYSKTGDGILAALKVMEIITKLNKPASLIFSLYENSPQIKINIPYKKISKNTVNYIKNINKKKLKNNNMRLLIRLSGTEPLIRILVEGNDLIEVNKIAKNIEKNIRAKLGK

SEQ ID NO: 156656 - protein, 152 aa, Unknown
  Bacterial polypetide isolated from the Sargasso Sea
NNFKNIETAVGDKYVAEAMLESNASIGGEQSGHIIISDKLPVGDGLLTLIYSLKALSFFKTTLSQFRKDNIKEYPQRLINIELNNMPDTKQLEELDNIAKTLSQEENLDGRYLIRNSGTEPLLRVLVEASEEESVKNFSENLVNKIKNFLQT

SEQ ID NO: 156657 - protein, 161 aa, Unknown
  Bacterial polypetide isolated from the Sargasso Sea
MKNKYFGTDGIRGTVNQGNITGEKFFKFGLASGNYFKNQKKSKQIAIIAKDTRLSGYTLEPALVSGLVSGGMHVFTLGPLPTNGLAMLTKSMKANMGIMITASHNPYYDNGLKLFGPDGMKLSDKIEKRIEKLIDAKSNSQLTNPKLLGRVKRLEDGNDNT

SEQ ID NO: 156658 - protein, 207 aa, Unknown
  Bacterial polypetide isolated from the Sargasso Sea
MIKKYFGTDGIRGKVNGPKINGEMFFKFGLAAGIYFKNLKKSKQTAIIAKDTRLSGYTLEPALVSGLASAGMHIYTLGPLPTNGLAMLTKKMRANMGIMITASHNPYHDNGLKLFGPDGLKLSDRIEKKIEKLIDSKITKNLSKPIELGRVKRLEDANENYIKILKQNFPSSFSLKGIKIALDCANGAGYKAGPALFKSLGAKVYDI

SEQ ID NO: 156659 - protein, 332 aa, Unknown
  Bacterial polypetide isolated from the Sargasso Sea
MGIMITASHNPHYYNGLKLFGPDGMKLSNKIEKKIEHLIDQHIEKNLSEPEKLGRVKRLETGTRDYIKILKKNFSEEFNLRGLRIVIDCANGAGYKAGPELLKSLGAKVIAIGVEPNGMNINKNCGSVYPQNIKRAVKKYKAHIGISLDGDADRVIMCDEKSNIIDGDQIIAALASRWKNKKMLKGGVVGTLMSNYGLEQYFKTLNINFIRANVGDRYVKEKMQKHKFNLGGEQSGHIILGKFATTGDGLLVALEALFALRKGKKASVFFSKFKKIPQILKNIDVKDRNIINKSDIKNSIKIAEKLIKGHGRILVRKSGTESKIRVMGESEN

SEQ ID NO: 156660 - protein, 260 aa, Unknown
  Bacterial polypetide isolated from the Sargasso Sea
MRNKYFGTDGIRGTVNQGNITGEKFFKFGLASGTYFKNQKKNKQIAIIAKDTRLSGYTLEPALVSGLVSGGMHVYTLGPLPTNGLAMLTKSMKANMGIMITASHNPYYDNGLKLFGPDGMKLSDKIEKKIEKLIDAKNTKQLTNPKLLGRVKRLEDGNDRYIKILKNNFPNNFHLRGTKIVLDCANGASYKAAPKLLKELGAKVISIGVKPDGFNINEKCGSTYPSKIRLAVKKFKANVGISFDGDADRIIMCDEKGKKL

SEQ ID NO: 156661 - protein, 331 aa, Unknown
  Bacterial polypetide isolated from the Sargasso Sea
AGTYFKNQNKIKQSAFIAKDTRLSGYTLEPALVSGLASAGVHVYTLGPLPTNGLAMLTKKMRANLGIMITASHNPFYDNGLKLFGPDGLKLSDKIEKKIEILIDSKITKNLSDPKILGRVERLENANERYIEILKRNFPSNFSLKGMKIAIDCANGAGYKSGPKLLSSLGAKVFQYGTSPNGFNINKKCGSTFPNKIKSLVKKYKANIGISLDGDADRIIISDEKGNIIDGDQIIAMLATRWKKKKILRGGVIGTLMSNYGLEKYFASERIKFIRADVGDRYVKEKMKQKNFNLGGEQSGHIILGKFATTGDGIISCPGSLVQYEKRKKSK

SEQ ID NO: 156662 - protein, 312 aa, Unknown
  Bacterial polypetide isolated from the Sargasso Sea
YFDNGLKLFGPDGMKLSDKIEKKIEKLIDAKNTKQLTNPNLLGRVKRLEDGNDKYIKILKNNFPNNFHLKGTKIVLDCANGACYKAAPKLLKELGAKVVSIGVEPDGFNINEKCGSTYPSKIRSAVKKYRANVGISFDGDADRIIMCDEKGKIIDGDQIIAMLARRWKSKKILKGGVVGTLMSNYGLENFLKNENIRFSRSKVGDRYVKEKMKKLNFNLGGEQSGHIILGKFATTGDGLLVALEVLFSLRKGKKASKLLNVFKPLPQILDNVDVKNKNIISKKKCKNAIKKANKIMGQKGRILVRKSEPNQK

SEQ ID NO: 156663 - protein, 286 aa, Unknown
  Bacterial polypetide isolated from the Sargasso Sea
TDDYIKILRKNVPKNFRLKNMKIVLDCANGAGYKSAPKMIKSLGAKLLVIGDKPNGFNINENCGSTFPNKLQRYVKKHKAHLGISLDGDADRVIMCDEKGRIVDGDQIIAALALQWKKKKILKGGVVGTLMSNYGIENFFRKKNIKFIRSNVGDRYVKEVMQRKRFNLGGEQSGHIILGKFATTGDGLLVALEVIQALNKNIKTSDFFNVFEKTPQILKNINIKDDNILKKSSTKNAIKIAKKLIKGQGRILVRKSGTEPKIRIMGESINKILLKKCIKIVTRVIK

SEQ ID NO: 156664 - protein, 263 aa, Unknown
  Bacterial polypetide isolated from the Sargasso Sea
YIEFAKATFPNTMRLDHLKIVIDCANGAAYKVAPMIFWELGADIIVIGNQPNGRNINQDCGSTKTQSLKEEVKSNNADLGIAFDGDGDRLVIIDENGDQVNGDHLLGMIALSLKKKNLLKNENIVSTIMANKSLENYLKSIDLKLIRTKVGDRYVIEKMLDIGSNFGGEPSGHLIINDFSSTGDAIVSSLQVLSLMIEENRPISNLTNLFPLTSQKNYEFKTENINNISNSFLEELSNKMNEKIGDEGRVIIRKSGTEPLIRV

SEQ ID NO: 156665 - protein, 222 aa, Unknown
  Bacterial polypetide isolated from the Sargasso Sea
STFPNKIKYHTKKNKSHIGVSLDGDADRIIICDENGKIIDGDKIIATLATRWKRKKILKGGVVGTLMSNYGLQKYFSKNKIKFIRSKVGDRYVKEAMQKSKFNLGGEQSGHIILGKFATTGDGLLVALEILFSMRKGKKASEIFENFTPTPQLLENVEVKDKSIINNLKCINAIKKANSLIKRKGRMLVRKSGTEPVVRIMCESEDKTILSKCVNIVKKSII

SEQ ID NO: 156666 - protein, 330 aa, Unknown
  Bacterial polypetide isolated from the Sargasso Sea
LKYFGPDGLKLSDKIQKKIENLIDSKVGKHLSKPTLLGRVKRLESGTDEYIKILKKKIPNNFKLKNMKIVLDCANGAGYKSAPKMIKSLGVKLIIIGNKPNGFNINKNCGSTFPKKLQRHVKKHKAHLGISLDGDADRIIMCDEKASIIDGDQIIAALALQWKKKKILKGGVVGTLMSNYGLENFFKRKKIKFIRANVGDRYVKEIMQKKKFNLGGEQSGHIILGKFATTGDGLLVALEVIQALNKKIKASNFFNVFEKTPQILENIKIKNNDILKKTSVKNSIKIANRLIKGQGRILVRKSGTEQKIRIMGESKNKVLLKKCIKTVTRT

SEQ ID NO: 156667 - protein, 321 aa, Unknown
  Bacterial polypetide isolated from the Sargasso Sea
LLGPLPTNGLAMLTKTMKANMGIMITASHNPHYDNGLKLFGPDGMKLSNKIEKKIEHLIDQRIENNLSEPEKLGRVKRLETGTKDYIKILKKNFSEEFNLRGLRIVIDCANGAGYKAGPELLKSLGAKVIAIGVEPNGININKNCGSVYPQNIKRAVKKYKAHIGISLDGDADRVIMCDEKSNIIDGDQIIAALASRWKNKKMLKGGVVGTLMSNYGLEQYFKTLNINFIRANVGDKYVKEKMQKHKFNLGGEQSGHIILGKFATTGDGLLVALEALFALRKGKKASVFFSKFKKIPQILKNIDVKDKNIINKSEIKNSIK

SEQ ID NO: 156668 - protein, 282 aa, Unknown
  Bacterial polypetide isolated from the Sargasso Sea
IKILKRNFPKNFSLRGIKIAIDCANGAGYKSGPKLFKSLGAKVYEIGTSPNGLNINDKCGSTFPNKIKSFVKKYRVNLGISLDGDADRIILCDEKGNIIDGDQIIAMLATRWKQKKILRGGVIGTLMSNYGLQKYLNKKKIKFIRANVGDRYVKEKMQKNKYNLGGEQSGHIILGKFATTGDGLLVALEVLFSMRKGRKASELFKIFKTTPQILENVVVNDKSIINSTKCRRAINQANKLIKDKGRMLVRKSGTEPKIRIMCESDNRTLLLKCINIVKKSIR

SEQ ID NO: 156669 - protein, 280 aa, Unknown
  Bacterial polypetide isolated from the Sargasso Sea
KTNFPKNFNLKGLKIVLDCANGAAYKAAPKLLQELGAKVISIGINPNGLNINENCGSTFPSKIKKAVIKFKAHVGISFDGDADRIIMCDEKGKIIDGDQIIAMLARRWKSKKILKGGVVGTLMSNYGLEKFLKNEKIKFFRSKVGDRYVKEKMKKLNFNLGGEQSGHIILGKFATTGDGLLVALEVLFSLRKKRKASNLLNVFKPMPQILENVIVKSKSIVDKRKCKNAIKVANKIMGHNGRILLRKSGTEPKIRIMAESNNKNLIVKCIKILKESISET

SEQ ID NO: 156670 - protein, 347 aa, Unknown
  Bacterial polypetide isolated from the Sargasso Sea
LGKYFTKGDHRHKVVIGKDTRLSGYMIEQALTSGLLSMGMDVFLFGPIPTPAVSMLTKSMRADLGIMITASHNQYQDNGLKIFDRLGNKLSDETELEIENLMESKLEESLAKPENIGRAQRLEDANGRYIEYLKNTFPKTQRLDGLKIVVDCAHGASYISAPLILWELGAEVTQIGTQPNGININDKCGSTNTDLLAKTVIEEKADIGIALDGDGDRLAIVDEKGNVINGDQILALLALHMSKKNLLQKNKVVGTSMANIGLENLLNENNIELVRANVGDRYVKEKMINENLNLGGEQSGHIIMRDYTSSGDGIIVALQVLTIIMQNKKLASEIFYLFTPHPQNLIN

SEQ ID NO: 156671 - protein, 290 aa, Unknown
  Bacterial polypetide isolated from the Sargasso Sea
LFRYVERVKSSFPGGMRLDGMKVVIDCANGAGYRAAPEVLWELGADVIPIGVNPNGTNINKNCGSTEPQSAAEAVVSHGADVGICLDGDADRITLIDSEGNIADGDQILGVIASRWSEDGLLTGSGIATTVMSNLGLERFLNQRGILMERTQVGDRYVVEHMRKSGFNLGGEQSGHIIMSDFSTTGDGLIAGLQFLAEIIRSDSNSKDLARIFEPVPQLLKNASYQTGSDPLSKPNVVKAIKAAELNLEGNGRLLIRKSGTEPLIRVMAESEDEDKMVKAVDSVVAEITA

SEQ ID NO: 156672 - protein, 300 aa, Unknown
  Bacterial polypetide isolated from the Sargasso Sea
YFKNQKKSKQIAIIAKDTRLSGYTLEPALVSGLVSGGMHVYTLGPLPTNGLAMLTKSMKANMGIMITASHNPYHDNGLKLFGPDGMKLSDKIEKKIEKLIDAKNTKQLTNPKLLGRVKRLEDGNDKYTKILKNNFPSNFHLKGTKIILDCANGASYKAAPKLLKELGAKVISIGVKPNGLNINEKCGSTYPSKIKTAVKKHRAKIGIAFDGDADRVIMCDEKGKIIDGDQIIAMLARRWKSKKILKGGVIGTLMSNYGLEKFLRNEKIRFSRSKVGDRYVKEKMKKLNYNLGGEQSGHII

SEQ ID NO: 156673 - protein, 293 aa, Unknown
  Bacterial polypetide isolated from the Sargasso Sea
MKNKYFGTDGIRGTVNKGNITGEKFFKFGLASGTFFKNQKKTKQIAVIAKDTRLSGYTLEPALVSGLVSGGMHVFTLGPLPTNGLAMLTKSMKANMGIMITASHNPYYDNGLKLFGPDGMKLSDRIEKKIEKLIDAKNTKQLTNPKQLGRVKRLEDGNDKYIKILKNNFPKNFHLKGTKIVLDCANGAGYKSAPKLLKELGAKVIPIGVKPNGLNINDKCGSTYPSKIRSAVKKFKAHIGISFDGDADRIIMCDENGRIIDGDQIIAMLARRWKAKKILKGGVVGTLSQIMVR

SEQ ID NO: 156674 - protein, 281 aa, Unknown
  Bacterial polypetide isolated from the Sargasso Sea
EILKKNFPNQFNLRGLKIAIDCANGAAYKVGPKLLRSLGAEVYEIGTSPNGFNINEKCGSTFPNKIKNLTKKNRAHIGISLDGDADRIIVCDEKGNIIDGDKIIAMLAQRWKKKKILKGGVVGTLMSNYGLEKFFKKNKIKFLRSNVGDRYVKDLMQKNKFNLGGEQSGHIILGKFATTGDGMLVALEILFSMRKGKKASELFKNFIPTPQLLENIEVKDKSIIKSVKCKKAIKIANNLVRGKGRMLVRKSGTEPKIRIMCESENKILLKKCINIVKKSIN

SEQ ID NO: 156675 - protein, 256 aa, Unknown
  Bacterial polypetide isolated from the Sargasso Sea
MITASHNPYYDNGLKLFGPDGLKLSDKIEKKIESLIDKKIDYKLSAPKYLGRVKRLENGNEEYVKILKKNFPKNFSLKGSKIVIDCANGAGYKSGPYLLKSLGAKVISLGVKPNGLNINKKCGSTFPKKIQSAVKKHKANIGISLDGDADRIIMCDEKGKIIDGDQIIAALARRWKNKKMLRGGVIGTSMSNYGLEKFFNKNKIKFFRTNVGDRYVKEKMQEKKFNLGGEQSGHIILGKFATTGDGLLVALEFYFL

SEQ ID NO: 156676 - protein, 287 aa, Unknown
  Bacterial polypetide isolated from the Sargasso Sea
GTDKYIEILKKNFPSSFSLKKLRIAIDCANGAAYKAGPKLLRSLGAIVYETGTVPNGLNINYNCGSTYPNKIKNLTKKTKADIGISLDGDADRIIICDEKSNVIDGDKIIAMLAERWKRKKILKGGVVGTLMSNYGLENFFKINKIKFLRSNVGDRYVKEMMKKNKFNLGGEQSGHIILGKFATTGDGLLVALEVLFSMRKGKKASELFNNFKPTPQLLENINVEDKSIIDTPKCRKAIRFANKIIKSNGRMLVRSSGTESKIRIMCETENKVLLNKCVNIVKRSII

SEQ ID NO: 156677 - protein, 296 aa, Unknown
  Bacterial polypetide isolated from the Sargasso Sea
TAIIAKDTRLSGYTLEPALVSGLASAGMHVYTLGPLPTNGLAMLTKKMRANMGIMITASHNPYHDNGLKLFGPDGLKLSDKIERKIEKLIDSKIKKNLSQNETLGRVKRLENANEEYIKILKKNFPKNFSLKGIRIAIDCANGAGYKSGPKLLRSLGAKVHEIGTSPNGFNINNKCGSTFPNNIKNFVKKNKVNLGISLDGDADRIIVCDETGKIIDGDQIIATLAKRWKRKKILKGGVVGTLMSNYGLQNFFTNNKIKFIRANVGDRYVKEKMQKFKFNLGGEQSGHIILGKFAT

SEQ ID NO: 156678 - protein, 223 aa, Unknown
  Bacterial polypetide isolated from the Sargasso Sea
DQHIPPKLNFAVKKFKANVGISFDGDADRIIMCDESGKIVDGDQIIAMLAKRWKSKGILKGGVVGTQMSNYGLEKFLKKEKIRFIRSKVGDRYVKEKMKKLNYNLGGEQSGHIILGKFATTGDGLLVAMEVLFSLRKGKKASKLLNVFKPLPQVLENVTVKNKNIISTTKCKNAIKKANKIMRQKGRILVRKSGTEPKIRIMAESYDKNLILKCIKIIKSSIK

SEQ ID NO: 156679 - protein, 268 aa, Unknown
  Bacterial polypetide isolated from the Sargasso Sea
MSKRYFGTDGIRGTVNKKKINGDMFFKFGLAAGTYFRNLKKKKQTAIIAKDTRLSGYTLEPAIVSGLASAGMHVYTLGPLPTNGLAMLTKKMNANLGIMITASHNPFYDNGLKLFGPDGLKLSDKIEKKIEKLIDTKISKHLTSPSVLGRVKRLEDANDNYINILKTNFPKNFSLKGIKIAIDCANGAGYKSGPKIFKSLGATVYSIGNNPNGLNINLNCGSTFPNKIKSFMNNKKVNLGISLDGDADRIIICDEKGKIVDGDQIIAM

SEQ ID NO: 156680 - protein, 205 aa, Unknown
  Bacterial polypetide isolated from the Sargasso Sea
YKCGSTHPNKIKYHTKKNKSHIGISLDGDADRIIICDEKGKIIDGDKIIAMLAERWKKKKILKGGVVGTLMSNYGLQKFFAKKKIKFLRSKVGDRYVKEVMQKSKFNLGGEQSGHIILGKFATTGDGLLVALEILFSMRKGKKASEIFKNFIPTPQLLENVEVKDKSIIHSLRCKNAVKKANSLMKGKGRMLVRKSGTEPVIRIM

SEQ ID NO: 156681 - protein, 252 aa, Unknown
  Bacterial polypetide isolated from the Sargasso Sea
RTFPRGLRLDGLKVVVDCANGAAYKVAPEVLWELGAEVVPVGVDPDGFNINRGCGSTDTDYMQAQVMAHGADIGLALDGDADRLIVCDESGSLIDGDQIMALIAANWAEAGHLAGGGVVATVMSNLGFEKYLDGRGIQLLRTQVGDRYVVEEMRKGGYNLGGEQSGHIVLGDYGTTGDGLVAALQVLAGLVADGGKASDVCRRFDPYPQQLTSVPVSDGRPLEDPRVKKAIQDGEARLADAGRLLIRPSGTE

SEQ ID NO: 156682 - protein, 248 aa, Unknown
  Bacterial polypetide isolated from the Sargasso Sea
NVIAINNNPDGLNINKNCGAVDVKSLSENVIREKADIGFAFDGDGDRLIVVDEKGQEVDGDKIIGLLCKSYVKPKKKSNKHDVIITVMSNMGLENYLTNKLKLNIKRTPVGDINVINQMKKSKSMIGGEQSGHIILSEHANTGDGILAALKITEILISNKNKASKLFDLYDDFAQEKINLRYKTKNTKLLKILDKLKNDKLYNNKKIRSIIRLSGTEPLVRILVEGQEITEVKKKSLEIKRLVRPYLG

SEQ ID NO: 156683 - protein, 256 aa, Unknown
  Bacterial polypetide isolated from the Sargasso Sea
MTKKYFGTDGIRGAINSKNINGDMFFKFGLASGTYFKSQKKRKQTAIIAKDTRLSGYTLEPALVSGLASSGMHVYTLGPLPTNGLAMLTKAMKANMGIMITASHNPHHDNGLKLFGPDGMKLSDKIEKKIESLIDKKIKKNLSKPEKLGRVKRLETGTKDYIKILKKNFTKEFNLRGLRIVIDCANGAGYKAGPELLRSLGAKVIAIGINPNGLNINKNCGSTFPEKIRSMVKKYKADIGISLDGDADRIIMCDEK

SEQ ID NO: 156684 - protein, 291 aa, Unknown
  Bacterial polypetide isolated from the Sargasso Sea
QRKKKQTAIIAKDTRLSGYTLEPALVSGLTSAGMHVFTLGPLPTNGLAMLTKKMKANMGIMITASHNPFYDNGLKLFGPDGLKLSDRFEKKIEKLIDSKILKNLSEPKNLGRVKRLEDANERYIKILKSNFPRGFDLKGMKIAIDCANGAAYKSGPILLKSLGAKVYEFGTSPNGFNINEKCGSTFPKKIKYMVKKNKAHLGISLDGDADRIIISDEKGNIIDGDKIIAMLATRWKRKKILKGGVIGTLMSNYGLQNYLKNKKIKFIRAKVGDRYVKEKMQLNRFNLGGEQ

SEQ ID NO: 156685 - protein, 296 aa, Unknown
  Bacterial polypetide isolated from the Sargasso Sea
MSKKYFGTDGIRGKVNQGNINGQMFFKFGLAAGTYFKNIKKTKQTAIIAKDTRLSGYTLEPALVSGLASAGMHVYTMGPLPTNGLAMLTKRMKANMGIMITASHNPYFDNGLKLFGPDGLKLSDKIEKKIEKLIDTKITNNLSKPNILGRVKRLENANDKYIKILKSNFPKNFRLKGIKIAIDCANGAGYKSGPKLLKSLGAKVYNFATSPNGLNINKNCGSTFPKKIKSIVKKHKVNLGIALDGDADRVILCDEKGNIVDGDQIIAMLADRWKRKKILRGGVIGTLMSNYGLQNY

SEQ ID NO: 156686 - protein, 255 aa, Unknown
  Bacterial polypetide isolated from the Sargasso Sea
LFWELGHNIIAINNNPDGLNINKNCGAVDVKSLSQNVIKEKADIGFAFDGDGDRLIVVDEKGKEVDGDKIIGLLCKSYVKPKKKSNQHDVVITVMSNMGLENYLTNKLKLKIKRTSVGDINVINQMKKSKSMIGGEQSGHIILSEHSNTGDGILAALKITEILISNKNKASKLFDLYNDFAQEKINLSYKTKNTKLLKILGKLKNDKLFNNKEIRSLVRLSGTEPLVRILVEGQEITEVKKKSLEIKKLVRPYLG

SEQ ID NO: 156687 - protein, 208 aa, Unknown
  Bacterial polypetide isolated from the Sargasso Sea
GMKIAIDCANGAAYKVGPHLLRSLGAVVYEIGTSPNGFNINEKCGSTFPNKIRYLTKKNRAHIGISLDGDADRIILCDEKGNIIDGDKIIAMLAERWKRKKILKGGVVGTLMSNYGLEKFFRKNKIKFLRSKVGDRYVKELMQKNKFNLGGEQSGHIILGKFATTGDGLLVALEVLFSLRKGKKASELFKNFKPTPQLLENIEVKNKS

SEQ ID NO: 156688 - protein, 257 aa, Unknown
  Bacterial polypetide isolated from the Sargasso Sea
GAAYKVGPLLLRSLGAVVYEIGTNPNGFNINDKCGSTFPNKIKYYTKKNKSHIGISLDGDADRIIICDEKGKIVDGDKIIAMLAERWKRKKILKGGVIGTLMSNYGLQKYFSRNNIKFVRSRVGDRYVKEAMQKYKYNLGGEQSGHIILGKFATTGDGLLVALEILFSMRKGKKASELFENFIPTPQLLKNVNVKDKSIIDSLKCKNAIKKANNLLKGKGRMLVRKSGTEPVIRIMCETEDQNILLKCVNIVKKSII

SEQ ID NO: 156689 - protein, 295 aa, Unknown
  Bacterial polypetide isolated from the Sargasso Sea
LTSAGMHVLTFGPLPTNGLAMLTKKMRANMGIMITASHNPHYDNGLKLFGPDGLKLSDKIEKKIEKLIDSKINDKLSNPKILGRVKRLEDGSEKYIEILKKNFPKQFNLRGLKISIDCANGAAYKIGPQLLRSLGATVYEIGTSPNGFNINEKCGSTFPNKIRYLTKKNKAQIGISLDGDADRIILCDEKGNIIDGDKIIAMLAERWKRKKILKGGVVGTLMSNYGLEKFFKKNKIKFLRSKVGDRYVKELMKKNKFNLGGEQSGHIILGKFATTGDGLLVALEILFSMRKGKKA

SEQ ID NO: 156690 - protein, 277 aa, Unknown
  Bacterial polypetide isolated from the Sargasso Sea
KNFSEDFNLRGLRIVIDCANGAGYKAGPELLKSLGAKVFAIGVKPNGLNINKDCGSVYPNNIKVAVKKYKAHIGISLDGDADRVIMCDEKSNIIDGDQIVAALATRWKNKKMLKGGVVGTLMSNYGLEKYFKNNNIKFIRANVGDRYVKEKMQKYKFNLGGEQSGHIILGKFATTGDGLLVALEALFALRKGKKASVFFSKFKKIPQILKNIEIKDKKIINKSNIKKSIKIAKKLIKGHGRILVRKSGTESKIRVMGESENLDLLTKCINIIVREIK

SEQ ID NO: 156691 - protein, 293 aa, Unknown
  Bacterial polypetide isolated from the Sargasso Sea
PDGMKLSDKIEKKIESLIDKKIINYLSNPEKLGRVKRLETGTKNYLKILKKNFIKEFNLRGLRIVIDCANGAGYKAGPELLKSLGAKVIAIGVNPNGLNINNNCGSTYPNKIKFAVKKHKAHLGISLDGDADRIIMCDETGSIIDGDQIIAALAARWKDKKMLKGGVVGTLMSNYGLEKFFKSKKIKFIRANVGDRYVKEKMKKNNFNLGGEQSGHIILGKFATTGDGLLVALEVLFAIRKERKASNFFNKFKKTPQILKSIEVKDKSIIKKSEVKKSIKAAEKLMKGQGRIL

SEQ ID NO: 156692 - protein, 218 aa, Unknown
  Bacterial polypetide isolated from the Sargasso Sea
DKIKYLVKKHKAHLGISLDGDGDRIIVSDENGNIIDGDQIIAMLATRWKRKKILKGGVIGTLMSNYGLQNYLKSQKIKFIRAKVGDRYVKEKMQNNNFNLGGEQSGHIILGKFATTGDGLLVALEILFSMRKGKKASDIFNTFKATPQILENVKVKDKSIINSQKCKIAISKSEKLIKNHGRMLVRKSGTEPKIRIMGESNNISLLKKCINIVKKSIN

SEQ ID NO: 156693 - protein, 258 aa, Unknown
  Bacterial polypetide isolated from the Sargasso Sea
MKNKYFGTDGIRGTVNQGNITGEKFFKFGLASGTYFKNQKKSKQIAIIAKDTRLSGYTLEPALVSGLVSGGMHVFTLGPLPTNGLAMLTKSMKANMGIMITASHNPYYDNGLKLFGPDGMKLSDKIEKKIEKLIDAKNTKQLTNPNLLGRVKRLEDGNDRYINILKNNFPSNFHLKGTKIVLDCANGACYKAAPKLLKELGAKVISIGVNPNGLNINEKCGSTYPSKIKAAVRKNKANVGIAFDGDADRVIMCDEKGK

SEQ ID NO: 156694 - protein, 262 aa, Unknown
  Bacterial polypetide isolated from the Sargasso Sea
KIENLIDSKTFHHLSRPKTLGRVKRLEDGNDRYLKIIRKNFPKKFSLKGIRIVLDCANGAGYKAAPRILTDLGAKVFPFGIKPNGLNINYKCGSTNPEVIKKNVKKYKADLGIALDGDADRVIMCDEKSQIIDGDQIIAMIAKRWNRKKILKGGVVGTLMSNFGLEKFFYNQKISFLRAKVGDRYVKELMKKNKFNLGGEQSGHIILGNFATTGDGLLVALECLFALRKGKSANEIFKVYKPVPQKLLNIKVKNKKILKTSK

SEQ ID NO: 156695 - protein, 267 aa, Unknown
  Bacterial polypetide isolated from the Sargasso Sea
MFGPNGMKLSDKIEKKIESLIDKKISKSLSHSEKLGRVKRLETGTKSYIKILKKNFTKEFNLRGLRIVIDCANGAGYKAGPELLKSLGAKVIAIGIKPNGLNINKKCGSTFPKNIRSAVKKYKAHIGISLDGDADRIIMCDEKSNIIDGDQIIAALATRWKNKKMLKGGVVGTLMSNYGLEKYFKSIGIKFLRANVGDRYVKEKMQKYKFNLGGEQSGHIILGKFATTGDGLLVALEALFALRKGKKASEFFEQFKKTPQLLENIEV

SEQ ID NO: 156696 - protein, 226 aa, Unknown
  Bacterial polypetide isolated from the Sargasso Sea
STNPQRAAEAVVSHGADVGICLDGDADRIILLDSDGNIADGDQIMGVIASRWSEDGVLTGSGIATTVMSNLGLERFLSQRGISMERTQVGDRYVVERMRKFGFNLGGEQSGHIILSDFATTGDGLIAGLQFLAEIIRSERGSKELARVFEPVPQLLKNASYQAGSDPLAKPNVIKAIKAAELKLKNNGRLLIRKSGTEPLIRVMAECEDEEKMTRAVDSVVAEITA

SEQ ID NO: 156697 - protein, 167 aa, Unknown
  Bacterial polypetide isolated from the Sargasso Sea
GGGVVATVMSNFGFERFLSKIGLVLKRTPVGDRYVVEEMRRLNFNLGGEQSGHIVMTDYMTTGDGLVAALQCLEIIVSSQMPASESLDKFEPYPQVTRNIKYEGDVDFLEKSSIKKMIVDSEKKLGKNGRLLLRKSGTEPLIRIMAEHHDEKLIHEVIETISEKVRK

SEQ ID NO: 156698 - protein, 225 aa, Unknown
  Bacterial polypetide isolated from the Sargasso Sea
KTQSLKEEVKSNNADLGIAFDGDGDRLVIIDENGDQVNGDHLLGMIALSLKKKNLLKNENIVSTIMANKSLENYLKSIDLKLIRTKVGDRYVIEKMLDIGSNFGGEPSGHLIINDFSSTGDAIVSSLQVLSLMIEENRPISNLTNLFPLTSQKNYEFKTENINNISNSFLEELSNKMNEKIGDEGRVIIRKSGTEPLIRVMVETDTKNIGETLIDEIKLSLNHST

SEQ ID NO: 156699 - protein, 216 aa, Unknown
  Bacterial polypetide isolated from the Sargasso Sea
NSSAVKKFKAHVGISFDGDADRIIMCDEKGKIIDGDQIIAMLARRWKLKKILKGGVIGTLMSNFGLEIFLKKEKIKFFRSKVGDRYVKEKMKKLNFNLGGEQSGHIILGKFATTGDGLLVALEVLFSLRKGKKASKLLNVFKPLPQILENVVVKDKNIINKPNCKKAIKKAIKLMSYNGRLLVRKSGTEPKIRIMGESYDRNLILKCVKIIKRSII

SEQ ID NO: 156700 - protein, 308 aa, Unknown
  Bacterial polypetide isolated from the Sargasso Sea
DGLKLSDKIEKEIEKLIDSKINKSLAKPEILGRVKRLEDANERYISILKKNFPKNFSLKGISIAIDCANGAGYKSGPKLFKSLGAKVYDIGTQPNGLNINNKCGSTYPNKIKSIVKKYKVDLGISLDGDADRIILSDEKGVIVDGDQIIAMIAKRWKRKKILKGGVVGTLMSNYGLEKFFKEQKIKFIRANVGDRYVKEKMKKLKFNLGGEQSGHIILGNFATTGDGLLVALEVLFSMRKGKKASELFNIFKVTPQVLENIIVKDKSIIDKNKCKKAIKFASKLIKDQGRMLVRKSGTEPKIRIMGES

SEQ ID NO: 156701 - protein, 184 aa, Unknown
  Bacterial polypetide isolated from the Sargasso Sea
VDGDQIIAMLARRWKSKRILKGGVIGTLMSNYGLEKFLKNEKIRFSRSKVGDRYVKEKMKKFNYNLGGEQSGHIILGKFATTGDGLLVALEVLFSLRKGKKASQLLNVFKPLPQILENVSVKDKNIIGKSKCKNAIRKANKLMGQKGRILVRKSGTEPKIRIMAESYDKNLILRCIKIIKRSIK

SEQ ID NO: 156702 - protein, 243 aa, Unknown
  Bacterial polypetide isolated from the Sargasso Sea
RGSIDNEVNPESVLKLGHAAGRHFKKRGINTLVIGKDTRISGYMLESALQAGIISSGVNVRLVGPMPTPAISYLVSTFKGHAGVVISASHNSFEDNGIKFFDENGEKLSIENEREIEKFAEEAYEFVHPENLGKAARISDAKGRYIEFCKNTLSDDISFSGLTLVIDSANGAAYEVAPKVFKELGAEVYSIADSPNGLNINKDCGSTNIDFLKDEVLNKNADFGIALDGDGDRLIIIDSNGQE

SEQ ID NO: 156703 - protein, 295 aa, Unknown
  Bacterial polypetide isolated from the Sargasso Sea
DGIRGEVGKYPVTADFMLKLGWAAGRVFASAEGHTHVLIGKDTRVSGYMFESALEAGLVAAGARVTLLGPMPTPAVAMLTRSQKASAGIVISASHNAYTDNGIKFFDAEGRKLSDDLEVEIERMLSEPMDTVPSAQLGKAARMVDAPGRYVEFCKNTFPEALSLRGLRLVLDCAHGATYQVAPQVFTELGATLVVIGAEPDGYNINRDVGSTSPAALQARVLSEQADLGIAFDGDGDRVQCVAADGTVVDGDELLYVIANDRVRRGRPPEGVVGTLMSNLGLEQALAAKGIELVR

SEQ ID NO: 156704 - protein, 303 aa, Unknown
  Bacterial polypetide isolated from the Sargasso Sea
MTRKLFGTDGVRGTANREPITAETALKLAMAAGSYFTPVSGKQRPLAVIGKDTRLSGYMLESAMVAGFTAVGMDVVLVGPMVTPGIAMLTRSLRADLGVMLSASHNPYHDNGIKFFGPDGFKLSDEIELSLENIITSIDDSVRVSPMNLGRARRLDDAAGRYIEMAKGTFPKGLRLDGLKLVVDCANGAAYKLAPKVFFELGADIVPLGVEPDGFNINRDCGAIAPASLIESVKMHKADAGIALDGDADRLILVDETGSVVDGDQILAALAAAWLKTGELKGDGIVTTSDVKSWTRSVPQSKG

SEQ ID NO: 156705 - protein, 299 aa, Unknown
  Bacterial polypetide isolated from the Sargasso Sea
SEKLGRVKRLETGTKNYIKILKKNFTKEFNLRGLRIVIDCANGAGYKAGPELLKSLGAKVIAIGVKPNGLNINKKCGSTFPRNIRSAVKKYKAHIGISLDGDADRIIMCDEKSNIIDGDQIIAALATRWKNKKMLKGGVVGTLMSNYGLEKYFKSIGIKFLRANVGDRYVKEKMQKYNFNLGGEQSGHIILGKFATTGDGLLVALEALFALRKGKKASEFFEQFKKTPQLLENIEVKDKNIINKPEIKKIIKNADKLIKGEGRILVRKSGTESKIRVMGESENKALLNKCVNMITKKIK

SEQ ID NO: 156706 - protein, 239 aa, Unknown
  Bacterial polypetide isolated from the Sargasso Sea
LAIGIKPNGLNINKKCGSTFPRNIRSAVKKYKAHIGISLDGDADRIIMCDEKSNIIDGDQIIAALATRWKNKKMLKGGVVGTLMSNYGLEKYFKSIGIKFLRANVGDRYVKEKMQKYNFNLGGEQSGHIILGKFATTGDGLLVALEALFALRKGKKASEFFDQFKKTPQLLENIEVKDKNIINKPEIKKIIKNADKLIKGNGRILVRKSGTESKIRVMGESENKALLYKCINMITKKIK

SEQ ID NO: 156707 - protein, 275 aa, Unknown
  Bacterial polypetide isolated from the Sargasso Sea
KLSDKIEKKIEKIIDSNISSKLTKPLNLGRVKRLEDANENYVNILKSNFPNNFSLKGLKIAIDCANGAAYKSAPKLLRSLGAKVFEVGTKPNGININYKCGSTHPEKIRSLTKKFKTDLGISLDGDADRIILTDEKANIVDGDKIIAVLAERWKRKKILRGGVIGTLMSNYGLEKFFKEKKIKFFRSNVGDRYVKELMQKKKFNLGGEQSGHIILGNFATTGDGLLVALEILFSLRKGKKASELFSIFKPTPQILENISVKDKAVISSKKCRLAI

SEQ ID NO: 156708 - protein, 259 aa, Unknown
  Bacterial polypetide isolated from the Sargasso Sea
IDSKVSKKLSNPKILGRVKRLENGPNKYLEILKTNFPKQFNLRGLRITIDCANGAAYKVGPQLFRSLGAAVHEIGTSPNGFNINKKCGSTFPNKIKYHTKKNKSHIGISLDGDADRIIVCDEKGNIIDGDKIIAMLATRWKRKKILKGGVVGTLMTNYGLQKYFFKNKIKFIRSQVGDRYVKEAMQKSKFNLGGEQSGHIILGKFATTGDGLLVALEILFSMRKGKKASEIFKNFIPTPQLLENIQVKNKLIINSLKCK

SEQ ID NO: 156709 - protein, 285 aa, Unknown
  Bacterial polypetide isolated from the Sargasso Sea
MTKKYFGTDGIRGRVNTKNINGEMFFKFGLAAGKYFTNLKKNKQTAIIAKDTRLSGYTLEPALVSGLASAGMHVFTLGPIPTNGLAMLTKSMKANMGIMITASHNPHFDNGLKLFGPDGLKLSDKIEKKIEILIDKKIDKKFTKTNNLGRVKRLENGVSEYIKILKKNFPSKFDIRGLKIVIDCANGAGYKAGPELLKSLGAKVISIGVNPNGLNINKNCGSTFPNKIRLAVKKYKAHLGISLDGDADRIIMCDENGKIVDGDQILAALATRWKYKNMLKRGVVG

SEQ ID NO: 156710 - protein, 230 aa, Unknown
  Bacterial polypetide isolated from the Sargasso Sea
MNINDKCGSTYPSKIKSLVKKYKVNLGISLDGDADRIILCDEKGKIIDGDQIIAMLANRWKKKGILKGGVVGTLMSNYGLQNYFNHKKIKFLRSNVGDRYVKEKMQKNKFNLGGEQSGHIILGKFATTGDGLLVALEVLFSMRKGKSASELFNIFKPTPQILENVVVKDKSLINSLKCKKAIRVASSLIKNQGRMLVRKSGTEPKIRIMGESANKELISKCIKIVKRSIK

SEQ ID NO: 156711 - protein, 264 aa, Unknown
  Bacterial polypetide isolated from the Sargasso Sea
NEKYIKILKKNFPKNFSLRGIKIAIDCANGAAYKSGPKLFKSLGAKVYEIGTSPNGLNINDKCGSTFPNKIKSFVKKYRVNLGISLDGDADRIILCDEKGNIIDGDQIIAMLATRWKRKKILRGGVIGTLMSNYGLQNYLSEQKIRFIRANVGDRYVKEKMQKNKYNLGGEQSGHIILGKFATTGDGLLVALEVLFSMRKGRKASELFKIFKNTPQILENVVVNDKSIINSTKCRRAINQANKLIKDKERMLVRKSGTEPKIRI

SEQ ID NO: 156712 - protein, 299 aa, Unknown
  Bacterial polypetide isolated from the Sargasso Sea
LRLEDSSGRYSEYLKSTLDKKINFRKFKIVLDCANGATYQVAPNLFWELGHEVISINSNPDGTNINKNCGAVEVSGLKRTVLKKRADIGFAFDGDGDRLIVVDEKGNEVNGDKIIALFAKNFIGLKNKLENNKVITTTMSNLGFEKYLQEELNISLVRTDVGDINVINAMQKNKSLLGGEQSGHIILSEYSNTGDGILAALKIIEIMSKKNDKTSKIFNLYNEFPQKKINIKYKKVNKNIRKKIISLSLNKSNNTLFYRSLIRFSGTEPLIRILVEGTNKKEVSKIAKKFEDKVRSILV

SEQ ID NO: 156713 - protein, 231 aa, Unknown
  Bacterial polypetide isolated from the Sargasso Sea
TNPKLLGRVKRLEDGNDKYIKILKNNFPSSFNLKGTKIVLDCANGASYKAAPKLLKDLGAKVISIGTKPDGFNINEKCGSTYPSKIKTAVKKFKAHVGISFDGDADRIIMCDEKGKTVNGDQIIAMLARRWKTKKILKGGVVGTLMSNYGLEKFLKFQNIKFFRSKVGDRYVKEKMKKLGFNLGGEQSGHIILGKFATTGDGLLVALEVLFSLRKGKKASELLNVFKPLPQ

SEQ ID NO: 156714 - protein, 295 aa, Unknown
  Bacterial polypetide isolated from the Sargasso Sea
VPLPTPGVAMLTKSMRADLGIMITASHNKFTDNGLKIFDRNGNKLSDEIELEIERLMGIRLEEHLIEPEKIGRAKRLDDANGRYIEFLKNTFPSKKRLEGLKVVIDCANGASYLSAPIVFWELGAEVIQIGVKPDGLNINKECGSTDTKLLSKKVKENKADIGLALDGDGDRLIICDENGEVIDGDQILGLLALQMKENGMLQNDEVVGTLMTNVGLERKLGDNSIGLIRAPVGDRYVKEEMLKKELNLGGEQSGHIILKNFTSSGDGIVVALQVLSILSEKGIKASKLLNIFKP

SEQ ID NO: 156715 - protein, 227 aa, Unknown
  Bacterial polypetide isolated from the Sargasso Sea
NKKCGSTYPSKLKFAVKKYKANVGISFDGDADRIIMCDENGKIIDGDQIIAMLARRWKSKKILKGGVIGTLMSNFGLEKFLKNEKIRFYRSKVGDRYVKEKMKKYNFNLGGEQSGHIILGKFATTGDGLLVALEVLFSLRKGIKASKLLSVFTPVPQVLENVTVKDKNVINLSKTKNSIKVATKLLGSKGRILVRKSGTEPKIRIMVESYDKHLIVKCINIIKRSIN

SEQ ID NO: 156716 - protein, 149 aa, Unknown
  Bacterial polypetide isolated from the Sargasso Sea
MKRKYFGTDGIRGRVGAFPITPEFCLRLSNAVGRVFTVDGRKPKVLIGKDTRISGYMLESVLQSGLISAGADVSLLGPMPTPAIAYLTRTLRADAAIVISASHNPYYDNGIKFFNAQGGKLDDETELAIEAAMDVPLYCEGSESLAKHR

SEQ ID NO: 156717 - protein, 252 aa, Unknown
  Bacterial polypetide isolated from the Sargasso Sea
WLGLLTKEMRANMGITITASHNPYYDNGLKLFGPDGLKLSDKIEKRIEKLIDSKIVKNLSKPQKLGRVKRLENGNEKYIKILKKNFPKKFSLKGLKIAIDCANGAGYKSGPKLFKSLGAKVITIGTKPDGLNINLNCGSTFPKKIQKFTNKYRADIGISLDGDADRIILCDEKGKIIDGDQIIAMLAERWKNKKILKGGVVGTLMSNYGLQKYFKSKKIKFYRSKVGDRHVKDKMQKLKFNLGGEQSGHIIS

SEQ ID NO: 156718 - protein, 279 aa, Unknown
  Bacterial polypetide isolated from the Sargasso Sea
MHQGRYSEFLKSTLIKTSSKRKLKIVLDCANGATYNIAPNLFWELGHNITAINNNPDGLNINKNCGAVDVKSLSQNVIKENADIGFAFDGDGDRLIVVDEKGNEVDGDKIIGLLCKSYIKPKNKSNQHDVIITVMSNMGLEKYLTNKLKLKIKRTSVGDINVINQMKKSKSMIGGEQSGHIILSEHSNTGDGILAALKITEILISNKNKASKIFDLYNDFAQSKINLTYKTKSTKLLKILDKLKNNKLYNNKKIRSLVRLSGTEPLVRILVEGQEVTEV

SEQ ID NO: 156719 - protein, 254 aa, Unknown
  Bacterial polypetide isolated from the Sargasso Sea
MSKKYFGTDGIRGKVNQEKINGEMFFKFGLAAGTYFKNQKKSKQIAIIAKDTRLSGYTLEPALVSGLASTGVHVYTFGPLPTNGLAMLTKKMKANMGIMITASHNPYYDNGLKLFGPDGLKLSDKIEKKIEKLIDSRINDKLSKPKILGRVKRLENGSEKYTEILKSNFPSQFNLRGLKIAIDCANGAAYKVGPKLLRSLGAVVYEVGTAPNGLNINEKCGSTFPNKIRYLTKKTKAHIGISLDGDADRIIICD

SEQ ID NO: 156720 - protein, 279 aa, Unknown
  Bacterial polypetide isolated from the Sargasso Sea
LTKEMKANMGIMITASHNPHYDNGLKLFGPDGMKLSDKIEKKIESLIDKNISKNLSKPEKLGRVKRLETGTKKYIKILKKNFTKEFNLRGLRIVIDCANGAGYKVGPELLKSLGAKVIAIGVNPNGLNINKNCGSTFPSKIRSAVKKYKAHIGISLDGDADRIIMCDEKSNVIDGDQIIAALATRWKNKKMLRGGVVGTLMSNYGLEKFFKSKGIKFIRANVGDRYVKEKMQKYKFNLGGEQSGHIILGKFATTGDGLLVALEALFALRKGKKASEFFD

SEQ ID NO: 156721 - protein, 279 aa, Unknown
  Bacterial polypetide isolated from the Sargasso Sea
TSSKKKLKIVLDCANGATYNIAPNLFWELGHNIIAINNNPDGLNINKNCGAVDVKSLSQHVIKEKADIGFAFDGDGDRLIVVDEEGKEVDGDKIIALLCKSYVKPKKKPNQHDVIITVMSNMGLEKYLTNKLKLKIKRTSVGDINVINQMKKSKSMIGGEQSGHIILSEHSNTGDGILAALKITEILISNKNKASKLFDLYNDFAQEKINLIYKTKNTKLLKILGKLKNDKLYNNRNIRSLVRLSGTEPLVRILVEGQEISEVKKKSLEIKELVRPYLG

SEQ ID NO: 156722 - protein, 284 aa, Unknown
  Bacterial polypetide isolated from the Sargasso Sea
RVKSSFPSGMRLDGMKVVIDCANGAGYRAAPEVLWELGADVIPIGANPNGLNINKNCGSTNPQIAAEAVVSRGADVGICLDGDADRIILIDSDGNTADGDQIMGVIASRWSEDGLLAGAGIATTVMSNLGLERFLNQRGISMERTQVGDRYVVEHMRKSGFNLGGEQSGHIILSDFSTTGDGLIAGLQFLAEIIRSERSSKELARVFEPVPQLLKNASYQAGSDPLAKPSVIKAIKAAESKLKNNGRLLIRKSGTEPLIRVMAESEDEEAMSVAVDSVVAEITA

SEQ ID NO: 156723 - protein, 297 aa, Unknown
  Bacterial polypetide isolated from the Sargasso Sea
AFNGVWMFSLFGPIPTPAVSMLTKSMRADLGIMITASHNQYQDNGLKIFDRLGNKLSDETELEIENLMESKLEESLAKPENIGRAQRLEDANGRYIEYLKNTFPKTQRLDGLKIVVDCANGASYVSAPLILWELGAEVIKIGTQPNGININDKCGSTNTDLLAKTVLEENADIGIALDGDGDRLAIVDEKGNVINGDQILALLALHLSKKNLLQKNKVVGTSMANIGLENLLNENNIELVRANVGDRYVKEKMIHEGLNLGGEQSGHIIMRDYTSSGDGIIVALQVLAIITQKEKQA

SEQ ID NO: 156724 - protein, 265 aa, Unknown
  Bacterial polypetide isolated from the Sargasso Sea
LVSGLTSAGMHVFTFGPLPTNGLAMLTKKMRANMGIMITASHNPFYDNGLKLFGPDGLKLSDKIEKKIEKLIDSKISKKLSNPEILGRVKRLENGSNKYLEILKTNFPKQFNLRGLRITIDCANGAAYKVGPKLFRSLGAIVHEIGTSPNGFNINKKCGSTFPNKIKYHTKKNKSHIGVSLDGDADRIIICDEKGNIIDGDKIIAMLATRWKRKKILKGGVVGTLMSNYGLQKYFSKNKIKFLRSKVGDRYVKEVMQKSKFNLGG

SEQ ID NO: 156725 - protein, 143 aa, Unknown
  Bacterial polypetide isolated from the Sargasso Sea
KIKFIRANVGDRYVKESMKKNKCNLGGEQSGHIILGNFATTGDGILVALEVLYSMRKGKKASELLNNFNQIPQKLVNINVKDKLIINSKSCKKSIKHAKKILKNRGRILVRPSGTEPKIRIMCETNDKKLMTKCINLIKQSIN

SEQ ID NO: 156726 - protein, 269 aa, Unknown
  Bacterial polypetide isolated from the Sargasso Sea
LRGTKIVLDCANGACYKAAPKLLKELGAKVIPIGVKPDGFNINEKCGSTCPSKIRLAVKKFKAHVGISFDGDADRIIMCDEKGKIIDGDQIIAMLARRWKSKKILKGGVIGTLMSNYGLEKFLKNEKIKFFRSKVGDRYVKEKMRKLKFNLGGEQSGHIILGKFATTGDGLLVALEVLFSLRKGKKASKLLNVFKPLPQILENVIVKDKNVINKTKCKKAIKKANKLMGYNGRLLIRKSGTEPKIRIMGESYDRSLVLKCIKIIKRSIK

SEQ ID NO: 156727 - protein, 283 aa, Unknown
  Bacterial polypetide isolated from the Sargasso Sea
KSTAPGLDLNGMKIVVDTANGAAYHIAPDVFEELGATVVPLANQPDGFNINRDCGSTHPEALQRKVVEEKADLGVALDGDADRLLMVDHAGNLVDGDQLLFVVARDRKENGAEMDGVVGTLMSNFGLELALQAEGIEFVRAKVGDRYVMEQLDKRGWNIGGESSGHLVCLDCTTTGDGTVSALQVLAALSRRKQGLAESVADVSMLPQKMINVRGPNRDGFMENGDVQAAMADVEDRLAGNGRILLRPSGTEPLVRVMIEGKDVDRVESLCRELAEVVEKAIN

SEQ ID NO: 156728 - protein, 292 aa, Unknown
  Bacterial polypetide isolated from the Sargasso Sea
KRLEDGNDRYIKILKRNFPKNFKLTGTKIVLDCANGAGYIAAPRLLKELGAKVISIGAKPNGFNINDRCGSTYPFKIQSAVKKFKANVGISFDGDADRIIMCDENGKIIDGDQIIAMIAQRWKSKKIIRGGVIGTLMSNYGLENFLKNKKIKFFRSKVGDRYVKEKMKKLNFNLGGEQSGHIILGKFATTGDGLMVALEVLFSLRKGKKASELLNVFKPLPQILENINVRDKNVINKSECKKAIKKSNKLMNGYGRLLVRRSGTEPKIRIMGESYDKNLILKCIKIIKKSIK

SEQ ID NO: 156729 - protein, 239 aa, Unknown
  Bacterial polypetide isolated from the Sargasso Sea
YEIGTSPNGLNINQQCGSTFPNQIRNLTKKNKADIGISLDGDADRIIICDEKCNIINGDKIIAALAARWKRKKILKGGVIGTLMSNYGLEKFLIKNKIKFLRSKVGDRYVKELMQKNRFNLGGEQSGHIILGKFATTGDGLLVALEILFSMRKGKKSSELFKNFQSTPQSLENIEVKDKSIINSIKCRQAIKFANNLINGKGRMLVRKSGTESKIRIMCESENKFLLSKCINIVKKSIK

SEQ ID NO: 156730 - protein, 281 aa, Unknown
  Bacterial polypetide isolated from the Sargasso Sea
MESSVQKKYFGTDGIRGQVNEFPMTAENALKIGMAAGQFFKNNTKKVHRVVVGKDTRLSGYMFESALTAGLTSMGMNVLLLGPVPTPAVGILTPSMRADLGIMISASHNSHEDNGIKFFGPDGFKLSDEAEQNIEELIGKELGNVELVDIGRAKRIEDGLFRYVERVKSSFPSGMRLDGMKVVIDCANGAGYRAAPEVLWELGADVIPIGINPNGLNINKNCGSTNPQRAAEAVVSHGADVGICLDGDADRIILIDSDGNIADGDQIMGVIASRWSKDGVL

SEQ ID NO: 156731 - protein, 230 aa, Unknown
  Bacterial polypetide isolated from the Sargasso Sea
HINDKCGSTFPNKIKFLVKKNKVNLGISLDGDADRIILCDEKGKIIDGDQIIAMLANRWKRKKILKGGVVGTLMSNYGLENYFREQKTKFLRADVGDRYVKESMQKNRFNLGGEQSGHIILGKFATTGDGLLVALEVLFSMRKGKKASDLLNVFKPMPQILENILVRDKNIINKLKCKKAIKKANELMGRNGRLLVRKSGTEPKIRIMGESHNKNLIIKCIKIIKQSIKY

SEQ ID NO: 156732 - protein, 273 aa, Unknown
  Bacterial polypetide isolated from the Sargasso Sea
QKNFSLKGLKIAIDCANGAGYKSGPQVLKSLGAKVYNIGTSPNGLNINLNCGSTFPNKIRYFSNKKKVDIGISLDGDADRIIICDEKGKIIDGDQIIAMIALRWKKKQILKGGVVGTLMSNYGLEKLFKEKKIKFIRAKVGDRYVKEAMKNNKCNLGGEQSGHIILGNFATTGDGILVALEVLYSMRKGNKASELFNNFKQIPQKLVNIHVKDKLIINSQKCKKTILEVKKLLKNKGRILVRPSGTEPKIRIMCESSDKKLMIKCINLVKRSI

SEQ ID NO: 156733 - protein, 220 aa, Unknown
  Bacterial polypetide isolated from the Sargasso Sea
FPNKIKYHTKKNKSHIGISLDGDADRIIICDEKGNIIDGDKIIAMLAIRWKRKKILKGGVVGTLMSNYGLQKYFFKNKIKFIRTKVGDRYVKEAMQKSKFNLGGEQSGHIILGKFATTGDGLLVALEILFSLRKGKKASEIFENFALTPQLLENVEVKDKSIINSLKCKNAIKKANSLIKGKGRMLVRKSGTEPVVRIMCETEDKNMLSKCVNIVKKSII

SEQ ID NO: 156734 - protein, 273 aa, Unknown
  Bacterial polypetide isolated from the Sargasso Sea
EEYIKILKKNFPKNFSLEGIRIAIDCANGAGYKSGPKLLRSLGAKVYEIGTSPNGFNINNKCGSTFPNNIKNFVKKYKVDLGISLDGDADRIIVCDETGKIIDGDQIIATLAKRWKRKKILKGGVVGTLMSNYGLQNFFTNNKISFVRANVGDRYVKEKMQKFKFNLGGEQSGHIILGKFATTGDGLLVALEILFSMRKGKKASELFNVFKPTPQVLENVTVKDKSILKSLKCKKAISKASKLMKNQGRMLVRKSGTEPKIRIMGESDNKKLL

SEQ ID NO: 156735 - protein, 178 aa, Unknown
  Bacterial polypetide isolated from the Sargasso Sea
MAVKKLKANLGISFDGDADRIIMCDERGKIIDGDQIIAMLARRWKSKRILKGGVVGTLMSNYGLEKFLKNQKIKFSRSKVGDRYVKEKMKRLNFNLGGEQSGHIILGKFATTGDGLLVALEVLFSLRKGKKASDLLDVFKPVPQILENVIVKNKNIINKFKCKNAVKKANKLMGQKGR

SEQ ID NO: 156736 - protein, 267 aa, Unknown
  Bacterial polypetide isolated from the Sargasso Sea
MSRKYFGTDGVRGKVGEFPITPEFAMKLGWAAGRVLSQRGTKKVLIGKDTRISGYLLETALEAGLVAAGVDVRLLGPMPTPAVSYLTRTFRAEAGIVISASHNPYYDNGIKFFSADGTKLPDEVELAIEEAMEQPMVCESSERLGKAMRIDDAAGRYIEFCKSHMPNHLSLNGLKVVLDCAHGATYHIAPNVFRELGAEVQAIGVSPNGLNINDHCGATHTDLLQQTVVETGADLGIAYDGDGDRVMMVDHTGRVIDGDEIVYIIAR

SEQ ID NO: 156737 - protein, 289 aa, Unknown
  Bacterial polypetide isolated from the Sargasso Sea
MHIFTLGPLPTNGLAMLTRSMKANMGIMITASHNPYYDNGLKLFGPDGMKLSDQIEKKIEKLIDAKNNKQLTDPRLLGRVKRLEDGNDKYIEILKKNFPNNFNLRGTKIVLDCANGAGYKSAPKLLRELGAKVISIGVKPNGFNINQKCGSTYPSKIQTVVKKHKAHAGISFDGDADRIIMCDENGKIIDGDQIIAMLAKRWKIKKILKGGVVGTLMSNYGLESFLKKEKIRFYRSKVGDRYVKEKMQKFNFNLGGEQSGHIILGKFATTGDGLMVALEVLFSFKKRKK

SEQ ID NO: 156738 - protein, 186 aa, Unknown
  Bacterial polypetide isolated from the Sargasso Sea
KVVDGDQIIAMLAQRWKSKRILRGGVIGTLMSNHGLENFLKNKKIRFFRSKVGDRYVKEKMKRFNFNLGGEQSGHIILGKFATTGDGLMVALEVLFSLRKGKKASKLLNVFKPLPQILENVFVKDKNIINKNKCKNAIKKANKLMGYDGRILVRKSGTEPKIRIMAESHNKRLILKCIKMIKRSIK

SEQ ID NO: 156739 - protein, 311 aa, Unknown
  Bacterial polypetide isolated from the Sargasso Sea
NPYYDNGLKLFGPDGLKLSDKIEKKIEKLIDSKITKNLSKPIELGRVKRLEDANDNYIKILKQNFPSSFSLKGIKIALDCANGAGYKAGPDLFKSLGAKVFKTGTSPNGLNINLKSGSTYPSKICKMTKKNKAHIGIALDGDADRIIVCDEKGRIIDGDKILAMLGERWKRKKILKGGVIGTLMSNYGLENFFKNNGIKFLRSDVGDRYVKEKMKKNKFNLGGEQSGHIILGKFATTGDGLLVALEILFSLRKRKKASELFNKFKPTPQILENIEVKDKSIINTPKCKKAINEANKIIKNKGRILVRKSGT

SEQ ID NO: 156740 - protein, 244 aa, Unknown
  Bacterial polypetide isolated from the Sargasso Sea
KMSANMGIMITASHNPYYDNGLKLFGPNGLKLSDKIEKKIEKLIDSKIIKNLSEPNTLGRVKRLEDANDRYIKILKNNFPKNFHLKRMRIAIDCANGAGYKSGPLLLRSLGAKVYQFGTSPNGFNINDKCGSTFPKKIKYLVKKHKAHIGISLDGDADRIIVSDENGNVIDGDQIIAMLATRWKRKKILKGGVIGTLMSNYGLQNYLKSQKIKFIRAKVGDRYVKEKMQNYNFNLGGEQSGHII

SEQ ID NO: 156741 - protein, 277 aa, Unknown
  Bacterial polypetide isolated from the Sargasso Sea
AKDTRLSGYTLEPALVSGLASAGMHVYTLGPLPTNGLAMLTKKMRANMGIMITASHNPFYDNGLKLFGPDGLKLSDKIEKKIEKLIDSKIVKNLSDPKTLGRVKRLEDANDRYIKILKSNFPKNFNLKGMKIAIDCANGAGYKSGPKLLRSLGAKVFEYGTSPNGFNINYKCGSTFPNKIRFLVKKNKTHIGISLDGDADRIIVSDEKGNIIDGDQIIAMLATRWKRKKILKGGVIGTLMSNYGLQKYFKSQKIKFIRADVGDRYVKGKNEKKKNLI

SEQ ID NO: 156742 - protein, 272 aa, Unknown
  Bacterial polypetide isolated from the Sargasso Sea
ESLIEKKIISNLSKPEKLGRVKRLETGTKNYIKILKKNFNKEFNLRGLRIVIDCANGAGYKAGPELLKSLGAKVIAIGVKPNGLNINKNCGSTFPEKIKLAVKKYKAHIGISLDGDADRIIMCDEKSNIIDGDQIIAALATRWKNKKMLKGGVVGTLMSNYGLEKYLKEKGIKFIRANVGDRYVKEKMQKNKFNLGGEQSGHIILGKFATTGDGLLVALESLFALRKGKKASEFFKKFKKIPQILKNIDVRDKNIINRTEIKRSIQLATKLI

SEQ ID NO: 156743 - protein, 201 aa, Unknown
  Bacterial polypetide isolated from the Sargasso Sea
LDGDADRIIMCDEKSNIIDGDQIIAALATRWKKKKMLKGGVVGTLMSNYGLEKYLKKEGIKFIRANVGDRYVKEKMQKNKFNLGGEQSGHIILGKFATTGDGLLVALETLFALRKGKKASEFFEKFKKTPQILKNIEVKDKNIINKLEIKNSIKLATKLINGNGRILVRKSGTESKIRIMGESENKNLLSKCVNIVSKKIK

SEQ ID NO: 156744 - protein, 260 aa, Unknown
  Bacterial polypetide isolated from the Sargasso Sea
VGQPPITPDFVLRLAHAVGRVLRRTEERPTVLIGKDTRISGYMLESALESGFNSAGVDVVLLGPLPTPGVAYLTRAQRASLGVVISASHNAYPDNGIKFFSAQGTKLSDAWELAVEAALAEPPVWVDSASLGKARRLDDAAGRYIEFCKSTFPQDLTLKGLKIVVDAAHGAAYQVAPKVFHELGAEVLSIGCAPDGLNINHEVGATHPDALVRAVRANRADYGIALDGDADRLQIVDATGRLYNGDELLYLMAADRMGRD

SEQ ID NO: 156745 - protein, 240 aa, Unknown
  Bacterial polypetide isolated from the Sargasso Sea
VISIGVKPNGLNINEKCGSTYPSKIKTAVKKYKAKIGIAFDGDADRVIMCDEKGKIIDGDQIIAMLARRWKSKKILKGGVIGTLMSNYGLEKFLKNEKIRFSRSKVGDRYVKEKMKKLNYNLGGEQSGHIILGKFATTGDGLLVALEVLFSLRKGKKASQLLKVFKPLPQTLVNIVVNDKNVINKSTCKKAIKKANKLMGQKGRVLVRKSGTEPKIRIMAESYDKSLVLKCIKTIKTSIK

SEQ ID NO: 156746 - protein, 307 aa, Unknown
  Bacterial polypetide isolated from the Sargasso Sea
YAWFIHWGPLPTNALAMLTKEMKANMGIMITASHNPHFDNGLKLFGPDGMKLSDKIEKKIESLIDKKISKNLSHSEKLGRVKRLETGTRNYIKILKKNFTKEFNLRGLRIVIDCANGAGYKAGPELLKSLGAKVIAIGVKPNGLNINKKCGSTFPRKIRYAVKKYKAHIGISLDGDADRIIMCDEKSNIIDGDQIIAALATRWKNKKMLKGGVVGTLMSNYGLEKYLKSKGIKFLRANVGDRYVKEKMKKYSFNLGGEQSGHIILGKFATTGDGLLVALEALFALRKGKKASEFFEQFKKTPQLLKN

SEQ ID NO: 156747 - protein, 277 aa, Unknown
  Bacterial polypetide isolated from the Sargasso Sea
VSGLTSAGMHVYTLGPLPTNGLAMLTKTMKANMGIMITASHNPHYDNGLKLFGPDGLKLSDKIEKKIECLIDQNIVKNLSEPEKLGRVKRLETGTRDYIQILKKNFSEEFNLRGLRIVIDCANGAGYKAGPELLKSLGAKVIAIGVEPNGMNINKHCGSVYPQNIKRAVKKYKAHIGISLDGDADRVIMCDEKSNIIDGDQIIAALASRWKNKKMLRGGVVGTLMSNYGLEKYFKTLNINFIRANVGDRYVKEKMQMYFIKKNISLNILSYTKFLLD

SEQ ID NO: 156748 - protein, 303 aa, Unknown
  Bacterial polypetide isolated from the Sargasso Sea
QNLSKPEKLGRVKRLETGTNDYIKILKKNFTKEFNLRGLRIVIDCANGAGYKAGPELLKSLGAKVIAIGVNPNGLNINKNCGSTFPGKIKSAVKKYKAHIGISLDGDADRIIMCDEKSNIIDGDQIIAALATRWKNKKMLKGGVVGTLMSNYGLEKYFKKKRIKFIRANVGDRYVKEVMQKNKFNLGGEQSGHIILGKFATTGDGLLVALESLFALRKGKRASEFFEKFKKTPQLLKNIEVKNKNIINKPEIKKSIRLASKLIKGSGRILVRKSGTESKIRIMGESENRRLLVKCVNIIVEKN

SEQ ID NO: 156749 - protein, 244 aa, Unknown
  Bacterial polypetide isolated from the Sargasso Sea
LKNLSNPKLLGRVKRLEYGSEKYIEILKTNFPKQFNLRGLKIAIDCANGAAYKVGPQLLRSLGAEVYEIGTSPNGFNINNKCGSTFPNKIKYYTKKTKSHIGISLDGDADRIIICDEKGKIIDGDKIIATIAERWKRKKILKGGVVGTLMSNYGLQKYFAENKIKFIRSKVGDRYVKDLMQKSKFNLGGEQSGHIILGNFATTGDGLLVALEILFSMRKGKKASEIFRNFTPTPQILENIKVKD

SEQ ID NO: 156750 - protein, 216 aa, Unknown
  Bacterial polypetide isolated from the Sargasso Sea
KSLVKKYNVDLGISLDGDADRIILCDEKGTIVDGDQIIAMLANRWKRKKILKGGVIGTLMSNYGLQNYFKEKKINFLRANVGDRYVKEKMKKKRYNLGGEQSGHIILGKFATTGDGLLVALEVLFSMRKGKKASELLNVFKPMPQILENVIVKDKNIINEIACKKAIKKANKIMAKNGRLLVRKSGTEPKIRIMGEAHNKKLILKCIKIIKQSIKY

SEQ ID NO: 156751 - protein, 257 aa, Unknown
  Bacterial polypetide isolated from the Sargasso Sea
MSEDRRFGTDGIRGPVDSTMNPLFVTKLGWAAGTVLLEEGISRVLIGKDTRISGYMLESALQAGFISSGMDVILLGPLPTPGVSYLANSNKQAGVVISASHNLFEDNGIKFFNKDGQKFSSELEKRIETKLTQEIKPVKSLNLGKTTRMNDAQGRYIEFCKSNFKDLDLNGLSVLLDCAHGATYSVAPKVFEELGAKVHTIGTEPDGININQNCGTTNPEYIREETLKGAYDLGISFDGDGDRILLVSKAGRVLDGD

SEQ ID NO: 156752 - protein, 245 aa, Unknown
  Bacterial polypetide isolated from the Sargasso Sea
MGAKVYNVGTSPNGLNINQNCGSTYPKKIKSLVKKHNVNLGISLDGDADRIILCDEKGKIIDGDQIIAMLASRWKRKKILRGGVIGTLMSNYGLQNYFKEKKIKFIRANVGDRYVKERMQKNKFNLGGEQSGHIILGKFATTGDGLLVALEVLFSMRKGKKASELLNVFKPMPQILENIIVRDKNIINELSCKKAIKKANKIMGPKGRLLVRKSGTEPKIRIMGESYNKNLILRCIKIIKRSIKY

SEQ ID NO: 156753 - protein, 255 aa, Unknown
  Bacterial polypetide isolated from the Sargasso Sea
SYKAGPQLFKSLGAKVFKSGTSPNGLNINLKSGSTYPKKICQMTRKNKAHIGIALDGDADRIIVCDEKGKIIDGDKILAMLGERWKRKKILKGGVIGTLMSNYGLEKFFKKNKIKFFRSNVGDRYVKEKMKKKNFNLGGEQSGHIILGRFATTGDGLLVALEILFSLRKRKKASELFNKFNPTPQILENVEVKDKSIIYSPKCKKAIYEANKIMKNKGRILVRKSGTEPKIRIMSESEDSSLNKLCVNIIKKSIQ

SEQ ID NO: 156754 - protein, 270 aa, Unknown
  Bacterial polypetide isolated from the Sargasso Sea
MLKKYFGTDGIRGMVNDEKINGEMFFKFGLAAGTYFKNLKKSKQIAVIAKDTRLSGYTLEPALVSGLASAGMHVFTLGPLPTNGLAMLTKKMKANLGIMITASHNPYYDNGLKLFGPDGLKLSDKIEKKIEKLIDSKITKNLTQPKNLGRVKRLEEASNEYIKILKKNFPNDFNLKGISIAIDCANGAGYKTAPVLFKSLGAKVYDVGVSPNGLNINDKCGSTFPKKIKALVSKKKVDLGISLDGDADRIIICDENAKVIDGDQIIAMLA

SEQ ID NO: 156755 - protein, 288 aa, Unknown
  Bacterial polypetide isolated from the Sargasso Sea
NPFYDNVLKLFGPDGMKLSDKIEKKIEKLIDTKITKQLSNPKFLGRVKRLEDGNDKYIKILKNNFPKNYHLKGTKIVLDCANGACYKAAPKLLRELGAKVISIGVKPNGLNINEKCGSTFPSKIKSAVKKFKANVGISFDGDADRIIMCDEKGKIIDGDQIIAMLARRWKSKKILKGGVVGTLMSNYGLERFLKNQKIKFSRSKVGDRYVKEKMKKLNYNLGGEQSGHIILGKFATTGDGLLVALEVLFSLRKGKKASSLLNVFKPLPQILENVVVKDKSVISSLKCK

SEQ ID NO: 156756 - protein, 316 aa, Unknown
  Bacterial polypetide isolated from the Sargasso Sea
MRANMGIMITASHNPYYDNGLKLFGPDGMKLSDKIEKKIEKLIDAKNTRQLTDPKLLGRVKRLEDGNDRYIKILKKNFPSNFHLKGTKIVLDCANGASYKAAPMLLKHLGAKVFPIGVKPNGFNINEKCGSTYPYKIRSAVKKYKANVGIAFDGDADRIIMCDEKGKIIDGDQIIAMLARRWKSKKILKGGVIGTLMSNYGLENFLKNMKIKFLRSKVGDRYVKEKMKKLNFNLGGEQSGHIILGKFATTGDGLLVALEVLFSLRKGKKASNLLNVFKPLPQILENIVVRDKNIINKIKCKKAINQANKIMGKNGR

SEQ ID NO: 156757 - protein, 279 aa, Unknown
  Bacterial polypetide isolated from the Sargasso Sea
SHNPFYDNGLKLFGPDGMKLSDSIEKKIEKIIDSKTSTHLTKPTELGRVKRLEDGNEQYLKILKSNFPKNFSLKGMKIVLDCANGAGYKAGPKLFKSLGAKVFVMGAKPNGLNINLNCGSTHPAKIQSAVKKYKANIGISLDGDGDRVIMCDEHGKMIDGDQIIAMLGQRWKRKKILKGGVIGTLMSNYGLNNFFKTENIKFLRSNVGDRYVKETMHKNKFNLGGEQSGHIILGKFATTGDGLLVALEVLFSLRKGHKASKVLRVFKPIPSKLVNIVVK

SEQ ID NO: 156758 - protein, 295 aa, Unknown
  Bacterial polypetide isolated from the Sargasso Sea
LLGPDGMKLSDQIEKKIEKLIDAQNTKQLTNPNLLGRVKRLEDGNDRYIEIIKKNFPNNFNLKGTKIVLDCANGAGYIAAPKLLKELGAKVFSIGVKPNGFNINDQCGSTCPSKIKLAVRKYKANVGISFDGDADRIIMCDENSKVIDGDQIIAMLARRWKSKKILKGGVIGTLMSNYGLEVFLRSEKIRFLRSKVGDRYVKEKMKKSNFNLGGEQSGHIILGKFATTGDGLMVALEVLFSLRKGKKASRLLNVFKPLPQILENVIVNDKNIINKDKCKKAIKKAYKFMNGHGRL

SEQ ID NO: 156759 - protein, 298 aa, Unknown
  Bacterial polypetide isolated from the Sargasso Sea
KAMRANMGIMITASHNPHNDNGLKLFGPDGMKLSDKIEKKIESLIDKKIVKNLSKPEKLGRVKRLETGTNDYIKILKKNFTKEFNLRGLRIVIDCANGAGYKAGPELLKSLGAKVIAIGVNPNGLNINKNCGSTFPEKIKSAVKKYKAHIGISLDGDADRVIMCDEKSNIIDGDQIIAALATRWKNKKMLKGGVVGTLMSNYGLEKYFKKKRIKFIRANVGDRYVKEVMQKNKFNLGGEQSGHIILGKFATTGDGLLVALESLFALRKGKRASEFFENFKKTPQLLKNIEVKDKNIIN

SEQ ID NO: 156760 - protein, 275 aa, Unknown
  Bacterial polypetide isolated from the Sargasso Sea
MAKKYFGTDGIRGAVNSKYINGDMFFKFGLASGTYFKSQKKRKQTAIIAKDTRLSGYTLEPALVSGLASAGMHVYTLGPLPTNALAMLTKEMKANMGIMITASHNPHFDNGLKLFGPDGMKLSDKIEKKIESLIDKKISKNLSRSEKLGRVKRLETGTKNYIKILKKNFTKEFNLRGLRIVIDCANGAGYKAGPELLKSLGAKVIAIGIKPNGLNINKKCGSTFPRNIRSAVKKYKAHIGISLDGDADRIIMCDEKSNIIDGDQIIAALATRWKN

SEQ ID NO: 156761 - protein, 289 aa, Unknown
  Bacterial polypetide isolated from the Sargasso Sea
LEDANENYIEILKQNFPPSFSLKGVKIALDCANGAGYKAGPQLFKSFGAKVFKTGTSPNGLNINFKCGSTYPNKICQMTKKRKAHIGIALDGDADRIIVCDEKGKIIDGDKILAMLGERWKRKKILKGGVIGTLMSNYGLEEFFRKNKIKFFRSDVGDRYVKEKMKKKKFNLGGEQSGHIILGKFATTGDGLLVALEILFSLRKRKKASELFNKFNPTPQILENVQVNDKSIIDSPKCKKAIAEVNKLIKNKGRILVRKSGTEPKIRIMCESEDSNLNKLCVNIIKKSI

SEQ ID NO: 156762 - protein, 224 aa, Unknown
  Bacterial polypetide isolated from the Sargasso Sea
MWVNFSRNIRSAVKKYKAHLGISLDGDADRIIMCDEKSNIIDGDQIIAALATRWKNKKMLKGGVVGTLMSNYGLEKYFKLIGIKFLRANVGDRYVKEKMQKYNFNLGGEQSGHIILGKFATTGDGLLVALEALFALRKGKKASEFFEQFKKTPQLLENIEVKDKNIINKPEIKKIIKNADKLIKGNGRILVRKSGTESKIRVMGESENKDLLYKCVNMIKKKIK

SEQ ID NO: 156763 - protein, 258 aa, Unknown
  Bacterial polypetide isolated from the Sargasso Sea
FPNSMRLDHLKIVLDCANGAAYKVAPMIFWELGADVIVIGDKPNGRNINQDCGSTKTKALRKKVKDENADLGIAFDGDGDRLAIIDENGDQVNGDHLLAMIALSLKKKNLLKNNKVVSTIMANLSLENYFDSIDLKLIRANVGDRYVIEEMLNSGSNFGGEPSGHLIINDFSTTGDAIISALQVLSLMIEENKSISNLTNLFPLISQKHYEHISDDKKDISNSHLENLSKEMEEKIGNEGRVIIRKSGTEPLIRVMIE

SEQ ID NO: 156764 - protein, 259 aa, Unknown
  Bacterial polypetide isolated from the Sargasso Sea
IAPHIFWELGHEVVCINDKPNGKNINFNCGAVNINELSKKVIKERADIGFAFDGDGDRLIIVNEKGEEIDGDKIIALFAKHLINLDNSKTQFPIITTVMSNFGLENYLLRDLKIKLKRSSVGDINVINEMQKHNSILGGEQSGHIILSEYSKTGDGILAALKVMEIISKLKKPVSSIFNLYNNFPQIKINIPYTKISKNCLQYIKNLNNKKIKDKNIRLLIRLSGTEPLIRILVEGKDLELVQAKAKRIEKDIRINLGK

SEQ ID NO: 156765 - protein, 252 aa, Unknown
  Bacterial polypetide isolated from the Sargasso Sea
MSKKYFGTDGIRGEVNQGNINGEMFFKFGLAAGTYFKNLKKTKQTAIIAKDTRLSGYTLEPALVSGLASAGMNVYTLGPLPTNGLAMLTKRMKANMGIMITASHNPYFDNGLKLFGPDGLKLSDKIEKKIEKLIDAKITKNLSKPNVLGRVKRLEDANDKYIQILKSNFPSNFKLKGIKIAIDCANGAGYKSGPKLLKSLGAKIYNFGISPNGLNINHNCGSTFPKNIRYLVKKHRVDLGIALDGDADRNYS

SEQ ID NO: 156766 - protein, 265 aa, Unknown
  Bacterial polypetide isolated from the Sargasso Sea
KIVLDCANGAGYKSAPKLLKELGATVFSIGIKPNGLNINEKCGSTHPSKIQSAVKKLKAHVGISFDGDADRIIMCDENGKIIDGDQIIAMLARRWKSKKILKGGVIGTLMSNYGLEKFLNKEKIRFLRSKVGDRYVKEKMKKLNFNLGGEQSGHIILGKFATTGDGLLVALEVLFSLRKVKKASKLLNVFKPVPQKLENLKVINKNVIESSKCKNAIRKASILMGIKGRVLVRKSGTEQKIRIMAESHDKRLISQCIKLIKKSIN

SEQ ID NO: 156767 - protein, 271 aa, Unknown
  Bacterial polypetide isolated from the Sargasso Sea
MSKKYFGTDGIIGKVNQENINGEMFFKFGLAAGTYFKNQKKSKQIAIIAKDTRLSGYTLEPALVSGLASAGVHVFTFGPLPTNGLAMLTKKMRANMGIMITASHNPYYDNGLKLFGPDGLKLSDKIEKKIEKIIDSKITDKLSNPKILGRVKRLEDGSEKYIEILKKNFPNQFNLRGLKIAIDCANGAAYKVGPKLLRSLGAEVYEIGTSPNGFNINEKCGSTFPNKIKNLTKKNRAHIGISLDGDADRIIVCDEKGNIIDGDKIIAMLAQ

SEQ ID NO: 156768 - protein, 315 aa, Unknown
  Bacterial polypetide isolated from the Sargasso Sea
LTDEKQTEINELMNRSDIMSLQDKNQIGAARRVDDALSRYIEFAKATFPNSMRLDHLKIVLDCANGAAYKVAPMIFWELGADVIVIGDKPNGRNINQDCGSTKTKALRKKVKDENADLGIAFDGDGDRLVVIDENGDQVNGDHLLAMIALSLKKKNSLKSNKIVSTIMANLSLENYLDSIDLKLIRANVGDRYVIEEMLKSGSNFGGEPSGHLIINDFSTTGDAIISSLQVLSLIIEENKPISNLANLFPIISQKHYEHISDDKKDISNSHLENLSKEMKEKIGNEGRVIIRKSGTEPLIRVMIETNNQNLSNEI

SEQ ID NO: 156769 - protein, 242 aa, Unknown
  Bacterial polypetide isolated from the Sargasso Sea
AKVIAIGVNPNGLNINKNCGSTFPGKIKSAVKKYKAHIGISLDGDADRIIMCDEKSNIIDGDQIIAALATRWKNKKMLKGGVVGTLMSNYGLEKYFKKKRIKFIRANVGDRYVKEAMQKNKFNLGGEQSGHIILGKFATTGDGLLVALESLFALRKGKRASEFFEKFKKTPQLLKNIEVKNRNVINKPEIKKSIMLASKLIKGSGRILVRKSGTESKIRIMGESENKRILIKCVNIILKKIK

SEQ ID NO: 156770 - protein, 281 aa, Unknown
  Bacterial polypetide isolated from the Sargasso Sea
MRNKYFGTDGIRGTVNKGNITGQKFFKFGLASGTYFKNQKKIKQIAIIAKDTRLSGYTLEPALVSGLVSGGMHVFTLGPLPTNGLAMLTKSMKANMGIMITASHNPYYDNGLKLFGPDGLKLSDKIEKKIEKLIDAKNTKQLTHPKSLGRVKRLEDGNDRYINILKKNFPKNFNLKGLKIVLDCAHGACYKAAPKLLKDLGAKVIAIGVKPNGLNINNKCGSTQPKKMKLAVKKYKAHLGISFDGDADRIIMSDENGKIVNGDQIIAMIAKRWKLKKILKG

SEQ ID NO: 156771 - protein, 215 aa, Unknown
  Bacterial polypetide isolated from the Sargasso Sea
KADIGFAFDGDGDRLIVVDEKGNEVDGDKIIGLLCKNYVKPKKKSSQHDVIITVMSNMGLEKYLRDKLKLKIKRVSVGDINVINQMKKSKSMIGGEQSGHIILSDHSNTGDGILAALKITEILISNKNKASKLFDLYNDFAQEKINLHYKKKTNKLLNILSKLKNNKSYNNKKIRSLVRISGTEPLVRILVEGQEKIEVKKKSYEIKKLLRPYLG

SEQ ID NO: 156772 - protein, 268 aa, Unknown
  Bacterial polypetide isolated from the Sargasso Sea
LETGTKDYLKILKKNFTKEFNLRGLTIVIDCANGAGYKAGPELLKSLGAKVITIGVKPNGLNINKKCGSTYPSKIKFAVKKNKAHLGISLDGDADRIIMCDEKGDIIDGDQIIAALAKRWKSKKMLKGGVVGTLMSNYGLEKFFKAEKIRFIRANVGDRYVKEKMQKNKFNLGGEQSGHIILGKFATTGDGLLVALEALFAIRKGKKASTFFNKFKKTPQILKNIEVKNRDIINYPDIKKSIKIAEKLIEGQGRILVRKSGTESKIRV

SEQ ID NO: 156773 - protein, 142 aa, Unknown
  Bacterial polypetide isolated from the Sargasso Sea
MKYFGTDGIRGRVGESPMTAEFALRLANASAQILAPDGGTVLIGKDTRISGYMFESALEAGFVSAGMDVKLLGPIPTPAIAYLVKKYNAELGIVISASHNSFVDNGIKFFNSKGTKLDDKTELQIENILNGTTFTKDSIDLG

SEQ ID NO: 156774 - protein, 291 aa, Unknown
  Bacterial polypetide isolated from the Sargasso Sea
IEEILQGEKFFKFGLAAGTYFKNQKKNKQIAIIAKDTRLSGYTLEPALVSGLVSGGMHVFTLGPLPTNGLAMLTKSMKANMGIMITASHNPYYDNGLKLFGPDGMKLSDKIEKKIEKLIDAKSTKQLTNPKLLGRVKRLEDGNDKYIKILKKNFPKNFNLKGTKIVLDCANGASYIAAPKMLKSLGARIISIGVNPNGININDKCGSTYPSKIQSAVKKYKAHVGISFDGDADRIIMCDEKGKIVDGDQIIAMLARRWKLKKILKGGVVGTLMSNYGLESFLNKEKIRFYR

SEQ ID NO: 156775 - protein, 253 aa, Unknown
  Bacterial polypetide isolated from the Sargasso Sea
KLLPKLLKSLGAKVISIGVKPNGLNINERCGSTHPSKIQSAVRKHRAQVGIAFDGDADRIIMCDEKSRIINGDQIIAMLARRWKIKKILRGGVIGTLMSNYGLENFLKKHKIKFFRSKVGDRYVKEKMKKLGFNLGGEQSGHIILGKFATTGDGLMVALEVLFSLRKGKKASELLNVFVPLPQILENITVKDKSIINKSKCKKAIKKANGLMKNYGRLLIRKSGTEPKIRIMGESHNKKLILKCIKIIKRSIK

SEQ ID NO: 156776 - protein, 289 aa, Unknown
  Bacterial polypetide isolated from the Sargasso Sea
DGMKLSDKIEKKIESLIDKKIIKNLSKPEKLGRVKRLETGTNDYIKILKKNFTKEFNLRGLRIVIDCANGAGYKAGPELLKSLGAKVIAIGVNPNGLNINKNCGSTFPEKIKSAVKKHKAHIGISLDGDADRIIMCDEKSNIVDGDQIIAALATRWKNKKMLKGGVVGTLMSNYGLEKYFKKNGIKFLRANVGDRYVKELMQKNKFNLGGEQSGHIILGKFATTGDGLLVALESLYAIRKGQKASEFFEKFKKIPQLLKNIDVKDKSIINKPEIKKSIKLASKLIKDKG

SEQ ID NO: 156777 - protein, 281 aa, Unknown
  Bacterial polypetide isolated from the Sargasso Sea
MAKKYFGTDGIRGAINSKYINGDMFFKFGLASGTYFKSQKKRKQIAIIAKDTRLSGYTLEPALVSGLASAGMHVYTLGPLPTNGLAMLTREMKANMGIMITASHNPHYDNGLKLFGPDGMKLSDKIEKKIESLIDKKISKSLSKPEKLGRVKRLETGTKKYIKILKKNFTKEFNLRGLKIVIDCANGAGYKAGPELLKSLGAKVIAIGVKPNGLNINKKCGSTFPRKIRSAVKKYKAHIGISLDGDADRIIMCDEKSNIIDGDQIIAALAHRWKNKKMLKG

SEQ ID NO: 156778 - protein, 204 aa, Unknown
  Bacterial polypetide isolated from the Sargasso Sea
GISFDGDADRIIMCDEKGKIIDGDQIIAMLAKRWKEKKILKGGVVGTLMSNYGLEKFLKNHKIKFLRSKVGDRYVKEKMKKFNYNLGGEQSGHIILGKFATTGDGLLVALEVLFSLRKKKKASELLNVFKPLPQILENVTVKDKGIIDKKKCKIALKKANKIMKKKGRILVRKSGTEPKIRIMAESDSKSIILKCIKLIKQSIK

SEQ ID NO: 156779 - protein, 237 aa, Unknown
  Bacterial polypetide isolated from the Sargasso Sea
EILGRVKRLEDGNDKYMNILKKNFPDTFSLKGMKIAIDCANGAGYKSGPKLFRSLGAKVYESGISPNGLNINNKCGSTFPKKIKFLTKKHKADLGISLDGDADRVILCDEKGNIIDGDQIIAMLAKRWKRKKILKGGVIGTLMSNYGLEKFFKQENIRFIRANVGDRYVKEMMQKYKFNLGGEQSGHIILGKFATTGDGLLVALEVLFSMRKGKKASELFKKFKITPQILENIVVKR

SEQ ID NO: 156780 - protein, 313 aa, Unknown
  Bacterial polypetide isolated from the Sargasso Sea
KIFGTDGIEGKVNQNKINGEMFFKFGLAAGTYFKNQKKFKQTAIIAKDTRLSGYSLEPALVSGLASAGMHVYTLGPLPTNGLAMLTKKMKANLGIMITASHNPYYDNGLKLFGPDGLKLSDKIEKKIEKLIDIKIVKNLSEPKILGRVKRLEDANDRYIKILKKNFPSNFILKGIKIVIDCANGAAYKSGPKLFRSLGAKVFEYGASPNGLNINQNCGSTFPNKIKRLVKKHNAHIGISLDGDADRIIISDEKGNIIDGDQIIAMLATRWKRKKILKGGVIGTLMSNYGLQNYFKSKKIKFIRADVGDRYVKE

SEQ ID NO: 156781 - protein, 230 aa, Unknown
  Bacterial polypetide isolated from the Sargasso Sea
LNINKKCGSTFPQKIKNLVQKHKVNLGISLDGDADRIILCDEKGNIVDGDQIIAMLGSRWKRKKILKGGVIGTLMSNYGLEKYFKNSKIKFIRSKVGDRYVKEQMQKNNFNLGGEQSGHIILGKFATTGDGLLVALEVLFSMRKGKKASELFNNFKPTPQILANVIVKNKSIINSKKCKNAIKLASNLIKNKGRMLVRKSGTEPIIRIMGESENKVLLSKCINIVKRSIK

SEQ ID NO: 156782 - protein, 315 aa, Unknown
  Bacterial polypetide isolated from the Sargasso Sea
GLTSAGMHVFTFGPLPTNGLAMLTKEMRANMGIMITASHNPYYDNGLKLFGPDGLKLPDKIEKKIEKIIDSRISNKLSNPKLLGRVKRLEDGSKKYIEILKTNFPSRFKLKGLKIAIDCANGAAYKIGPQLLRSLGAVVYEIGTSPNGFNINDKCGSTYPNKIKYLTKKNKAHIGISLDGDADRIILCDEKGKIIDGDKIIAMLAERWKRKKILKGGVVGTLMSNYGLEKFFSKNKIKFLRSNVGDRYVKELMQKKKFNLGGEQSGHIILGKFATTGDGLLVALEVLFSMRKGKKASELFKNFVPTPQLLLNVEV

SEQ ID NO: 156783 - protein, 239 aa, Unknown
  Bacterial polypetide isolated from the Sargasso Sea
KQLTNPKLLGRVKRLEDGNDKYIKILKNNFPSNFHLRGTKIILDCANGASYKAAPKLLKELGAKVISIGVKPNGLNINEKCGSTYPSKIKTAVRKHKAKIGIAFDGDADRVIMCDEKGKIIDGDQIIAMLARRWKSKKILKGGVIGTLMSNYGLEKFLRNEKIRFSRSKVGDRYVKEKMKKLNYNLGGEQSGHIILGKFATTGDGLLVALEVLFSLRKGKKASQLLKVFKPLPQTLENV

SEQ ID NO: 156784 - protein, 286 aa, Unknown
  Bacterial polypetide isolated from the Sargasso Sea
IDAKNTTQLTNPKLLGRVKRLENGNDKYIEILRKNFPKNFHLRGTKIVLDCANGAGYKAAPKLLKELGAKVISIGVKPNGFNINDKCGSMYPSKIRSAVRRFKAHVGISFDGDADRIIMCDEKGKIVDGDQIIAMLARRWKSKKILKGGVIGTLMSNYGLETFLKNEKIKFFRSKVGDRYVKEKMKKSNFNLGGEQSGHIILGKFATTGDGLMVALEVLFSLRKKKQASELLNVFKPLPQILENIVVKDKNVISRAKCKNAIKKANKLMGNKGRVLVRKSGTEPKI

SEQ ID NO: 156785 - protein, 280 aa, Unknown
  Bacterial polypetide isolated from the Sargasso Sea
LGRVKRLEDANENYINILKSNFPNNFSLKGLKIGIDCANGAAYKSAPKLLRSLGAKVFEVGTKPNGININFKCGSTYPEKIKSLTKKFKTDLGISLDGDADRIILTDEKANIVDGDKIIAVLAQRWKRKKILRGGVIGTLMSNYGLENFFKEKKIQFFRSNVGDRYVKELMQNKKFNLGGEQSGHIILGNFATTGDGLLVALEILFSLRKGKKASELFSIFRPTPQLLENISVKDKSIISSKKCKFAIKKAEKIIFGKGRLLIRKSGTESKIRIMWNRKT

SEQ ID NO: 156786 - protein, 277 aa, Unknown
  Bacterial polypetide isolated from the Sargasso Sea
VSGGMHVFTLGPLPTNGLAMLTKSMKANMGIMITASHNPYYDNGLKLFGPDGMKLSDQIEKKIEKLIDSKNTKQLTNPRLLGRVKRLEDGNERYIKILKKNFPSNFHLKGTKIVLDCANGASYKAAPKLLKELGAKVISIGVKPDGFNINEKCGSTYPLKIKSAVKKYRANVGISFDGDADRIIMCDEKGKIIDGDQIIAMLARRWKSKKILKGGVVGTQMSNWGLENFLKNQKINFVRSKVGDRYVKEKMKKINFNLGGEQSGHIILGKFATTGDG

SEQ ID NO: 156787 - protein, 259 aa, Unknown
  Bacterial polypetide isolated from the Sargasso Sea
MTKKYFGTDGIRGRVNQGNINGNMFFKFGLAVGTYFKNQKKSKQTAIIAKDTRLSGYTLEPALVSGLASAGMHVFTLGPLPTNGLAMLTKSMKANMGIMITASHNPYYDNGLKLFGPDGLKLSDKIEKKIESLIDKKIETQLSKPKILGRVKRLENGNEEYIKIIKKNFPKNFNLKGTKIVIDCANGAGYKSGPHLLKSLGAKVISIGVNPNGLNINEKCGSTFPKKIQLSVKKYKAHLGISLDGDADRIIMCDENGKL

SEQ ID NO: 156788 - protein, 223 aa, Unknown
  Bacterial polypetide isolated from the Sargasso Sea
GSTFPEKIKSVVRKYKAHIGISLDGDADRVIMCDENSNIIDGDQIIAALATRWKNKKMLKGGVVGTLMSNYGLEKYFKKTGIKFIRANVGDRYVKEVMHKNNFNLGGEQSGHIILGKFATTGDGLLVALESLFALRKGKRASEFFDKFKKTPQLLRNVEVKDKNVINKPEIKRSIKLASKLIKGYGRILVRKSGTESKIRIMGESENKNLLLECVNMILKKIR

SEQ ID NO: 156789 - protein, 158 aa, Unknown
  Bacterial polypetide isolated from the Sargasso Sea
LGFERYLEGIGVSLKRTGVGDRYVVEEMKSSGCNFGGEQSGHIIMSDYSTTGDGLISALQVLSIFSLANGKFSEIGRSFIPVPQKLVNIEYKEDNPLGSASLKSAISDAEKTLYGIGRVLVRKSGTEPILRVMVEADSQSLVDSILDNIVSAVDEKKR

SEQ ID NO: 156790 - protein, 258 aa, Unknown
  Bacterial polypetide isolated from the Sargasso Sea
MITASHNPFYDNGLKLFGPDGLKLSDNIEKKIEKLIDTKISKNLIKPNILGRVKRLENANENYINILKKNFPKDFSLKGLKIAIDCANGAGYKSGPNILKSLGAKVYSVGASPNGLNINLNCGSTFPNKIRSYSIRKKVDLGISLDGDADRIIICDEKGRIIDGDQIIAMIALRWKKKGILKGGVVGTLMSNYGLEKLFRKKKIKFIRTNVGDRYVKESMKKNKCNLGGEQSGHIILGNFATTGDGLLVALEILYSMR

SEQ ID NO: 156791 - protein, 471 aa, Unknown
  Bacterial polypetide isolated from the Sargasso Sea
MPSAPMAGEESLGVDITIERLLPVAAAAAAELAHSAPADLDSRTVVIGYDRRFLAPELAAAIAAAVRGVGLEPLLAQEPLPTPACSWVVVERRALGALVITASHNPPEWLGLKIKGHFGGSVEGDFTKRVERRLQAGGITVPEPGETECFDGWAEYLHGLRGAMDTNALRHGLQTMGLKVIVDPMHGSAAGGLPALLGDAVSEIRSQRDPLFGGHPPEPLAPYLGDLIAQVKASTAAGQPAVGIVFDGDGDRIAAIDEQGRYCSTQLLMPLLIDHLARARNLPGKVIKTVSGSDLMLRVAEDLGREVVEKPVGFKYIASEMLSGQVLVGGEESGGVGFGMHLPERDAAFAALMLLEALVEGGQPLGARLEALQTRCGGGSHYDRLDLRLAGMESRKRLEQQLADSPPASVAGVPVQEVIRTDGVKLRLGPSHWLMLRFSGTEPLLRIYCEAPNAERVVEVLAWARDLAEAA

SEQ ID NO: 156792 - protein, 484 aa, Unknown
  Bacterial polypetide isolated from the Sargasso Sea
MTADKLDKIKFGTDGWRGIIGFDFNLSNLSRVVVAACQELHYQYYKEVNSKKIIIGYDRRFMACEFAKQIVPFVRGCGFEPILSDSFVTTPSCSFYAKEVGCLGALVITASHNPYNWLGLKIKSFNGCSVDESFTSEVEKRLMLGNSIEKIDGVNQLVDIKKFHLDRIKSLFDIDYISKRLKKMKLRIFVDSMHGSAANCMAEIFASNDLEVISEIRKDADPFFGGKPPEPLLNYADDLKQILMKNSTNEVKTLGIIFDGDGDRIAAIDEKGRYSSTQDLLPYFISYLGEIKNNSYPVLKTVSGSDIIKNISESQNRDVFELPVGFKYIAEKMIKEKIFIGGEESGGVGFGDFMPERDALYAAMVLLNGIAEKSQYLYETLDEIQEDFGPSFYKRIDIKFPNQSEKNNVKEFIIDNIPENINNHKLKSISKIDGIKLRIDKNFWLLFRFSGTEPLLRLYCEAPKESYLIEVLEWGQEFINLAGK

SEQ ID NO: 156793 - protein, 317 aa, Unknown
  Bacterial polypetide isolated from the Sargasso Sea
MDKIIGPDGMKLSDKIEKKIESLIDKKIIKYLSKPEKLGRVKRLETGTKDYLKILKKNFIKKFNLRGLRIVIDCANGAGYKAGPELLKSLGAKVIAIGVNPNGLNINNNCGSTYPNKIKFAVKKHKAHLGISLDGDADRIIMCDETGSIIDGDQIIAALATRWKYKKMLKGGVVGTLMSNYGLEEFLKSKKIKFIRANVGDRYVKEKMKKNKFNLGGEQSGHIILGKFATTGDGLLVALEVLFAIRKERKASNFFNKFKKTPQILKSIEVKDKSIIKKTEVKKSIRAAEILMKGQGRILDEKIRNRVKNKNYGRERK

SEQ ID NO: 156794 - protein, 243 aa, Unknown
  Bacterial polypetide isolated from the Sargasso Sea
GAKVIAIGVNPNGLNINNNCGSTYPNKIKLAVKKYKAHIGISLDGDADRIIMCDELGNIIDGDQIIAALAERWKNKKMLKGGVVGTLMSNYGLENFFKSKKINFIRANVGDRYVKEKMQKKNFNLGGEQSGHIILGKFATTGDGLLVALESLFAIRKGRKASTFFNKFKKVPQILKNIEVKNKDIIKNSEVKKSIRIAEKLMKGQGRILVRKSGTESKIRVMGESQNKRLLNKCINTILKKIK

SEQ ID NO: 156795 - protein, 324 aa, Unknown
  Bacterial polypetide isolated from the Sargasso Sea
MKLSDKIEKKIEKLIDAKNTKQLTNPKLLGRVKRLEDGNERYIEIIKKNFPKNFHLRGTKIVLDCANGAGYIAAPKLLKNLGAKIIPIGTKPNGFNINAKCGSTYPLKMQIAVKKYKANAGISFDGDADRIIMCDENSKLIDGDQIIGMLAERWKEKKILKGGVVGTLMSNYGLEKFLKNKKIKFYRSNVGDRYVKEKMKKLNFNLGGEQSGHIILGKFATTGDGLMVALEILFSLRKGKKASNLLNVFKPFPQILENIIVKDKKIINTSKCKKAIKRANDLMNGYGRLLVRNSGTEPKIRIMGESINKSLILKCIKIVKKSIK

SEQ ID NO: 156796 - protein, 249 aa, Unknown
  Bacterial polypetide isolated from the Sargasso Sea
QLFRSLGATVHSIGISPNGFNINKKCGSTFPNKIKYHTKKNKSHIGVSLDGDADRIIICDEKGNIIDGDKIIAMLATRWKRKKILKGGVVGTLMSNYGLQKYFSKNKIKFLRSKVGDRYVKEVMQKSKFNLGGEQSGHIILGKFATTGDGLLVALEILFSMRKGKKASEIFENFTPTPQLLENVEVKDKSIINNLKCKNAIKKANSLVKGKGRMLVRKSGTEPVVRIMCETEDKTILSKCVNIVKKSII

SEQ ID NO: 156797 - protein, 316 aa, Unknown
  Bacterial polypetide isolated from the Sargasso Sea
KKIEGLIDRNISKNLSHSEKLGRVKRLETGTKKYIKILKKNFTNEFNLRGLRIVIDCANGAGYKAGPELLKSLGAKVIAIGVKPNGLNINKKCGSTFPRKIRSAVKKYKAHIGISLDGDADRIIMCDEKSNIIDGDQIIAALATRWKNKKMLKGGVVGTLMSNYGLEKYFKSKKIKFLRANVGDRYVKEKMQKYNFNLGGEQSGHIILGKFATTGDGLLVALEALFAIRKGKKASEFFKQFNKTPQLLENIEVKDKNIINKPEIKKIIKNAEKLIKSNGRILVRKSGTESKIRVMGESENKALLYKCVNMITKKIK

SEQ ID NO: 156798 - protein, 344 aa, Unknown
  Bacterial polypetide isolated from the Sargasso Sea
MVVKLFGTDGIRGKANVNPMTAEVALKVGMAAGAVFTSGARRHTVVIGKDTRLSGYMLEPALAAGFIGMGMDVIFVGPMPTPAVAMLVRSLRADLGVMISASHNSFEDNGIKLFGPSGYKLSDSAEAEIESLVEQQNTNKLATPNKLGRARRLEDAEGRYIEFAKNTFPKGLRLDGLKIVVDCANGAAYKVVPAALWELGSDVVALGISPNGLNINKACGSTNTELMRETVVNEGANLGIALDGDADRVILADEEGNIIDGDQILALIAKSWKSDNRLKGEGIVTTVMANLGLERFLTDLGLNVVRTRVGDRYVVEKMLCDGFNVGGEQSGHIILNDYNTTGDG

SEQ ID NO: 156799 - protein, 255 aa, Unknown
  Bacterial polypetide isolated from the Sargasso Sea
CYKAAPKLIRELGAKVISIGVNPDGFNINEKCGSTYPSKLRKTVKKHRANVGISFDGDADRIIMCDEKGKIIDGDQIIAMLARRWKMKKILKGGVIGTLMSNYGLENFLKREKIKFFRSKVGDRYVKEKMKKFNFNLGGEQSGHIILGKFATTGDGLLVALEVLFSLRKGKKASELLNVFKPLPQILENISVKDKSIINKLKCKRAIMKANALMGSEGRILVRKSGTEPKIRIMAESYNKKLISKCVNMIKKSIN

SEQ ID NO: 156800 - protein, 317 aa, Unknown
  Bacterial polypetide isolated from the Sargasso Sea
KKIEKLIDSNITKNLSKPNVLGRVKRLENANERYIKILKSNFPSNFSLKGIKIAIDCANGAGYKSGPKLLKSLGAKVYNVGTLPNGLNINQNCGSTFPRKIKFLSKKYKVDLGISLDGDADRVILCDEKGTIVDGDQIIAMLAKRWKRKKILRGGVVGTLMSNFGLQNYFREQKIKFLRANVGDRYVKEKMQKNNFNLGGEQSGHIILGKFATTGDGLLVALEVLFSMRKGKKASDLLNIFKPMPQILENIFVIDKNIINKLKCKKAIKKANKLMGQNGRLLIRKSGTESKIRVMGESHNKNLIIKCIKIIKRSIKY

SEQ ID NO: 156801 - protein, 232 aa, Unknown
  Bacterial polypetide isolated from the Sargasso Sea
NGLNINKKCGSTFPRNIRSAVKKYKAHIGISLDGDADRIIMCDEKSNIIDGDQIIAALATRWKNKKMLKGGVVGTLMSNYGLEKYFKSIGIKFLRANVGDRYVKEKMQKYNFNLGGEQSGHIILGKFATTGDGLLVALEALFALRKGKKASEFFEQFKKTPQLLENIEVKDKNIINKPEIKKIIKNADKLIKGKGRILVRKSGTESKIRVMGESENKALLYKCVNMITKKIK

SEQ ID NO: 156802 - protein, 397 aa, Unknown
  Bacterial polypetide isolated from the Sargasso Sea
IIAKDTRLSGYTLEPALVSGLVSGGMHVYTLGPLPTNGLAMLTKSMKANMGIMITASHNPYHDNGLKLFGPDGMKLSDKIEKKIEKLIDAKNTKQLTNPKLLGRVKRLEDGNDKYTKILKSNFPNNFHLKGTKIVLDCANGASYKAAPKLLKELGAKVISMGVKPNGLNINEKCGSTYPSKIKTAVKKHKATIGIAFDGDADRVIMCDEKGKIIDGDQIIAMLARRWKSKKILKGGVIGTLMSNYGLEKFLLNEKIRFSRSKVGDRYVKEKMKKLNYNLGGEQSGHIILGKFATTGDGLLVALEVLFSLRKGKKASRLLKVFKPLPQILENIDVNDKNVINKSKCKKAIKIANKLMGQNGRILVRKSGTEPKIRIMAESYDKSLILKCIKVIKSSIK

SEQ ID NO: 156803 - protein, 273 aa, Unknown
  Bacterial polypetide isolated from the Sargasso Sea
MTKKYFGTDGIRGKVNGNKINGDMFFKFGLAVGTYFNNKKKTKQMAVIAKDTRLSGYTLEPALVSGLTSAGMHVFTFGPLPTNGLAMLTKKMKANMGIMITASHNPFYDNGLKLFGPNGLKLSDKIEKKIEKLIDSKISKKLSNPQILGRVKRLEDGSNKYIEILKTNFPKQFNLRGLRITIDCANGAAYKVGPQLFRSLGAIVHEIGTSPNGFNINKKCGSTFPNKIKYHTKKNKSHIGVSLDGDADRIIICDERGNIIDGDKIIAMLATRW

SEQ ID NO: 156804 - protein, 204 aa, Unknown
  Bacterial polypetide isolated from the Sargasso Sea
MKQRKYFGTDGVRGLVGTAPINPEFAMKLGWAAGRVLSKGGTKKVIIGKDTRISGYMLETALEAGLIAAGIDVVLLGPMPTPAVAYLAQTFRAEAGIVISASHNPYYDNGIKFFNGQGLKLDDAVELEIEAMLDEQMTCVASDKLGKATRLASADGRYIEFCKSQFPQGLSLEGLKVVVDCANGATYHIAPSVMRELGADVITH

SEQ ID NO: 156805 - protein, 257 aa, Unknown
  Bacterial polypetide isolated from the Sargasso Sea
WSCIQVGPRLLRSLGATVYEIGTSPNGFNINKKCGSTFPNKIKNLTKKNRAHIGISLDGDADRIIVCDEKGNIIDGDKIIAMLAQRWKRKKILKGGVVGTLMSNYSLEKFFKKNKIKFLRSDVGDRYVKELMQKNKFNLGGEQSGHIILGKFATTGDGMLVALEILFSMRKGKKSSELFDNFIPTPQLLENIEVKDKSIIKSTKCKKAIKIAKNLVRDKGRMLVRKSGTEPKIRIMCESENKILLKKCINIVKKSIN

SEQ ID NO: 156806 - protein, 251 aa, Unknown
  Bacterial polypetide isolated from the Sargasso Sea
MKNKYFGTDGIRGTVNKGNITGEKFFKFGLASGTYFKNQKRTKQIAVIAKDTRLSGYTLEPALVSGLVSGGMHVFTLGPLPTNGLAMLTKSMKANMGIMITASHNPYYDNGLKLFGPDGMKLSDRIEKKIEKLIDAKNTKQLTNPKQLGRVKRLEDGNDRYIKILKKNFPKDFHLNGTKIVLDCANGAGYKSAPKLLEELGAKVISIGVKPNGLNINDKCGSTYPSKIRSAVKKFKAHIGISFDGDADRVI

SEQ ID NO: 156807 - protein, 434 aa, Unknown
  Bacterial polypetide isolated from the Sargasso Sea
MKKYFGTDGIRGIPNDTLSKDLISKISASVEQHINPKNIGVISDTRSSSDEILNWISIGFSSKVNIYNHGVLPSGSMPIILKKFNYDLGIIISASHNPAEYNGIKLIQENGSKLDDDVEISIEKNIDSLELPNQHAEIINLSDGHLEYLNFLDEVTDIDFSHFQILIDAANGSASTVIKELFDKKNANYRIINNQPDGLNINKDCGATVPENLQKNIEKGEIGASFDGDADRLIMVDENGDIVNGDLILTILSKYLSEVNQLTNNIVVSTVMSNYGFKQAIEKFNFDLIETPVGDKYVAEAMKKYDAALGGEQSGHIIISDLLPVGDGLVTLIYVLKAMQHFGVALSDFKREHLYEYPQKLTNLELENKLNDEELEYINQIALDMSIKKDLDGRYLIRNSGTEPLLRVLVEAKSNEAMEDFSNELITKINKYLN

SEQ ID NO: 156808 - protein, 434 aa, Unknown
  Bacterial polypetide isolated from the Sargasso Sea
MKKYFGTDGIRGIPGESLKEEIVTKIFSSVEKILAPKSVAIILDTRESCEMITEWIVKGFSEEVSITNYGILPSGSMPILLETFNEDLGIIISASHNPSEYNGIKLIDKNGSKLDDDLEIQIESELERVSLPENNAKIKNSTKGYDIYLQYLKNVNDFKFDKFDLIIDAANGSAFKIIEDLLSAKNAQFNIISNNPDGKNINDNCGATFPENLQKNISNGQVGISFDGDADRLIMVDENQQVVNGDLLLTILSKYLSEKGNLNGDFVVSTVMSNYGFKLAMNDFGFKLIETPVGDKYVAEAMKKNNAKLGGEQSGHIILGDFLPVGDALLTCLLVLEALDYFDVSIADFRKKYLMEYPQKLTNIELSKSLNDEELEFINQIALEMSIKLDLDGRYLIRNSGTEPLLRVLVEARSQESMENFSEELLSKINNYLN

SEQ ID NO: 156809 - protein, 370 aa, Unknown
  Bacterial polypetide isolated from the Sargasso Sea
AISMLTRSMRCDVGVMISASHNSYEDNGIKLFDPNGEKLSDKSELKIESLMDKNHKINLVDSSKLGRAKRIEDAAGRYLEFVKSTFPDELSLKKLKIVIDCANGAAYQVAPRVLWELGAEVIPIGCNPDGTNINYKCGSTYPIHMANMVKKHKADIGIALDGDADRCVLCDEKGNFIHGDKIIGLIVKRYLDQGLLEGKSIVGTKMTNKGLENYLNNLNLNLIRANVGDRYVVEKMRENGCNIGGEQSGHIILGEYGSTGDGLVASLQIIASMLENNIKISKLMDIFSLMPQTVESIAYDSNYFKYKNSDQFIKNIIKMHEKLLGKEGKIIIRASGTESKLRIMGECENKILLNKTLKNLKIEITNYINE

SEQ ID NO: 156810 - protein, 358 aa, Unknown
  Bacterial polypetide isolated from the Sargasso Sea
MLTKSMKANMGIMITASHNPYHDNGLKLFGPDGMKLSDQIEKKIEKLIDAKNTKQLTNPKSLGRVKRLEDGNDKYIKILRKNFPKNFHLKGTKIVLDCANGAGYKAAPKLLKELGAKVISIGVSPNGFNINEKCGSTHPSKIRSAVRKFKAHVGISFDGDADRIIMCDEKGKIINGDQIIAMLAKRWKFKKILKGGVVGTLMSNYGLENFLRKEKIKFYRSKVGDRYVKEKMRKLNFNLGGEQSGHIILGKFATTGDGLMVALEVLFSLRKRKKASKLLNVFNPLPQILENIIVKDKNIINKTKCKNAIKKANKLMGHSGRILVRKSGTEPKVRIMAESLNNSLILKCIKIIKQSIKN

SEQ ID NO: 156811 - protein, 443 aa, Unknown
  Bacterial polypetide isolated from the Sargasso Sea
MYKKYFGTDGIRGRVNQTKINGEMFFKFGLASGTYFKNLKKNKQTAIIAKDTRLSGYSLEPALVSGLASAGMHVYTLGPLPTNGLAMLTKKMKANMGIMITASHNPYYDNGLKLFGPDGLKLSDKIEKKIEKLIDSKITRNLSQPRVLGRVKRLEDANDRYINILKENFPKKFNLKGIKIAIDCANGAGYKSGPKLLKSLGAKIYTVGTSPNGLNINHKCGSTYPNKIKSLVKRHKVNLGISLDGDADRIILCDEKGNIIDGDHIIAMLASRWKRKKILKGGVIGTLMSNYGLQNYFKQEKIRFIRAKVGDKHVKEQMKKNRFNLGGEQSGHIILGKFATTGDGLLVALEVLFSMKKGKKASELFNIFKSTPQVLENVVVRDKSIINSTKCKKAIKVAKRLIKNRGRLLVRKSGTESKIRIMVESDHKRTLHQCVNMVKKAVL

SEQ ID NO: 156812 - protein, 459 aa, Unknown
  Bacterial polypetide isolated from the Sargasso Sea
MADLASHPVGQPLEGGGVSFGTDGIRGRVGTVMTPALALQVGYWSGQVLPAGAPVLLGMDSRSSGPMLVAALEAGLAAAGREVWTLGLCPTPAVARLVNQFQAAGGLMVSASHNPPEDNGIKLFGPSGAKLSRDQQQLIEAGLRGEVRPALTSCGPTQRRSELLESYTVLLEQSLQGRRLDGRRIVLDLCWGSATSCAESLFRRLGAEVIALHSQPDGAAINVGCGSTHLEPLRQAVKEHGAEMGFAFDGDADRVLAVDGQGRLVDGDHILYLWGSALADANSLPQQRLVATVMSNLGFERAWTARGGQLERTAVGDQYVHAAMAELGAALGGEQSGHIISADHGMSGDGVLTALQLAALLQPGETLADRVDQSFCSYPQRLRNVRVPDRDRRKGWQQCDALTAAIAAAEAAMGDQGRVLVRASGTEPLLRVMVEASSQEQVDHWTDHLSEMADQLLNA

SEQ ID NO: 156813 - protein, 435 aa, Unknown
  Bacterial polypetide isolated from the Sargasso Sea
MDLKFGTDGIRGPVESKITPEACLKIGHATGIVMKELGWNTVVIGKDTRISGYMLESALQAGFIASGVNVNLLGPLPTPGVAYLTKTLRKKFGVVISASHNDFLDNGIKIFNEDGEKISREIEKKIEKNISKDLKPVKTSKIGKAYRFDESGPRYIEFCKSTVPPGVSFSSLRIVIDCANGACYKVSPEIFQELGAEVIEIGTNPDGYNINQDCGSTNPEVVKEAVVKHRADFGISLDGDGDRVILVDKEGNILDGDDLLYILAYANPNRTGAWSGVVGTHMSNLGFEKGIQELGYKFIRADVGDKYVTEMLAKKGWMLGGETSGHIICKDLVSTGDGTIAALKVISSLLMLEKSPQEVLSNYKKIPQINKAVVVKNKDIINDKDLQALTKEIELNLTVGRILVRPSGTESKIRIMVESPDEKGAEKFAKDIEKV

SEQ ID NO: 156814 - protein, 326 aa, Unknown
  Bacterial polypetide isolated from the Sargasso Sea
QKVVEDSNQDISVPTKGMSLKEDKELMNIYIESLIKTMGRESLSGMKIILDTCYGSATTCAQKIFNNLGADVRVINNSKDGLKINMNCGSTNLEPLKKALRESPADMGFSFDGDADRVIGVDCEGNVLDGDHILFLWGRELMEERMLTNNLLISTQMANLGFENAWNKIGGFLHRTDVGDKYVHNAIKEKRAVLGGEQSGHILSKINDFSGDGILTALQISKYCKKKNIALNDWLKSSFDPFPQKLTNIKLDFNINKINPKNKILINQSIENFQAIYSDNCRVYIRPSGTEPLIRVLVEAKNQKKVDFLSSEITNKLFLEINRIIN

SEQ ID NO: 156815 - protein, 141 aa, Unknown
  Bacterial polypetide isolated from the Sargasso Sea
LIRAKVGDRYVKEKMISEDLNLGGEQSGHIILRDFTSSGDGIVVALQVLSILSRKKAKASDCLHLFSPLPQNLINFPVKERNILDHEDTKLFIKSCEEKVSEDGRIVVRMSGTEPLLRVMIESGNQHTIDELTESVTKYFS

SEQ ID NO: 156816 - protein, 348 aa, Unknown
  Bacterial polypetide isolated from the Sargasso Sea
MKKFFGTDGVRASSNSQKLNGLTLMKLGMALGKHFTVGEHRHKVVIGKDTRLSGYMIEQALTSGLLSMGMDVFLFGPIPTPAVAMLTKSMRADLGIMITASHNQYQDNGIKIFDKNGNKLSDETEIEIESLMESELENSLAGPGKIGRAKRLEDANGRYIEFLKGTFPKSQRLDGLKIVIDCANGASYISAPLILWELGAEVIQIATQPNGTNINFECGSTNTNKLAKKVLEEKADIGIALDGDGDRLAVIDEKGHLVNGDQILALLAIEMSKDKKLKNNNVVGTSMANMGLETLLKKHNIGLIRAKVGDRYVKEKMISEDLNLGGEQSGHIILRDFTSSGDGIVVAL

SEQ ID NO: 156817 - protein, 417 aa, Unknown
  Bacterial polypetide isolated from the Sargasso Sea
MNLKFGTDGIRGPVENKITPEACLRIGHATGLVMKELGWDTVVIGKDTRISGYMLESALQAGFIASGVDVNLLGPLPTPGVAYLTKTLRNKFGVVISASHNNFLDNGIKIFNEDGEKISRDIEKKIEKNIAKNLTPVETSKIGKAYRFDESGPRYIEFCKSTVPPDISFSSLRIVIDCANGACYKVSPEIFQELGAEVIKIGTEPDGYNINQNCGSTNPEVVQEAVINNRADYGISLDGDGDRVILVDKEGNILDGDDLLYILAFANPNRTGSWSGVVGTLMSNLGLEDGIQKLGYKFIRADVGDKYVTEMLTKKGWMLGGEASGHIICKDLVSTGDGTIAALKVISSLLMLEKSPQEILSNYTKIPQINKAVSVNNKDIVNDKDLKALIKAIESDMTVGRILVRPSGTESKIRIMV

SEQ ID NO: 156818 - protein, 213 aa, Unknown
  Bacterial polypetide isolated from the Sargasso Sea
AVKKHRAKIGIAFDGDADRVIMCDEKGKIIDGDQIIAMLARRWKSKKILKGGVIGTLMSNYGLEKFLHNEKIRFSRSKVGDRYVKEKMKKLNYNLGGEQSGHIILGKFATTGDGLLVALEVLFSLRKGKKASRLLKVFKPLPQTLENVEVNDKNVINKSKCKNAIKIANKLMGQKGRILVRKSGTEPKIRIMAESYDKSLILKCIKIIKSSIK

SEQ ID NO: 156819 - protein, 409 aa, Unknown
  Bacterial polypetide isolated from the Sargasso Sea
MTPNGGKVAIGKDTRISGYMFESALESAFVAHGLEVILLGPLPSPAIAYYTIKQNCDFGIVISASHNSYEYNGIKIINHQGEKIDREIESIIESKLSDTPITNTAETLGKAKISNTSRNLYKSLLMSIFADIDQHLPLKGFKIVVDASNGAAYKIAPQVLLDLGADVIPIACSPNGKNINLDCGSTHPETLRKTVVATESNLGIALDGDADRILIVDEEGRILDGDQILYILAKSNIFNKSFNHKVVGTITTNSGLEMKLREMNIDLYRSDVGDKNVYSMMKKTGAIIGGESSGHIINSEYSPTGDALLIALIIIKESLTKELKISELVSDLELLPVLNENIDSEDLLHTNENFLSDLANEINSKNPEGRVVIRPSGTEPLIRISIENKDQDVASILAKDIINTIKVNG

SEQ ID NO: 156820 - protein, 278 aa, Unknown
  Bacterial polypetide isolated from the Sargasso Sea
MVNKYFGTDGIRGTVNQGNITGEKFFKFGLAAGTYFKNQKKNKQIAIIAKDTRLSGYTLEPALVSGLVSGGMHVFTLGPLPTNGLAMLTRSMKANMGIMITASHNPYYDNGLKLFGPDGLKLSDKIEKKIEKLIDAKSTKQLTNPDKLGRVKRLEDGNDRYIKILKKNFPKNFKLKGTKIVLDCANGAGYIAAPKLLKSLGAKVFAIGVKPNGLNINDKCGSTYPYKIQSAVKKYKAHAGIAFDGDADRIIMCDENSKIIDGDQIIATLAKRWRLKRI

SEQ ID NO: 156821 - protein, 445 aa, Unknown
  Bacterial polypetide isolated from the Sargasso Sea
MAKSFFGTDGIRGTVNTESLNSEIALKLGLAAGKIFTRGNHKHRVLIGKDTRISGYMLESALESGFTSSGMDVFLTGPIPTPAVAHLTQALRADLGVMITASHNTYEDNGFKLFGPDGYKLTDEKQTEINELMNRSDIMSLQDKNQIGAARRVDDALSRYIEFAKASFPNSMRLDHLKIVLDCANGAAYKVAPMIFWELGADVIVIGDKPNGRNINQDCGSTKTKALRKKVIDENADLGIAFDGDGDRLAIIDENGDQVNGDHLLAMIALLLKKKNLLKNNKVVSTIMANLSLENYLDSIDLKLIRANVGDRYVIEEMLNSGSNFGGEPSGHLIINDFSTTGDAIISSLQVLSLMIEENKSISNLTNLFPLISQKHYEHISDDKKDISNSHLENLSKEMKEKIGNEGRVIIRKSGTEPLIRVMIETNNQNLSNEILDEVKTSLTL

SEQ ID NO: 156822 - protein, 357 aa, Unknown
  Bacterial polypetide isolated from the Sargasso Sea
GTDGIRGTVNEGNITGEKFFKFGLASGTYFKNQKKSKQIAIIAKDTRLSGYTLEPALVSGLVSGGMHVFTLGPLPTNGLAMLTKSMKANMGIMITASHNPYYDNGLKLFGPDGMKLSDKIEKKIEKLIDAKNTKQLTNPKLLGRVKRLEDGNDRYIKILKNNFPNNFHLRGTKIVLDCANGASYKAAPKLLKELGAKVIPMGVKPDGLNINEKCGSTFPSKIRLAVKKFKAHVGISFDGDADRIIMCDEKGKIIDGDQIIAMLAKRWKSKKILKGGVIGTLMSNFGLEKFLKNEHIRFSRSKVGDRYVKEKMKKLNFNLGGEQSGHIILGKFATTGDGLLVALEVLFSLRKGKRRVN

SEQ ID NO: 156823 - protein, 370 aa, Unknown
  Bacterial polypetide isolated from the Sargasso Sea
ITASHNPYDWNGFKFKSHIGGSANQEIIDQIERYANSANPSGDLVDLENTELIEYIPAKKVYTDHVNTIVDITTVKNANLNVIVDCMYGSGIDYLTDILSGSSTQITQIHNNINPSFPGIGHPEPIRQNLVELMNEVNSDVMIDLGLAFDGDADRIGLIDEQGRYISTLDSFSLLVYYFLAYKNYRGAIVKSITHSDMINKLCNSYNVEVYETAVGFKNLGPKMIATNAVLAGEESGGFAFRDSVPERDGILSALYLLEFVANTGKNCSDLLDELYQIVGPHVYSRIDIVLNEEQREKITLFDAATIPMETFPIKINQINTIDGVKLIGDAGWVAYRLSGTEPLLRIYSESNNQQSVDSLIDHVRTFLGV

SEQ ID NO: 156824 - protein, 441 aa, Unknown
  Bacterial polypetide isolated from the Sargasso Sea
MKYFGTDGIRGHVNSKNINGDMFFKFGLAAGKYFTNLKKKKQIAIIAKDTRLSGYALEPALVSGLASAGMHVFTLGPLPTNGLAMLTRSMNANLGIMITASHNLFDDNGLKLFGPNGLKLSDKIQKKIENLIDLNVKKHLSNPKSLGRVKRLETGTDDYLAIIKKKIPKRLKLKNMKIVLDCANGAGYKSAPKMLKTLGAKLTIIGDKPNGFNINKNCGSTYPNTLQRYVKKYKADLGISLDGDADRIIMCDEKGSIIDGDQIIAALAVLWKKKRILKGGVVGTLMSNYGLEDFFKRKKIKFIRANVGDRYVKEIMQNKKFNLGGEQSGHIILGKFATTGDGLLVALEVIQALNGKIKASNFFDVFEKIPQVLVNIKIKNENILKKFSVKNSIKIANKLIKGHGRILVRKSGTEAKIRIMGESKNKFLLNKCIKNITKTIN

SEQ ID NO: 156825 - protein, 357 aa, Unknown
  Bacterial polypetide isolated from the Sargasso Sea
MLTKKMKANMGIMITASHNPYYDNGLKLFGPDGLKLSDKIEKKIEKLIDSRISDKLSNPKILGRVKRLEDGPKKYIEILKKNFPNQFNLKGLKIAIDCANGAAYKVGPQLLRSLGAVVYEIGTSPNGFNINEKCGSTFPNKIKNLTKKNRAHIGISLDGDADRIIVCDEKGNIIDGDKIIAMLAQRWKRKKILKGGVVGTLMSNYGLEKFFKKNKIKFLRSKVGDRYVKELMQKNKFNLGGEQSGHIILGKFATTGDGMLVALEILFSLRKCKKASELFKNFNPTPQLLENVEVKDKSVINSTKCKKAIKIANNLVKHKGRMLVRKSGTEPKIRIMCESENKILLKKCINIVKKSIT

SEQ ID NO: 156826 - protein, 441 aa, Unknown
  Bacterial polypetide isolated from the Sargasso Sea
MKYFGTDGIRGQVNSGNINGDMFFKFGLAAGKYFTNLKKRKQTAIIAKDTRLSGYALEPALVSGLASAGMHVYTLGPLPTNGLAMLTKSMNANLGIMITASHNLFYDNGLKLFGPDGLKLSDKIQKKIENLIDSKVQKHLSNPKKLGRVKRLETGTDEYIKICKKKLSRNFKLNNLKVVLDCANGAGYKSAPKLIRSLGAKLKVIGNKPNGFNINKNCGSTFPEKLQRNVKKFKADLGISLDGDADRIIMCDEKGSIIDGDQIIAALALQWKKRKILKGGVVGTLMSNYGLEKFLKEKGIKFLRANVGDRYVKELMQKKKFNLGGEQSGHIILGKFATTGDGVLVALEIIKSMNRKTKASDFFNVFKKIPQILENIKIKDDKILKNHSVKRSIKIAKKLIKNQGRILVRKSGTEPKIRIMGESENKILLKKCIKIISKEFK

SEQ ID NO: 156827 - protein, 409 aa, Unknown
  Bacterial polypetide isolated from the Sargasso Sea
FKNLKKTKQIAIIAKDTRLSGYTLEPALVSGLASAGMHVYTLGPLPTNGLAMLTKKMKANMGIMITASHNPYYDNGLKLFGPDGLKLSDKIEKKIEKLIESKINKNLSKPEILGRVKRLEDANDRYIRILKNNFPDNFSLKGIKIAIDCANGAGYKSGPKLLKSLGAKVYQIGTSPNGLNINDKCGSTFPNKIKFLVKKHKVNLGISLDGDADRIILCDEKGKIIDGDQIIAMLANRWKRKKILKGGVVGTLMSNYGLQNYFREQKTKFLRANVGDRYVKESMQKNRFNLGGEQSGHIILGKFATTGDGLLVALEVLFSMRKGKKASDLLNVFKPMPQILENILVRDKNIINELRCKKAIRKANKLMRRNGRLLVRKSGTEPKIRIMGESHNKNLIIKCIKIIKQSIKY

SEQ ID NO: 156828 - protein, 394 aa, Unknown
  Bacterial polypetide isolated from the Sargasso Sea
KDTRYSGYTLEPALVSGLVSGGMNVFTLGPLPTNGLAMLTKSMKANMGIMITASHNPFYDNGLKLFGPDGMKLSDSIEKKIEKLIDAKNTNQLTKPKFLGRVKRLEDGNERYIKILKKNFPNNYNLKGTKIVLDCANGACYKAAPKLLKELGARVISIGVKPNGLNINEKCGSTYPSKIKQAVNKYKAHVGISFDGDADRIIMCDEKGKIINGDQIIAMLARRWKSKKILRGGVIGTLMSNLGLEKFLKNEKIKFFRSKVGDRYVKEKMKKLNFNLGGEQSGHIILGKFATTGDGLLVALEVLYSLRKGKKASKLLNVFKPLPQILENVVVKDKNIIDKIKCRNAIKLANKMMIGKGRVLVRKSGTEPKIRIMAESYNKNLILKSIKIIKRSIK

SEQ ID NO: 156829 - protein, 362 aa, Unknown
  Bacterial polypetide isolated from the Sargasso Sea
TNGLAMLTKKMRANMGIMITASHNPYYDNGLKLFGPDGLKLSDKIEKKIEKLIDSRIVDKLSNPKILGRVKRLEDGSKKYIEILKKNFPKQFNLKGLKIAIDCANGAAYKVGPQLLRSLGAVVYEIGTSPNGFNINEKCGSTFPNKIKNLTKKNKAHIGISLDGDADRIIVCDEKGNIIDGDKIIAMLALRWKRKKILKGGVVGTLMSNYGLEKFFKKNKIKFLRSNVGDRYVKELMQKNKFNLGGEQSGHIILGKFATTGDGMLVALEILFSMRKGKKASELFKNFNPTPQFLENVEVKDKSVIKSIKCKRAIKIANNLIKHKGRMLVRKSGTEPKIRIMCESENKILLKKCINIIKKSIN

SEQ ID NO: 156830 - protein, 267 aa, Unknown
  Bacterial polypetide isolated from the Sargasso Sea
IVVDSANGAAYKVAPSVFEELGAKVINIANTPNGININNDCGATSLNSLSKAVTTNKADLGIAVDGDADRIMFVDSQGEVVDGDEILFLMAREAKQAGYKGGVVGTLMSNLGLEIALKELDIPFVRTKVGDRYVVEKLKETGWRIGGETSGHILNLDYAFTGDAIIAALQILTVVVKSEYSLSELKAGMTKLPQCMVNVRHNDLDSVLDLDVVKDEVSRVEEALGKNGRLVLRKSGTEPLIRVMIEARDRGLASELANSLAEVIREN

SEQ ID NO: 156831 - protein, 234 aa, Unknown
  Bacterial polypetide isolated from the Sargasso Sea
NGININDKCGSTNTALLAKTVIEKKADIGIALDGDGDRLAIVDEKGNDINGDQILALLAMHMSKKNLLQKNKVVGTSMANIGLENLLNENNIELVRANVGDRYVKEKMIHENLNLGGEQSGHIIMRDYTSSGDGIIVALQVLAIIMQNKKQASEIFNLFTPHPQNLINFEVKTKNILENDETKNFIKKCEEEVAGEGRIIVRMSGTEPLLRVMIECKSQNKIDKLTKNVTKYFS

SEQ ID NO: 156832 - protein, 312 aa, Unknown
  Bacterial polypetide isolated from the Sargasso Sea
MSKKYFGTDGIRGKVNQYKINGEMFFRFGLASGTYFKNLNKSKQTAIIAKDTRLSGYTLEPALVSGLVSAGMHVYLLGPLPTNGLAMLTKKMKANMGIMITASHNPYYDNGLKLFGPDGLKLSDRIEKKIEKLIDSKIIKNLSRPEALGRVIRLENGTDNYIKILKKNFPRSFSLKGLKIAIDCANGAGYKAGPKLLRCLGAKVFEIGTNPNGLNINDNCGSTFPNKIKRLTKKYKANIGISLDGDADRIIICDEKSNIIDGDKIIAMLAERWKRKKILKGGVIGTLMSNYGLEKYFRNNKINFLRSNVGDK

SEQ ID NO: 156833 - protein, 450 aa, Unknown
  Bacterial polypetide isolated from the Sargasso Sea
MQSIFGTDGIRGRFNKEITYSLAYKVGYALGSALEKKNPILIGRDTRITGDILLQAITQGINESGKKFINIGICTTPAIPFLIKQENLSSGVMISASHNPPEYNGIKIFDQNGQKITKIFESKIQKIIEESKQNILIPTKVVSLKTNTVLMDAYIKSLIQTMGGESLSGLKIILDTCYGSATTCAKQIFQSLGADVRVINNSKNGLKINMNCGSTNLEPLKKALRENPADMGFSFDGDADRVIGIDSKGHVLDGDHILFLWGKELMEQKNLTNNLLISTQMANLGFEKAWNKIGGILYRTDVGDKYVYDAIKEKRAVLGGEQSGHILSKINNFSGDGILTALQISKYCKKKNINLNDWLKSSFKPYPQTLSNINLDFNIKKLNPKTKILIDQTIENFQALYSDNCRVFIRPSGTEPLIRVLVEAKNYEEVNSLSSEITNKLFLEINKIIN

SEQ ID NO: 156834 - protein, 437 aa, Unknown
  Bacterial polypetide isolated from the Sargasso Sea
MSKERRFGTDGIRGPVDSTMNPLFVTQLGWAAGTVLLEEGITKVLIGKDTRISGYMLESALQAGFISSGIDVILLGPLPTPGVSFLANSNKQAGVVISASHNLFEDNGIKFFNKDGQKFSSALEKRIETKLNQEIESVKSINLGKATRMTDAQGRYIEFCKSNFINLDLSGLSLLLDCAHGATYSVAPKVFEELGAKVATIGTDPDGVNINQNCGSTSPENIKDEILKGDYDLGIAFDGDGDRILIVSKTGKILDGDDLLYILTKQLDKDSGVVGTLMTNKALELYFEKENIRFCRADVGDKYVLHRLLDEGWQLGGEPSGHIICLDATQTGDAIVAALKLLSCLKENQFNVDDSIKDFTKFPQTLINLSVDNPNKIILNDKFWSEVTEIENKLNDKGRVLIRPSGTEPLIRIMVESEKEEYSEDYCNKLADLASRL

SEQ ID NO: 156835 - protein, 263 aa, Unknown
  Bacterial polypetide isolated from the Sargasso Sea
MAKKYFGTDGIRGRVNLSKINGEMFFKFGLAVGTYFKNLRKKKQTAIIAKDTRLSGYTLEPALVSGLTSAGMHVYTLGPLPTNGLAMLTKKMSANMGIMITASHNPYYDNGLKLFGPNGLKLSDKIEKKIEKLIDSKIVKNLSEPNSLGRVKRLEDANDRYIKILKNNFPKNFHLKRMRIAIDCANGAGYKSGPLLLRSLGAKVYQFGTSPNGFNINDKCGSTFPNKIKYLVKKHNAHIGISLDGDADRIIVSDENGNIIDGD

SEQ ID NO: 156836 - protein, 443 aa, Unknown
  Bacterial polypetide isolated from the Sargasso Sea
MTKKYFGTDGIRGRVNGNKINGDMFFKFGLAAGTYFNNKKKTKQIAIIAKDTRLSGYALEPALVSGLTSAGIHVFTFGPLPTNGLAMLTKKMRANMGIMITASHNSFYDNGLKLFGPDGLKLSDKIEKKIEKLIDSKVSKKLSNPEILGRVKRLENGSNKYLEILKTNFPKQFNLRGLRITIDCANGAAYKVGPQLFRSLGATVHEIGTTPNGFNINKKCGSTFPNKIKYHTKKNKSHIGISLDGDADRIIVCDEKSNIIDGDKIIAMLATRWKRKKILRGGVVGTLMTNYGLQKYFSKNKINFIRSKVGDRYVKEAMQKSKFNLGGEQSGHIILGKFATTGDGLLVALEILFSMRKGKKASEIFKNFIPTPQLLENVEVKDKSIINSLKCKNAIKKAKNLIKGKGRMLVRKSGTEPVLRIMCETKDKTMLSKCVNIVKKSII

SEQ ID NO: 156837 - protein, 454 aa, Unknown
  Bacterial polypetide isolated from the Sargasso Sea
MSKLASIRNNELSVLSTLSKDRKFGTDGIRGPVTSTMNPLFVTKLGWAAGSILIEEGMSKVLIGKDTRISGYMFESALQAGFISAGMDVTLLGPLPTPGVSYLANSNNQVGLVISASHNLFEDNGIKFFNKDGQKFSAELEKRIETKLTQEMVAVESINLGKASRMNDAQGRYIEFCKSSFTDLDLNGLSILLDCANGATYSVAPKVFSELGAKVETIGSSPDGININQNCGSTNPDFLKEELMKGSYDLGIAFDGDGDRILIVNSEGEILDGDDILYILSNNLVPNSGVVGTLMTNKALEIYFEKNGIPFSRAEVGDKYVLQRLMEESWVLGGEPSGHIICLDSAPTGDAIIAALNLLNAIKDNNFSIKKSLEGFQKFPQTLINLKVSNPNKIIISDKFWSEVTRIEKQLGQNGRVLIRPSGTEPLIRIMVESDRNGASNDFCNALADLAQTI

SEQ ID NO: 156838 - protein, 345 aa, Unknown
  Bacterial polypetide isolated from the Sargasso Sea
MGIKIFDHNGQKITKEVENKIQKLVEEQNQSVPTKELSLKTNNELMDIYMKSLIHTMGGENLSGLKIILDTCYGSATTCAKKIFQNLGADVRVINNSKNGLKINMNCGSTNLEPIKKALEENPSDMGFSFDGDADRVIGLDSRGNVLDGDHILFLWGRELMGKKILTNNLLISTQMANLGFEKAWNKIGGILYRTDVGDKYVHDAIKEKRAVLGGEQSGHIISKINNFSGDGILTALQIAKYCKKKNITLNDWFKSSFDPFPQKLTNINLDFNINKINSKTKFLIDRTIEIFQANNSDNFRVYIRPSGTEPLMRVLIEATNQTKVNSLSSEITHKLSLEINKIMN

SEQ ID NO: 156839 - protein, 265 aa, Unknown
  Bacterial polypetide isolated from the Sargasso Sea
MTKKYFGTDGIRGAINSKNINGDMFFKFGLASGTYFKSQKKRKQTAIIAKDTRLSGYTLEPALVSGLTSAGMHVYTLGPIPTNGLAMLTKVMKANMGIMITASHNPHHDNGLKLFGPDGMKLSDKIEKKIENLIDKKITKNLSNPEKLGRVKRLETGTKNYLKILKKNFTKEFNLRGMRIVIDCANGAGYKAGPELLKSLGAKVIAIGVNPNGLNINNNCGSTYPDKIRLAVKKHKAHIGISLDGDADRIIMCDETGNVIDGDQI

SEQ ID NO: 156840 - protein, 115 aa, Unknown
  Bacterial polypetide isolated from the Sargasso Sea
MTQRKYFGTDGIRGKVGESNINPEFVTKLGWAAGKVLAGRGTNKVLIGKDTRISGYMLESSLEAGLSAAGINIGLLGPMPTPAIAYLTKTFRSEAGIVISASHNPFYDNGIKFFS

SEQ ID NO: 156841 - protein, 487 aa, Unknown
  Bacterial polypetide isolated from the Sargasso Sea
MASAPLRLSPAPIKFGTDGWRGVLGVDITVERLLPVAAAAAQELAHRAPDGLNSRTVIIGFDRRFLAPELAEAIANAVRGCELEPLLTETPVPTPACSWAVVERKALGALVITASHNPPEWLGLKIKGPFGGSVEGDFTAAVERRLAAGGITPPIAATTSRFDGRGEHLEGLRRKLDLTALVTGLKTMNLKVFVDPMHGSAAGCVSDLLGPEASELVDEIRSTRDPLFGGHPPEPLAPYLSDVITAVQHSTAAGTPAVGLVFDGDGDRIAAVDENGRFCSTQLLMPLLIDHLARARQLPGTVVKTVSGSDLMRLVAEAQGREVLELAVGFKYIASEMLAGEVLIGGEESGGVGFGMHLPERDALFAAMLVLEALVEGGQPLGSRLDALQQRHGGASHYDRLDLRLQDMEARRRLETLLASSTPQEVAGAAVVEVNTTDGIKLRMGASHWLMLRFSGTEPLLRLYCEAPDRDRVGAVLAWAKRYAEAA

SEQ ID NO: 156842 - protein, 253 aa, Unknown
  Bacterial polypetide isolated from the Sargasso Sea
MTKKYFGTDGIRGKVNGNKINGDMFFKFGLAVGTYFNNKKKTKQVAIIAKDTRLSGYTLEPALVSGLTSAGMHVLTFGPLPTNGLAMLTKKMRANMGIMITASHNPFYDNGLKLFGPNGLKLSDNIEKKIEKLIDSKVSKKLSNPKILGRVKRLEDGSNRYLEILKKNFPKQFNLRGLRITIDCANGAAYKTGPQLFRSLGAVVHEIGTSPNGFNINKKCGSTFPNKIRYHTKKNKSHIGIALDGDADRIIVC

SEQ ID NO: 156843 - protein, 325 aa, Unknown
  Bacterial polypetide isolated from the Sargasso Sea
GLKLSDKIEKKIEKLIDSKIAKNLSIPIQLGRVKRLEDANQNYIKILKQNFPSSFSLKGIKIALDCANGAGYKAGPDLFKSLGAKLFKTGTSPNGLNINLKSGSTYPSKICQMTKKSKAHIGISLDGDADRIIVCDENGKIIDGDKILAMLGERWKRKKILKGGVVGTLMSNYGLENFFKKNKIKFLRSNVGDRYVKEKMKKNNFNLGGEQSGHIILGKFATTGDGLLVALEILFSLRKTKKASELFNKFKPTPQILENVEVKDKSVINSIKCKKAISEAKKIMKNKGRILVRKSGTEPKIRIMSESEDSSLNKICVSIIKKSIQ

SEQ ID NO: 156844 - protein, 447 aa, Unknown
  Bacterial polypetide isolated from the Sargasso Sea
MGTDGIRCLVNKEPLSAETTLKISKAVGYLLKSKKKNSSRVVICKDTRLSGYLYEPLITAGFISMGMEVILVGPLPTPAVPHLMRTLRADIGVMITASHNTFEYNGLKFFNADGYKISNQLEKKIENIVLNKKQYSKILNNEVNTGKAIRLEDASGRYSEFLKNTLDKKIKIKKLKVVLDCGNGATYEIAPNLFWELGHEVIPINNKPNGKNINDHCGAVNVKDLSKKVIYEKANIGFAFDGDGDRLIIVDENGNEVDGDKIIGLFANQFVKTKNKKTNYPVIITVMSNLGLEKFLSDKLKIKIKRSAVGDINVIREMQRNESILGGEQSGHIILSKFSKTGDGILAALKVTEIISKLNKSASSIFNLYENFPQIKINIPYKNISQNNIKYIKYLNNKKTNNKNIRTLVRLSGTEPLVRVLVEGNDLNKVRETAELIEKDIRKKLAQ

SEQ ID NO: 156845 - protein, 272 aa, Unknown
  Bacterial polypetide isolated from the Sargasso Sea
NFHLKGTKIVLDCANGACYKAAPKLLKELGAKVISIGVKPNGFNINEKCGSTYPFKIKSAVKKFRAHVGISFDGDADRIIMCDEKGKIVDGDQIIAMLARRWKSKRILKGGVIGTLMSNYGLEKFLKNEKIRFFRSKVGDRYVKEKMKKFDFNLGGEQSGHIILGKFATTGDGLLVALEVLFSLRKGKKASKLLNVFKPLPQILENIFVKDKDIISKSKCKNAIKKANKLMGQKGRILVRKSGTEPKIRIMAESYDRSLILKCIKTIKRSIK

SEQ ID NO: 156846 - protein, 419 aa, Unknown
  Bacterial polypetide isolated from the Sargasso Sea
YLLKSNQKQNSRVIICKDTRLSGYLYEPLITAGFISMGMEVILVGPLPTPAVPHLMNTLRADIGVMITASHNTYEYNGLKFFNSDGYKISSILEKKIENIILNKKKYAKIINGNSNTGKAIRLEDASARYSEFLKSTLDKKIKSKKLKVVLDCGNGATYEIAPNIFWELGHEVISINDKPNGKNINYNCGAVNTNALSKKVVDERADIGFAFDGDGDRLIIVDEKGNEIDGDKIIALFAKYLIKFNKSKFKYPIVTTVMSNIGLENFILNEFKVNLKRSSVGDINVIKEMKKYSSLLGGEQSGHIILSEYSKTGDGILAALKVTEIISKLKKSTSSIFSLYETFPQIKINISYKKMSKNTIDYIKNINKKKLKDKNMRLLIRLSGTEPLIRILVEGNDLNKVNTIAKNIEENIRTKLGK

SEQ ID NO: 156847 - protein, 275 aa, Unknown
  Bacterial polypetide isolated from the Sargasso Sea
KKLKIVLDCANGATYNIAPNLFWELGHNIIAINNNPNGLNINKNCGAVDVKSLSQNVIKEKADIGFAFDGDGDRLIVVDEEGKEVDGDKIIGLLCKSYVKPQKKTNQHDVIITVMSNMGLENYLTNKLKLKIKRTSVGDINVINQMKKSKSTIGGEQSGHIILSEHSNTGDGILAALKITEILISNKNKASKLFDLYNDFAQEKINLSYKTKNTKLLKILDNLKNDKLYNNKKIRSLVRLSGTEPLVRILVEGQEVTEVKKKSLEIKKLVRPYLG

SEQ ID NO: 156848 - protein, 345 aa, Unknown
  Bacterial polypetide isolated from the Sargasso Sea
MASHNQYQDNGIKIFDKNGNKLSDETEIEIESLMESELENSLAGPEKIGRAKRLEDANGRYIEFLKGTFPKSQRLDGLKIVIDCANGASYISAPLILWELGAEVIQIATLPNGTNINFECGSTNTNKLAKKVLEEKADIGIALDGDGDRLAVIDEKGHLVNGDQILALLAIEMSKDKKLKNNNVVGTSMANMGLETLLKKHNIGLIRAKVGDRYVKEKMISEDLNLGGEQSGHIILRDFTSSGDGIVVALQVLSILSRKKGKASDCLHLFSPLPQNLINFPVKERNILDHEDTKLFIKSCEEKVSEDGRIVVRMSGTEPLLRVMIESGNQHTIDELTESVTKYFS

SEQ ID NO: 156849 - protein, 321 aa, Unknown
  Bacterial polypetide isolated from the Sargasso Sea
MKNKYFGTDGIRGTVNQGNITGEKFFKFGLASGNYFKNQKKSKQIAIIAKDTRLSGYTLEPALVSGLVSGGMHVYTLGPLPTNGLAMLTKSMKANMGIMITASHNPYHDNGLKLFGPDGMKLSDKIEKKIEKLIDAKNTKQLTNPKLLGRVKRLEDGNDKYTKILKNNFPNNFHLKGTKIVLDCANGASYKAAPKLLKALGAQVISIGVKPNGLNINEKCGSTYPSKIKTAVKKHRAKIGIAFDGDADRVIMCDEKGKIIDGDQIIAMLARRWKSKKILKGGVIGTLMSNYGLEKFLHNEKIRFSRSKVGDRYVKEKMKKL

SEQ ID NO: 156850 - protein, 440 aa, Unknown
  Bacterial polypetide isolated from the Sargasso Sea
MNLKFGTDGIRGPVESVVTPEACLKIGHATGLVMKELGWNTVVIGKDTRISGYMLESALQAGFIAAGVNVRLLGPIPTPGVAYLTKTLRNKFGVVISASHNDFLDNGIKIFNEDGEKISRDVEKRIEKHLSKDLSPVETSKIGKAYRFDESGPRYIEFCKSTVPPNISFSSLRIVLDCANGACYKVSPEIFEELGAEVITIGNEPDGYNINQDCGSTHPEVIQDAVIKHRADYGISLDGDGDRVILVDEKGNLLDGDDILYILAFSNPNRTGVWSGVVGTHMSNLGLEEGIEKLGYKFIRADVGDKYVSEMLAKKGWMLGGETSGHIICKDLVSTGDGTVAALKVISSLLILEKRPSEVLSNFKKIPQINKAIKVNNKDIINDKELKSFLKEIESDLTIGRILVRPSGTEPKIRIMVEAPEKNVAEKFAEDIEKLIKSKI

SEQ ID NO: 156851 - protein, 290 aa, Unknown
  Bacterial polypetide isolated from the Sargasso Sea
LETGTKNYIKILKKYFTKEFNLRGLRIVIDCANGAGYQAGPELLKSLGAKVIAIGVKPNGLNINKDCGSIFPRKIRTAVKKYKAHIGISLDGDADRIIMCDEKGSIIDGDQIIAALATRWKNKKMLKGGVVGTLMSNYGLEKYFKSKGIKFIRANVGDRYVKEKMQKYKFNLGGEQSGHIILGKFATTGDGLLVALEALFALRKGKKTSEFFQSFKKTPQLLKNITVKDKNIINKPEIKKIIKLAEKLIKGQGRVLVRKSGTESKIRVMVESDNKILLSRCANMMSKKIK

SEQ ID NO: 156852 - protein, 451 aa, Unknown
  Bacterial polypetide isolated from the Sargasso Sea
MGRRYFGTDGIRGTVGEAPITPDFVLRLGYAAGKVLAGSADVAAGSRPTVLIGKDTRVSGYMLEAALEAGFSAAGVDVMLAGPMPTPGVAYLTRALRLSAGVVISASHNPYHDNGIKFFSADGNKLPDDTEAAIEAWLDKPLDCASSDGLGKARRLDDAAGRYIEFCKSTFPAAFNLRGLKLVIDCAHGAAYQIAPHVFHELGADVIPIGVAPNGFNINDGVGATAPDALVRAVRANHADLGIALDGDADRLQVVDATGRLYNGDELLYVLVKDRIATDGNVEGAVGTLMTNLAVEVALQREGVKFVRAAVGDRYVLEQLREHGWQLGAEGSGHILSLDRHSTGDGIVSALLVLAALKRSGKTLAQMLDGVTLFPQKLINVRMKPGADWKGSTSIRAAIDAAEAALAGSGRVLIRASGTEPVLRVMVEAQQAADAVRHAETIADAVRAATT

SEQ ID NO: 156853 - protein, 211 aa, Unknown
  Bacterial polypetide isolated from the Sargasso Sea
KKNKSHMEISLDGDADRIIVCDEKSNIIDGDKIIAMLATRWKRKKILRGGVVGTLMTNYGLQKYFSKNKIKFIRSKVGDRYVKEAMQKSKFNLGGEQSGHIILGKFATTGDGLLVALEILFSMKKGKKASEIFKNFIPTPQLLENVEVKDKSIINSLKCKNAIKKANSLIKGKGRMLVRKSGTEPVVRIMCETEDKTMLSKCVNIVKKSII

SEQ ID NO: 156854 - protein, 59 aa, Unknown
  Bacterial polypetide isolated from the Sargasso Sea
MNQFSVININSPFLDQKPGTSGLRKSTLKFQEEHYLEVFIESNLTIIRRFKRFNISSWW

SEQ ID NO: 156855 - protein, 217 aa, Unknown
  Bacterial polypetide isolated from the Sargasso Sea
AVDNVARALNIPCFETPTGWKFFGNLLDSNLITLCGEESFGTGSNHVREKDGLWAVLFWLQVLAEKKCSVSDLMQNHWKQFGRNYYSRHDYEAIPSNIANQIFGNLTSMLENLRGNSFAGHLVKVADNFSYLDPVDNSISENQGLRLVLDDNSRVIVRLSGTGTKGATLRLYFEKFFDPQQNLSLNPQIALKPLIDDLDALLNISKLTQLETPTVIT

SEQ ID NO: 156856 - protein, 62 aa, Unknown
  Bacterial polypetide isolated from the Sargasso Sea
MTQANVININSPFLDQKPGTSGLRKSTLKFQEEHYLEIFIEAILQSLEDLKGSTLIVGGDGR

SEQ ID NO: 156857 - protein, 35 aa, Unknown
  Bacterial polypetide isolated from the Sargasso Sea
MSQVSVININSPFLDQKPGTSGLRKSTLKFQQEHY

SEQ ID NO: 156858 - protein, 149 aa, Unknown
  Bacterial polypetide isolated from the Sargasso Sea
MRLTPSAALGVAVKDVATTPIEGQKTGTSGLRKKAAVFSEGNYLANWVQSLFLALPAEEVKDSTMVLGGDGRWFNKEAAQIIIKLAAGNGVGKMYVGQNGYLATPAASAVIRARKAYGGFIMSASHNPGGPKEDWGIKFNYTSGEPAPE

SEQ ID NO: 156859 - protein, 192 aa, Unknown
  Bacterial polypetide isolated from the Sargasso Sea
SAGCRQITLCGEESFGTGSNHVREKDGLWAVLFWLQILAERRCSVAEIMAEHWKRFGRHYYSRHDYEAVASDAAHGLFHRLEGMLPGLVGQSFAGRSVSAADNFSYTDPVDGSVTKGQGLRILLEDGSRVMVRLSGTGTKGATIRVYLESYVPSSGDLNQDPQVALADMISAINELAEIKQRTGMDRPTVIT

SEQ ID NO: 156860 - protein, 191 aa, Unknown
  Bacterial polypetide isolated from the Sargasso Sea
MDPLTVTTKATAPIEGQKPGTSGLRKKTKVFMGENYLENFVQSVFDALVATGTKVAGGTLVISGDGRYWNTNAIQTIIKMAAAAGVAKVWCGTGGLLSTPAMSAVIRARGKGFEPIGGFILSASHNPGGIDEDFGIKYNCENGGPAPEKVTNLIFENTKAIKEYKLCESLPAIDLEKPAAYNITGSKSLTV

SEQ ID NO: 156861 - protein, 39 aa, Unknown
  Bacterial polypetide isolated from the Sargasso Sea
MTTSAPAEPTQRLVRLDAPFKDQKPGTSGLRKSSQQSSK

SEQ ID NO: 156862 - protein, 217 aa, Unknown
  Bacterial polypetide isolated from the Sargasso Sea
AVDNVARALNIPCFETPTGWKFFGNLLDSNLITLCGEESFGTGSNHVREKDGLWAVLYWLQVLSEKKCSVSDLMQNHWRQFGRNYYSRHDYEAIPSDIANQIFSNLNSMLKNLKGTNFAGNLVKIADNFSYLDPVDNSISENQGLRLVLDDNSRVIVRLSGTGTKGATLRLYFEKFFNPKQNLTLNPQVALKPLINDLDALLNISKLTQMETPTVIT

SEQ ID NO: 156863 - protein, 143 aa, Unknown
  Bacterial polypetide isolated from the Sargasso Sea
EHWAKYGRNFFSRYDYEGCESDPCNAMVESLRAKAAAAKKGDKYGDYELDFADDFEYTDPIDGSVAKKQGVRFVFTDGSRFIFRLSGTGSSGATVRMYIEQYEADPAKQGADAQDALAPLIAIALETSQLAEFTGRESPTVIT

SEQ ID NO: 156864 - protein, 133 aa, Unknown
  Bacterial polypetide isolated from the Sargasso Sea
MNQVSVININSPFVDQKPGTSGLRKSTLKFQEEHYLEVFIEAILQSLEDLKGSTLVVGGDGRYGNIEAIEKIIQICIAHKVQKVIVPKYGLLSTPATSHLIRKEKAIGGIILSASHNPGGIDGDFGVKLNISN

SEQ ID NO: 156865 - protein, 263 aa, Unknown
  Bacterial polypetide isolated from the Sargasso Sea
MPEINVINIINPFLDQKPGTSGLRKSTLKFQEEHYLEIFIEAIFKSLENLRGSTLVVGGDGRYGNIEAIKKIIQICVAHKVGKVIIPKNGLLSTPAASHLIRKEEAIGGIILSASHNPGGIEGDFGVKLNTANGGPASESITNQIFQCSQSLKSYKISKIKIPDLDKFGLFSFGETSLEIIDGFKDYSNLMENIFDLDQIGDFLKKDFSLIFDAMNAVTGPYAKNIFVEKMGLIDDCVMNGIPLEDFGRLHPDPNLTYASKLA

SEQ ID NO: 156866 - protein, 161 aa, Unknown
  Bacterial polypetide isolated from the Sargasso Sea
MNQVSVININSPFLDQKPGTSGLRKSTLKFQEEHYLEVFIEAILQSLEDLKGSTLVVGGDGRYGNIEAIEKIVQICIAHKVQKVIVPKYGLLSTPATSHLIRKEKAIGGIILSASHNPGGIDGDFGVKLNISNGGPAPEIITNKIFEASQLLTSYKICKIQ

SEQ ID NO: 156867 - protein, 237 aa, Unknown
  Bacterial polypetide isolated from the Sargasso Sea
CVPGYKDGITGVARSMPTSSAVDNVARALNIPCFETPTGWKFFGNLLDSNLITLCGEESFGTGSNHVREKDGLWAVLYWLQVLAEKKCSVSDLMQNHWKQFGRNYYSRHDYEAIPSNIANLIFGNLTSMLENLKGNSFAGHLVKVADNFSYLDPVDNSISENQGLRLVLDDNSRVIVRLSGTGTKGATLRLYFEKFFNPQQNLSLSPQIALKPLISDLDALLNISKLTQMETPTVIT

SEQ ID NO: 156868 - protein, 202 aa, Unknown
  Bacterial polypetide isolated from the Sargasso Sea
MNQVSVININSPFLDQKPGTSGLRKSTLKFQEEHYLEVFIEAILQSLEDLKGSTLVVGGDGRYGNIEAIEKIVQICVAHKVQKVIVPKYGLLSTPATSHLIRKENAIGGIILSASHNPGGIDGDFGVKLNISNGGPAPEIITNKIFKASQLLTSYKICKIQIPDFSEYGTYSYDETTLEIIDGLTDYSNLMEKIFDFDQISD

SEQ ID NO: 156869 - protein, 119 aa, Unknown
  Bacterial polypetide isolated from the Sargasso Sea
MNQVSEININSPFLDQKPGTSGLRKSTLKFQEEHYLEVFIEAILQSLGDLKGSTLVVGGDGRYGNIEAIEKIVQICIAHKVQKVIVPKFGLLSTPATSHLIRKENALGGIILSASHNPG

SEQ ID NO: 156870 - protein, 273 aa, Unknown
  Bacterial polypetide isolated from the Sargasso Sea
ALLGLRKSTLRFKEEHYLEIFIEAIFKSLNNLRGSTLVVGGDGRYGNIEAIKKIIQICVAHEVGKVIIPKNGLLSTPATSHLIRKEGAIGGIILSASHNPGGIHGDFGVKLNTANGGPAAESITNQIYKCSQSLMSYKISNVKIPDIDKLGVFFFGETSLEIIDGLKDYSNLMENIFDFDQISDFLKKDFSLIFDAMNAVTGPYAKNIFVEKMGLVDNCVMNSVPLEDFGGLHPDPNLTYASKLADLLLVQKAYSFGAACDGDGDRNMILGQG

SEQ ID NO: 156871 - protein, 248 aa, Unknown
  Bacterial polypetide isolated from the Sargasso Sea
GGATAVHDCTASAAVTVVPTEPIEGQKPGTSGLRKKTKVFQGEKYLENFVQSLFDSLPAGELAGTTLVVSGDGRYHNAAAIQTICRMAAANGVARVWVGRGGLLSTPAASAIIREREGGAAYGGIVLTASHNPGGPDEDFGIKYNVQNGGPALESLTDAVYERTGAIKEFKLCEGLPAVDLQSVGRHVYAEEGGAPFFEVEVVDPAEDYLVLMRKAFDLDALKALLARDDMSFVFDGMHGVAGPYAAS

SEQ ID NO: 156872 - protein, 194 aa, Unknown
  Bacterial polypetide isolated from the Sargasso Sea
MTEVNVIHIDSPFLDQKPGTSGLRKSTLKFQEQHYLEIFIESILESLENLQGSTLVVGGDGRYGNIEAIEKIVQICIAHKVQKVLVPKCGLLSTPATSHLIRKENAIGGIILSASHNPGGINGDFGVKLNISNGGPAPEMITNKIFKLSQLLTSYKICKIQLPDFSEYGTYIFGETTLEVIDGLERYFYLMEKI

SEQ ID NO: 156873 - protein, 203 aa, Unknown
  Bacterial polypetide isolated from the Sargasso Sea
MNQDSVININSPFLDQKPGTSGLRKSTLKFQEEHYLEVFIEAILQSLEGLKGSTLIVGGDGRYGNIEAIEKIVQICIAHKVQKVIVPKYGLLSTPATSHLIRKENAIGGIILSASHNPGGIDGDFGVKLNISNGGPAPEIITNKIFKASQLLTSYKICKFQLPDFSEYGIYAYDETTLEIIDGLTDYSNLMEKIFDFDQISDF

SEQ ID NO: 156874 - protein, 233 aa, Unknown
  Bacterial polypetide isolated from the Sargasso Sea
YKDGITGVARSMPTSSAVDNVARALNIPCFETPTGWKFFGNLLDSNLITLCGEESFGTGSNHVREKDGLWAVLYWLQVLAEKKCSVSDLMQNHWQQFGRNYYSRHDYEAIPSNIANQIFGNLTSMLENLKGTNFAGHSVKIADNFSYLDPVDNSISENQGLRLVLDDNSRVIVRLSGTGTKGATLRLYFENFFNPQQNLSLNPQVALKPLINDLDALLNISKLTQMETPTVIT

SEQ ID NO: 156875 - protein, 174 aa, Unknown
  Bacterial polypetide isolated from the Sargasso Sea
MTQVNVVNIKSPFLDQKPGTSGLRKSTLKFQEDHYLEIFIEAILQSLEDLKDSTLVVGGDGRYGNIEAIEKIVQICIAHKVQKVIIPKNGLLSTPATSHLIRKENAIGGIILSASHNPGGINGDFGVKLNISNGGPAPEIITNKIFKASQLLTSYKICKIQLPDFSEYGTFSYG

SEQ ID NO: 156876 - protein, 262 aa, Unknown
  Bacterial polypetide isolated from the Sargasso Sea
RNMILGSGCFVNPSDSLAVITANTKCVPGYKDGITGVARSMPTSSAVDNVARALNIPCFETPTGWKFFGNLLDSNLITLCGEESFGTGSNHVREKDGLWAVLYWLQVLAEKKCSVSDLMQNHWKQFGRNYYSRHDYEAIPSNIANQIFGNLTSMLENLKGNSFAGHLVKVADNFSYLDPVDNSISENQGLRLVLDDNSRVIVRLSGTGTKGATLRLYFEKFFEPQQNLSLNPQIALKPLIDDLDTLLNISKLTQMETPTVIT

SEQ ID NO: 156877 - protein, 106 aa, Unknown
  Bacterial polypetide isolated from the Sargasso Sea
MNQVSIININSPFLDQKPGTSGLRKSTLKFQEEHYLEVFIEAILQSLEDLKGSTLVVGGDGRYGNIEAIEIIVQICIAHKVQKVIVPKSGLLSTPAASHLIRKEKA

SEQ ID NO: 156878 - protein, 142 aa, Unknown
  Bacterial polypetide isolated from the Sargasso Sea
MTQVNVININSPFLDQKPGTSGLRKSTLKFQEDHYLEIFIEAILQSLEDLQDSTLVVGGDGRYGNIEAIEKIVQICIAHKVQKIIVPKYGLLSTPATSHLIRKENAIGGIILSASHNPGGIDGDFGVKLNISNGGPAPEIIT

SEQ ID NO: 156879 - protein, 113 aa, Unknown
  Bacterial polypetide isolated from the Sargasso Sea
MTEVNVINTNSPFLDQKPGTSGLRKSTLKFQEEHYLEIFIEAILRSLEDLQVSTLVVGGDGRYGNIEAIEKIVQICVAHKVQKVLVPKGGLLSTPATSHLIRKRKCYWVVLFF

SEQ ID NO: 156880 - protein, 156 aa, Unknown
  Bacterial polypetide isolated from the Sargasso Sea
MTQVNVININSPFLDQKPGTSGLRKSTLKFQEEHYLEIFIEAILQSLEDLQCSTLVVGGDGRYGNIEAIEKIVEICVAHKVKKVIVPKNGLLSTPATSHLIRKENAIGGIILSASHNPGGIDGDFGVKLNISNGGPAPEIITNKIFKASQLLTNYK

SEQ ID NO: 156881 - protein, 136 aa, Unknown
  Bacterial polypetide isolated from the Sargasso Sea
MTTSAPAESTQRQVPLATPFTDQKPGTSGLRKSSRQFEEPHYLESFIEASLRTLPGVQGGTLVVGGDGRYGNRRAIDVILRMGAAHGLSKVIITTGGILSTPAASNLIRQRQAIGGIILSASHNPGGENGDFGVKV

SEQ ID NO: 156882 - protein, 223 aa, Unknown
  Bacterial polypetide isolated from the Sargasso Sea
MNQFNVININSPFLDQKPGTSGLRKSTLKFQEEHYLEIFIEAILQSLEDLKGSTLVVGGDGRYGNFEAIQKIVQICVAHKVQKVIVPKYGLLSTPATSHLIRKEKAIGGIILSASHNPGGIDGDFGVKLNISNGGPAPEIITNKIYKASQLLTSYKICKIQLPDFSKYETYSYGETTLEIIDGLKDYSNLMEKIFDFDQISDFLKKDFSLIFDAMNAVTGPYA

SEQ ID NO: 156883 - protein, 170 aa, Unknown
  Bacterial polypetide isolated from the Sargasso Sea
MNQVNVININSPFLDQKPGTSGLRKSTLKFQEEHYLEIFIEAILQSLEDLKGSTLVVGGDGRYGNIEAIEKIVQICIAHKVQKLIVPKYGLLSTPATSHLIRKENAIGGIILSASHNPGGIDGDFGVKLNISNGGPAPEKITNKIFKASQLLTSYKICKIQLPDFSEYGT

SEQ ID NO: 156884 - protein, 63 aa, Unknown
  Bacterial polypetide isolated from the Sargasso Sea
MNQVSVININSPFLDQKPGTSGLRKSTLKFQEEHYLEVFIEAILQSLEDLKGSTLVVGGDGRY

SEQ ID NO: 156885 - protein, 249 aa, Unknown
  Bacterial polypetide isolated from the Sargasso Sea
MKRCFLVVIDSLGVGEAPDADKYGDLGTNTLSNVASAVGGVSLPTMEKLGFGKITEVKNMNTDHIATVGRLSEKSIGNDSTTGHWELAGLITEEDFSTYPDGFPKDLIHSIEQEANIEFIGNKHASGTEILKELGREHLSSGKLILYTSADSVFQIASHENICSVEKLYKICKISRKYCDEYNIGRVIARPFIGEYDNFVRTYDRKDFGMNPPGETILSYLYKNNLSTYGIGKISDLFGDKFLTTAVHT

SEQ ID NO: 156886 - protein, 183 aa, Unknown
  Bacterial polypetide isolated from the Sargasso Sea
MKRCFLVVIDSLGVGEAPDADKYGDLGTNTLSNVANAVGGVNLPTMEKLGFGKITEVKNMDTNHIATVGRLSEKSIGNDSTTGHWELAGLITEQDFSTYPEGFPQELIHSIQKEANIEFIGNKHASGTEILKELGREHLSSGKLILYTSGDSVFQIAAHENVCSVEELYKICEISRKYCDEYN

SEQ ID NO: 156887 - protein, 171 aa, Unknown
  Bacterial polypetide isolated from the Sargasso Sea
NRQDFYITSTKYTPLCDKVIKSGKKCFGIGKIADIFGHRGISKSISGMTDEKLFDEMLHVVAKANTGDLIFANFVEFDTLYGHRRDLPGYARALEKFDKQLPKLFSILNRDDFLLITADHGNDPTFTGTDHTREQVPVLIKKHNLRNKCYGSINFSDIGSLVETFLRLKKH

SEQ ID NO: 156888 - protein, 283 aa, Unknown
  Bacterial polypetide isolated from the Sargasso Sea
MGKAVLIVLDSLGIGGAPDASFYNDEGANTFGSIATACANGDADTGRKGSLMIPNLESLGIYSATRLSTGLTFPNTDNTIGSYAVAQERSMGKDTPTGHHEIVGFTNPVGWHTFSEVVPVFPEKKMKTLIQRAKLSGVLGNKHSSGEEIIKEFGEKHLNSGRPIVYTSADSVLQIAAHEHVFALDRLYKTCEIAAEIFDELRVQRIIARPFLGEKKGEFFRTKNRKDFISPPPIDTLCDKVIKSGKKCFGIGKIADIFGQRGISESISGMSDDKLFEEMLKII

SEQ ID NO: 156889 - protein, 193 aa, Unknown
  Bacterial polypetide isolated from the Sargasso Sea
MVTYQILGSNTVLHIAEHMQKKGRPLNLPQLNALGLGSAIYHSVGIEHPNLPVEKAANWAVGIESSKGKDTPSGHWELAGLPVTWDWHYFKDKTNSFPKEIISAICRIAQVDGILGNKHASGVEIIEEFGQLHVETSRPICYTSADSVFQIAAHETAYGLERLYALCEKLAPIMHNLKVGRVIARPFIGSTDE

SEQ ID NO: 156890 - protein, 83 aa, Unknown
  Bacterial polypetide isolated from the Sargasso Sea
YARALENFDKQLPKLFSILNKDDFLVITADHGNDPSFAGTDHTREQVPVLIKNQKLVNKCYGLINFSDIGSLIENFLRLETYD

SEQ ID NO: 156891 - protein, 343 aa, Unknown
  Bacterial polypetide isolated from the Sargasso Sea
MKRCFLVVIDSLGVGEAPDAKQYGDEGVNTLGNVAKHVQGVDLPTFDKLGFGKITNVLGLGTEHIATVGRLSEVSTGNDSTTGHWEIAGLITTQEFKTFPDGFPHELTSKIEDEIGFKFIGNIHASGTEIIKDLGEQHMQTKELILYTSGDSVFQIAAHEDVCSLEELYRICEISRKHCNQYNIGRVIARPFRGPINAFERTYDRKDYGMNPPGETLLSYVSKNNLKTYGIGKISDLFGIEFLSSYVHTEGDQNGIDYLLKEVEYGDNDFTFVNLVDLDMLYGHREDPDGYYKGLQIIDKGLEKVIELFKRNDLLIFTGDHGTDPTDGKTDHSREYVPFCAYK

SEQ ID NO: 156892 - protein, 97 aa, Unknown
  Bacterial polypetide isolated from the Sargasso Sea
MKRAFIMVLDSFGIGATEDADRFGDVGSDTMGHIAEACAKGEADNGRKGPLNLPNLTRLGLVKAHEGSTGKIAAGMDGNAEVIGAYAWAHELLPGKT

SEQ ID NO: 156893 - protein, 254 aa, Unknown
  Bacterial polypetide isolated from the Sargasso Sea
MPRVCILLMDSFGVGASLDAKDFGDEGADTLGAIYQGYANAHAGQSLAMPNLLRLGLGHVHVASTGKKYFDLATLPDPQSQWGYAVEQSVGKDTPSGHWEIAGVPVLSPWGMFPKTQPCFPTSLINAICQQANLPGVLGEKHASGTEILVELGEAHIETGKPIFYTSADSVLQIAAHESHFGLQRLYDVCEIARREVDALDIGRVIARPFVGTQASDFKRTANRRDYATPPPAATLLDVLKDAGRDVISIGKID

SEQ ID NO: 156894 - protein, 201 aa, Unknown
  Bacterial polypetide isolated from the Sargasso Sea
MKKCILIVIDSLGVGAAPDAKKYGDEESNTFGNVSKVNGELNLPTFNRLGFGKITTINGLDSEKYVSTVGKLAEKSTGNDSTTGHWEIAGLISESDFNIFPNGFPEELVNRVSNETGFEFLGNFHASGTEIINNLGEEHLATKKLILYTSGDSVFQIAAHEDVLSVEKLYDVCKTARKICNDYNIGRVIARPFRGKPNKFE

SEQ ID NO: 156895 - protein, 326 aa, Unknown
  Bacterial polypetide isolated from the Sargasso Sea
MKKCILIVIDSLGVGAAPDAKKYGDEKSNTFGNVSKVNGELILPTFNKLGFGKITTINGLDSEKYIATVGKLAEKSTGNDSTTGHWEIAGLISESDFNIFPNGFPEDLVNRVSDETGFEFLGNFHASGTEIINDLGEEHLATKKLILYTSGDSVFQIAAHEDVLSVEKLYDVCETARIICNDYNIGRVIARPFIGKPNNFERTYDRKDFGITPPGETLLSYLHKNNFKTLGIGKISDLFGDEYLDSSIHTEGDTDGFNTLIKSYKKGLFDFYFINLVDLDMLYGHREDPVGYYEGLKIIDKYLEKLIEILDDEDLLILTGDHGTDP

SEQ ID NO: 156896 - protein, 331 aa, Unknown
  Bacterial polypetide isolated from the Sargasso Sea
INGLDSEKYIATVGKLAEKSTGNDSTTGHWEIAGLISESEFKIFPNGFPEDLVNKVTDETGFEFIGNFHASGTEIINNLGEEHLATKKLILYTSGDSVFQIAAHENVLSIEKLYDVCKTARIICNDYNIGRVIARPFRGKPTNFERTYDRKDFGITPPGETLLSYLHKNNFKTLGIGKISDLFGDEFLHSSIHTEGDQDGLNTLIKTYSEGLYDLYFINLVDLDMLYGHREDPIGYYEGLKIIDKNLNKLMKILNDEDLLILTGDHGTDPTDGKTDHSREYVPLVAYKNNLKGNNIGEKDSFSVIASSITEFFNLKNIFYGDSFLEEIIKK

SEQ ID NO: 156897 - protein, 385 aa, Unknown
  Bacterial polypetide isolated from the Sargasso Sea
MSKCILIVIDSLGVGEAPDAESYGDIGANTFGNVAKANGQLNLPTFEKLGFGAITNINGLKDEVTCSIVGKLAESSKGNDSTTGHWEIGGLITQRDFSVFPKGFPSELIDKISLETGHEFIGNYHASGTEIINELGEEHLSSGKLILYTSGDSVFQIAAHEDILPVNELYKICKISREYCNEYNIGRVIARPFIGDKGNFQRTYDRKDFGITPPGETILSQLFKNGKNSLGIGKISDLFSDEFLSNSIHTEGDKNGLEILISEYEDNRYDFYFINLVDLDMLYGHREDPAGYYDGLKIIDNGLDKLISVLNDDDIIIITGDHGTDPTDGKTDHSREYVPFIIYRNNLKPKYIGEGDTFSDIAATISDIYEIENIFPGKSSANHLS

SEQ ID NO: 156898 - protein, 384 aa, Unknown
  Bacterial polypetide isolated from the Sargasso Sea
MPKCILIVIDSLGVGEAPDAELYGDKGSNTFGNVSKANGGLELPTFEKLGFGAITEIEGLNNQNSFSIVGKLAEASKGNDSTTGHWEIAGLVTKKDFAVFPDGFPVELVDNISKDIGYGFIGNFHASGTEIINDLGKEHLETKKLILYTSGDSVFQIAAHEDILSTNELYKICEISRMHCNDYNIGRVIARPFIGTIGNFKRTYDRKDFGISPPGDTLLSQLFQNDISTLGIGKISDLFGEEFLNKSIHTEGDENGMQILLDNYKSADYDFYFINLVDLDMLYGHREDAQGYYEGLKIIDKHLSKLMDNLHDDDVLIITGDHGTDPTDGKTDHSREYVPFVIYKNDINPKNIGSGNTFANIASTISEFYGLENIFPGKSFIQDI

SEQ ID NO: 156899 - protein, 385 aa, Unknown
  Bacterial polypetide isolated from the Sargasso Sea
MSKCILIVIDSLGVGEAPDAESYGDIGANTFGNVAKANGELYLPTFEKLGFGAITNINGLEDEVTCSIVGKLAESSKGNDSTTGHWEIGGLITQKDFSVFPKGFPSELIDKISSESGYEFIGNYHASGTEIINELGEEHLRSGKLILYTSGDSVFQIAAHEDILPVNELYKICKISREYCNEYNIGRVIARPFIGEKDNFQRTYDRKDFGITPPGETILSQLFKYGKNSLGIGKISDLFGDEFLSNSIHTEGDKNGLEILINEYEDNSYDFYFINLVDLDMLYGHREDPAGYYEGLKIIDDGLDKLMSVLNDEDIIIITGDHGTDPTDGKTDHSREYVPFVIYKKNLNPKYIGEGNTFSDIASTISDIYEIENIFPGKSSANHLS

SEQ ID NO: 156900 - protein, 215 aa, Unknown
  Bacterial polypetide isolated from the Sargasso Sea
AWDGDFDRCFLFDADGEFIEGYYIVGLLAEAFIEKNTDSKIIYDPRVYWNTEDIVANAGGTPIKSKTGHAFIKERMRKEDAVYGGEMSAHHYFRDFAYCDSGMIPWLLIAELVCVKKQTLASMVKARIEAFPSSGEINSKLKDADAALERVTSKYQPLASVIETTDGLGLEFGTWRFNLRKSNTEPVIRLNVESKGDIALMEQKTEELLSLIRAE

SEQ ID NO: 156901 - protein, 146 aa, Unknown
  Bacterial polypetide isolated from the Sargasso Sea
LLRYVADLDIPIKRGTFVEFRSGMLNVSPIGRNCSQEERDEFERFDKEAGVRTKMVETLKKEFAEYGLTYSIGGQISFDVFPNGWDKTYCLQFVEKDFDVIHFFGDKTYPGGNDHEIFESPKTIGHTVTSPEDTRKQVTEHILDKL

SEQ ID NO: 156902 - protein, 195 aa, Unknown
  Bacterial polypetide isolated from the Sargasso Sea
PGNMWWVCLPKSSKQRKGATIIHDPRVIWNTIEVVTKCGGRAVASRTGHALVKAAMRNLDAIYGGEMSAHHYFRDFAYCDSGMIPWLLVWEYLSMSDLLLSDLIAVRKTCFPSSGELNFRVSNAATCIERAQNHYAANANLIDELDGLSMFFENWRFNLRKSNTEPLVRLNIETKGDLFLLKEKINEMTNLIKQP

SEQ ID NO: 156903 - protein, 234 aa, Unknown
  Bacterial polypetide isolated from the Sargasso Sea
MSRVLALFDVDGTLTEPRKKSDDVMRAFMRDLRSKVTVGIVGGSDLTKISEQLGDGVEREYEYVFSENGLVAHERGALLAKQSLREFLGEDKLKKFINFVLRYVADLDIPIKRGTFVEFRSGMLNVSPIGRNCSQEERDEFERFDKEAGVRTKMVETLKKEFAEYGLTYSIGGQISFDVFPNGWDKTYCLQFVEKDFDVIHFFGDKTYPGGNDHEIFESPKTIGHTGRLRKTRA

SEQ ID NO: 156904 - protein, 221 aa, Unknown
  Bacterial polypetide isolated from the Sargasso Sea
MGELDCFKAYDVRGEIGRTFNPEICYRISRAFAKVLGTKRVVIGHDARSTSIDFTECAIEGLIHEGVEVFELGLCGTEEVYWATTNFNACGGIQVTASHNPINYNGLKFVKSQSRPLNSMQELAVIKDLAEKEKFGDRKKSGIRRDFREEARESYIKKLLTFVDTALFRDYKVVVNSGNGAAGPTFECLKRKLSDLSCPLIFEHMFSEPDGNFPMEFQIYE

SEQ ID NO: 156905 - protein, 283 aa, Unknown
  Bacterial polypetide isolated from the Sargasso Sea
EFGSDAGVEITASHNPIEYNGMKIVKRGSKPLSNQEFVNIKKLAEKNEFPVSKRIGLVKDKRANARTAYVKKVLDFVTLPNLRPLKIVLNSGNGAAGPTIDALNFYLKEKGVKTNFVYVNHQPDSSFPNGIPNPLLEENRSSTADAIIEEKADFGVAFDGDFDRCFFFDHFGNFIPGEYIVGLLAKIFLSKEKGATIIHDPRVIWNTVDVVKNCGGYGVLSKTGHAFVKATMRDFGAIYGGEMSAHHYFRDFNYCDSGMIPWLTIWELLSISNFSLATLIEKR

SEQ ID NO: 156906 - protein, 212 aa, Unknown
  Bacterial polypetide isolated from the Sargasso Sea
GDFDRCFLFDADGEFMRGYYIVGLLAEAFIEKNTDSKIIYDPRVYWNTEDIVANAGGTPIKSKTGHAFIKERMRKEDAVYGGEMSAHHYFRDFAYCDSGMIPWLLIAELVCVKKQTLASMVKARIEAFPSSGEINSKLKDADAALERVTSKYQPLASVVDTTDGLGLEFDTWRFNLRKSNTEPVIRLNVESKGDIALMEQKTEELLSLIRSE

SEQ ID NO: 156907 - protein, 245 aa, Unknown
  Bacterial polypetide isolated from the Sargasso Sea
MSRVLALFDVDGTLTEPRKKSDDVMRAFMRDLRGKVTVGIVGGSDLTKISEQLGDGVEREYEYVFSENGLVAHERGALLAKQSLREFLGEDKLKKFINFVLRYVADLDIPIKRGTFVEFRSGMLNVSPIGRNCSQEERDEFERFDKEAGVRTKMVETLKKEFAEYGLTYSIGGQISFDVFPNGWDKTYCLQFVEKDFDVIHFFGDKTYPGGNDHEIFESPKTIGHTVTSPEDTRKQVTEHILDKL

SEQ ID NO: 156908 - protein, 123 aa, Unknown
  Bacterial polypetide isolated from the Sargasso Sea
FREFAYCDSGMIPWLLIWQLLSKNNTDLANLVSHRKYKFPSSGEINFKVDDALSCLTRVKERYISSSKIYDELDGLSMNFENWRFNLRSSNTEPLVRLNVETKGDKTLLKSKVEQLTKLINNA

SEQ ID NO: 156909 - protein, 332 aa, Unknown
  Bacterial polypetide isolated from the Sargasso Sea
MDSGLDEIKNIAEASESKTDKEPFIEIIDVKNEYIDKLMEFIDPKKIKPMKIVTNSGNGCAGPILDMLEDKLPIEFIKIQNEPDGSFPNGIPNPLLPENRKITSKAVIEHSADLGIAWDGDFDRCFFFDSNGEFIESYYLIALLGEQLLKQSPGESIVHDPRLVWNTVEEVDGFGGTPVISKSGHSFIKETMRENNSVYGGEMSGHHYFRDFYYSDSGMIPWLLLIENASVSGSTLTDLVKNMISKFPVSGEINRTVSEPEKLLEKIKDHYLSFDPIIDNLDGYSFDFGSWRFNLRMSNTEPLVRLNVESRNDAHLMQTKTEEVLELIEKLG

SEQ ID NO: 156910 - protein, 452 aa, Unknown
  Bacterial polypetide isolated from the Sargasso Sea
MWSTDCFKTYDIRGIVPTQLNEELAYRIGRALCQQLSAKIVVIGHDIRLSSPSLSAALAQGLQEGGADVIDIGLCGTEQVYFSVFHLEADAGVCVTASHNPAIFNGMKFVGKGSTPISADTGLNAIRDLVANAEFAAPVDVGSYQQQNTLPAYVDHLLTYLDVQALKPLKVVMNPGNGGAGLVVNALAPLLPIQIIPLQFEPDGTFPHGVPNPLLVENRLSTSAAIQAHQADLGVAWDGDFDRCFFFDEQGQFVDGYYLVSLLAQALLLKNPAEKIIYDPRLYWATQQTVKAAGGVPVISKTGHAYIKEKMRSEDALYGGEISAHHYFRDFAYCDNGTIPWLLILALLSATGQPLSALVLQLQHQFPCSDELNFKVTDAKAAIAAIAALYQHKALEVELLDGLGLNFADWRFNLRMSNTEPLLRLNVETRADAKLLATKIAELTSALQPFLV

SEQ ID NO: 156911 - protein, 418 aa, Unknown
  Bacterial polypetide isolated from the Sargasso Sea
AEFLSPKIVVVGFDIRLTSCELNDALIRGLRDSGVDVVNIGLCGTEEIYFATSHLNVDGGIIVTASHNPKNYNGMKFVRKNSVPISGDTGLNEIREIAESNLFKDSSVKGKISSANLRDAYVDHLLSYIDLNALKPIRVVCNAGNGAAGLVIDQLEKVLPIEFVKIHHEPNGEFPNGVPNPLLEENRLPTIEAIKNNNAQLGIAWDGDFDRCFFFDEHGRFIEGYYIVGLLSHFFLSNSAGSKIVHDPRLTWNTVAVTKIFGGQAVCCKTGHAFMKERMRSEDAIYGGEMSAHHYFKDFFYCDSGMIPWILVIQMMADQDKSLSELVNQYMTAFPASGEINIAVENPEGLIQKIKFRYQKSAEAIDNIDGLSMSFKDWRFNLRMSNTEPVIRLNVESRGNADLMHEKTEELLKHISGS

SEQ ID NO: 156912 - protein, 265 aa, Unknown
  Bacterial polypetide isolated from the Sargasso Sea
ISKNVPIEIIKQNFDPDSSFPNGIPNPMIEENRASTSQAVIDNKADLGIAWDGDFDRCFFFDEKGNFIEGYYLVGLLAKSFLIKNRNEKVIYDPRLTWNTIDVVKRHGGDAIQCQSGHSFIKKSMRDNDAVYGGEMSAHHYFRDFYYCDSGMIPWLLILEMISKEKMPLSQMIQKYREKYPVSGEINLKVSNTKTIIDSIKEYYLDDALGVDETDGVGMEFEKWRFNLRASNTEPLIRLNVESNSNESLMNEKTRELVDRINSLD

SEQ ID NO: 156913 - protein, 185 aa, Unknown
  Bacterial polypetide isolated from the Sargasso Sea
MVTELTCFKAYDVRGEVGNNFDSAICYRICRSFARVLNTKRVVIGYDARSTSINLTESAIEGLKDEGVEVFELGLCGTEEMYWATTYFNACGGIEVTASHNPINYNGLKFVKSRSRPLEPKTELIEIKNFAEQNKFGPKKKSGARFDISKESRESYVKKILTLINYNDFQNYKVVINSGNGAAGP

SEQ ID NO: 156914 - protein, 159 aa, Unknown
  Bacterial polypetide isolated from the Sargasso Sea
MAGGSAEQSKTGHAFIKETMRRVDAVYGGEMSAHHYFRDFAYCDSGMIPWLLVAEIMSTTGKTLASLVEERTKAFPCSGEINRTVSDAQALIGKVEALYADGANTIEHMDGLSLSYDDWRFNLRMSNTEPVVRLNVESRGDEALMAEKTQELLAIIDAA

SEQ ID NO: 156915 - protein, 307 aa, Unknown
  Bacterial polypetide isolated from the Sargasso Sea
LAEESNFSQPHKTGVILNKKEAARAAYVEKVLGFMDYSSLKPLKIVINSGNGAAGPTVNAINKNLKEKGIETNFIFLHHDPDPTFPNGIPNPLLEQNRLSTVDAVITEKADFGVAFDGDFDRCFFFDNSGDFIPGEYVVGLLAEIFLKKEKGASIIHDPRVVWNTLDVVGQCSGQAVVSKTGHAFMKDTMRKADAIYGGEMSAHHYFRDFAYCDSGIIPWLLVWEHLSTFNFSLLDLISERRNRFPSSGELNFKVSHAAACIARVQNHFASKATSINQLDGLSMSFDTWRFNLRKSNTEPLVRLNMR

SEQ ID NO: 156916 - protein, 451 aa, Unknown
  Bacterial polypetide isolated from the Sargasso Sea
MNKEISCFKAYDVRGRIPSELNEDVAYRIGVGIASFFSAKSVVVGYDVRPSSIEILNALTKGINSMGAKVYSIGLCGTEEIYFATNHLETDAGVMITASHNPADYNGLKIVGKGAKPVSMNSGLGEIKKIADQSESNLLAESHIEVVDIKAAYIEKLLEFIDSDAIKPMHIVTNAGNGCAGPILDLLEERLPLKFTKIQNDPDGTFPNGIPNPLLPENRDITSKAVIENSADLGIAWDGDFDRCFFFDSNGDFIENYYLIGLLSEQLLKLSPGDSIVHDPRLVWNTVEEVNSFGGIPTISKSGHSFIKEVMRENNSIYGGEMSGHHYFRDFYFSDSGMIPWLLLVENVSASGSNLTHLVKDRINKFPVSGEINRTVSNPEELLETVKDHYLKLDPNVENLDGYSLDFGAWRFNLRMSNTEPLVRLNVETRGDIDLMKSKTEEILNLIEDLG

SEQ ID NO: 156917 - protein, 435 aa, Unknown
  Bacterial polypetide isolated from the Sargasso Sea
IPSELNEDVAYRIGAGVASYFGAESVVVGYDVRPSSIDILNALTKGINSKGAKVYSIGLCGTEEIYFATNHLNTDAGVMITASHNPADYNGLKIVGKGAKPVSMDSGLDEIKKIAEASESKNNKEPVIEIIDVKNEYIEKLMEFIDPKKIKPMKIVTNSGNGCAGPILDMLEDKLPIEFIKIQNEPDGSFPNGIPNPLLPENREITSKAVIGHSADLGIAWDGDYDRCFFFDSGGEFIESYYLIALLSEQLLKQSPDDKIVHDPRLVWNTVEEVNGFGGTPIISKSGHSFIKESMRENNSVYGGEMSGHHYFRDFYYSDSGMIPWLLLIENASVSGSTLTDLVKNMISKFPVSGEINRTVSEPEKLLEKIKDHYLSFDPIIDNLDGYSFDFGSWRFNLRMSNTEPLVRLNVESRNDAHLMQTKTQEVLELIEKLG

SEQ ID NO: 156918 - protein, 458 aa, Unknown
  Bacterial polypetide isolated from the Sargasso Sea
MLGKLNCFKAYDVRGEIGQNFNPEICYRISRAFAKFFQAKRIVIGYDARSTSIDLTESAIQGLRDEGAEVFELGLCGTEEVYWATTNFNACGGIEVTASHNPINYNGLKFVKSQSRPLDPIKELAIIKNLAEEGKFGPKKKSGIRHNIGEAARESYINKLLTFVDTSLFRDYKVVVNSGNGAAGPTFDCLKNKLSDLSCPLIFEHMFAEPDGNFPNGIPNPMNSENQIPTRAKVLESSADLGIAFDGDFDRCFICDEKGNFIEGEYIVALLSEIFLKREVGATIVHDPRVIWAIQETVKRNSGTSIQSTTGHAFFKKKIRESNAIYGGEMSAHHYFRDFCFCDSGMIPWLIIVEFMSLQDLSLSEIIKCRRVNFPSSGEINFQVRDCDIAMARISENFSKDYVYKDYSDGLSLTFTDWRLNLRQSQTEPLIRLNIESRGNRELISKKLDEISALLREC

SEQ ID NO: 156919 - protein, 58 aa, Unknown
  Bacterial polypetide isolated from the Sargasso Sea
TPKATDSERFGKLHRAMLERGVYLPPSAFEAGFTSLAHSEADIEATVNAFRESFAEVA

SEQ ID NO: 156920 - protein, 299 aa, Unknown
  Bacterial polypetide isolated from the Sargasso Sea
MNKNISLKEWQRRAQKVLPGAGFGNFDPSISLKRGLGSRVWDEDNKEYIDFLIGSGPMILGHGNEEVLDAIRAQLGEGLTFFTNNSKGIELAEEICNAVKCAEQIRFVSSGGEADMYAMRLARAHTGRNKIFKFEGGYHGMSGDSLMSLAPNKMVNFPLAVPDSAGIPEAVRDDILVAPFNDPQVATEIMNEYSDQIAGVIVEPLQRIIPPIKGFLEHLRAETKRIGALLIFDEIVTGFRLAYGGAQELYGVVPDLCTLGKIIGGGLPLAAIAGEKEIMDHFDKNIVGRRKVYFPNRYP

SEQ ID NO: 156921 - protein, 145 aa, Unknown
  Bacterial polypetide isolated from the Sargasso Sea
MKSSNREEIIEHNAKELFDIVLDIESYPYFIPWCSAMKVHSKSDKEIYADMIVWYKYFMPQKFGSHVEFDKKNLNIKTTYIEGPLKDLKTSWLFKYLKKNKTLISFNVEFEFKRFFHQKIAEAFYPLIENKMIESFKDRADEILD

SEQ ID NO: 156922 - protein, 119 aa, Unknown
  Bacterial polypetide isolated from the Sargasso Sea
MKSSNREEIVEHNARELFDIVLDIESYPYFIPWCSAMKVHSKSDNEIYADMIVWYKYFMPQKFGSHVEFDKKKLNIKTTYIEGPLKDLKTSWFFKSLKKNQTLISFNVEFEFKRFFHQK

SEQ ID NO: 156923 - protein, 121 aa, Unknown
  Bacterial polypetide isolated from the Sargasso Sea
DDLAAIIVEPIAGNMGFIPGEHRFLSALRELCNKFESLLIFDEVMSGFRVAVGGAQAIYEIKPDLTALGKVIGGGLPVGSFGGKQPIMDTTCPNGSYISSRNIIGKSACNECRDSLAKCFS

SEQ ID NO: 156924 - protein, 145 aa, Unknown
  Bacterial polypetide isolated from the Sargasso Sea
MKSSNREEIVQHNAQELFDIVLDIESYPYFIPWCSAMKVHSKSESEIYADMIVWYKYFMPQRFGSHVQFDKKKLNIKTTYIEGPLKDLKTSWFFKSLKKNQTLISFNVEFEFKRFFHQRIAEAFYPLIENKMIESFKERADEILD

SEQ ID NO: 156925 - protein, 121 aa, Unknown
  Bacterial polypetide isolated from the Sargasso Sea
MKTKNSEALFKKSKEHIAGGVNSPVRAFKSVGGTPIFFRKSRDCYIYDEDGNKYLDFVGSWGPMVLGHSNKQIIDAIKKQASKAISFGAPTKNELEIAKIIKSYFPSMEKIRMVNSGTEAT

SEQ ID NO: 156926 - protein, 106 aa, Unknown
  Bacterial polypetide isolated from the Sargasso Sea
MNLFSEAKKVIAGGVNSPARSFSGVGGEPLFFKSAKGAYIKTEGDRELIDYVGSWGPMILGHSFPPVLNSIKKAIENGLSFGAPTTIETKLAKKVKDFIPSIEKLR

SEQ ID NO: 156927 - protein, 246 aa, Unknown
  Bacterial polypetide isolated from the Sargasso Sea
SFYDIDFISSIITKFKDKIAGIIVEPLQRIIPPEPGFLEGLRNLCDKNNILLIFDEIVTGFRLAYGGAQEKYNVTPDLCTLGKIIGGGFPLAAIAGSNEIMSHFDQNKVGKDKWLMQIGTLSGNPIAAAAGLKTMEVLRRENMFDKLRKCGNEIMNCLNENLKNANIGHRIVGDPTLFDVLFLDQDVKNYRDTKKADIKLNTLFNKGLRMRGIFKSSAKIYPSLAISDEDLFNTKKAIHDTVLNLV

SEQ ID NO: 156928 - protein, 278 aa, Unknown
  Bacterial polypetide isolated from the Sargasso Sea
NEFISFNLVNFPQPVPDSAGIPKTIEKDILIAPFNDLDFINSIITEFKDKIAGIIVEPLQRIIPPEPGFLEGLRNICDKNNILLIFDEVVTGFRLAYGGAQEKYNVTPDLCTLGKIIGGGFPLAAIAGSNDIMSHFDQSKVGKEKWLMQIGTLSGNPIASAAGLKTMEVLKRENMFDKLRKCGSEIMNCLNNNLNKANIGHRIVGDPTLFDVLFLDQDVKNYRDTKKADNKLSVLFNKGLRKRKIFKSTGKIYPSLAISDEDLLNTKKAIQDTVLDLV

SEQ ID NO: 156929 - protein, 289 aa, Unknown
  Bacterial polypetide isolated from the Sargasso Sea
MEKISTQKEWISRAQEVFPAGGFGNFDPSVFIKEGRGSRVWDENGNEYVDFLIGSGPMLLGHGHPEVLEAILDQIPIGMTFFTNNSAGVELAEEICRAVTCAEQVRYVTSGSEADMYAIRLARAFTGKSKILKFEGGYHGMCSEAQMSLAPKHLANFPQAVPDSAGIPTSVESEVQIAPFNDNDFLRSFLGEHGNNLAAIILEPLQRQIPPEPGFLETVRDLCSKHNIILIFDEIVTGFRLAYGGAQEYYNVVPDICTLGKIIGGGFPLAAVVGRKEIMQHFDKSKVWG

SEQ ID NO: 156930 - protein, 234 aa, Unknown
  Bacterial polypetide isolated from the Sargasso Sea
NLAAVLIEPMLGSGGCIPAEKDFLKAIRYETEQHNICLIFDEVMTSRNSSGGLQKILEIQPDLTTLGKYLGGGASFGAFGGKSEIMNLWDPTKPNFLAHAGTFNNNTLSMAAGLTGLTEVFTSEIATDLFNKGENFKSSLNSICERYSINIQVTGLGSILGIHIGTKKIVRPYAYNEHDLNRLKLIHLEMANKGFLFAQRGYMTLNIAMVEKDTNEFLSAFEEVVTSHKEIFLM

SEQ ID NO: 156931 - protein, 145 aa, Unknown
  Bacterial polypetide isolated from the Sargasso Sea
MKSSNREEIIDHNAKELFDIVLDIESYPYFIPWCSAMKVHSKSNKEIYADMIVWYKYFMPQKFGSHVQFDKKKLNIKTTYIEGPLKDLKTNWIFKSLKKNQTLINFSVEFEFKRFFHQKIAETFFPLIENRMIESFKIRADEILD

SEQ ID NO: 156932 - protein, 72 aa, Unknown
  Bacterial polypetide isolated from the Sargasso Sea
MNTSRSQAIFDAAQALMPGGVSSPVRAFKSVGGQPIVFDRVKGPYAWDVDGNNTSITSAAGARPSVGMPIRK

SEQ ID NO: 156933 - protein, 145 aa, Unknown
  Bacterial polypetide isolated from the Sargasso Sea
MKSSNREEIIEHNAKELFDIVLDIESYPYFIPWCSAMKVHSKSDSEIYADMIVWYKYFMPQKFGSHVEFDKKKLNIRTTYIEGPLKDLKTSWIFKSIKKNQTLITFNVEFEFKRFFHQKIAEAFFPLIENKMIESFKERADEILI

SEQ ID NO: 156934 - protein, 42 aa, Unknown
  Bacterial polypetide isolated from the Sargasso Sea
MKRIKSESLFEQAQILMPGGVNSPVRAFKNVDGQPVFFKSAK

SEQ ID NO: 156935 - protein, 242 aa, Unknown
  Bacterial polypetide isolated from the Sargasso Sea
MSILSTYEESHTGSRKKYEEAKNIFPSGVTHDNRYATPFPLYMTHGMGSRKWDVDGNEYIDYVCGHGALILGHSHPEIVEVVNNQMALGTHLGACTDQELEWGSYVKALVPSVERIRFHSSGTEATMMAMRLARAYTGKNVVIKLQDHFHGWHDYAISDSAGPSSGVPEAAWGSTKVLPAGDLDAIESFLEINDDVAAIILEPTGAHYGQLMFDVLPYLKGIRELTIKHGVVFIMDEVVTGF

SEQ ID NO: 156936 - protein, 258 aa, Unknown
  Bacterial polypetide isolated from the Sargasso Sea
MNKNISLKEWQSRAQKVLPGAGFGNFDPNISLKRGLGSRVWDEDNKEYIDFLIGSGPMILGHGNEEVLDAIRAQLSEGLTFFTNNSKGVELAEEICNAVKCAEQIRFVSSGGEADMYAMRLARAHTGRNKILKFEGGYHGMSGDSLMSLAPNKMVNFPLAVPDSAGIPEAVRDDILVAPFNDPQVATEIMNEYSDQIAGVIVEPLQRIIPPIRGFLKHLRAETKRIGALLIFDEIVTGFRLAYGGAQELYGVVPDLCT

SEQ ID NO: 156937 - protein, 304 aa, Unknown
  Bacterial polypetide isolated from the Sargasso Sea
AEPLKCSASHTRNLSHSHPLTLSATQLLTSISLPLCVSPSRPPGLSASQPLSLSTLRTSDSQPLSYSASHTLTCSHAQPLTLTLTHAHTLTRSHAHMLNLSHSQPLTLSACQHLSLLASRPLSRSDSQPLTLSPLGASAHQILSHSHSHMLTLSHAHMLTLSHSHTLTCSHAHMLTLSHAHTLSLASLSHSHTLGRSHSQPRSFLASRPLTLSASQMLASQPLSRSASLPLCLSFAQPLSLSHSSQALSLSHAQPLTRSASHTLSLSHSPTLHTLSLSHTQPLSLSHTRSCSLSPSHTLSLSHS

SEQ ID NO: 156938 - protein, 156 aa, Unknown
  Bacterial polypetide isolated from the Sargasso Sea
FGGKKKYMDKLSPIGPIYHAGTLSGNPIAMTAGIKTIELLSSKKFHKNLENKTKKLMHGIQNAAHKYNIDLYVTYAGGMFGFFFTNQEKIKNYNQVKSCNNLMFENFFKIMLSKGIYFAPSSFEAGFISSKHSQKDISFTIKSAEEAFKEISIMNL

SEQ ID NO: 156939 - protein, 41 aa, Unknown
  Bacterial polypetide isolated from the Sargasso Sea
MTGFRVSLGGAQEIYGIKPDITTLGKVIGGGLPVGAFGRKR

SEQ ID NO: 156940 - protein, 169 aa, Unknown
  Bacterial polypetide isolated from the Sargasso Sea
VRAFKNIDGNPIFFKKAKGPYIFDADNNKYIDYIGSWGPMIMGHSHPEIVKSVSKQLELGTSYGAPTSIESTTAKLIKKCVPSIKKIRMVNSGTEATMSAVRLARGYTNRNKIIKFDGCYHGHVDSLLIKAGSGVTTFGLPDSPGIPKELAKQTLSCEFNNKDEFLKDF

SEQ ID NO: 156941 - protein, 424 aa, Unknown
  Bacterial polypetide isolated from the Sargasso Sea
MKKINTQEDWINRAKEVLPAAGFGNFENDIIIKRGKGSKVWDENNNEYIDYLIGSGPMLLGHGHPEVMEAIFEQLPNGLTFFANNSKGIELAEEICKAVKSSEQVRFVSSGGEADMYAIRLARAFTGKDKIIKFEGGYHGMSAEAQMSLSPSNLVNFPQPVPDSAGIPKNIEKDILIAPFNDIDFINSIITEFKDEIAGIIVEPLQRIIPPEPGFLEGLRSLCDKNNILLIFDEIVTGFRLAYGGAQEKYNVTPDLCTLGKIIGGGFPLAAIAGSSEIMSHFDQNKVGKDKWLMQIGTLSGNPIASAAGLKTMEVLRRENMFDKLRKCGNEIMNCLNENLKNANIGHRIVGDPTLFDVLFLDQDVKNYRDTKKADIKLNALFNKGLRMRGIFKSSAKIYPSLAISDEDLFNTKKAIHDTVLNLV

SEQ ID NO: 156942 - protein, 49 aa, Unknown
  Bacterial polypetide isolated from the Sargasso Sea
MSKSDQLFEQARQTIPGGVNSPVRAFNGVGGTPRFIDHADGAYLYDVDG

SEQ ID NO: 156943 - protein, 145 aa, Unknown
  Bacterial polypetide isolated from the Sargasso Sea
MKSSNREEIVDHDAKGLFDIVLDIESYPYFIPWCSAMRIHSKNKNEIYADMVVWYKYFMPQTFGSHVTFDKKKLSISTTYIEGPLKDLKTNWIFESLKKNQTRIHFNVEFEFKRFFHQKIAEAFFPLIENKMIESFKVRADEILD

SEQ ID NO: 156944 - protein, 198 aa, Unknown
  Bacterial polypetide isolated from the Sargasso Sea
MIFDEIVTGFRLAYGGAQELYGVVPDLCTLGKIIGGGLPLAAIAGEKEIMNHFDKNIVGEEKFTFQIGTLSGNPLAAVAGLKTMEILRRDGAYNKIRENGQFLIDSITKHFKSNSIEFQIVGDPTLFDIIFSETPVINYRDTKKNKTEYSKTFNQIVRELGILKADAKLYTHLALTEEDLQKTDSAFKKAAEGIAAIS

SEQ ID NO: 156945 - protein, 275 aa, Unknown
  Bacterial polypetide isolated from the Sargasso Sea
DGSFPDSVLEDTIICPYNKPEMARQLINQHASEIAAIIVEPILGSMGMIGATREFLQTLRDEATANDIILIFDEVITLRINHGGAQNYFGVTPDLTCMGKIIGGGLPVGGIGGKEEFMQLFNPESSNPVMHASTFSGNALTMSAGLPAMRMYNEDECNRINLLAERLRDGFNQAFADAGILGNAAGVGSLTNINFTEGILNDSRDYLDGLFKAKHIGQLLHLGMLRHGVASASRLMYCTSTPMTAADIDTAVAALQNSLAELRPYVESECPELII

SEQ ID NO: 156946 - protein, 94 aa, Unknown
  Bacterial polypetide isolated from the Sargasso Sea
MPGGVNSPVRAFRNVNSTPIFIKSASGAYLHDVDGNDYVDFIGSWGPMILGHSNPKIIKAIKDQADLGTSYGAPTEAETSIGELIRTVNALYRK

SEQ ID NO: 156947 - protein, 260 aa, Unknown
  Bacterial polypetide isolated from the Sargasso Sea
MPAAGFGNFDPAIFIHKGKGSRIWDENGKEYVDYLLGSGPMLLGHGHPEVLEAVYQQLPKGMTFFTNNTAGVELAEEICLAVKSAEQVRYVSSGGEADMYAIRLARAYTGKEKIIKFEGGYHGMSSEAQMSLAPNRLANFPQAVPDSAGIPETVRSEVLVAPFNDLDFVRSLLLEYGDQVAAIIVEPLQRLIPPEPGFLEGLRHECTKSGVLLIFDEIVTGFRFAYGGAQEHYGVFPDICTLGKVIGGGFPLAAVASSKE

SEQ ID NO: 156948 - protein, 222 aa, Unknown
  Bacterial polypetide isolated from the Sargasso Sea
MNQNKSNELYQVSSQYFPGGVNSPVRAFKSVDGTPLFIKKGKGAYITDVDGNKFIDFCASWGPLILGHNHPKIRKSVVKSSKNGLSFGAPTVQENELAELIINNNKYIEKIRFVSSGTEAVMSAVRLARGYTKREKIIKFEGCYHGHVDHLLVKAGSGLVTFGSSSSAGIPEAFVKETLVLPLNNKDAVEQAFKEYKDEIACIIVEPIPANNGLLLQEKEYL

SEQ ID NO: 156949 - protein, 269 aa, Unknown
  Bacterial polypetide isolated from the Sargasso Sea
MALRARKGVKQGRDKILKFNGCYHGHVDSMLIKAGSGLAGTSTASSKGIPKNVAEDTLILDLNDEKALEECFDIHGKSIAGVIIEPLPANNGLLIQNSDFLKKINSLCKANGSLLIFDEVISGFRVNFSGMAHDLDITPDIVTYGKVIGGGLPVGAIAATRSVMETLAPVGDVYQAGTLSANPLAMVGGLSTLKQLDETTYKKVDDNALKIEELFSDWFKSYENGKFSHYKIIRYKSLFWFVPNNSNLKSIDDIPQNLAQEFLPLFETL

SEQ ID NO: 156950 - protein, 218 aa, Unknown
  Bacterial polypetide isolated from the Sargasso Sea
MKTKNSKELFKKSKEHIAGGVNSPVRAFKSVGGTPIFFKKSRGCYLYDEDGNKYLDFVGSWGPMVLGHSNKAIVNAIKKQASKAISFGAPTKNELEIAKIIKSYIPSIEKLRMVNSGTEATMSCIRLARGTTGRKKIIKFIGCYHGHVDSLLVKAGSGAATLGVPDSPGIPDELSKLTITLEYNNASELKKAFTKFGEDIAAVIVEPIAGNMGFIEPR

SEQ ID NO: 156951 - protein, 41 aa, Unknown
  Bacterial polypetide isolated from the Sargasso Sea
LERGVYLAPSAFEAGFTSLAHSEADIEATVNAFRESFAEVA

SEQ ID NO: 156952 - protein, 196 aa, Unknown
  Bacterial polypetide isolated from the Sargasso Sea
MNNINKSIEFFSEAKKHLPGGVNSPVRAFKNIDGNPIFFKKAKGAYVFDADNNAYIDYIGSWGPMIMGHSHPTIIKAISKQLKLGTSYGAPTRIESETADLIKQCFPSIKKIRMVNSGTEATMSAIRLARGFTKRNKIIKFDGCYHGHVDSLLIKAGSGVSTFGLPDSPGVPTQLAKETLSCEFNNQDGLSKSFEK

SEQ ID NO: 156953 - protein, 121 aa, Unknown
  Bacterial polypetide isolated from the Sargasso Sea
MTKFLLIYKLEHDKIFLRVSFIKIVTDILNCTQSEEVFSAAQELMPGGVSSPVRAFKSVGGQPIVFDRVKGPFAWDIDGNRYIDYIGSWGPAICGHAHPEVTTALQEAIEKGTSFGAPCVL

SEQ ID NO: 156954 - protein, 64 aa, Unknown
  Bacterial polypetide isolated from the Sargasso Sea
MLETCEEAKSSDTELFSKIHRLMLQKGVYLAPSAFEAGFTSLAHSEDDINATIKAFQEIFSEIS

SEQ ID NO: 156955 - protein, 191 aa, Unknown
  Bacterial polypetide isolated from the Sargasso Sea
MEKIMSAFEAANDVLVGGVNSPVRAYKSVGGEPVFLKSGKGAEVTAIDNQTYIDYVLSYGPLLAGHAPESVLSDIHNTMIKGTTFGAPTENETQLAKSIRSFFPSCEKVRLVNSGTEATMSAIRLARGATKRDVIVKFNGCYHGHVDSLLVAMGSGGLTLGKPSSAGIPDDVTKHTRVLEYNDTDSLTALF

SEQ ID NO: 156956 - protein, 253 aa, Unknown
  Bacterial polypetide isolated from the Sargasso Sea
MNLSAQARQVIPGGVNSPVRAALQVQSHALYLQSAQGAYVTDEGGRDYIDYVNGYGPVILGHADAGLQEVIQDTARRGWVHGHCHRAEIELASLLTDIIPGIEQVRLMNSGTEAVMTAVRLARGATNRTKIIKFKGHYHGHADTLMPQESLEPAVINGVPRSATEETIVAGFNDLNSVKRLFEAHHANIAGVLIEPIAGNMGMIFADHDFMTGLRELCDQYGALLIFDEVMTGFRVGLTGAAGHYECQPDLKV

SEQ ID NO: 156957 - protein, 141 aa, Unknown
  Bacterial polypetide isolated from the Sargasso Sea
SCSNGPVYQAGTLSGNPLAMAAGSTLIKLLIKSNPYKNLELKASTLLSQMKDLFLNRDIPFTTNQIGGMFGFFFSKELPNNFKDVENSNDIHFKKFLNRCMANGIYFAPSKFEAGFISTKHTNKEINHTINVVKKILDEGM

SEQ ID NO: 156958 - protein, 202 aa, Unknown
  Bacterial polypetide isolated from the Sargasso Sea
ELGIVLIFDEIQSFRVSSGGAQESFGITPDMTTLGKIIGGGLPVGAFGGKDEIMELFDPTSSNYDIAHAGTFNGNPLTMEAGVTVMENLTSDNFEKMNNLGDSLRSKLSSVFNEINLDVQVTGYGSLFGINFNENKIKDYRSFLNNNSDMTKILFSYLRNKGILLQLKNAGALNILMTEKEIDYLVDSTREISSEMKDTLDE

SEQ ID NO: 156959 - protein, 288 aa, Unknown
  Bacterial polypetide isolated from the Sargasso Sea
VDSLLVNAGSGSATFGVPSSPGIPKDLTKHTYSLEYNNIHDVENCFKKNGEKIACVIVEPIAGNMNCVLPDLKFIKKLRALCNKYKSILIFDEVMTGFRVSKGGAQEFFGVHPDITTLGKIVGGGMPVGVFGGKKKYMDKLSPIGPIYHAGTLSGNPIAMTAGIKTIELLSSKKFHKNLESKTKKLMNGIRDAANKNNIDLYITYAGGMFGFFFTDQKNIKNFNQVKKCNSLMFENFFKIMLSKGIYFAPSSFEAGFISSKHSQEDIGYTIKSAEEAFKEISKKKLYY

SEQ ID NO: 156960 - protein, 178 aa, Unknown
  Bacterial polypetide isolated from the Sargasso Sea
MKLFKEAKLHIPGGVNSPVRAFKNINGNPIFFKKAKGSKLFDEDNNEYIDYIGSWGPMIMGHSHPKIIKAISKQVKLGTSYGAPTSIESKTAELIKKCIPSIEKIRMVNSGTEATMSAIRLARGFTKKNKIIKFDGCYHGHADSLLIKAGSGVSTFGLPDSPGVPPQLAKETLSCEFN

SEQ ID NO: 156961 - protein, 135 aa, Unknown
  Bacterial polypetide isolated from the Sargasso Sea
MNQTRSQELFNRSQKLMPGGVNSPVRSFNGVGGVPPFIAKGLGSKVWDVDGNEYLDFLGSWGPLILGHANPVIVDAIRSAALEGTSFGAPTEKELLLAELISTAIPSIEMLRLVSSGTEATMSAIRIARAYTNRN

SEQ ID NO: 156962 - protein, 125 aa, Unknown
  Bacterial polypetide isolated from the Sargasso Sea
MSKTNKSKSLFNKAKSVMPGGVNSPVRAFGNVNSTPIFIKSASGAYLHDVDGNDYVDFIGSWGPMILGHGNPKIIKAIKDQADLGTSYGAPTEAETSIGELIRTVMPFIEKIRMVNSGTEATMSC

SEQ ID NO: 156963 - protein, 198 aa, Unknown
  Bacterial polypetide isolated from the Sargasso Sea
MTDTRGLSHNAFTRAQQLIPGGVNSPARAFGAVGGEPIFFQAGQGAYLTDIDGHKYLDYIGSWGPMILGHRHPRVVAAIEKALSCGTSYGAPTEAESGLAEQIIEAVPSIEKVRMVSSGTEAAMSAVRLARGATGREGIIKFAGNYHGHADSLLVAAGSAAATLGIPDSPGVTAGTAKDTLVLEYNDTAALVEIFEKR

SEQ ID NO: 156964 - protein, 239 aa, Unknown
  Bacterial polypetide isolated from the Sargasso Sea
MKNIKNSKNVFKQALKYMPGGVNSPVRSFSAVKEDPRFIKRSFGAYIEDIDNNIYIDYISSFGPLIFGHGKKEIIDAAKNALDFGTTYGACHMKEVKLAKIISKLMPSMEMLRLTSSGTEATMSAIRAARGFTGKDKIIKFEGCYHGHIDHLLVSAGSGASTFGEAFSKGVPNDFIKNTLIADFNNLNQVKKIIYDNKDEIAAIIMEPIPANMGLVLPNDNFVQEIRKICDENRNSFNF

SEQ ID NO: 156965 - protein, 143 aa, Unknown
  Bacterial polypetide isolated from the Sargasso Sea
MVAPAGPVYQAGTLSGNPLAMTAGIKTLELLKQDGTYDKLDSITSRLIEGIIQSAENNGIAINGGSVSAMFGFFLCDGPVRNFNEAKTNDAQLFGKLHREMLQRGIYLAPSPFEAGFTSLAHSEEEIDKTIEAFDQSFNEIKK

SEQ ID NO: 156966 - protein, 121 aa, Unknown
  Bacterial polypetide isolated from the Sargasso Sea
AQMEALCEEGLYETLSAKTKRIAEGFKAAADKHGIPMAINYVGGMFGFFFTEQEQITRFDQVTKCNIEHFRTFYHGMLDEGVYLAPSAYEAGFLSMAHGEEELRLTLEAADRVLGRMKAAM

SEQ ID NO: 156967 - protein, 213 aa, Unknown
  Bacterial polypetide isolated from the Sargasso Sea
MKTKKSQDLFEKSKHHIAGGVNSPVRAFKSVGGTPIFFKKSRECYLYDEDGNKYLDFVGSWGPMVLGHSNKNIVNAIKNQASKGISFGAPTKNELEIAKIIKSYLPSIEKLRMVNSGTEATMSCIRLARGTTNKKKIIKFIGCYHGHVDSLLVKAGSGLATLGVPDSPGIPEELSQLTISLPYNDIPALDKAFKEYGNDIAAVIIEPIGGKYG

SEQ ID NO: 156968 - protein, 256 aa, Unknown
  Bacterial polypetide isolated from the Sargasso Sea
MNNIRNRALNAFTGGISNGEFGVEAEDIIVIARGKGCKLWDTSGREFIDFSMAWGSCLVGHSRPEVVDAVSKQAPMGSNFAHLNNNVLEFAEEIQSISPAAEKLRFCASGTEANMYCQRVARGYKGRNKILKFEGAYHGADETGVTSLFPKQMLDYPTPEPTSAGVLDIDKLLLVAPYNNLSTAQEIIEKHKNDIAAVIVEPLQRCIPPEKGFLEGLRKICTTNNLLLIFDEVVTGFRLAYGGAQEYYGVAPDLIA

SEQ ID NO: 156969 - protein, 197 aa, Unknown
  Bacterial polypetide isolated from the Sargasso Sea
MKLFKEAKLHIPGGVNSPVRAFKNINGNPIFFKKAKGSKLFDEDNNEYIDYIGSWGPMIMGHSHPKIIRAISKQVKLGTSYGAPTSIESKTAELIKKCIPSIERIRMVNSGTEATMSAIRLARGFTKKNKIIKFDGCYHGHADSLLIKAGSGVSTFGLPDSPGVPPQLAKETLSCEFNNSKDFLKIFEKVKNDLAAV

SEQ ID NO: 156970 - protein, 144 aa, Unknown
  Bacterial polypetide isolated from the Sargasso Sea
SMVAPSGPVYQAGTLSGNPLAMTAGIKTLELLKQEGTYEKLELTTSRLIEGIIQSAENNGIAINGGNVSAMFGFFLCDGPVRNFDEAKTNNAELFGKLHREMLQRGIYLAPSPFEAGFTSLAHSEEEIDKTIEAFDQSFNAIKE

SEQ ID NO: 156971 - protein, 151 aa, Unknown
  Bacterial polypetide isolated from the Sargasso Sea
MVGKGKIMDYLAPNGPVYQAGTLSGNPLAMAAGSTLIKLLIQSNPYKNLELKASNLLDQMKDLFHNKGIPFSTNQIGGMFGFFFSQKLPNNLRDVENSNDTQFKKFLNKCMTNGIYFAPSKFEAGFISTKHTNKEINHTISVVKKILDEGI

SEQ ID NO: 156972 - protein, 426 aa, Unknown
  Bacterial polypetide isolated from the Sargasso Sea
DIDWNSARNACAAEDLYYPHPWIQDALWGALMKLEPFLLGSRLRRAACADAMRQIHYEDENTRYVDIGPVNKVFNMLCCWFEDPDSDAVKRHIPRIADYLWVSEDGMKMQGYNGSQLWDCAFSVQAIVATGLADEYGECLRRAHDYIEKSQVRDDCPDVKKWYRHISKGAWPFSTRDHGWPISDCSSEGLKAALTLASMDSALVGEAISVERLSDCVNVILSYQNRSTGGWATYENTRSYAWVEWLNPAETFGDIMIDYPYVECSSASLQALCKFSERYPDVRAKDIARAKKTGRAFLKRIQKPDGSWYGSWAVCFTYGTWFGVLGLIATGSTYETCPALRKAVEFLLSKQQANGGWGESYLSCEKKTYHELLDAEGNPTPHLVNTGWATLALIASGQASRDAAPLHRDARCILSRQCANGDSRNR

SEQ ID NO: 156973 - protein, 177 aa, Unknown
  Bacterial polypetide isolated from the Sargasso Sea
ELDTQTVFNGLNHHLRPYPISILAVDIVSEEFHSRFDAKQRKYLYRIINRNSPLTIEKGRAWHVFKNLDVDQMVECISLIEGKRDFTTFRSAHCQAESPIKTMESVKINSTNEEVLLGFTARSFLHHQVRSIVGSLKLVGEGTWTVEDFRHAVDSKDRSKCGALAPPEGLYLMEVTY

SEQ ID NO: 156974 - protein, 246 aa, Unknown
  Bacterial polypetide isolated from the Sargasso Sea
MITYQIRIEYLGTNFVGWQFQKNGLSIQEVLEKALSQYLKENIRVIGSGRTDSGVHASEQSAHFKTKNKINNKGIFLNSVNFFLKKFPVSILNIQKRSNNFHARHSAKERVYKYFVINRTSSLAIDKNKAWHIKKKLDVKLMKKGATILKGTHNFTTFRASNCQAKSPIRTLKKPSISKSKNKIVFTFQSKSFLQQQVRSMVGSLKYLGEGKWNLKDFEKAFQSKKRSMCAPPAPAHGLYLVKVKY

SEQ ID NO: 156975 - protein, 128 aa, Unknown
  Bacterial polypetide isolated from the Sargasso Sea
MDEKRMSEAANFLLGEHDFSSFRARGCQAKSPVREIKDIRVSRRQEFVVITIKANGFLQKMVRNIAGLLIDVGSGKKEPSWAKKVLLSKRRSMNSATAAPSGLYLASVDYPQEFGIPCKTAKNYFDWT

SEQ ID NO: 156976 - protein, 247 aa, Unknown
  Bacterial polypetide isolated from the Sargasso Sea
MKYNYQIIIEYLGASYIGWQIQKKGKSIQGEIQKAIYKTFHTKVKLIGAGRTDTGVNALAQSANFYLKNKIQNKNKILATMNFFLKESNISIIDIKRKKNSFHSRFDAKKRSYEYIIINRGAKLSVLKDRAWLVKKKLNIKNMKDAISLLIGKHDFSTFRSSSCSAKSPIRTILKANIKNTGSKIIINFISRSFLQQQVRSMVGSIKYVGENKWDLSTFKKVFKSKKRNFCAPPAPPEGLYLKKVYY

SEQ ID NO: 156977 - protein, 246 aa, Unknown
  Bacterial polypetide isolated from the Sargasso Sea
MFRYQLLIEYLGTNYKGWQIQKKNKTIQGILQDKIRKLLKENITIVGSGRTDAGVHAIEQSAHFDLKNKLLNLDKFINSINHFLKNENITILKIRKRTSNFHSRFSAKKRIYKYFILNRTSSPVIEKNQVWHVRKKLDLDLMKLGAKKLVGTKDFSTFRASSCNAKSPIRTIDFVKLKSLNDKIEIHFKSQSFLQQQVRSMVGCLKYLGEKKWDLKKFDKALKSKKRSLCAPPAPPTGLFLSRVFY

SEQ ID NO: 156978 - protein, 246 aa, Unknown
  Bacterial polypetide isolated from the Sargasso Sea
MKSNYQIIIEYDGTTYNGWQYQKNGSSIQNEIEKALRKVIKKKIRVIGSGRTDAGVHAVGQSANFFCDKIENNKKFLNSLNYFLSKKNISINSIKKKKFNFHSRFDAKKRTYKYIIVNRKNFLVLDKNRAWLVKKKLNINYMKKAIKLFSGTHNFNAFRASSCGAKSPVRTIEKSSLTKKGDKIIIIFSSKSFLQHQVRSMVGCLKFIGEGKWSINMLKRLFNSKKRSLCAPPAPSSGLYLYKVIY

SEQ ID NO: 156979 - protein, 249 aa, Unknown
  Bacterial polypetide isolated from the Sargasso Sea
ALLMNRYQILVEYVGTNYNGWQIQKKGKTIQGKIQKVISKILNEKVNIIGSGRTDSGVHALEQSAHFDTSVKIKDSNKFLKSINHFLSRYGISILDLKKRELTFHSRYSAKARIYKYVILNRKSGSVLKNKRCWHIIKKLNISMMKKGAKKLIGKKDFSTFRSSSCSAKTPVRTIKSIKFLTKKNIIEIEIKAQSFLQNQVRSMVGCLKYVGEDKWSIKKFDKIIKSKKRINCAPPAPAEGLYLTKVIY

SEQ ID NO: 156980 - protein, 200 aa, Unknown
  Bacterial polypetide isolated from the Sargasso Sea
MSRYKLIIQYDGAAYSGWQTQKYPRTVQGELEKVLTKIFNQKIKVYGSGRTDTGVHAWAQVAHIDLNTSLKDYEIKNAMNSNLPIDCRIMDVKPIDSDFHSRFHARKRIYRYQCISTESLLYRNQCWIFSESLDLDLLNELSSKILGIHDFLSFCKFNSEISSTVCEVYISEWICDGNMIVYKSAANRYLHHMIRYLVGS

SEQ ID NO: 156981 - protein, 103 aa, Unknown
  Bacterial polypetide isolated from the Sargasso Sea
MFTYQMTIEYDGTKFVGWQTQKNGLSIQELLEKKLSKFLKNKITVIGSGRTDAGVHARGQSAHFRIKNKIKNKKIFLNSLNFFLNKHQVSVVSIKEKTKKFHA

SEQ ID NO: 156982 - protein, 199 aa, Unknown
  Bacterial polypetide isolated from the Sargasso Sea
MEEPTPGVHASEQSAHFKTKNKINNMDIFLNAVNFFLKKHPVSILNIQKRANNFHARHSAKERVYKYFIINRTSSLAIDKNKAWHIKKKLDVKLMKKGATILKGTHNFTTFRASNCQAKSPIKTLKKPLISKSKNKIIFTFQSKSFLQQQVRSMVGSLKYLGEGKWNLKDFKRAFKSKKRSMCAPPAPAHGLYLVKVKY

SEQ ID NO: 156983 - protein, 244 aa, Unknown
  Bacterial polypetide isolated from the Sargasso Sea
MPNYKITLEYDGTNYVGWQRQENGPSVQQFVEEAIEKLSKQKITLFGAGRTDAGVHARGQVANFELEQHFDTDTIRDGINHYLRPQPISILHAEEVDKDFNSRFSAKLRWYEYKILNRRSPITLEQNKVWCVHKKIDAEKIIKQSQQFIGKFDLSAFRSINCQSKSPIKSINSLDINFNHDEINFLISAKSFLHSQVRIMVGTLVDIGLSKIEKSISEIIKSKKREYAGVTAPPEGLYLLKIDY

SEQ ID NO: 156984 - protein, 249 aa, Unknown
  Bacterial polypetide isolated from the Sargasso Sea
MTIRIKIKIEYDGGLYIGWQRQRIGRSIQKEIENCLEELFRKKISLYVSGRTDAGVHALGQIAHFDLNATNIEISKISFALNHLLNKKKNKITILKSEKISNTFNARFSVKEKTYLYKILNRPVPSFIFEDRVWFIPQKLSLDLMRDAANCLVGKFDFNAFRSSDCQANTSIRSIKDIKIKKIGDIIEIRVVGKSFLHNQVRIIVGTIVKAGKNIWNKKKIVEILNSKDRRNAGPTAPSFGLYLEKIKF

SEQ ID NO: 156985 - protein, 231 aa, Unknown
  Bacterial polypetide isolated from the Sargasso Sea
MNRYQILIEYVGTNFRGWQIQKKGPTIQGLIQEKLSKLLKEKIVLHGQGRTDAGVHAFEQSAHFDCKKKITDTIKFLKSINHFLNLNNIAIKNIKKRNNKFHARYSAKQRIYKYFIFNQISQPIIEKNRAWHVRRPLNLEIMKKGAKKLLGTHDYSTFRSSSCHAKSPIKTIKSIKIKSSKNKIEFQFSSQSFLQHQVRSMVGCLKYLGETKWDLKTFEKRFKSKKRTLCA

SEQ ID NO: 156986 - protein, 203 aa, Unknown
  Bacterial polypetide isolated from the Sargasso Sea
TASFNSTSKNIKTTEKWCSALNAVLPDDIVVKYAQTVSTDFHARHNAIGKRYRYLISNNSYHSPFTKNKTWQVGKILDVDIMKQVAGVLVGEHDFSAFRSSNCSSPNTVKDIREISIDKSHFQNSILQIEIEGNSFLQHMVRIITGTLVEAAQSRISCVDVKKALKNGDRKLAGCTAPAHGLYSLKVIYPEGLVKWPSEVIDN

SEQ ID NO: 156987 - protein, 245 aa, Unknown
  Bacterial polypetide isolated from the Sargasso Sea
MQRYKIKIEYEGTPFVGWQFQKNGPSIQEVLQKAIFNFSNEKVIVTGAGRTDSGVHALAQVAHFDLKKKIKDKKLLPAINQNIGDKPVTVLKINKTNKKFHARHNAKKRTYRYLIVNRQSPLALQKNKAWHIRKKLNIKNMKKGSKFLLGTHNFSTFRAASCGAKSPIKTMEKISIKKIKDTIFLEFTSRSFLQQQVRSMVGCLKYLGEGKWNLEKFINSFKSKNRTSCAPPAPACGLYLKKINY

SEQ ID NO: 156988 - protein, 137 aa, Unknown
  Bacterial polypetide isolated from the Sargasso Sea
KTYEYVIINRQSPLALEKNKAWHIRKKLNIKAMEKGIKLLKGTHDFSTFRSSSCQAKSPIKTLKKTSIKKNGDKVILKFTSKSFLQQQVRSMVGCIKYLGDEKWNLNDFKNSFKSKNRLKCAPPAPACGLYLKKIYY

SEQ ID NO: 156989 - protein, 250 aa, Unknown
  Bacterial polypetide isolated from the Sargasso Sea
MNRYRASVSYDGGPFHGFAENPDVETVAGKLRESLEKIIGHEIHLTCAGRTDAGVHAEGQVISFDAETFDIEKIERSLNKLCAPFITVRDLQKTNDLFNARFSATCRTYRYRILNDDYPDPFSHRFAWYIQTQLDIDSMQRAAQAVVGEHDFSSFCRKATILVDGKEEEASLIREVISITVKDEGPFVEIWVTATSFCHQMVRSIVGTLVAIGKGRLNKSDVSSIISKKDRNSAGPVAPPQGLTLMEVGY

SEQ ID NO: 156990 - protein, 218 aa, Unknown
  Bacterial polypetide isolated from the Sargasso Sea
KISTVCCGRTDAGVHALNQFIHFDTSSLRKIDSWIKGVNVNLPDDIVVKNFYKVDKNYHARFDATSREYLYVIKNANIPPAIGFNNCLWIKQTLNIQKMNKAAQYLLGEKDFSAFRASGCQSKSPVREIVKTKFVSKGEYLYFFIKGNAFMLNMVRIIMGTLLDVGTNKINVTDFKKIIKQKNRKKAGKTISPKGLYFLGPEYNELNYTKEAILDELD

SEQ ID NO: 156991 - protein, 165 aa, Unknown
  Bacterial polypetide isolated from the Sargasso Sea
MFRYQILIEYVGTNFRGWQVQAKGKTIQGLIQYKISKLLKEKIILLGAGRLDKGVHAIEQSAHFECKTKIINLDRFIKSLNYFLNKDMVTVLKIKKQNKNFHARFSAKMRIYKYVIINRLSKPVLDKNRGWHVTNKLDLEKMKKAAKQLVGTNDFSTFRASSCRA

SEQ ID NO: 156992 - protein, 187 aa, Unknown
  Bacterial polypetide isolated from the Sargasso Sea
MRIALSVEYIGKKYYGWQQQNHSSTNTVQYFVDKSLSKIADHKIKTICSGRTDTGVNALNQIVHFDTISKRSDKNWIDGANSNLPDDIRVKRIYRVDNDFHARFLASKRTYKYFINTNIKSTIFNNAYTWVVGDKLSFSSMQLSMKYLKGVHDFSSFRSSGCQASNPQRNVSDVSLVKNNGVIVFSI

SEQ ID NO: 156993 - protein, 224 aa, Unknown
  Bacterial polypetide isolated from the Sargasso Sea
MQRYKIKIEYEGTPFVGWQFQKNGQSVQEVLQKAIFNFSKENVTVTGAGRTDSGVHALAQVAHFDLKKKIQKKNLLSAINQNISNKSVTVLKINRVNKNFHSRYDARKRTYLYLIINRQSPLALQKNKAWHIKKKLDIKVMKKGAKLLLGTHDFSTYRAASCGAKSPIKTMEKILIKKNKDKISLQFTSRSFLQQQVRSMVGCIKYLGEGKWNIEAFQKVFKSK

SEQ ID NO: 156994 - protein, 240 aa, Unknown
  Bacterial polypetide isolated from the Sargasso Sea
MTNIKLTIEYHGLPYCGWQYQKNEKTVQGEIEKAIFKFSGEKKTIQGAGRTDAGVHAIGQCANFDLKKKFDDYQILSGINFHLGTEKIRVTKVESVDNDFNARFTAKNKIYHYQVFNGLAPSVIEDDFSLHIRQPLDLNAMQDAIKLFIGKHDFSSFRAHGCQANKPFRTIDEASIDAKGNKIIFEFKAQSFLYQQIRIMVGSLLEVGLKNKNPNWIRELIEVKDRRLAGPTVPSKGLIL

SEQ ID NO: 156995 - protein, 63 aa, Unknown
  Bacterial polypetide isolated from the Sargasso Sea
IEIEFRSQSFLQQQVRSMVGCLKYLGENKWSLKKFESVIKSKKRILCAPPAPPEGLYLERIIY

SEQ ID NO: 156996 - protein, 96 aa, Unknown
  Bacterial polypetide isolated from the Sargasso Sea
GLHDFSTFRASNCYSKTPMRKLNEVKINKKNEKIILKFKSKSFLRNQVRSMVGCIVLLGKDIWSLNEFEKVFRSKKRSLCAPPAPAEGLYLSKVVY

SEQ ID NO: 156997 - protein, 208 aa, Unknown
  Bacterial polypetide isolated from the Sargasso Sea
MRIALLVEYDGTNYFGFQKQKLNQTKTIQYHIDQSIKKIANHDVKTACGGRTDTGVHACNQVIHFDTSSKRSDFNWLKGINTYLPSDIFVKNIFHVKSDFHARFSVISRTYQYVIYNNVLYSPLNSKYALHYQNIIDIEKIQKSFKYFIGENDFSAFRGSGCSSPSPIKNIKSIKIKKNKDKIYIEITANSFLYHMVRNMVGFFIDIG

SEQ ID NO: 156998 - protein, 122 aa, Unknown
  Bacterial polypetide isolated from the Sargasso Sea
MYNYLIKIEYDGSGYVGWQYQKNGKSIQEKIEKVLKKILKENIRIIGAGRTDKGVHASGQFANFKSIKKIDNKKKFLSSINFFLRKSSISIVDIKKKKKDFHARFSAKERVYTYYIVNRLAS

SEQ ID NO: 156999 - protein, 129 aa, Unknown
  Bacterial polypetide isolated from the Sargasso Sea
MRIALTIEYNGAKYFGWQKQKINKSKTIQYHVDRAIATIADEPIATICAGRTDTGVHALSQVVHFDTTKKRKDYKWIQGINSFLPADIIIKEIYHVDDSFHARYLAIDRTYRYIILNQKHPSSHMLKTV

SEQ ID NO: 157000 - protein, 156 aa, Unknown
  Bacterial polypetide isolated from the Sargasso Sea
ILSLKIRNPRFHARHSAKKREYEYVIINRAGRLVIDINRGWLINKKLDLKKMKKAIIYFRGTHDFSAFRSSSCSSNNPIRTISSASVLKKGDKIFINFISKSFLQKQVRSMVGCLKYIGEKKWSPYKIKQIINSKKRNNCAPPAPADGLFLKKVYY

SEQ ID NO: 157001 - protein, 230 aa, Unknown
  Bacterial polypetide isolated from the Sargasso Sea
MHTYQIKVEYQGTNFSGWQIQKNGLAVQEVLEKALTKLLKDKIKVVGSGRTDAGVHASEQSAHFKTKKKIINKDIFINSINFFLGQDSVVILSIKKRSDKFHARHSAKKRTYKYFIVNRPSPLTLEKNKAWHIKKKLNLKNMEKGTKILKGTHNFSTFRASSCEAKSPIKTLNEAIVRKKKTKIIFTFTSKSFLQNQVRSMVGSLKYLGEGKWKLKDFKKAFSSKKRSMC

SEQ ID NO: 157002 - protein, 180 aa, Unknown
  Bacterial polypetide isolated from the Sargasso Sea
KSKINEPKRFLKSINYFLNKEGVALLKIKKKNNNFHSRFSAKMRIYKYVIINRISGPVLDKNRGWHVIKELDLDLMKRGAKKLIGTKDFSTFRKQSCKAKSPIKSMKLVKIKSFKNKIEIEFRSQSFLQQQVRSMVGCLKYLGEKKWSLKKFDSIMRSKNRSLCAPPAPPEGLYLTKIIY

SEQ ID NO: 157003 - protein, 132 aa, Unknown
  Bacterial polypetide isolated from the Sargasso Sea
LIINRPSTLALDKNKAWHIKKKLDVKLMKKGAAILKGTHNFSTFRASNCQAKSPVKTLKKPLIKKSKNKIVFIFQSKSFLQQQVRSIVGSLKYLGEGKWDLKEFKKAFLSKKRSMCAPPAPAHGLYLVKVRY

SEQ ID NO: 157004 - protein, 224 aa, Unknown
  Bacterial polypetide isolated from the Sargasso Sea
KGKSIQNEIENNLSKLLKEKILIYGSGRTDAGVHAIEQSAHFDTKIKIKEIKKLIKSLNFFLNSKKISIINIHKKKINFHARYSAKERIYKYFIINRFASSALENERAWHIRKKLNIKLLKKGAKKLIGKHDFSTFRASNCYAKSPIKKMNKITIKNNNNKIQIEFRSKSFLRNQVRSMVGCLKYLAENKWDINKFEKVFKSKKRSNCAPPAPAHGLFLYKIIY

SEQ ID NO: 157005 - protein, 170 aa, Unknown
  Bacterial polypetide isolated from the Sargasso Sea
MNYKLTISYDGTNYSGWQIQPDSKTIQEIIEKSLMKIFSDQNIKVIGSGRTDAGVHANGQVANVNIENSKMNESQIKNAINSYLPNDIFINDCTLVNDEFHARFTAKKREYFYYISNNYHPKNRFYIWNCKWELDLNILNKCSDLLIGEHDFSLFSKASSDTKIKYVNCM

SEQ ID NO: 157006 - protein, 146 aa, Unknown
  Bacterial polypetide isolated from the Sargasso Sea
NINFVKEVTEDFHARFSATNRAYQYFIFNSSNRSSLLRDRFWWIRDTLYESLMQEGAKILVGEHDFNSFRASSCQASSPIRTIKTLDVQRNDQFLIISIKANAFLQKMVRNIVGSLVHIGLGEKTNDWLIDVLAVRDRKRAGITAP

SEQ ID NO: 157007 - protein, 246 aa, Unknown
  Bacterial polypetide isolated from the Sargasso Sea
MITYQITVEYLGTNFVGWQFQKNGLSIQEVLESALSRYLKEKIRVIGSGRTDSGVHASEQSAHFKTKNKINDMGIFLNSVNFFLKKHPVSILNIKKRSNSFHARHSAKERVYKYFIINRHSSLALDKNKAWHIKKKLDVKLMKKGATILKGTHNFSTFRASNCQAKSPIKTLKKPLISKSKNKIVFTFQSKSFLQQQVRSMVGSLKYLGEGKWNLKDFKKAFLSKKRSMCAPPAPAHGLYLVKVKY

SEQ ID NO: 157008 - protein, 169 aa, Unknown
  Bacterial polypetide isolated from the Sargasso Sea
NGRRPNLFLAPWSWHRYQLRLDESRMRDALNGMLGLHDFSAFMRAGSRRAHARTTVQEVELVRQGDMVRVEIQASGFLYGMVRLLMAQLVAVGEHRLSVRDFEQRWRQRRRHEVREAAPGHGLCLLRAGYEQEIFTRAGWYDCQPWFFLAESDPPPDPPPLPEASGSEL

SEQ ID NO: 157009 - protein, 137 aa, Unknown
  Bacterial polypetide isolated from the Sargasso Sea
MHRYKIVIQYDGSFFKGWQLQKNQKTVQGEIENALMTIAKSKSRIIVKGSGRTDAGVHAIGQVAHFDLDNHLTEKQLLNALNFYTNENCKIMSLCKTHDRFDSRFDAKNRTYKYQIYFGKSILYRNQAWLKNDSIDI

SEQ ID NO: 157010 - protein, 76 aa, Unknown
  Bacterial polypetide isolated from the Sargasso Sea
MNRYKIKIEYDGTPFVGWQRQENGQSVQGCIEKAISNIFEENITIFGAGRTDAGVHAMGQVAHFDITNKLLEPYVN

SEQ ID NO: 157011 - protein, 154 aa, Unknown
  Bacterial polypetide isolated from the Sargasso Sea
DIKKKSEKFHARHSAKKRTYKYLILNRTSPSVLEKNRAWNVRKKLDLKILKKGAKLLKGTKDFSTFRSSSCNAKSPVKTIIDVRIKRFDNKIEIKFIARSFLQQQVRSMVGCLKYLAEGRWDLKRFNKAISLRKRSLCAPPAPSCGLYLLKINY

SEQ ID NO: 157012 - protein, 234 aa, Unknown
  Bacterial polypetide isolated from the Sargasso Sea
MFRYQILIEYVGTNFRGWQVQRKGKTIQGLIQEKISKLLKEKIILTGSGRTDAGVHAIEQSAHFDCKIKIKKTDRFLKSINHFLTSEGVVILKIKKRNNNFHSRFSAKMRIYRYVIFNRLSRPVLEKNRGWHIIKKLDLEVMKKGAQKLIGTKDFSVFRASTCRAKSPIKTMKLVKIRSSKDKIEIEFRSQSFLQQQVRSMVGCLKYLGEKKWSLKKFESIMKSKKRILCAPPA

SEQ ID NO: 157013 - protein, 185 aa, Unknown
  Bacterial polypetide isolated from the Sargasso Sea
MTRYKIVIQYDGTNFSGFQSQKNQSGIQDKIESSIFALNNNKKVKIFGASRTDAGVHALGQVAHFDLDSKLTDNELHRAINARLNKEIRISHLSKIEESFHSRFDAKSKEYNYLCCLSDNPLYLKDHYHVKNIDIKLLMEVSKIIEGKHNFLSFSKFSNKQNNDCEIFTSKWVFDDKNHKKLLYI

SEQ ID NO: 157014 - protein, 155 aa, Unknown
  Bacterial polypetide isolated from the Sargasso Sea
IKIKKRDNNFHSRFSAKMRIYKYVIINRPSRPVIDKNRGWHIINKLDLKIMKKAAKKLVGTLDFSTFRASSCRAKSPIKTMRSVKIKSRNSRIEIEFQSQSFLQQQVRSMVGCLKYVGEKKWTLKKFYFVMNSKKRILCAPPAPPEGLYLARVIY

SEQ ID NO: 157015 - protein, 84 aa, Unknown
  Bacterial polypetide isolated from the Sargasso Sea
MKRVALIIQYDGSYFSGWQKQKNAVTVQEILEKALLKISNHNVNTFAAGRTDAGVHASGQVVHFDIDNIIPANRYSYILNSLLP

SEQ ID NO: 157016 - protein, 217 aa, Unknown
  Bacterial polypetide isolated from the Sargasso Sea
KEKYLACTLKKNIIGSGRTDAGVHALGQSANFFIYGGINPNRKKVLLNRWNFLLAKKGISILSIRTRNKNFNARRSAKERTYLYKIMNRASSIALDKNRVWHVRKKLSMNEMKKGAKLLTGTHDFSAYRSSSCTAKSPIRTIKKISIKKNRNGKIIIRFVSKSFLQKQVRSMVGCLKFLGEGKWDISDFKKTLNSKKRSSCAPPAPACGLYLEKVKY

SEQ ID NO: 157017 - protein, 96 aa, Unknown
  Bacterial polypetide isolated from the Sargasso Sea
MKRVALLVQYNGSNFSGWQRQKNATTIQEILEKALFEISHHYVKTFAAGRTDAGVHASGQVVHFDIDCVIPGNRYSDVLNNLLPSSIRILESVEVK

SEQ ID NO: 157018 - protein, 245 aa, Unknown
  Bacterial polypetide isolated from the Sargasso Sea
MKKKYLVIIEYEGTAYHGWQFQKNGISIQEVIEKALTKITKAETCVLSSGRTDAGVHAEGMPAHFVTESKMKPFEFLFALNSQLPLDITVKEVKKVPMSFNARGSARRKLYRYSVLNREHPSALNYRRSWFIPHALDIAAMRRAAKYFVGKHDFTSFRAGNCNAKTPIRILNRVEIFKQGCFLQFEFEGKGFLKHMVRNLVGTLVHVGRKKIFAREVKTILEARNRSIAGPTAPAQGLCLVKVYY

SEQ ID NO: 157019 - protein, 170 aa, Unknown
  Bacterial polypetide isolated from the Sargasso Sea
MANIKLTIEYHGLPYCGWQYQKNEKTVQGEIEKAIFKFSGEKKTIQGAGRTDAGVHAIGQCANFELEKKFDDYQILSGINFHLGTEKIRVTRVESVDNEFNARFTAKNKIYNYQVFNSLAPSVIEDDFSIHIRQPLDLEAMQNAIKLFIGKHDFSSFRAHGCQANKPLRT

SEQ ID NO: 157020 - protein, 243 aa, Unknown
  Bacterial polypetide isolated from the Sargasso Sea
MHRYHILVEYVGTNFHGWQTQSNGKTIQKTIEQKIKKIINEKVKLIGSGRTDSGVHALEQSAHFDCKKKIENLNKFIKSINYFLNDNLISILSIKKRNIYFHARYSAKKRIYKYIIFNRKSKPSIYKERGWHVSNKLDISLMRKGAKKLLGTNDYSTFRASSCNAKSSIKSIKLIKIRKANNIIYIKFQSQSFLQQQVRSMVGCLKYLGEGKWNLKKFVRVFKAKKRILCAPPAPPSGLYLEK

SEQ ID NO: 157021 - protein, 203 aa, Unknown
  Bacterial polypetide isolated from the Sargasso Sea
MTESSSAVTDQPIPHRIALSLQYDGSEFCGWQRQRNGLSVQAVLENAIEQLDPHRPIHCFAAGRTDAGVHAAGQVVHFDCIGPIPAHKWAPALNGRLPASIRVRESVERPADWHACYDAIYRRYRYTIHNGRRPNLFLSAWSWHRYQLRLDEISMRTALEGMLGRHDFGAFMKAGSRRADAITTVQDVLVERQGDMLRVGDQA

SEQ ID NO: 157022 - protein, 218 aa, Unknown
  Bacterial polypetide isolated from the Sargasso Sea
KISTVCCERTDAGVHALNQFIHFDTSSLRKIDSWIKGVNVNLPDDIVVKNFYKVDKNYHARFDATSREYLYVIKNANIPPAIGFNNCLWIRQTLNIEKMNKAAQYLLGEKDFSAFRASGCQSKSPVREIVKTKFVSKGEYLYFFIKGNAFMLNMVRIIMGTLLDVGTNKINVTDFKKIIKQKNRKKAGKTISPKGLYFLGPEYNELNYTKEAILDELD

SEQ ID NO: 157023 - protein, 242 aa, Unknown
  Bacterial polypetide isolated from the Sargasso Sea
MYRYQILIEYVGTLYVGWQIQKKGNSIQKTVQLALSKLLGQKIILYGSGRTDAGVHASEQSAHFDVKNKIQNIERTIKSLNFFLKNKMISIIKIKKKKINFHARYSAKQRIYLYIIQNRLSPSSLYKDREWHVRKKLDINLIKKGAKKLVGTHDFSVFRASNCSAKSPIRTINEILVSKVKNRIIFKFKSKSFLKNQVRSMVGCLKYLGERKWSVNQFINVIKSKDRKKVAPPAPACGLYLK

SEQ ID NO: 157024 - protein, 93 aa, Unknown
  Bacterial polypetide isolated from the Sargasso Sea
MRRYKIIIQYDGSFFSGWQLQKDKKTVQGEIENALKIITDSKERITIKGSGRTDAGVHAIGQVAHFDIDTSLKKEELKNAINYYISNHCKIMS

SEQ ID NO: 157025 - protein, 246 aa, Unknown
  Bacterial polypetide isolated from the Sargasso Sea
MFRYQIIVEYIGTNLRGWQVQKKGKTVQGLIQKKISKLLKEKIILFGSGRTDAGVHAIEQSAHFDTSSEIVEINKFLKSINYFLINEGISILKIKKRNKDFHSRFSAKMRVYKYVIINRLSKPAIDRNRGWHIIKKLDLSLMNRGAQRLIGTKDFTTFRASSCRAKSPIKTMKSIKIKSSKNKIIIEFKSQSFLQHQVRSMVGCLKYLGEKKWSIKKFNYILKAKNRTLCAPLAPAEGLFLAKIIY

SEQ ID NO: 157026 - protein, 208 aa, Unknown
  Bacterial polypetide isolated from the Sargasso Sea
MARYQVLIEYVGTSFRGWQIQKKGSTIQGFIQQHLSKLLKEKIILNGSGRTDAGVHAHAQSAHFDCQKKILDLTKFLKSINHFLNNKGIAITQIKKRSEKFHSRFSAKQRIYRYIIFNQISAPVIENGRGWHVRKILDVDLMKKGAKKLLGTNDYSTYRSSSCHAKSPIRTIKSIKIRTLKNKIEIEFKSQSFLQQQVRSMVGCLKYL

SEQ ID NO: 157027 - protein, 257 aa, Unknown
  Bacterial polypetide isolated from the Sargasso Sea
MTPRVFALWQNKQTDNVSNKIVPTAQNWLLLLTFDGACYHGWQVQPDFPTIQDTLQKAILRLTGETVSVHGAGRTDAGVHALNYTANFTSTSKSIKTNEKWCRALNAVLPNDIVVKSIQTVSADFHARHKAIGKRYRYLISNHSYHSPFTKNKSWHVGQTLDLDMMKKVAEVLIGEHDFSAFRSSNCSSPNTVKDIREISIVKSHFQNSILQIEIEANSFLQQMVRIITGTLVEAAQARIRRTDVKKALNFGDRNLA

SEQ ID NO: 157028 - protein, 201 aa, Unknown
  Bacterial polypetide isolated from the Sargasso Sea
VIGAGRTDSGVHALEQVAHFDLKKKIQKKSILPAINQNIGNKPVTVLKINKVNKKFHARHDAKKRTYLYLIINRQSPLTLQKNKAWHIRKKLNLKTMTKGAKLLLGTHDFSTFRAASCGAKSPVRTMEKVLIKKNKDKITLKFTSRSFLQQQVRSMVGCIKYLGEGKWNLNDFKNSFKSKSRLRCAPPAPACGLYLKKIEY

SEQ ID NO: 157029 - protein, 171 aa, Unknown
  Bacterial polypetide isolated from the Sargasso Sea
MENKVKYALLIEYNGNSLVGWQRQETGISVQGTLEKVANQIFNDEFLIQGSGRTDAGVHALGQVAHIYLPSNHPLTSKHPFYIISAFNSFLMDTSIRVVSAKPVKSKFDARFSAIKRYYKYRILCRAAPAGVDKGKVWHYRKKLNIKSMKEGIKYLIGKHDFTSFRTIKCQ

SEQ ID NO: 157030 - protein, 234 aa, Unknown
  Bacterial polypetide isolated from the Sargasso Sea
TNYSGWQSQKNAKSIQKEIEKILSKFLKKKVNITGSGRTDAGVHSKNQSAHFDHEKLIFDKYKLTTSVNYFLNKKNISIKKIIKKNMNFHARYSAKEREYEYIILNRDAPPVLDKNKVWYLRSRLDIKLLKKGANKLIGTHNFNAFRSGNCQAKSPVRTLKKIKITKKKEKIIFTLRSKAFLKNQVRSIIGCLKYVGEKKWTINDLEKVLKSKNRNYCAPPAPAQGLYLSKIIY

SEQ ID NO: 157031 - protein, 74 aa, Unknown
  Bacterial polypetide isolated from the Sargasso Sea
MSRYKIIIQYDGNNFSGFQSQKNKSGIQDQIESSLSNLNNNKLVKVFGASRTDAGVHALGQVAHFDIISQIIRR

SEQ ID NO: 157032 - protein, 197 aa, Unknown
  Bacterial polypetide isolated from the Sargasso Sea
MEIKNSIRYALLIEYNGYDLVGWQKQNEGMSVQSSLEEAAKNIFNQNFEIQGSGRTDAGVHALGQIAHINLPKGHRLTSRHPFYIISAFNSLLRDTNIRVISTKPVKPEFNARFSAIKRFYKYRILCRAAPPGLEKGKVWHFRKKLNISLMQEGVGHLIGKHDFTSFRTIKCQAKSPIRTIDEISFSRENEEVIMRV

SEQ ID NO: 157033 - protein, 246 aa, Unknown
  Bacterial polypetide isolated from the Sargasso Sea
MITYQIRVEYLGTNFVGWQFQKNGLSIQEVLEKALSQYLKENIRVIGSGRTDSGVHASEQSAHFKTKNKINNKGIFLNSVNFFLKKFPVSILNIQKRSNNFHARHSAKERVYKYFIINRTSSLAIDKNKAWHIKKKLDVKLMKEGATFLKGTHNFTTFRASNCQAKSPIRTLKKPLISKSKNKIVFTFQSKSFLQQQVRSMVGSLKYLGEGKWNLKDFKKAFQSKKRSMCAPPAPAHGLYLVKVKY

SEQ ID NO: 157034 - protein, 183 aa, Unknown
  Bacterial polypetide isolated from the Sargasso Sea
ASFKIEKLIEINVIRDGLNQHLRPHPIAVITAEVVNDDFHARFSAKNRTYQYKIINRRSPLTIEKNRAWCVHKKLNFDKMLIESKSFIGKYDLSSFRSSHCQSKSTIKTIKDIIIEQESETLIFTITAKSFLHSQVRIMVGTLVDIGKGLLSKSISEIIESKDRNVAGQTAPACGLYLKKIFY

SEQ ID NO: 157035 - protein, 249 aa, Unknown
  Bacterial polypetide isolated from the Sargasso Sea
MKKFHNYLLKIEYDGTKFVGWQYQKNGISIQEKIEWALTKLLKRKVRIIGAGRTDKGVHAMGQYANFKVEKKIENRIKFIDSMNFFLRKNLISIINIKKKNLTFHSRFSALERIYVYKIINRTGSLSLNNNRAWHIKKKLNIKLLKEGAKILEGTHDFSAFRAASCSAKSPIKKMNSVKIKKKENEILIQFSSKSFLQNQVRSMVGSLKYLSCGNWSIKKFKEVLKNKKRANCAPPAPAYGLYLKNIKY

SEQ ID NO: 157036 - protein, 165 aa, Unknown
  Bacterial polypetide isolated from the Sargasso Sea
FFLKKHPVSILNIQKRSNNFHARHSAKERVYKYFIVNRPSSLAIDKNKAWHIKKKLDVKLMKKGATILKGTHNFSTFRASNCQAKSPIRTLKKPLIIKSKNKIIFTFQSKSFLQQQVRSMVGSLKYLGEGKWNLKDFKKAFKSKKRSMCAPPAPAHGLYLVKVKY

SEQ ID NO: 157037 - protein, 231 aa, Unknown
  Bacterial polypetide isolated from the Sargasso Sea
KAIQRITGETVMVHGAGRTDSGVHALNYTANFNSTSKNIKTTEKWCSALNAVLPDDIVVKSIQTVSVDFHARHNAIGKRYRYLISNMSYHSPFTKNKCWQIGKILDIDMMKQVADILIGKHDFSAFRSSNCNSPNTVKDIREISIGKSQFQNSILQIEIEGDSFLQHMVRIITGTLVEAAQHRISCVDVKKALKNGDRNLAGVTAPAHGLYSLKVIYPEGLVSWPLEVIDK

SEQ ID NO: 157038 - protein, 95 aa, Unknown
  Bacterial polypetide isolated from the Sargasso Sea
KKDFSTFRASSCRAKSPIKTMKMAKIKSSKDKIEIEFRSQSFLQQQVRSMVGCLKYLGEKKWSLKKFESVMKSKKRILCAPPAPPEGLYLSKVVY

SEQ ID NO: 157039 - protein, 93 aa, Unknown
  Bacterial polypetide isolated from the Sargasso Sea
MNRYKIKIEYDGTPFVGWQRQENGQSVQGCIENAINNIFEENITIFGAGRTDAGVHAMGQVAHFDVTEKLLEPYVIKNALNDHLRPFPISIWK

SEQ ID NO: 157040 - protein, 135 aa, Unknown
  Bacterial polypetide isolated from the Sargasso Sea
MFRYQILIEYIGSSFIGWQVQTKGKTIQGLIQKKISYILNEKIALIGSGRTDTGVHAIEQSAHFDVTEKIQNLNKFLKSINYFLNKYEIAILKIKKKNMKFHARFSAKERVYKYVIFNQFSKPILQNKRGWFVIK

SEQ ID NO: 157041 - protein, 99 aa, Unknown
  Bacterial polypetide isolated from the Sargasso Sea
TPHRTVSSVSVHRQGRYVVLDIRANAFLHHMVRNITGSLLCIGAGEQPVDWMAHLLTLKDRAKAATTAKPNGLYLVDVTYPEHFGIPKSPLGPLFLPES

SEQ ID NO: 157042 - protein, 246 aa, Unknown
  Bacterial polypetide isolated from the Sargasso Sea
MFTYQITVEYLGTNFVGWQFQKNGLSIQEVLETALSKYLKENIRITGSGRTDSGVHASEQSAHFKSKNKIKNRGIFINSLNFFLKKHPVSILNILKRSNNFHARHSAKERTYKYFVINRPSSLALDKNKAWHIKKKLDVKLMKKGAAILKGTHNFSTFRASNCQAKSPIKTLKKPLIKKSKNMIVFTFQSKSFLQQQVRSMVGSLKYLGEGKWDLKEFKKVFLSKQRSMCAPPAPAHGLYLVKVRY

SEQ ID NO: 157043 - protein, 133 aa, Unknown
  Bacterial polypetide isolated from the Sargasso Sea
MFRYQILIEYVGTNFRGWQVQTKGKTIQGLIQDKISKLLKERIILFGAGRLDKGVHAIEQSAHFECETKIIDLDKFLKSLNYFLNKEMVTVLKIKKRKKDFHARFSAKMRIYKYVIVNRLSGPVLDKNRGWHI

SEQ ID NO: 157044 - protein, 168 aa, Unknown
  Bacterial polypetide isolated from the Sargasso Sea
MFRYQILIEYVGTNFRGWQIQKKGKTVQGLLQSKISKLLKENIVIYGAGRLDVGVHAKEQSAHFDCKNKINNIDRFLKSINHFLNKDGVAILKIKKRSKNFHARFSAKMRVYNYVIINRISGPVLDENRGWHIMKDLDLKLMRKSAKKLIGTLDFSTFRKSSCRAKSS

SEQ ID NO: 157045 - protein, 228 aa, Unknown
  Bacterial polypetide isolated from the Sargasso Sea
GSFKKTGSSIQNEIEKALWKFLKRKIRVIGSGRTDAGVHAVGQSANFFCDKIENNKKFLNSLNYFLSKKNISISSIKKKNLNFHSRFDAKKRTYKYIIVNRKNFLVLDKNRAWLVKKKLNVNYMKKAIKLFSGTHNFNAFRSSSCSAKSPVRTIEKSSLIKKDGKIIMIFSSKSFLQHQVRSMVGCLKYIGEGKWNIDKLKTLFNSRKRSLCAPPAPSSGLYLYKVTY

SEQ ID NO: 157046 - protein, 261 aa, Unknown
  Bacterial polypetide isolated from the Sargasso Sea
MKLAFTLEYDGTDFSGFQSQKNSITIQDHIERAIEKITNSKTRINYSGRTDAGVHALSQVFDFDTEIQREEENWIKGINANLPKTIAVRKVFNVPDDFDSRFSAVERRYSYVIYNSKNKPLFFDTFSYWVTNNLEINIIKNQLNMFLGHHDFSSFRSSSCNSKNPNKNISYVDVKTIDSFIIITIASNAFLQNMVRIMVGTIIDIAKNEKNMTIEDIIKKKDRTFAGKTAPANGLFFLGPKYKDELNIDTFEMNILDRLKK

SEQ ID NO: 157047 - protein, 244 aa, Unknown
  Bacterial polypetide isolated from the Sargasso Sea
MPNYKITLEYDGTNYVGWQRQENGPSVQQLVEEAIEKLSKQKITLFGAGRTDAGVHARGQVANFELEQHFDTDTIRDGINHYLRPQPISILHAEEVDKDFNSRFSAKLRWYEYKILNRRSPITLEQNKVWCVHKKIDAEKIIKQSQQFIGKFDLSAFRSINCQSKSPIKSINSLDINFNHDEINFLISAKSFLHSQVRIMVGTLVDIGLSKIEKSISEIIQSKKREYAGVTAPPEGLYLLKIDY

SEQ ID NO: 157048 - protein, 249 aa, Unknown
  Bacterial polypetide isolated from the Sargasso Sea
MPHGVEAKLSRTIAAGRTDSGVHAAAQVAHFDCYGPIPAGRWAPALNGRLPGSIRVRASAAVDANWHACFSARYRRYRYCLYNARRPNLFLAPVSWHRYQWRLRDDLMGELLQELVGHHDFSAFQRAGSQRPHARTTVQEVSLQRDGDIITLEIQASGFLYGMVRLLVGQLVAAGEGRISPEQFRQRWHEQRREEVKEAAPPQGLCLLRVGYPEPVFPRGAWYDCQPRYRLETSDPPPEITNNPTGEVL

SEQ ID NO: 157049 - protein, 261 aa, Unknown
  Bacterial polypetide isolated from the Sargasso Sea
MARFFAQIEYQGTRYHGFQKQKNSKSTIQAKVESALSKVANHKILITCSGRTDAGVHATNQIIHFDSRSKRTIESWIRGTNTYLPDDIAIKNIFKVKDSLHARFDAKSRTYIYLIKNSPQKPAIESNNSLWVRANLNIKKMNTACKHLLGEQDFSSFRSSNCQSKTAMRNLYSAQFTKKEEYILFEIKGNAFLQNMIRIIVGTLIEVGKNNLTITDFKNIIKAKNRKKACKTVSPNGLYFIGPEYNDFTYTKNKIFLDELD

SEQ ID NO: 157050 - protein, 92 aa, Unknown
  Bacterial polypetide isolated from the Sargasso Sea
MKRVALLVQYDGTHYSGWQKQKNATTVQEILDRALLKITNHTVKTFAAGRTDAGVHASGQVVHFDVDCVVPGNSYSDVLNSLLPSSIRILES

SEQ ID NO: 157051 - protein, 245 aa, Unknown
  Bacterial polypetide isolated from the Sargasso Sea
MTNIKLTIEYHGLPYCGWQYQKNEKTVQGEIEKAIFKFSGEKKTIQGAGRTDAGVHAIGQCANFELEKKFNDYQILSGINFHLGTEKIRVTKVESVDNEFNARFTAKNKIYNYQVFNSLAPSVIEDDFSIHIRQPLDLQAMQNAIKLFIGKHDFSSFRAHGCQANKPLRTIDDASIDIRGNKIIFVFKAQSFLYQQIRIMVGSLLEVGLKNKNTNWISELIEAKDRSLAGPTVPSKGLILKEIYY

SEQ ID NO: 157052 - protein, 246 aa, Unknown
  Bacterial polypetide isolated from the Sargasso Sea
MARYQLLIEYVGTNYRGWQIQKKGLTIQGIIQQKLTKILKEKIILNGSGRTDKGVHAIEQSAHFDCKNKIGDLTKFLKSINYFLNDKGIAITKIKKRNNKFHSRFSAKQRIYKYTIFNQINAPVIEKKRGWHVKKPLDLKLIKLGAKKLIGTNDYSTFRSSSCHAKSPIRTIKSIKIRSSKNKIEIEFKSQSFLQQQVRSMVGCLKYLGEKKWDLKTFDRAFKSKKRALCAPPAPPEGLFLARVIY

SEQ ID NO: 157053 - protein, 246 aa, Unknown
  Bacterial polypetide isolated from the Sargasso Sea
MSRYKITIQYDGNSFSGFQSQKNKSGIQNQIESSIAKLNNNKIVKVFGASRTDAGVHALGQVAHFDIVSQLSDDDFLRAINARLNKEIRISKLVKVDDCFHSRFDAKSKKYEYFCCTEENPLFLKNHHFIKNIDFNLIKKASKLIEGEHDFLSFSKFSGKENNRCKIFSSEWLFDDKNKQKLSYIIHGNRFLHHMVRYLVGTMIAVGQNKISIEDFLILLNNPKKDARIFKAPSKGLILREIFYEN

SEQ ID NO: 157054 - protein, 178 aa, Unknown
  Bacterial polypetide isolated from the Sargasso Sea
KILDLTKFLKSINHFLNNKGISITQIKKRSEKFHSRFSAKQRIYRYIIFNQISAPVIENGRGWHVRKILDVDLMKKGAKKLLGTNDYSTFRSSSCHAKSSIRTIKSIKIRALKNKIVIEFNSQSFLQQQVRSMVGCLKYLGEKKWDLKTFDKVFKSKKRALCAPPAPPEGLFLYRVIY

SEQ ID NO: 157055 - protein, 246 aa, Unknown
  Bacterial polypetide isolated from the Sargasso Sea
MTRYKIVIQYDGTNFSGFQSQKNLSGIQDKIESSIFVLNNNKKVKIYGASRTDAGVHALGQVAHFDLDSKLTDKELHRAINARLDKEIRISHLSKIEESFHSRFDAKSKEYNYLCCLSDNPLYLKDHYHVNNIDIKLLMEVSKIIEGKHNFLSFSKFSNKQNNDCEIFASKWVFDDKNHEKLLYIIHGNRFLHHMVRYLVGSMIAVSQNKISIDDFRTLLNQPIKDAKIFKAPSNGLVLKEIFYEK

SEQ ID NO: 157056 - protein, 94 aa, Unknown
  Bacterial polypetide isolated from the Sargasso Sea
MKRVALLIQYDGTHYSGWQKQKNATTVQEILDKALLKITNHKVKTFAAGRTDAGVHASGQVVHFDVDCVVPGNSYSDVLIVFYPHQLGFWNQLR

SEQ ID NO: 157057 - protein, 246 aa, Unknown
  Bacterial polypetide isolated from the Sargasso Sea
MARYQLFIEYVGTNFRGWQIQKTGLTVQGFIQKNLKKLLNEKIVLIGSGRTDAGVHAIEQSAHFDCKKKIRNLESFAKSINHFLNSKDVAIIKIKKRSNNFHSRFSAKQRIYKYVIFNQSSLPVIEKNRGWYLRKPLDLELMKKGAKKLIGSNDFSTFRSSSCNARSPIKTIKSIKIKSSKNKIEIEFKSKSFLQQQVRSMVGCLKYLAEKKWTLKTFEKVFKSKKRELCAPPAPSEGLFLKKVIY

SEQ ID NO: 157058 - protein, 86 aa, Unknown
  Bacterial polypetide isolated from the Sargasso Sea
MLRYKIIVQYDGTAFYGWQTQKSERTIQGELELALKKINDSRNVRVHGSGRTDTGVHAIGQVAHFDLKTSLDTFQLKDALNGNLPP

SEQ ID NO: 157059 - protein, 258 aa, Unknown
  Bacterial polypetide isolated from the Sargasso Sea
MTARFFCQLEYDGSSYKGFQAQKSTKKTIQYEVEHALAKVADHEINIVCSGRTDAGVHAVNQIFHFDTTAERDIDSWIRGANANLPNNISLINFFNVETDSHARFDAISREYIYLITNSDFKPAIHNNKTLWVRRELDVKGMNDAAKLLIGEKDFSSFRATGCQSKHSVRKIYEAEVRQDNDLISFRIKANAFMLNMVRIIVGTLLAVGRNEKSLSDFANIIEAKDRKRSGKTVDPFGLYFMGPEYNYLSYKKNRIFK

SEQ ID NO: 157060 - protein, 69 aa, Unknown
  Bacterial polypetide isolated from the Sargasso Sea
GFLYNMVRIIAGTLLMVGTGKRPETWVGDVLADRQRTSAGPTAPAQGLLLLQINLKPQTVVAARNGSSS

SEQ ID NO: 157061 - protein, 246 aa, Unknown
  Bacterial polypetide isolated from the Sargasso Sea
MARYQLLIEYVGTNFRGWQIQKKGSTIQDLIQEKLTKLLKQKIILNGSGRTDTGVHAIEQSAHFDCKNEIKDLTKFLKSINFFLNDKDVAIKKIKKRSNKFHSRFSAKQRIYKYIIFNQISEPVIEKKRGWHVRKTLDLNLIKKGAKILEGTNDYSTFRASSCHAKSPIKTIKSIKIKSSKNKIEIEFKSQSFLQQQVRSMVGCLKYLGEKKWDLKTFDKIFKSKKRVLCAPPAPPEGLFLARVIY

SEQ ID NO: 157062 - protein, 244 aa, Unknown
  Bacterial polypetide isolated from the Sargasso Sea
MPNYKITLEYDGTNYVGWQRQENGPSVQQLVEEAIEKLSKQKITLFGAGRTDAGVHARGQVANFELEQHFDTDTIRDGINHYLRPQPISILHAEEVDKDFNSRFSAKLRWYEYKILNRRSPITLEQNKVWCVHKKIDTEKIIKQSQQFIGKFDLSAFRSINCQSKSPIKSINSLDINFNHDEINFLISAKSFLHSQVRIMVGTLVDIGFSKIEKSISEIIQSKKREYAGVTAPPEGLYLLKIDY

SEQ ID NO: 157063 - protein, 268 aa, Unknown
  Bacterial polypetide isolated from the Sargasso Sea
ELIVGKEMIIGVNSYISGNVTEIDTLEIDNTEVRSSQIKRLIRIKTERDSVKLEKALSTLENCAATGKGNLLELAVEAAKHRATLGEISLALEKTFGRYKATIRTISGIYSSELMNDKNYNEAFGLAKEFEKVVGRRPRIMIAKMGQDGHDRGAKIVATSFADIGFDVDIGPLFQTPEEAAKQAVENDVHILGISSLAAGHKSLVPAVIKELNDLGREDIMVVVGGVIPKKDYETLFNDGVAAIFGPGTNISHAAQDIIKIMLEGYEK

SEQ ID NO: 157064 - protein, 127 aa, Unknown
  Bacterial polypetide isolated from the Sargasso Sea
MFRYQILIEYVGSSFIGWQVQTKGKTIQGLIQKKISYLLNEKITLIGSGRTDTGVHAIEQSAHFDVTEKIQNFNKFLKSINYFLNKYEIAILKIKKKNMKFHARFSAKERVYKYVIFNQLSKTDPSK

SEQ ID NO: 157065 - protein, 260 aa, Unknown
  Bacterial polypetide isolated from the Sargasso Sea
MPAVLTKYACGVEYLGSHYKGWQSQDSQETIQDQIESALSNVANEKLRIYSAGRTDSGVHALGQVFHFSTNANRTENQWLDGINSHLPSDISIQWIEIVDEEFDARYSAVSRTYIYLINNKKFDVFSDQRSLFVRQKLNTEHMREACQYLIGRHDFSSFRASSCQSNNPIRDMISIELEVDKFISIRFTANAFLHHMIRNIVGTLLDVGTEKISPKDLLRILHAKDRNAASKTASAEGLYLARVNYPEKYAFPSHSNEMI

SEQ ID NO: 157066 - protein, 261 aa, Unknown
  Bacterial polypetide isolated from the Sargasso Sea
MARFFAQIEYQGTRYHGFQKQKNSKSTIQAKVELALSKVANHKILTTCSGRTDAGVHATNQIIHFDSRSKRAIESWVRGANTYLPDDIAVKNIFKVKGSLHARFDAKSRTYIYLIKNSPQKPAIESNNSLWVRANLNIKKMNTACKHLLGEQDFSSFRSSNCQSKTAMRNLHSAQFTKKEEYVLFEIKGNAFLQNMIRIIVGTLIEVGKNNLTITDFKNIIKAKNRKKACKTVSPNGLYFIGPEYNDFTYTKNKVFLDELD

SEQ ID NO: 157067 - protein, 134 aa, Unknown
  Bacterial polypetide isolated from the Sargasso Sea
MFRYHILIEYVGTNFRGWQIQKKGKTVQRLLQDEISKLLKEKITIYGAGRLDVGVHAKEQSAHFDCKNKISKINRFLKSINHFLNIDGIAILKIKKRNNNFHARFSAKMRVYNYVIINRIGGPVLDENRGWHII

SEQ ID NO: 157068 - protein, 115 aa, Unknown
  Bacterial polypetide isolated from the Sargasso Sea
MFDNLLDLDSMRKAIRFLLGKHDFSSFRAQGCQANKPIRTIDEASIDIVDQKIIFIFKAQSFLYQQIRIMVGSLLEVGSKNKDINWISELIDAKDRRLAGPTVPSKGLILKEISY

SEQ ID NO: 157069 - protein, 246 aa, Unknown
  Bacterial polypetide isolated from the Sargasso Sea
MFRYQLLIEYLGTNYKGWQIQKKNKTIQGILQDKIRKLLKENITIVGSGRTDAGVHAIEQSAHFDLKKKLLNLDKFINSINHFLKNENITILKIKKRNSNFHSRFSAKKRIYKYIILNRTSSPVIEKNQVWHVRKKLDLDLMKLGAKKLVGTKDFSTFRASSCNAKSPVRTMDFVKLKSSNDKIEIQFKSQSFLQQQVRSMVGCLKYLGEKKWDLKNFDKALKSKKRSMCAPPAPPTGLFLSRIFY

SEQ ID NO: 157070 - protein, 246 aa, Unknown
  Bacterial polypetide isolated from the Sargasso Sea
MFIYQIKIEYSGSDFVGWQIQKNGLSIQGILEKVLSKFLNNKIKVIGSGRTDAGVHANEQSAHFVTPKKIIYKEKFISSINYFLKNYPIVILSLKKRPKGFHARHSANNRIYKYFIINRLSSLVLKKNKAWHIKKKLNLKVMKKGIKLLKGTHNFSTFRSSSCEAKSPIKTMKKATIKKQKDKIILTFSSQSFLQQQVRSMVGCLKYLGEGKWNLKDFKKAFLSKKRSMCAPPAPAHGLYLYKVKY

SEQ ID NO: 157071 - protein, 61 aa, Unknown
  Bacterial polypetide isolated from the Sargasso Sea
IEFQSQSFLQQQVRSMVGCLKYVGEKKWSLKKFNFIMNSKKRILCAPPAPPEGLYLARVIY

SEQ ID NO: 157072 - protein, 238 aa, Unknown
  Bacterial polypetide isolated from the Sargasso Sea
MDSRIALGVEYDGTNYFGFQKQNSTKQTLQGSLEESISKVADHKVKTFCSGRTDAGVHAFMQVMHFDTKAVRSSIEWSRGINSYLPKDIRVLWAKEIDESFHARFSATKRSYIYNILNHSNPSALWADKSLYVPIRLDIQSMKKGSKYLIGEHDFSSFRGSGCQSKTPIRNIQEIKISRNDAFVTLEITANAFLLHMVRIIVGTLIMVGKKEIRPKEVDKILKQKNRKLAGKTVSSSG

SEQ ID NO: 157073 - protein, 244 aa, Unknown
  Bacterial polypetide isolated from the Sargasso Sea
WQVQPNQPTIEGTLEKALQRLTGQVIKVHGSGRTDAGVHGLNQTASFSVVSEFSPEKWRIALNGVLPDDLVVKHVQQVPSDFHARHSSVGKRYRYLVCNLPYRSPFSRNKSWWVRKSLNLEAIREASSYLMGKHDFSAFRAANCSSPNPNKDLREILCDVKPWLHANLCLELEADSFLQHMVRIMVGTLVQVGTGKLKPEQMKGILESRDRTQAGLTAPAHGLYALAVRYPEDSIEWPDVLMDL

SEQ ID NO: 157074 - protein, 127 aa, Unknown
  Bacterial polypetide isolated from the Sargasso Sea
MYNYKIIVEYDGTNFVGWQQQENGQSIQAFLQDAAFKLSGEKVTIFGAGRTDAGVHAYGQVASFTINKKIETDVIRDGLNQHLRPHPISVQKAELVDSEFHARFSAIKRWYEYKIINRRPPLTMDKN

SEQ ID NO: 157075 - protein, 129 aa, Unknown
  Bacterial polypetide isolated from the Sargasso Sea
MRAAAKVLVGTHDFTSYRAVGCQAKSPIKTIHHLELLEFGRFIVLDIRANAFLHHMVRNIAGVLMQIGCGEHPVGWAAQVLAARDRAQGGLTAPAYGLYLVDVTYPAHFDLPDRYLGPHFLSALPDVLD

SEQ ID NO: 157076 - protein, 80 aa, Unknown
  Bacterial polypetide isolated from the Sargasso Sea
MRIALGIEYAGCNYYGWQTQSITPTIQETIELALSEVANEKVIIHCAGRTDTGVHAIQQVVHFETSSIRKSHNWVLGVNS

SEQ ID NO: 157077 - protein, 170 aa, Unknown
  Bacterial polypetide isolated from the Sargasso Sea
LRGVNQHIGNKPITILKIKKVKNKFHARFDAKRRTYEYIIVNRQSPLTLEKNKAWHIRKKLNIKVMKKGAKLLKGTHDFSTFRSSSCQAKSPIKTLKKVSIKKSGNKIILKFVSQSFLQQQVRSMVGCIKYLGDEKWNLNDFKNSFKSKNRLKCAPPAPACGLYLKKVSY

SEQ ID NO: 157078 - protein, 163 aa, Unknown
  Bacterial polypetide isolated from the Sargasso Sea
MPRYKLTVEYLGTNFSGWQKQKNSYSVQEAIEKAANKLLQQKINLVVAGRTDAGVHAEGQVAHFDIKNEFCSRKIQLGINFHLMTQKFGKDISVKKAIKVNNNFNARFSAKKKLYQYLILNSIYRSPILYDKSWWVRKRLDYEKMFEASQNLIGSHDFSSFRA

SEQ ID NO: 157079 - protein, 218 aa, Unknown
  Bacterial polypetide isolated from the Sargasso Sea
FRECIEIAIKKLTNENVRVYGAGRTDAGVHALEQVAHFEINKDIKTENIRDGLNQHLKPNTIAIINAEKVDDNFHARFSAKLRSYEYRVINRRTPLTIDLNRAWCVYKQLNVDKIVNEASSFLGEHDFESFRSSNCQSSKTIKNLKSFDIKYKNDNLFFNISAKSFLHSQVRIMVGTLIDIGKGVIDKSLVEILNAKKRSLAGTTAPACGLYLKKIYY

SEQ ID NO: 157080 - protein, 226 aa, Unknown
  Bacterial polypetide isolated from the Sargasso Sea
QKNGLSVQGVLEKALSKFLKDKIRVIGSGRTDAGVHASEQSAHFKTKHKVIDKNTFINSINFFLSKYPVSVLSIKKRSNKFHARHSANERIYKYFIINRSSSLVLEKNKAWHIKKRLDVKIMRRGAEILKGTHNFSTFRASSCQAKSPIKTMKKAMIKKNKNKIILTFQSKSFLQQQVRSMVGSLKYLGEGKWNLNHFKKSFLSKNRAMCAPPAPAHGLYLYKVRY

SEQ ID NO: 157081 - protein, 246 aa, Unknown
  Bacterial polypetide isolated from the Sargasso Sea
MFTYQITVEYLGTNFVGWQIQKNGLSIQEILEKVLSKFLKEKIKVIGSGRTDAGVHASEQSAHFKIKHNIIDKNNFINSINFFLKKYPISILEIKKKSNKFHARHSANKRTYKYFIINRCSSLVLEKNKAWHIKKKLDINIMKKGAEILKGTHNFSTFRASSCQAKSPIKTLKKAVVKKDKNKIVLTFQSKSFLQQQVRSMVGSLKYLGEGKWNLNDFKKAFLSKKRTMCAPPAPAHGLYLTKVLY

SEQ ID NO: 157082 - protein, 158 aa, Unknown
  Bacterial polypetide isolated from the Sargasso Sea
MKRVALLVQYDGSHYSGWQKQKNATTVQEILDRSLLRITNHTVKTFAAGRTDAGVHASGQVVHFDADCVVPGNSYSDVLNNLLPSSIRILESVEVKDSWHACYSAMYRHYRYVINNSKFPNLFINNWSWHRYQKVLDEVLMLNASKKMIGEHDFFAFQ

SEQ ID NO: 157083 - protein, 132 aa, Unknown
  Bacterial polypetide isolated from the Sargasso Sea
MTRYQILVEYLGTSFVGWQVQKKGISVQKVIQSVLSKLLKQKILLYGSGRTDAGVHALEQSAHFDLKNKIQNIEKFIKSLNYFLNPKKISIINIKKRNLKFHARFSAKERSYIYLIQNRMSPSVIIKIKYGI

SEQ ID NO: 157084 - protein, 132 aa, Unknown
  Bacterial polypetide isolated from the Sargasso Sea
RQAPLVLQKNRYWHIWRNLEIEQMMEASNFLVGTHDFTTFRSSICQSNSPVKTIDQICIKEKIIDDEKIINFHFQARSFLHNQVRSIVGSLEKVGSKKWSPNYIKTILDKKDRKKCGPIAPPEGLYLKKIFF

SEQ ID NO: 157085 - protein, 209 aa, Unknown
  Bacterial polypetide isolated from the Sargasso Sea
MKRYKIKIEYDGTPFIGWQRQDNGQSIQGAIEDSIKNIFEETVTIFGAGRTDAGVHAMGQVAHFDINNKELKPFVIKNALNDHLRPFPIAILEVDEVDNKFHARFNALQRKYLYRIVNRKSPLTIEKGRAWHVHKEIDVDLMKECISSIEGKHDFTTFRSAHCQSDSPIKTIDSLQITKSDENIYFGFSAKSFLHHQVRSIVGSLKLVG

SEQ ID NO: 157086 - protein, 224 aa, Unknown
  Bacterial polypetide isolated from the Sargasso Sea
MDFRIALGVEYDGTNYFGFQKQKSTKQTIQGSLEESISRVADHKVKTFCSGRTDAGVHAFMQVLHFDTKAIRSSIEWSRGINSYLPKDIRVLWAKEIDESFHARFSATKRFYIYNILNDPTPSALWAHRSLYIPTRLDMQSMKKASKYLLGEHDFSSFRGSGCQSKTPIRNIHKIKISRKDDFVTLEFTANAFLLHMVRIICGTLIMVGKKEIKPEEVDKILKQ

SEQ ID NO: 157087 - protein, 144 aa, Unknown
  Bacterial polypetide isolated from the Sargasso Sea
ARHSASERIYKYFIINRRSSLVLEKNKAWHIKKKLDIKLMRQGANILKGTHNFSTFRASSCQAKSPVKTMKNATIKKNNHRIILTFQSKSFLQQQVRSMVGSLKYLGEGKWNLNDFKKAFLSKKRKMCAPPAPAHGLYLSKIKY

SEQ ID NO: 157088 - protein, 242 aa, Unknown
  Bacterial polypetide isolated from the Sargasso Sea
MILEYDGTAYNGFQAQDGQPTVQGALETAIHAFSGERIRIAAAGRTDTGVHATAQVVHADLERNWPVDTVLNAMNAHLVREDVCILSAERAPDPDWHARFSATGRGYLYRILNRRPQPVLERDRVWHVKKTLDAEAMHHAAQVLVGHHDFTTFRDVACQSKSPVKSLDVARVTRFGEEVHLVFQARSFLHRQVRSMAGTLVEVGLGRWTAHDVKAALEARDRARCGPVAPSAGLYLSGVRYD

SEQ ID NO: 157089 - protein, 219 aa, Unknown
  Bacterial polypetide isolated from the Sargasso Sea
QGLIQEKVSIILKEKIIVYGAGRLDSGVHAIGQSAHFDCLTKIEKKDSFLKSINFFLKKENVSILSIKKRNRNFHARFSAKIRVYNYKIINRLSIPVLHKNRSWHVIKKLNLNLMKEGAKILMGTKDFSTFRASSCRAKSPIKTLELVKIISSKNIIDIEFRSKSFLQQQVRSMVGCLKFLGEKKWSLKKFDDVTKSKKRTLCAPPAPPEGLYLTKVIY

SEQ ID NO: 157090 - protein, 113 aa, Unknown
  Bacterial polypetide isolated from the Sargasso Sea
MFRYQILIEYLGTSFVGWQVQKKGISVQKVIQSVSSKLLKQKIIFYGSGRTDAGVHALEQSAHFDLKNKIQNIEKFIKSLNYFLNPKKISVISIKKKNLTFHARFSAKERSYI

SEQ ID NO: 157091 - protein, 165 aa, Unknown
  Bacterial polypetide isolated from the Sargasso Sea
MKRVALIIQYDGSFFSGWQRQKNAKSVQATIEDALFEFSNQIIKTFAAGRTDAGVHASGQVVHFDIKSIIPCDRYADILNKKLPQTIRILESVEVQNSWHACYSAVYRHYRYVINNSKISNLFLNKWSWHRYQKTLDEFLMSNALNGMVGEHDFFAFQKSGSNRS

SEQ ID NO: 157092 - protein, 236 aa, Unknown
  Bacterial polypetide isolated from the Sargasso Sea
MFRYHILIEYFGSSFRGWQVQKKGKTVQGLIQEKISKILKKKITIYGAGRLDSGVHAKEQSAHFDYDKEIKQKDRFLKTINHFLEKENVVILVLKKRSKNFHARFSAKMRVYNYVIINRLSKPVLERNRGWHLMKKLDTDIMKKGAKKLVGTKDFSTFRASSCRAKSPIKTMKLVKIKSLKDKIEIEFRSQSFLQKQVRSMVGCLKYLGEKKWSLKKFEYVMNSKKRILCAPPAPP

SEQ ID NO: 157093 - protein, 228 aa, Unknown
  Bacterial polypetide isolated from the Sargasso Sea
YIGWQKQENGKSIQQTIEDSIEMLTSEKISLYGAGRTDAGVHAFGQVGHFEIKKNIELNKIRDGLNQHLRPNPIAILNVEKVDENFHSRFSAKLRSYKYRIVNRRSPLTIDRNRAWAVYKKLNIKKIIYEANNFIGKHNLAAFRSINCQSKTTTKTIESINVNYENNELDINISAKSFLHSQVRIMVGTLIEIGKGKIKESISDIIKSKDRSRAGMTAPAHGLYLIKV

SEQ ID NO: 157094 - protein, 150 aa, Unknown
  Bacterial polypetide isolated from the Sargasso Sea
VKKNFHARFDAKKRTYKYVIINRKSPLTLQKNKAWHIKKKLEIKKMKKGAKLLEGTHDFSTYRSSSCQAKSPIKTLKKVSIKTKGDNVVLIFTSKSFLQRQVRSMVGCIKYLGAGQWNIDDFENSFKSKNRIKCAPPAPACGLYLTQVKY

SEQ ID NO: 157095 - protein, 157 aa, Unknown
  Bacterial polypetide isolated from the Sargasso Sea
MNRYKIKIEYDGTPFVGWQRQENGQSVQGCIEKAISNIFEENIIIFGAGRTDAGVHAMGQVAHFDVTDKLLDPYVIKNALNDHLRPFPISILEVEKVHNDFHARFDATQRKYLYRIVNRKSPLTIEKGRAWPVHKDIDVELMRECIPFIEGQHDFYT

SEQ ID NO: 157096 - protein, 200 aa, Unknown
  Bacterial polypetide isolated from the Sargasso Sea
VYGAGRTDAGVHAYGQVASFAISKKISTDVIRDGLNQHLRPLMISVLKAEEVENDFHARFSAKKRWYAYKIINRRSPLTIDANRAWCVHKKLDTKKMQNEATSFIGKHDLNAFRSAHCQSKSSIRTIDDIIIDIEDENILIEVVAKSFLHSQVRIIVGTLVDIAKGKINISILDIINSKNREAAGQTAPARGLYLKKIGY

SEQ ID NO: 157097 - protein, 219 aa, Unknown
  Bacterial polypetide isolated from the Sargasso Sea
MFRYQILIEYVGTNFRGWQIQTKGKTIQGLLQDKISKLLKEKIILFGAGRLDKGVHAIEQSAHFECKKKIIDLDKFIKSLNYFLNKHMVSVLKIKRRDKDFHARFSAKMRIYKYVIINRLSRPVLDKNKGWHIMSKLDLNMMKKAAKKLVGTKDFSTFRASSCRAKSPIKTMKSVKIKYKNNKIEIEFQSQSFLQQQVRSMVGCLKFVGEKKWTLKKLF

SEQ ID NO: 157098 - protein, 158 aa, Unknown
  Bacterial polypetide isolated from the Sargasso Sea
IAILKIKKRDKNFHARFSAKMRIYKYIIINRLSGPVLEKNRGWHIMKELDLDAMKKGATKLVGTKDFSTFRASSCRAKSPIKTMKLVKIKSSRNKIEIEFRSQSFLQQQVRSMVGCLKYLGENKWTLNKFEKVMKSKKRTQCAPPAPPEGLFLTRVLY

SEQ ID NO: 157099 - protein, 199 aa, Unknown
  Bacterial polypetide isolated from the Sargasso Sea
AGRLDVGVHAKEQSAHFDCKNKIIKFDKFLKSINHFLNKDGIAILKITKRGNNFHARFSAKMRVYNYVIINRISGPVLDKNRGWHIMKDLDLKLMKSAARKLIGTKDFSTFRKSSCRAKSPIKTMKSVKIKSTKDKIEIEFRSQSFLQQQVRSMVGCLKYVGEEKWTLKKFVNVMQSKKRELCAPPAPPQGLYLTRIIY

SEQ ID NO: 157100 - protein, 146 aa, Unknown
  Bacterial polypetide isolated from the Sargasso Sea
FHARFSAKLRIYKYIIINRISKPVLEEKRGWHIMKKLDLKIMKKSAKKLIGTKDFSTFRASSCRAKSPIKTMKSVKVKSSKDKIIIEFKSQSFLQQQVRSMVGCLKYVGEKKWSLKKFDRVIKSKKRTLCAPPAPAEGLFLFKIIY

SEQ ID NO: 157101 - protein, 178 aa, Unknown
  Bacterial polypetide isolated from the Sargasso Sea
MLRYKIIVTYDGTNFEGWQIQNNSRTIQGELENALKIINNNKCIKIFGSGRTDSGVHAIAQVAHFDFDFKERSKFDLKNAINGNLPEEIRITNCEIVPSNFHARFSASSRSYKYKLRTNDNIFDKNYTWRVGKLNLSLLNELASMITGTHDFTSFSKISSNLNSRKCNIYESSWYKKE

SEQ ID NO: 157102 - protein, 143 aa, Unknown
  Bacterial polypetide isolated from the Sargasso Sea
MPNYKIEIEYDGTNYVGWQRQDNGQSIQELIEIAIKKLTNEIVVLFGAGRTDAGVHAKGQVASFKIKKEINASVIRDGLNQHLRPHPIAIISANIVNDDFHARFSAKKRSYEYKIVNRRSPLTIEKNRAWCVHKKLDFDKIII

SEQ ID NO: 157103 - protein, 101 aa, Unknown
  Bacterial polypetide isolated from the Sargasso Sea
IKYFIGTHDFSAWRASSCSAKSPIRTITHASLNSFKDKITMRFESESFLQKQVRSMVGCLKYVGENKWKPEKIKKIIKSKKRNECAPPAPPEGLYLKKVFY

SEQ ID NO: 157104 - protein, 173 aa, Unknown
  Bacterial polypetide isolated from the Sargasso Sea
KNALNDHLRPFPISILQVEKAHNDFHARFDATQRKYLYRIVNRKSPLTIEKGRAWQVHKDIDVDLMKECIPSIEGQHDFTTFRSAHCQSDSPIKTLDSLKISQSEENIYFGFTARSFLHHQVRSIVGSLKLVGEKSWSPDDFEKAFNSKDRSNCGALAPPEGLYFMEVKYSLL

SEQ ID NO: 157105 - protein, 187 aa, Unknown
  Bacterial polypetide isolated from the Sargasso Sea
MKRVALLVQYDGSHYSGWQKQKNATTVQETLDKALLKITSHKVKTFAAGRTDAGVHASGQVIHFDVDCVIPGNSYSDVLNSLLPATIRILESVEVKDSWHACYSAMYRHYRYVINNSKFPNLFINNWSWHRYQKVLDEVLMLNASKTMEGEHDFFAFQKSGSNRTNSITTIKDIDIKRVEDLILVDI

SEQ ID NO: 157106 - protein, 118 aa, Unknown
  Bacterial polypetide isolated from the Sargasso Sea
MHRYALTIEYDGSSFHGWQVQNNVTTVQGVIFEAIKKFDVNCKNFIGAGRTDAGVHAICQIAHVDLATKHDCETVRKAINYYLSKYPISILSAETVDEKFHARFSAIRRHYTYKIFSR

SEQ ID NO: 157107 - protein, 218 aa, Unknown
  Bacterial polypetide isolated from the Sargasso Sea
MKIALGIEYAGCNYYGWQKQSISPTIQETVESALSAIADESINVYCAGRTDTGVHAIQQVIHFETSTKRKLYSWVLGANSKLPKDISVIWALDVDDNFHARYTAENRTYQYLILNRRSRPAILNGLVTWECRELDYKKMVDSSKCLIGENDFTSFRAVSCQSDSPIRTIHELEIGRIEDWFVITVRANGFLHHMVRNIAGVLIAVGIGKESIKWVADV

SEQ ID NO: 157108 - protein, 239 aa, Unknown
  Bacterial polypetide isolated from the Sargasso Sea
MSRYRATLEYFGKPFAGWQRQKNGFSVQQALEEAIKNFCGQDVVTYVAGRTDAGVHALGQVCHFEIEKKETTKTIRNAINFHLKPNPIIVLNVVEVDETFHARFSAKERHYRYKFINRATPSALYSDLSWWVPQALDIDLMIEASKCLIGKHDFSTFRAAGCQAKTPVKTLNSITFWREGDEVIMETRAKSFLYHQVRNMAGTLKLVGEKKWTIEDFSNAFNARTRVRGGITAPACVFI

SEQ ID NO: 157109 - protein, 237 aa, Unknown
  Bacterial polypetide isolated from the Sargasso Sea
ICCSSFIGWQVQSKGKTIQGLIQKKISYLLNEKITLIGSGRTDTGVHAIEQSAHFDVTEKIQNLNKFLKSINYFLNKYEIAILKIKRKNMNFHARFSAKERIYKYIIFNQLSKPILENKRGWFVIKKLELEIMKKAAKKLVGTHDFSTFRASGCNSKSPIRSIKSVKIKKIKNKIELEFRSQSFLKQQVRSMVGCLKYIGEKKWTLKKFTSVIKLKNRNLCAPPAPAEGLFLKRVLY

SEQ ID NO: 157110 - protein, 218 aa, Unknown
  Bacterial polypetide isolated from the Sargasso Sea
DAGVHALGQVAHINLPKNHKLTTRHPFYIISAFNSHLRKSKIRVVSTKQVKSEFNARFSATKRYYKYRILCRAAPPGIEKGKVWHSRKKLNIRLMEEATKYLIGKHDFTSFRTINCQAKSPIRTLDKISLLSVGDEIIINVSAKSFLHSQVRIIIGTIYKVGDETLKPKNVKNILEGKDRNLAGPTAPAEGLYLEKVEYPNNLLDDNWPIIYDSNLYN

SEQ ID NO: 157111 - protein, 186 aa, Unknown
  Bacterial polypetide isolated from the Sargasso Sea
MHTFDCKNKITDTIKFLKSINHFLNLKDIAIKNIKKRNNKFHARFSAKQRIYKYFIFNQISQPIIEKNRAWHVRRSLNLELMKKGAKKLLGTNDYSTFRSSSCNAKSPIKTIKSIKIKSSKNKIEFQFSSQSFLQHQVRSMVGCLKYLGETKWDLKTFEKRFKSKKRTLCAPPAPPSGLFLFRVLY

SEQ ID NO: 157112 - protein, 230 aa, Unknown
  Bacterial polypetide isolated from the Sargasso Sea
MFRYQIIIEYVGTNFRGWQIQKKGKTVQGLLQNKISKLLKENITIYGAGRLDVGVHAKEQSAHFDCKNKIIEIDRFLKSINHFLNKDGIAILKIKKRSKNFHARFSAKMRVYNYVIVNRIGGPVLDQNRGWHIMKDLDLKLMRKSAKKLIGTIDFSTFRKSSCRAKSPIKTMKLVKIKSTKDKIEIEFRSQSFLQQQVRSMVGCLKYVGEKKWTLKKFVNVIESKKRELC

SEQ ID NO: 157113 - protein, 222 aa, Unknown
  Bacterial polypetide isolated from the Sargasso Sea
MTRRILITIEYDGGPFVGWQRQDNGPSVQTAIEDAAKAFIHAPVAVVGAGRTDAGVHATGQAAHIDVPKKFTANRVMEALNSHLSSVPITVQDASEVPGDFHARFTAIGRRYLYRILPRRQPPALDVGRVWHHKQRLDPELMARAAKHLLGRHDFTSFRASQCQAESPLRTLDRLDIVTRGDEIHIHIEARSFLHHQVRNITGTLALVGTGKWHPDNMKTRT

SEQ ID NO: 157114 - protein, 195 aa, Unknown
  Bacterial polypetide isolated from the Sargasso Sea
MTRRILITIEYDGTPFVGWQRQDNGDSIQAAIEAAAEAFIGTPTPVAGAGRTDSGVHATGQVAHLDVPDKFDANRVMHALNAHLGEVPITIHHAREVPATIHARFSAIGRRYLYRILPQRQKPALDLGRVWHHRQPLDSDRMHKAAQYLVGHHDFTSFRASQCQTDSPLRTLDKLNVEEVDNEIHIHAEARSFLH

SEQ ID NO: 157115 - protein, 221 aa, Unknown
  Bacterial polypetide isolated from the Sargasso Sea
AGRTDAGVHASGQVVHFDIDSVIPGNSFSDILNSVLPSTIRILESVEVKDSWHACYSAKYRHYRYVINNSKFPNLFINNWSWHRYQKVLDEVLMLNASRKMIGEHDFFAFQKSGSNRTNSITKIKNIDIKRVEDLIFVDIKATGFLYGMVRLIIGQLVLVGENKISQEIFTDRWVNKKKNDVKESAPAKGLCFVNAVYEENVFKKINKNDFFPVFLIKGFS

SEQ ID NO: 157116 - protein, 218 aa, Unknown
  Bacterial polypetide isolated from the Sargasso Sea
YSSVLQEALVKLSNEKVIIFGAGRTDAGVHAYGQVASFTLSKKIETDIIRDGLNQHLRPHPIAVQNAEVVDDNFHARFSAKKRWYEYKIINRRPPLTIDLNRAWCVYKNLDIEKMKSESLSFLGKHDLNAFRSAHCQSKNSTKTIDSVSIKNIDEQIIIEVSAKSFLHSQVRIMIGTLVDIAKGNINKTILDIINSKQRDFAGQTAPANGLYLKKIEY

SEQ ID NO: 157117 - protein, 214 aa, Unknown
  Bacterial polypetide isolated from the Sargasso Sea
MKRVALLVQYDGSYYSGWQKQKNATTVQEILERALLKITNHTVKTFAAGRTDAGVHASGQVVHFDVDCVVPGNSYSDVLNSLLPSSIRILESVEVKDSWHACYSAMYRHYRYVINNSKFPNLFINNWSWHRYQKVLDEVLMLNASRKMIGEHDFFAFQKSGSNRTNSITKINNIDIKRVEDLIFVDIKATGFLYGMVRLIIGQLVLVGENKISP

SEQ ID NO: 157118 - protein, 159 aa, Unknown
  Bacterial polypetide isolated from the Sargasso Sea
MKRVALIIQYDGSYFSGWQRQKNAISVQEIIEDALFKVSNQRIKTFAAGRTDAGVHASGQVVHFDIEFLIPSDRYADVLNNKLPQAIRILESVEVKNSWHACYSAVYRHYRYVINNSKLPNLFLNKWSWHRYQKSLDEFLMSSALDGMLGEHDFFAFKR

SEQ ID NO: 157119 - protein, 165 aa, Unknown
  Bacterial polypetide isolated from the Sargasso Sea
YLFKKRNISILAIKKRNKNFHARFSAKMRIYTYIIINRFSEPALEKNRSWHIMKKLDLDIMRRGAKKFEGTKDFSTFRAASCRAKSPIKTMKLVEIKCSKNVIKIEFRSQSFLQRQVRSMVGCLKYLGEKKWSLKKFENIMKSKERALCAPPAPPEGLYLTKIIY

SEQ ID NO: 157120 - protein, 195 aa, Unknown
  Bacterial polypetide isolated from the Sargasso Sea
DAGVHAFEQSAHFDCINKITDKIKFLKSINHFLNLKDIAIKNIKKRSNKFHARFSAKQRIYKYFIFNQISQPIIEKNRAWHVRRPLNLELMKKGAKKLLGTHDYSTFRSSSCHAKSPIKTIKSIKIKSSKNKIEFQFSSQSFLQHQVRSMVGCLKYLGETKWDLKTFEKRFKSKKRTLCAPPAPPSGLFLFRVLY

SEQ ID NO: 157121 - protein, 211 aa, Unknown
  Bacterial polypetide isolated from the Sargasso Sea
KSYKKKKIVLHGQGRTDAGVHAFEQSAHFDCKNKITDKIKFLKSINHFLNLKDIAIKNIKKRNNKFHARFSAKQRIYKYFIFNQISQPIIEKNRAWHVRRPLNLELMKKGAKKLLGTHDYSTFRSSSCHAKSPIKTIKSIKIKSSKNKIEFQFSSQSFLQHQVRSMVGCLKYLGETKWDLKTFEKRFKSKKRTLCAPPAPPGGLFLFRVLY

SEQ ID NO: 157122 - protein, 222 aa, Unknown
  Bacterial polypetide isolated from the Sargasso Sea
MNRYKIKIEYDGTPFVGWQRQENGQSVQGCIEKAISNIFEENITIFGAGRTDAGVHAMGQVAHFDVTDKLLEPYVIKNALNDHLRPFPISILEVEKAHNDFHARFDATQRKYLYRIVNRKSPLTIEKGRAWQVHKDIDIDLMKECIPSIEGQHDFTTFRSAHCQSDSPIKTLDSLKISQSEENIYFGFTAKSFLHHQVRSIVGSLKLVGENSWSPNDFMNAL

SEQ ID NO: 157123 - protein, 191 aa, Unknown
  Bacterial polypetide isolated from the Sargasso Sea
HAFEQSAHFDCKNKIIDKIKFLKSINHFLNLKDIAIKNIKKKNNKFHARFSAKQRIYKYFIFNQISQPIIEKNRAWHVRRPLNLELMKKGAKKLLGTNDYSTFRSSSCNAKNPIKTIKSIKIKSSKNKIEFQFSSQSFLQHQVRSMVGCLKYLGETKWDLKTFEKTFKSKKRTLCAPPAPASGLFLFRVLY

SEQ ID NO: 157124 - protein, 195 aa, Unknown
  Bacterial polypetide isolated from the Sargasso Sea
DSGVHALEQSATFKSDIKIKNKVLFLRSMNHFLSKKNISILNFKTKKINFHARFSARKRSYKYIIINRESPLSLMKKKAWHLKKKLNIDLMKQGLLILKKNKDFSTFRSSSCSAKSPIRTLDKAFVRKKNLKIEIFFSSKSFLQQQVRSMVGCLKYLSEGKWSLKDFEKVVKSKQRSKCAPPAPPHGLYLKKVYY

SEQ ID NO: 157125 - protein, 195 aa, Unknown
  Bacterial polypetide isolated from the Sargasso Sea
MKRVALLVQYDGTNYSGWQKQKNAITVQEILDRALLKITNHTVKTFAAGRTDAGVHASGQVVHFDVDCVVPGNSYSDVLNSLLPSSIRILESVEVKDSWHACYSAMYRHYRYVINNSKFPNLFINNWSWHRYQKILDEVLMLNASKKMIGEHDFFAFQKSGSNRTNSITKIKNIDIKRVEDLIFVDIKATGFLYG

SEQ ID NO: 157126 - protein, 158 aa, Unknown
  Bacterial polypetide isolated from the Sargasso Sea
IAIKNIKKRNNKFHARFSAKQRIYKYFIFNQISQPIIEKNRAWHVRRPLNLELMKKGAKKLLGTHDYSTFRSSSCHAKSPIKTIKSIKIKSSKNKIEFQFSSQSFLQHQVRSMVGCLKYLGETKWDLKTFEKRFKSKKRTLCAPPAPPSGLFLFRVLY

SEQ ID NO: 157127 - protein, 148 aa, Unknown
  Bacterial polypetide isolated from the Sargasso Sea
MHRYQLKIEYVGSKYFGWQIQQKGKTIQKTIQSVLKKIFKKKIQLYGSGRTDTGVHAIEQSAHFETEKKIHNLKKFLETINFFLNNKDISILEINKKSSNFHARFSAKERVYKYIIYNRSSKLSLNNLRGWHIKKKLDVNLMKIGGQN

SEQ ID NO: 157128 - protein, 233 aa, Unknown
  Bacterial polypetide isolated from the Sargasso Sea
MKRIALLVQYDGSNYSGWQRQKNAITVQEILEKALFEITNHDVKTFAAGRTDAGVHASGQVVHFDIDYVIPGNSYSDLLNSYLPSSIRILESVEVQDSWHSCYSAMYRHYRYVINNSKFPNLFINNWSWHRYQKVLDEVLMSNASKRMEGEHDFFAFQKSGSNRKNSITKIKNIDIKRVEDLILVDIKATGFLYGMVRLIIWSLVLVGEKKISPEIFTDRWVNKRKMMLRICS

SEQ ID NO: 157129 - protein, 136 aa, Unknown
  Bacterial polypetide isolated from the Sargasso Sea
IYLYKILNRSTNSHLLEKRVWFFPSNLNITAMRESSLPLVGNHDFSAFRSTDCQAKKTIRSIDSIRISKRKDLVEIRVRGKSFLHNQVRIIVGTLVRVGNGFWNTRKIKEIINSKDRKNAGPTAPPEGLYLEKIFY

SEQ ID NO: 157130 - protein, 207 aa, Unknown
  Bacterial polypetide isolated from the Sargasso Sea
MNRYQILIEYIGTNFKGWQIQKKGPTIQGLIQEKLSKLLKEKIILHGQGRTDAGVHAFEQSAHFDCKNKITDTIKFLKSINHFLNLKDIAIKNIKKRNNKFHARFSAKQRIYKYFIFNQISQPIIEKNRAWHVRKPLNLELMKKGAKKLLGTNDYSTFRSSSCSAKSPIKTIKSIKIKSLKNKIELQFSSQSFLQHQVRSMVGCLKY

SEQ ID NO: 157131 - protein, 268 aa, Unknown
  Bacterial polypetide isolated from the Sargasso Sea
MKRVALLVQYDGSHYSGWQKQKNATTVQEILDGALLKITNHKVKTFAAGRTDAGVHASGQVVHFDVDCVVPGNSYSDVLNSLLPSSIRILESVEVKDSWHACYSAMYRHYRYVINNSKFPNLFIHNWSWHRYQKVLDEVLMLNASREMIGEHDFFAFQKSGSNRTNSITKIKNIDIKRIEDLIFVDIKATGFLYGMVRLIIGQLVLVGENKISPESFTDRWVNKKKNDVKESAPAKGLCFVNAVYEENVFKKINNNDFFPVFLIKGFS

SEQ ID NO: 157132 - protein, 235 aa, Unknown
  Bacterial polypetide isolated from the Sargasso Sea
YDGTNFVGGQEQENGQSIQALLQDAAFKLSGEKVTIFGAGRTDAGVHAYGQVASFSINNKIATDVIRDGINQHLRPHPISVQKAELVDGEFHARFSAIKRWYEYKIINRRPPLTIDTNRAWCVYKKINVEKMKTESASFLGKHDLNAFRSAHCQSKSSLKTIENIQIKHEGEKIIFDICAKSFLHSQVRIMVGTLVDIAKGNLNKSILDIINSKNREVAGQTAPAHGLYLKKIDY

SEQ ID NO: 157133 - protein, 226 aa, Unknown
  Bacterial polypetide isolated from the Sargasso Sea
QTKGKTIQGFIQKKISYLLNEKITLIGSGRTDTGVHAIEQSAHFDVTEKIQNLNKFLKSINYFLNKYEIAILKIKKKNIKFHARFSAKERIYKYVIFNQLSKPILQNKRGWFVIKNLELEIMKKAAKKLIGTNDFSTFRASGCNAKSPIRSIKSIKIKKTKNKIELEFRSQSFLKQQVRSMVGCLKYIGEKKWTLKKFTSVIKSKNRNLCAPPAPAEGLFLKKVLY

SEQ ID NO: 157134 - protein, 186 aa, Unknown
  Bacterial polypetide isolated from the Sargasso Sea
MYNYKIVIEYDGTNFVGWQQQENGQSIQSALQDALFKLSNEKVTIFGAGRTDAGVHAYGQVASFILSKKIETDVIRDGLNQHLRPHPIALQNAELVDDDFHARFSAKKRWYEYKIINRRPPLTIDVNRAWCVYKSLDIEKIKSESSSFLGKHDFNAFRSAHCQSKNSIKTIDSVSIKNKDEQIILK

SEQ ID NO: 157135 - protein, 144 aa, Unknown
  Bacterial polypetide isolated from the Sargasso Sea
MYNYKIIVEYDGTNFVGWQQQANGQSIQATLQEAVFKLSGDKVTIFGAGRTDAGVHAYGQVASFTVKKKIDTDVIRDGLNQHLRPHPISVQKAELVDSEFHARFSAIKRCYEYRIINRRPPLTIDINRAWCVYKKINVAKIKKE

SEQ ID NO: 157136 - protein, 247 aa, Unknown
  Bacterial polypetide isolated from the Sargasso Sea
NMFRYQILIEYVGSSFIGWQVQTKGKTIQGLIQKKISYLLNEKITLIGSGRTDTGVHAIEQSAHFDVTEKIQNLNKFLKSINYFLNKYEIAILKIKRKNMKFHARFSAKERIYKYVIFNQLSKPILQNKRGWFVIKNLELEIMKKAAKNLIGTHDFSTFRASGCNARSPIRSIKSVKIKKIKNKVELEFRSQSFLKQQVRSMVGCLKYIGEKKWTLKKFISVIKSKNRNLCAPPAPPEGLFLKKVLY

SEQ ID NO: 157137 - protein, 210 aa, Unknown
  Bacterial polypetide isolated from the Sargasso Sea
KLLKEKIILFGAGRLDKGVHALEQSAHFECKKKIENLSKFVKSLNHFLNKEMISIIKIKKKGNDFHARFSARMRIYRYKIINRPSRPVIDKNRGWHIINKLDLKIMKKAAKKLVGTKDFSTFRASSCRAKSPIKTMRSVKIKSRNSKIEIEFQSQSFLQQQVRSMVGCLKYVGEKKWTLKKFNFVMKSKKRILCAPPAPPEGLYLARVIY

SEQ ID NO: 157138 - protein, 261 aa, Unknown
  Bacterial polypetide isolated from the Sargasso Sea
MRIALLVEYDGTNYFGFQKQKLNQTKTIQYHIDQSIKKIANHDIKTACGGRTDTGVHACNQVIHFDTSSKRSDFNWLKGINTYLPPDIFVKNIFHVDNDFHARFSVISRTYRYVIYNNILYSPLNSRYALHYQNMIDVEKIEKSFKYFIGENDFSSFRGSGCSSPSSIKNIKSITIKKNKDKIYIEITANSFLYHMVRNMVGFFIDIGIGKISLVNVKKLIHVKDRRKLSKTVSPCGLFLTRVDYPSKYKIKCDNQYRFII

SEQ ID NO: 157139 - protein, 254 aa, Unknown
  Bacterial polypetide isolated from the Sargasso Sea
GWLAKQKEGISVQGSLEEAAKNIFNQEFEIQGSGRTDAGVHALGQVAHINLPKSHRLTSRHPFYIISAFNSYLRKSNIRVVSAKQVKSEFNARFSATKRYYKYRILCRAAPPGIEKGKVWHSRKKLNIRLMEEGTKYLIGKHDFTSFRTINCQAKSPIRTLDKISLSSIGDEIIINVSAKSFLHSQVRIIVGTIYNVGEETLKPKNIKSILEGKDRNLAGPTAPAEGLYLEKIEYPNNLLDDNWPIIYDSNQYN

SEQ ID NO: 157140 - protein, 207 aa, Unknown
  Bacterial polypetide isolated from the Sargasso Sea
LSGEKVTIFGAGETDAGVHAYGQVASFTIHKKMETNVIRDGLNQHLRPQPISIQKVELVKNDFHARFSAKKRWYQYKIINRRPPLTINANRAWCVYKKIDVAQMKSESSFFLGKNDLNAFRSSHCQSKSSIKTIDSIQIKNNDDQIIFQISAKSFLHSQVRIMVGTLVDIAKGNINKSIIDIINSKNREIAGQTAPAHGLYLKKIDY

SEQ ID NO: 157141 - protein, 264 aa, Unknown
  Bacterial polypetide isolated from the Sargasso Sea
MKRVALLVQYDGSHYSGWQKQKNATTVQEILDSALLKITNHKVKTFAAGRTDAGVHASGQVVHFDADCVIPGNSYSDVLNSILPSTIRILESVEVQDSWHACYSATYRHYRYVINNSKFPNLFINNWSWHRYQKALDEVLMLNASKTMEGEHDFFAFQKSGSNRTNSVTKIKNIDIKRVEDLILVDIKATGFLYGMVRLIIGQLVLVGEKKISPEIFTDRWVNKKKNDVKESAPAKGLCFVNAVYEKNVFKKVNNNDFFPFILN

SEQ ID NO: 157142 - protein, 184 aa, Unknown
  Bacterial polypetide isolated from the Sargasso Sea
MPKYKIKIEYNGCDYVGWQRQDNGPSIQAAIEGAVLGFCREKVEVVAAGRTDSGVHALGMIAHFELINNVYDPATVRKALNFHLGAQPIKIIDTEIAPDTFHARFSAIERRYLYRILNRQSPPALDTGRVWYIPRKLDIVKMNQAAELLLGEHDFSSFRAKDCQATSPVKTLNMLKVSQSKTKY

SEQ ID NO: 157143 - protein, 234 aa, Unknown
  Bacterial polypetide isolated from the Sargasso Sea
IVEQAISKVANSKTEIVCAGRTDAGVHARGQIIHYDTDAKRTNYEWQTGVNSHLPDDININFVKEVTEDFHARFSATNRAYQYFIFNSSNRSSLLRDRFWWIRDTLDESLMQEGAKILVGEHDFNSFRASSCQASSPIRTIKTLDVQRNDQFLIISIKANAFLQKMVRNIVGSLVHIGLGEKTNDWLIDVLAVRDRKRAGITAPSHGLCLIEVDYPKNYEIPKIDNRDIFMHMV

SEQ ID NO: 157144 - protein, 299 aa, Unknown
  Bacterial polypetide isolated from the Sargasso Sea
MSSEPSSATPESPVLRRIALSLQYEGSAFCGWQRQRNGHSVQAQLEAAIEQLDPHRPIQTFAAGRTDAGVHAAGQVVHFDCGDRIPPSKWAPALNGRLPSTIRVRESVPRPMDWHACYSATYRRYRYTIHNGRRPNLFLAPWSWHRYRLRLDESRMRDALNGMLGLHDFSAFMRAGSRRAHARTTVQEVELVRQGDILRVEIQASGFLYGMVRLLMAQLVAVGEHRLSVGDFEQRWRQRRRHEVKEAAPGHGLCLLRAGYEDDIFTRAGWYDSQPWFFLAESDPPPDPPPLPEASGSEL

SEQ ID NO: 157145 - protein, 246 aa, Unknown
  Bacterial polypetide isolated from the Sargasso Sea
MFRYQILIEYVGSSFIGWQVQTKGKTIQGLIQKKISYLLNEKITLIGSGRTDTGVHAIEQSAHFDITDKIQNLNKFLKSINYFLNKYEIAILKIKKRNIKFHARFSAKERIYKYVIFNQLSKPILQNKRGWFVIKKLDLEIMKKAAKKLIGTRDFSTFRASGCNAKSPIRSIKSVKIKKTKNKIELEFRSQSFLKQQVRSMVGCLKYIGEKKWTLKKFISVIKLKNRNLCAPPAPAEGLFLKKVLY

SEQ ID NO: 157146 - protein, 244 aa, Unknown
  Bacterial polypetide isolated from the Sargasso Sea
MYNYKIIVEYDGTNFVGWQQQENGKSIQAALQEAAFKLSGEKVTIFGAGRTDAGVHAYGQVASFTINKKIETDVIRDGLNQHLRPHLISVQKAELVDSKFHARFSAIKRCYEYKIINRRPPLTIDTNRAWCVYKKINVEKIKTESSSFLGKHDLNAFRSAHCQSKSSVKTIEDIHIKHQGEQIIFNICAKSFLHSQVRIMVGTLVDIAKGNINKTIIDIINSKNREIAGQTAPAHGLYLKKIDY

SEQ ID NO: 157147 - protein, 189 aa, Unknown
  Bacterial polypetide isolated from the Sargasso Sea
MDSRIALGVEYDGTNYFGFQKQNTTKQTVQGSLEESISKVADHKVKTFCSGRTDAGVHAFMQVMHFDTKAIRSSIEWTRGINSYLPKDIRVLWAKEIDESFHARFSATKRSYIYNILNHSTPSALWADKSLYVPIRLDIQSMKKGSKYLIGEHDFSSFRGSGCQSKTPIRNIQEIKISRNDDFVTLEIT

SEQ ID NO: 157148 - protein, 246 aa, Unknown
  Bacterial polypetide isolated from the Sargasso Sea
MFRYQILIEYVGTSFIGWQVQTKGKTIQGLIQKKISYLLNEKITLIGSGRTDTGVHAIEQSAHFDVTEKIQNLNKFLKSINYFLNKYEIAILKIKRKNLKFHARFSAKERIYKYVIFNQLSKPILQNKRGWFVIKNLELEIMKKAAKKLIGTHDFSTFRASGCNSKSPIRSIKSVKIKKTKNKIELEFRSQSFLKQQVRSMVGCLKYIGEEKWTLKKFISVIKSKNRNLCAPPAPPEGLFLKKVLY

SEQ ID NO: 157149 - protein, 246 aa, Unknown
  Bacterial polypetide isolated from the Sargasso Sea
MYRYQILIEYVGTPFIGWQIQKKGKSVQKIIQSILSKLLNQKIILYSAGRTDREVHASEQSAHFDVKSKIQNTDKMIKSLNFFLNKKKISIINIIKRNKNFHARFSAKERVYKYFIINRLATPVIENERAWHIRKKLDIKLLKKGAKKLEGTHDFSTMRAKNCYAKSPIKKINKITIKNINKKIQIEFRSKSFLRNQVRSMVGCLKYLAENKWDIKKFENVLKSKKRKNCAPPAPACGLYLEKIIY

SEQ ID NO: 157150 - protein, 268 aa, Unknown
  Bacterial polypetide isolated from the Sargasso Sea
MGTYALGVEYNGENFSGWQKQLDRPTIQGSLEKALSQVADSEIQLSAAGRTDAGVHAMGQVASFRSAVTRSSEQWRRGVNSLTPNSINVAWVTGVEDDFHARFSATARRYLYLFMDRVEDTHAKQLAWSVASLNADLMHSSAQFLVGEHDFTTFRGSGCQAETPYRRINHCVVKRIGDLVVVDIEANAFLLHMVRNIVSCLSQIKEDSRPDCLLELLSLRDRTQIGMTAPSSGLYLFDVRYPDYDFPLPRLPSLLLGASREFSIRNEK

SEQ ID NO: 157151 - protein, 152 aa, Unknown
  Bacterial polypetide isolated from the Sargasso Sea
MNRFKIKIEYDGTPFVGWQRQENGQSVQGCIEKAISNIFEENITIFGAGRTDAGVHAMGQVAHFDVTDKLLEPYVIKNALNDHLRPFPISILEVEKAHNDFHARFDATQRKYLYRIVNRKSPLTIEKGRAWQVHKDIDVDLMKECIPSIEGQ

SEQ ID NO: 157152 - protein, 246 aa, Unknown
  Bacterial polypetide isolated from the Sargasso Sea
MFRYQILIEYVGSSFIGWQVQTKGKTIQGLIQKKISYLLNEKIILIGSGRTDTGVHAIEQSAHFDVTEKIQNLNKFLKSINYFLNKYEIAILKIKRKNIRFHARFSAKERVYKYVIFNQLSKPILQNKRGWFVIKNLELEIMKKAAKKLTGTHDFSTFRASGCNAKSPIRSIKSVKIKKTKNKIELEFRSQSFLKQQVRSMVGCLKYIGEKKWTLKKFTSVIKSKNRNLCAPPAPAEGLFLKKVLY

SEQ ID NO: 157153 - protein, 244 aa, Unknown
  Bacterial polypetide isolated from the Sargasso Sea
MPNYKITVEYDGTNFVGWQQQANGVSVQSSLQDSVFKLSGEKVVVYGAGRTDAGVHAYGQVASFAISKKISTDVIRDGLNQHLRPLMISVLKAEQVDNDFHARFSAKKRWYVYKIINRRSPLTIDANRAWCVHKILDTKKMQSESASFLGKHDLNAFRSAHCQSKSSIRTIDDIIINIKNEIIFIEVVAKSFLHSQVRIMVGTLVDIAKGNINISILDIINSKNREAAGQTAPANGLYLKKIDY

SEQ ID NO: 157154 - protein, 155 aa, Unknown
  Bacterial polypetide isolated from the Sargasso Sea
IKIKKKNLKFHARFSAKERVYKYVIFNQLSKPILQNKRGWFVIKNLELEIMKKAAKKLIGTHDFSTFRASGCNAKSPIRSIKSVKIKKTKNKIELEFRSQSFLKQQVRSMVGCLKYIGEKKWTLKKFASVIKSKNRNLCAPPAPAEGLFLKKVLY

SEQ ID NO: 157155 - protein, 255 aa, Unknown
  Bacterial polypetide isolated from the Sargasso Sea
MISYDGTNYNGWQVQPNQPTIEGTLENALLRLTGQVVKVHGSGRTDAGVHGLNQTASFSVVSEFNPEKWRIALNGVLPDDLVVKHVQQVPSDFHARHSSVGKRYRYLVCNLPYRSPFSRNKSWWVQKSLNLKAIREASSYLVGKHDFSAFRAAACSSPNPNKDLHEILCDVKPWLHANLCFELEADSFLQHMVRIMVGTLVQVGTGKLKPEQMKGILESRDRTQAGLTAPAHGLYALAVRYPEDSIEWPYILMDS

SEQ ID NO: 157156 - protein, 246 aa, Unknown
  Bacterial polypetide isolated from the Sargasso Sea
MFNYQINVEYLGTNYVGWQIQKNGISVQSIVQKALSKVLRSKINIVGSGRTDSGVHAKAQSANFFSKKEIKDKYKFLNSVNFFLKNKSVSIIKINRKNINFHSRYSVKKKIYKYIIFNRSTPSPIYENRSWFIKKELKINKMKKGIKFFLGTHDFSSMRAASCSALNPTKTITKADIKKRGKKIIIIFESKSFLQKQVRSMVGCLKYVGENKWKPEKIKSVIKQKKRELCAPPAPPDGLYLEKVLY

SEQ ID NO: 157157 - protein, 246 aa, Unknown
  Bacterial polypetide isolated from the Sargasso Sea
MNRYQILIEYVGTNFRGWQIQKKGPTIQGLIQEKLSKLLKEKIVLHGQGRTDAGVHAFEQSAHFDCKNKITDKIKFLKSINHFLNLKDIAIKNIKKRNNKFHARFSAKQRIYKYFIFNQISQPIIEKNRAWHVRRPLNLELMKKGAKKLLGTNDYSTFRSSSCHAKSPIKTIKSIKIKSSKNKIEFQFSSQSFLQHQVRSMVGCLKYLGETKWDLKTFEKRFKSKKRTLCAPPAPPSGLFLFRVLY

SEQ ID NO: 157158 - protein, 210 aa, Unknown
  Bacterial polypetide isolated from the Sargasso Sea
KILKEKIILIGSGRTDTGVHAIEQSAHFDCKSEIKNLRLFLKSINYFINKKNISILSITKKNFKFHARFSAKQRIYKYLILNRIIKPSIEKERCWHVSKKLNIDLMKKGAEKLTGTKDFSTFRSSSCSAKNAIRTMKSVKIKRKKDLIEIKFKSKSFLKQQVRSMVGCLKYLGENKWDLNKFEIILKSKKRTLCAPPAPACGLFLEKVIY

SEQ ID NO: 157159 - protein, 245 aa, Unknown
  Bacterial polypetide isolated from the Sargasso Sea
MTRYKLVVEYDGTDYVGWQRQDNGPSIQAVLEDAVRSFCAEEVVVHGAGRTDAGVHAAGQVAHVDIAKPVSGETVRDAMNHFLLDVSVSVLQAEAVDEDFHARYAAAARHYCYRILNRRSQPALDAGRVWWVRVALDADAMADAAQELLGHHDFTSFRATLCQAKSPVKTLDRLDVTRQGEEVIIEASAPSFLHHQVRNIVGTLKLVGEGKWNRADVRDALAARDRAAGGPTAPAEGLCLVRVEY

SEQ ID NO: 157160 - protein, 246 aa, Unknown
  Bacterial polypetide isolated from the Sargasso Sea
MFRYQILIEYVGTSFIGWQIQKKGKTIQGVIQKNISKLIKEKITVNGSGRTDTGVHAIEQSAHFECTNRIQDFKKFLNSINYFLNKHEIAILKIKKRNLNFHARFSAKERVYKYVIYNQFTKPIIKNKRGWFVIKKLDLDSMKRGAKNLVGNKDFSTFRASGCNAKSPIRLMKSIKIKKLKNKIEFEFRSQSFLKQQVRSMVGCLKYLGEKKWTLKEFVSVIQSKNRKLCAPPAPAEGLYLLKVNY

SEQ ID NO: 157161 - protein, 246 aa, Unknown
  Bacterial polypetide isolated from the Sargasso Sea
MHRYQLKIEYVGSKYFGWQIQQKGKTIQKTIQSVLKKIFKKKIQLYGSGRTDTGVHAIEQSAHFETEKKIHNLKKFLETINFFLNNKDISILEINKKSSNFHARFSAKERVYKYIIYNRSSKLSLNNLRGWHIKKKLDINLMKIGGQKLTGTKNFGTYRASNCGSKSPIKTLKSVKIKIKREKIEIYFKSKSFLKQQVRSMVGCLKYLGEKKWDLKKFIKVMNSKKRSLCAPPAPPHGLYLEKVIY

SEQ ID NO: 157162 - protein, 210 aa, Unknown
  Bacterial polypetide isolated from the Sargasso Sea
GVHAINQVVHFDSPVNRGEKAWSTGVNSLLPPSIRVIWAQDVDSGFHARFSAMARNYKYLVYCHKTERPMLWKKAVRVSQKLDISAMNEAAACLIGEHDFSAFRGAGCQSKSPYRSVIEANWTTRGAFLIFSIKANAFLLHMVRNIVGSSLDVGKGIKESHWFLELLDGGERSSAGVTAPSDGLYLVDVDYPKAYGIPKGMTLPLFFSEG

SEQ ID NO: 157163 - protein, 246 aa, Unknown
  Bacterial polypetide isolated from the Sargasso Sea
MFRFQIIIEYDGTGYVGWQSQKNGKSVQKEIEKILSKILKIKIKVISAGRTDAGVHSTNQSAHFDIKNNILNKYQFISSINHFLSKKNISIKKIIKKNNKFHARFSAKEREYKYIILNRNAPPVLDKNKVWHLRSKLNMNLLKKAAKKLIGTHNFNAFRSSNCQANSPVRTLKKLKITKKNEKIFFVLRSRSFLKNQVRSIVGCLKYVGEKKWDVKHLEKVLKSKNRKNCATPAPAQGLYLSKVIY

SEQ ID NO: 157164 - protein, 246 aa, Unknown
  Bacterial polypetide isolated from the Sargasso Sea
MHRYQLRIEYVGTKYLGWQIQKKGKTVQKTIQIVLKKIFNKKIQLFGSGRTDTGVHAIEQSAHFDLDKKISDLNKFLETINFFLKNKDISILKINKKNNKFHARFSAKERIYRYVIFNRSSGLSLNNLRGWHIKKKLDIKLMRIGGKMLLGTKDFATFRASNCGAKSSIKTLKSVKIQVKGEKIEIQFKSKSFLKQQVRSMVGCLKYLGEKKWSLEKFKIVMNSRKRSFCAPPAPPHGLYLEKVIY

SEQ ID NO: 157165 - protein, 163 aa, Unknown
  Bacterial polypetide isolated from the Sargasso Sea
MNRYQILIEYVGTGFIGWQIQPKGKSVQKLIQLKISKLLKEKIKLVGSGRTDTGVHAMEQSAHFDTKSKIENLNKFLKSINFFLNSELVSIKKIKKKNLTFHARFSAKERVYKYIIFNRLSVPSIEKGRGWHISKKLDLKLMKKGSKKLLGKHDFSTFRAFSC

SEQ ID NO: 157166 - protein, 299 aa, Unknown
  Bacterial polypetide isolated from the Sargasso Sea
MSSEPSSAAPESTIPRRIALSLQYEGSAFCGWQRQRNGNSVQAQLEAAIEQLDPYRPIQTFAAGRTDTGVHAAGQVVHFDCGDRIPPAKWAPALNGRLPSTIRVRESVLRPKDWHACYSATYRRYRYTIHNGRRPNLFLAPWSWHRYQLRLDESRMRDALNGMLGLHDFSAFMRAGSRRAHARTTVQEVDLVRQGDMVRVEIQASGFLYGMVRLLMAQLVAVGEHRLSGQDFEQRWRQRRRHEVREAAPGHGLCLLRAGYEQEIFTRAGWYDCQPWFFLAESDPPPDPPPLPEASGSEL

SEQ ID NO: 157167 - protein, 261 aa, Unknown
  Bacterial polypetide isolated from the Sargasso Sea
MESRKYIVALGLEYEGTNYLGFQKQKSSKLTIQGLLEAGLKKVANQPIKTFCSGRTDSGVHALMQVIHFETNSFRREDEWVRGVNSYLPHDIRLLWSKEVEESFHARFSATDRSYRFIIRNSDTPSALWSKRSLYVPKKLDHIAMRKACKYLLGEHDFTSFRGSGCQSKTAIRNMKKIEIIKNKDLIMIDLNANAFLLHMVRVIVGTLIMVGKKEIKPLDLKKILESKDRKLAGKTVESSGLYYVGPRYPKNFNIPKPKIS

SEQ ID NO: 157168 - protein, 242 aa, Unknown
  Bacterial polypetide isolated from the Sargasso Sea
MLRYKIIIQYDGTSFNGWQIQKGHQTIQGELEKALKNFMSKEIVVYGSGRTDSGVHALGQVAHFDLSKKIDPNILLRAINANLNHCIRIIKCELVDSDFHARFSAKKRHYYYRVRTDPFLLDHHYTHHISSIDIELLNNASKLIIGQHDFTSFSKYNEKIENRKCIIYESIWKDYNSILNYHIVGNRFLHHMVRYLVGTMLEIGKNKYSLNEFKNLLIEPRERVKIYKAPAKALVLKQVDYE

SEQ ID NO: 157169 - protein, 246 aa, Unknown
  Bacterial polypetide isolated from the Sargasso Sea
MNRYQILIEYVGTNFRGWQIQKKGPTIQGLIQEKLSKLLKQKIILYGQGRTDAGVHAFEQSAHFDCKNKITDTIKFLKSINHFLNLKDIAIKNIKKRNNKFHARFSAKQRIYKYFIFNQLSQPIIEKNRAWHVRRPLNLKLMKKGAKKLLGTNDYSTFRSSNCNAKSPIKTIKSIKIKSSKNKIEFKFSSQSFLQHQVRSMVGCLKYLGETKWDLKTFEKIFKSKKRTLCAPPAPPGGLFLFRVLY

SEQ ID NO: 157170 - protein, 246 aa, Unknown
  Bacterial polypetide isolated from the Sargasso Sea
MARYQVLIEYVGTSFRGWQIQKKGSTIQGLIQQHLSKLLKEKIILNGSGRTDAGVHAHAQSAHFDCQKKILDLTKFLKSINHFLNNKGIAITQIKKRSEKFHSRFSAKQRIYRYIIFNQISAPVIENGRGWHVRKILDVDLMKKGAKKLLGTNDYSTYRSSSCHAKSPIRTIKSIKIRTLKNKIEIEFKSQSFLQQQVRSMVGCLKYLGEKKWDLKTFDKVFKSKKRVLCAPPAPPEGLYLYRVIY

SEQ ID NO: 157171 - protein, 49 aa, Unknown
  Bacterial polypetide isolated from the Sargasso Sea
SWIAELLAAKDRTLAAATAKAEGLYLVAVDYPDRFDLPKPPMGPLFLAD

SEQ ID NO: 157172 - protein, 246 aa, Unknown
  Bacterial polypetide isolated from the Sargasso Sea
MYRYQILIEYEGTKFIGWQTQKKGNSVQKTIEIILSRLLKTQVKLIGAGRTDAGVHALEQSAHFETTKIINNKKKLLNSLNHFLKKKLISIISIIKKKNDFHARYSAKFRIYKYIIFNRESNPSIFMNRGWHIKNKIDIQTMKKGAKLLEGKKDFSTFRASTCSAKSPIKTMSYVKVKKSKNLIVIKFKSKSFLQQQVRSMVGCLKVLGEKKWNIKKFKAVLVSKKRKLCAPPAPPYGLFLEKVIY

SEQ ID NO: 157173 - protein, 232 aa, Unknown
  Bacterial polypetide isolated from the Sargasso Sea
MTRFVGICQYDGTLFSGFQFQKNARSVQDELEKALKSFTNLSSRVNCAGRTDKGVHALSQIFDFSVQDPSRNINWIAAFNSSLPDDLVVTHVEEAYSNFHARFSAYERSYVYLIKVGEIRSTFLRNYVYHVSKPIDLKLLSKELKGIIGTHDFSAFRSSQCSAKDPVKTISKASLEERDNLICIEFIANAFLHNMIRILVGTLIEISTNADSEYTITEIISSKNRAMAGKTA

SEQ ID NO: 157174 - protein, 246 aa, Unknown
  Bacterial polypetide isolated from the Sargasso Sea
MFTYQIIVEYLGTNFVGWQIQKNGLSVQEALEKVLSKFLKEKIRVIGSGRTDAGVHAKEQSAHFKTKHKIINKNIFINSINFFLKKNPISVLSVKKRSNKFHARHSAKERIYKYFVINRHSSLVLEKNKAWHIKKNLDVKVMRKGAEILKGTHNFSTFRASSCQAKSPIKTLKKVAIKKSKNKIVLIFQSESFLQQQVRSMVGSLKYLGEGKWNLNEFRKAFLSKKRTMCAPPAPAHGLYLTKVIY

SEQ ID NO: 157175 - protein, 229 aa, Unknown
  Bacterial polypetide isolated from the Sargasso Sea
MNRYKIKIEYDGTPFVGWQRQENGQSVQGCIEKAINNIFEENITIFGAGRTDAGVHAMGQVAHFDVTDKLFEPYVIKNALNDHLRPFPISILEVEKADNDFHARFDATQRKYLYRIVNRKSPLTIEKGRAWQVHKDIDVDLMQECISSIEGQHDFTTFRSAHCQSDSPIKTLDSLKISQSEENIYFGFTAKSFLHHQVRSIVGSLKLVGEKSWSLGDFEKAFNSKDRSK

SEQ ID NO: 157176 - protein, 233 aa, Unknown
  Bacterial polypetide isolated from the Sargasso Sea
FKITNHVIKTFAAGRTDAGVHASGQVVHFDVDFVIPGNRYSDILNSLLPSTIRILESVEVKDGWHACYSAMYRHYRYVLNNSKFPNLFIDNWSWHRYQKVLDEGLMSDASKRMEGEHDFFAFQKSGSNRTNSITKIKEIDIKRVEDLILVDIKATGFLYGMVRLIVGQLVLVGENKISPELFTDRWVNRKKNDVKESAPAKGLCFINAVYEEKVFIKTNKEDFFPVFLIKGFS

SEQ ID NO: 157177 - protein, 156 aa, Unknown
  Bacterial polypetide isolated from the Sargasso Sea
IIKVDKVSNDFHARFSAKLRHYEYKIINRRQPLTLEKDLFWRVGKPLNIENMQKGANYLIGTHDFTTFRSINCQSKTPVKSLDSITINKEGEKIYFFFSAKSYLHNQIRSIVGSLKLVGEGKWNPEKINEILNSKERKECGPIAPSEGLYFKSVDY

SEQ ID NO: 157178 - protein, 138 aa, Unknown
  Bacterial polypetide isolated from the Sargasso Sea
MKARIGSVSRPVHNAEQIELPALATGNSESINFARENQPGFAPFMRGPYPGMYATRPWTIRQYAGFSTAKDSNSFYRRNLAAGQMGLSVAFDLPTHRGYDSDNPLVADDVGLAGVAIDSIVDMALLFDQIPLEHMSVS

SEQ ID NO: 157179 - protein, 324 aa, Unknown
  Bacterial polypetide isolated from the Sargasso Sea
AVAGHTQSLHTNSLDEALGLPTDHAARIARNTQIHLQHEANMAHVIDPFGGSYLLEQLTQGLVARATAHIEEVESLGGMAAAIEAGLPKLRIEEAATAAQADIDSGRRQIVGVNSYQPAPRTDGTEEVLVRRIDNSEVRARQITGLKKVRAERDQSRVTAALDALSEAASGSANLMPAAIEAARARATVGEMSDALSRVYGRHKAEIKGVRGIWKARMKADAELEMLQARVDEFIASTGRAPCLLVAKLGQDGHDRGQKVIASAFADIGFDVTIGPLFASPDEVYDMAIAEDVDAVGISTLAAAHLSQVPALRKRLDAGKGRHI

SEQ ID NO: 157180 - protein, 287 aa, Unknown
  Bacterial polypetide isolated from the Sargasso Sea
LGLPKRRIEESAAIRQAKVDSGEEVIVGVNKYVGEDEQNVEVRDVDNFKVRLEQIERLENIKSSRDEKKCRAALNNMKLAARDGTGNILALAIEAARERATVGEMSYALEEVYTRYSTTSEVGKGQYVKSFKNKKEIEQTIEIVDTFTRMEGRKPKMLVVKMGQDGHDRGAKVIASAFIDFGFDVKVGPLFQTPSEAAEDALNGKFDIIGISTQAAGHKTLAPQLIEELEKRDGQDILVICGGVIPHQDHKFLKDSGVSAIFGPGTNIPRAANEIIQLLFNKKGRNH

SEQ ID NO: 157181 - protein, 274 aa, Unknown
  Bacterial polypetide isolated from the Sargasso Sea
YEALSAVLGGTQSLHTNSFDEAIALPTEFSARIARNTQLILQNETGVTNTVDPLAGSYFIENLTDEVAAKAWNIIQEVEELGGMTKAVNAGVPKLKIEESATKKQAKIDSGDRVVVGVNKFQNPKEPKIDVLVIDNEKVREDQIKKINKLKKSRENKKLEKSLKELTEDAKNGKNLLYSAVKAIRNRATVGEVSKALENVFGRHYATSVGVSGVYGKYFEGNEEFMHVTEKIENFEKSFGRRPRVLVVKMGQDGHDRGAKIVATSFADIGFDID

SEQ ID NO: 157182 - protein, 291 aa, Unknown
  Bacterial polypetide isolated from the Sargasso Sea
WRTQSLHTNSFDEAIALPTDESARIARNTQLILQNETGVTKTVDPLAGSYFVENLTEELSKKAWDIITEIEELGGMTKAVKAGIPKLKIEESATKKQAKVDSGSRVVVGVNKFKNPQEPSVDVRVIDNNRVRDDQIKKIQAIKESRDAIAVEKALTNLTNAAKDETNLLIPCIEAIKLRATVGEVSKALEQVYGRHFAKSLSVSGVYGKHFEGDEEFMKVESKIKEFENVNGRRPRVLVVKMGQDGHDRGAKIVATSFADMGFDVDMGPLFQSPKDVAKDAIENDVHAIGV

SEQ ID NO: 157183 - protein, 311 aa, Unknown
  Bacterial polypetide isolated from the Sargasso Sea
TGLSVAYDMPTLMGYDPDHPWSLGEVGKCGVSVSSLDDMRRLFKNINLSEISVSQTINGPAVILLAFYIALAQEQNIPLSKLRGTLQNDILKEFTAQKEWIFPPKPSMRIITDMISFCTREMPNFNTISISGYHIREAGSTAAQELAFTLADGFAYIEHALEAGLDIDSFAPRLSFFFNSHLDFFEEIAKFRASRRIWANKLKYKYSAKDPRSLKLKFHTQTAGCSLTAQQPENNIARTGFQALSAVLGGTQSLHTNSMDETLSLPTEKAAEIALRTQQLIAHETGVTNVVDPLGGSWYVESLTDKIEEEA

SEQ ID NO: 157184 - protein, 273 aa, Unknown
  Bacterial polypetide isolated from the Sargasso Sea
VSIASIKDMESLFHGINLGEISVSMTINGPAIILLAFYIAVAENQNIPLSKLRGTLQNDILKEFIAQKEWIFPPEPSMRIITDMMTFCTENMPNYNTISISGYHIREAGSTAAQELAFTLANGFTYIDYAIDAGLDIDDFAPRLSFFFNSHLDFFEEIAKFRAARRIWAKKLKIKYNAKNERSCKLRFHTQTAGCSLTAQQPENNIARTGFQAMAAVLGGTQSLHTNSMDETLALPSEKAAEIALRTQQLLAFETGVTNVVDPLGGSWFVESL

SEQ ID NO: 157185 - protein, 310 aa, Unknown
  Bacterial polypetide isolated from the Sargasso Sea
RKGQTGISMAFDLPTQIGHDPDAAQAEGEVGKVGVSISSLKDMETVFNGIELGKVSTSMTINATASTLLAYYIAVGQSQGFSSKQLRGTTQNDILKEYIARNTYIYPPEPSMRIIGDMIGYCAKEVPQWYPVSISGYHIREAGSTAVQEIAFTIANAIQYIETCLAQGLKIDDFAPRLSFFFCCTIEFFEEIAKFRVARKVYAKILKERFHAKNPKSLQLKFHTQTSGESLTAQQPDNNIVRVAMQTMAAVLGGTQSLHTNSRDEALALPTEESAKIALRTQQIVAHESGNYRTVDPMAGSHYLEELCDE

SEQ ID NO: 157186 - protein, 167 aa, Unknown
  Bacterial polypetide isolated from the Sargasso Sea
MNTFPKKSIEDWIALAEKELKGKKVEDLKFNTPEGIDIKPLYTLDDLKGIEGQLSMLPGFGPYVRGPRATMYTNKPWTIRQYAGFSTAEESNIFYKQCLKNGQTGLSVAFDLATHRGFDSDHPRVEGDVGKTGVAIDTVEDMKILFQDIPLDKMSVSMTMNGAVLPV

SEQ ID NO: 157187 - protein, 137 aa, Unknown
  Bacterial polypetide isolated from the Sargasso Sea
KNTEERPRVLVVKMGQDGHDRGAKIVATSFADLGFDVDMGPLFQTPKDVAKDAIENDVHAIGVSTLAAGHKTLIPELMENLKDIDPSSKIIVFVGGIIPEQDYKFLFDNNVSAIFGPGSNIIESAEKVIELIIEKNN

SEQ ID NO: 157188 - protein, 91 aa, Unknown
  Bacterial polypetide isolated from the Sargasso Sea
MSVYDPDAANLSAWGALVEKQSKGLKPDDFTWHTPEGIPLKTLYTAEDLKTLPYTNTMPGMAPYIRGPQATMYAGRRWTIRQYAGFSTAEA

SEQ ID NO: 157189 - protein, 350 aa, Unknown
  Bacterial polypetide isolated from the Sargasso Sea
LGLPTETSARIARNTQLILQEEAGIPNVIDPFGGSYFMESLSNSLIQESTKLLKKVENLGGMTKAVESGMPKQQIEASSARRQAMIDQGKEIIVGINKYKVGNTEPVEVREIDNTAVREAQIKLLKKIRKNRDQQKVDSELNALTDAANTGVGNLLELSINAMRARATVGEVSFALEKVWGRFNAPIQSISGVYAGAFPDQQKIADVRNEINKFAKKAGRRPRIMVAKIGQDGHDRGAKVIATAFADMGFDVDIAPLFQTPEEVVKQSIENDVHVIGISSLAAGHKTLIEQLMKVLRQENSEDIAVVAGGVIPPKDYDFLKSLGVCCIFGPGTPIPDAALEVLSSLKITP

SEQ ID NO: 157190 - protein, 411 aa, Unknown
  Bacterial polypetide isolated from the Sargasso Sea
MATKKKTKPAPKEYVTDSSIPIKPFYQKSTKKRPKEEPGKFPFTRGIHQGMYRDRFWTMRQYAGFGDAAQSNKRYKFMLEKGQTGISMAFDLPTQIGHDPDAPQAEGEVGKVGVSISSLKDMQTVFNGIELGKVSTSMTINATASTLLAYYIAVGQSQGFSSKQLRGTTQNDILKEYIARNTYIYPPEPSMRIIGDMIGYCATEVPQWYPVSISGYHIREAGSNAVQEIAFTIANAIQYIETCLAQGLKIDEFAPRLSFFFCCTIEFFEEIAKFRVARKVYAKILKERFHAKNEKSLQLKFHTQTSGESLTAQQPDNNIVRVAMQTMAAVLGGTQSLHTNSRDEALALPTEESAKIALRTQQIVASESGITKTVDPMAGSHYLEELCDEIEEQTWAYLKKIDKMGGSLKAI

SEQ ID NO: 157191 - protein, 457 aa, Unknown
  Bacterial polypetide isolated from the Sargasso Sea
MAAKKETKPAPKEYVTDSNIPIKPFYQKSAKKKTKEEPGKFPFTRGIHQGMYRDRFWTMRQYAGFGDAAQSNKRYKFMLEKGQTGISMAFDLPTQIGHDPDAAQAEGEVGKVGVSISSLKDMETVFNGIELGKVSTSMTINATASTLLAYYIAVGQSQGFSSKQLRGTTQNDILKEYIARNTYIYPPEPSMRIIGDMIGYCAKEVPQWYPVSISGYHIREAGSTAVQEIAFTIANAIQYIETCLAQGLKIDDFAPRLSFFFCCTIEFFEEIAKFRVARKVYAKILKERFHAKNPKSLQLKFHTQTSGESLTAQQPDNNIVRVAMQTMAAVMGGTQSLHTNSRDEALALPTEDSAKIALRTQQIVAHESGITRTVDPMAGSHYLEELCDEIEEQTWAYLKKIDKMGGSLKAIEKGFFQGEIRQNAYRLKKEVDEESRILVGVNKFVDAEEAKQKLLRI

SEQ ID NO: 157192 - protein, 552 aa, Unknown
  Bacterial polypetide isolated from the Sargasso Sea
MSKKKKSYQKAKQSWKESFENSISRNYNFDTLSGKKLDPLYFPEKPSEDYLDQLGFPGQFPFTRGVHSSMYRGKLWTKRQFSGFGTAKETNKRYHSLLEKGQTGLSVAYDMPTLMGYDPDHPWSEGEVGKCGVSVASIDDMEDLFKGINLEEISVSQTINGPAIILLAFYIATAEKQGVDIKRLRGTLQNDILKEFIAQKEWIFPPEPSMKLITDMIEYCTDKMPKYNTISISGYHIREAGSTAAQELAFTLADGFTYVEYALKAGVNIDSFAPRLSFFFNSHLDFFEEIAKFRAARRIWAKRMKNHYGAKDPQSWKLRFHAQTAGCSLTAQQPENNIARTAFQGLAAVLGGTQSLHTNSMDETLALPSEKAAEIALRTQQLIAFETGVANVADPLGGSWFIENLTDELEEEAEKYFKEIDNMGGVIPAIEKGYFQYEISRSASSHQKKIDNKELIHVGVNEFEKINEEIEIPILEIGQEVESYQKNKIRQLRKNRNDEITQQALKKIQKACKNGDNLLPSIIAAAKAHATMGEIVIKIKDEFGEWNETSVF

SEQ ID NO: 157193 - protein, 409 aa, Unknown
  Bacterial polypetide isolated from the Sargasso Sea
MAEKKKAKPAPKQYVTDSSIPIKPFYQKSAKKRPKEEPGKYPFTRGIHQGMYRDRFWTMRQYAGFGDAAQSNKRYKFMLEKGQTGISMAFDLPTQIGHDPDAAQAEGEVGKVGVSISSLKDMQTVFDGIELGKVSTSMTINATASTLLAYYIAVGQSQGFSSKQLRGTTQNDILKEYIARNTYIYPPEPSMRIIGDMIGYCATEVPQWYPVSISGYHIREAGSNAVQEIAFTIANAIQYIETCLDQGLKIDEFAPRLSFFFCCTIEFFEEIAKFRVARKVYAKILKERFHAKNEKSLQLKFHTQTSGESLTAQQPDNNIVRVAMQTMAAVLGGTQSLHTNSRDEALALPTEESAKIALRTQQIVASESGIIKTVDPMAGSHYLEELCDEIEEQTWAYLKKIDKMGGSLK

SEQ ID NO: 157194 - protein, 541 aa, Unknown
  Bacterial polypetide isolated from the Sargasso Sea
MKKIDWESKHKDKLRERRSEFQTTSNIKIERFYTSQDISKNIDEKNSLPGEFPFTRGVQPTMYRGRFWTMRQYAGFGSAKETNERFKYLLDKGQTGLSVAFDLPTQMGYDSDAPVSKGEVGKVGVAIDSLKDIEILFDGIPLDKVSTSMTINATASMLLAMYIVAAEKQGVSADKIMGTTQNDLLKEFIARGTYAFPPNPSVQISVDLMEYCKDYVPKWNPISVSGYHIREAGSTAVQEVAFMLADAIEYLEIAKNRKLDIDGICKRVSFFFAVHGNFFEEISKYRAARRIWANILRKDFGVMDDNACKFRTHSQTGGVTLTAQQPLNNIVRTAMQAMAAVLGGTQSLHTNSFDEALGLPTEESATIALRTQQIIAHECEVANTIDPFAGSYFIENLTDQIEEKVYEYLNIIKDKGGMVKCIEDNYIQSEIENAAYDFQIELEKKDRVIVGVNDFKADEEEVPPIQGIDKNLEKNQNESLKVLRNQRDNEKVENCLNLLTKAAENSENIMPYILDAVREYCTIGEMTHALEQVHGRYKGSI

SEQ ID NO: 157195 - protein, 510 aa, Unknown
  Bacterial polypetide isolated from the Sargasso Sea
PDKPDSNYMDNLGFPGQFPFTRGIHSNLYRGKLWTMRQFAGFGTPEETNRRFKKLLKKGQTGLSVAYDMPTLMGYDPDHDFSQGEVGKCGVSVFSLSEMERLFEGIDLEKISVSQTINGPAIILLAFYIAAADKKGVRADQLKGTLQNDILKEFTAQKEWIFPPKSSMRIITDMLKYCTESMPKYNTISISGYHIREAGSTAAQELAFTLADGFSYIEHGIKAGLDVDDFAPRLSFFFNSHLDFFEEIAKFRAARRIWAKHLRFKYGSKNQRSWKLRFHTQTAGCSLTAQQPENNIARTGFQALAGVLGGTQSLHTNSMDETLALPTEKAAEIALRTQQLIAYETGVTNVVDPLGGSWYIEKLTDEIELKAEEYFSQIESIGGVIPAIEQGFFQREIAKSAADYQRKVDEGKRIVVGVNEFIKENEEIDIPILEIGSEAGDDQLKKLLELRNNRNNENVKISILKIREACNNGSNLMHPIIDAAKEYATLGEIVDVLKAEFGEWHETAVF

SEQ ID NO: 157196 - protein, 181 aa, Unknown
  Bacterial polypetide isolated from the Sargasso Sea
MAKNDKDKEKLNIWKKSFEKETKNSNAEKVFFSTDEEIDIKPLYTKDDLKNLSFVDPNSLPGSSPFTRGPKASMYTNRPWTIRQYAGFSTAEESNAFYKKNLESGQKGLSVAFDLPTHRGYDSDEEIVKGDVGKAGVAIDTVEDMKILFKDIPLDQMSVSMTMNGAVLPILASFIVAGEEQ

SEQ ID NO: 157197 - protein, 256 aa, Unknown
  Bacterial polypetide isolated from the Sargasso Sea
QELAFTIADGLEYIRAASKRGLLVDDFAPRLSFFFAIGMNFFLEAAKLRAARYLWSEWTKKLFNCQNPKSQMLRTHCQTSGASLQEQDPYNNIIRTTIEALAATLGGTQSLHTNSFDEAIGLPTEFSAKIARNTQLILQHESGITDTVDPLAGSYFVENMTKELIDKANALIEKIEGMGGMTVAVMEGFPKSQIEISATKRQAKIDSGEQVIVGVNKFKSDRQDPIEILDIDNDAVREEQINKKIAIKKSRNPSDV

SEQ ID NO: 157198 - protein, 173 aa, Unknown
  Bacterial polypetide isolated from the Sargasso Sea
MKISTSKKNSDFREWEEKVCSELRASNLSGFNCQTPGGIELKALYTASDLEKLEWVDSLPGLFPFIRGPKASMYAGRPWTIRQYAGFSTAEESNRFYRENLKAGQKGLSVAFDLATHRGYDSDHPRVRGDVGKAGVAIDTVEDMKLLFDGIPLEQMSVSMTMNGAVLPVLASY

SEQ ID NO: 157199 - protein, 233 aa, Unknown
  Bacterial polypetide isolated from the Sargasso Sea
MTKNNSLQSWKENALKELKKQDIEAIIVETPEGINIKPLYTELDNKEIKHLGSNPGEAPYVRGPKATMYTGRPWTIRQYAGFSTASESNEFYKKNLASGQKGLSVAFDLATHRGYDSDHERVYGDVGKAGVAIDSVEDMKILFDGIPLDKMSVSMTMNGAVLPVLAGYIVAAEEQGVSLEKLSGTIQNDILKEFMVRNTYIYPPEPSMRIVSDIIHFTSKQMPKFNSISISGY

SEQ ID NO: 157200 - protein, 229 aa, Unknown
  Bacterial polypetide isolated from the Sargasso Sea
MKDQVSITNEAFKEWEEKALSELRGNDLSERKWQTPEGIELKALYTASDLEKLEWIDSLPGLFPFIRGPKASMYAGRPWTIRQYAGFSTAEESNRFYRENLKAGQKGLSVAFDLATHRGYDSDHPRVRGDVGKAGVAIDTVEDMKMLFDGIPLDQMSVSMTMNGAVLPVLASYIVAAEEQGVQRSQMSGTIQNDILKEFMVRNTYIYPPEQSMRIVGDIIEFTSQEMPR

SEQ ID NO: 157201 - protein, 190 aa, Unknown
  Bacterial polypetide isolated from the Sargasso Sea
MKISTSKKNSYFREWEEKVCSELKASNLSGFNWQTPEGIELKALYSTSDLEKLEWVDSLPGLFPFIRGPMASMYAGRPWTIRQYAGFSTAKESNRFYQENLKAGQKGLSVAFDLATHRGYDSDHPRVRGDVGKAGVAIDTVEDMKMLFDGIPLGQMSVSMTMNGAVLPVLASYIVAAEEQGVQRSEMSGT

SEQ ID NO: 157202 - protein, 275 aa, Unknown
  Bacterial polypetide isolated from the Sargasso Sea
KIKINKKKENWENLIKKEENLKINSRLSDSIKLNSLYTLADLEDFKFAESFPGLFPFTRGTYGSMYVGRPWTIRQYAGFSTAEESNRFYQENLKAGQKGLSVAFDLATHRGYDSDHPRVRGDVGKAGVAIDTVEDMKMLFEGIPLDQMSVSMTMNGAVLPVLASYIVAAEEQGVQRSQMSGTIQNDILKEFMVRNTYIYPPEQSMRIVGDIIEFTSQEMPRYNSVSISGYHIQEAGATTVQELAFTLGDGLEYVRMALNRGMNIDSFAPKTFLLF

SEQ ID NO: 157203 - protein, 287 aa, Unknown
  Bacterial polypetide isolated from the Sargasso Sea
RAAMSKGLDVDDFAPRPFFFFAIGTDFFMEIAKLRAARTLWAKIMRDFGAKNERSLILRTHCQTSGVSLTEKDPYNNIIRTSYEALSAILGGTQSLHTNSFDEAIALPTDESARIARNTQLILQNETGVTKTVDPLAGSYFIESLTDELSKKAWDIINEIEELGGMTKAVKAGIPKLKIEESATKKQAKVDSGSRVVVGVNKFKNPKEPAVDVRVIDNNRVRDDQIKKIQSIKDSRDTKAVEKALENITNAAKDEKNLLIPCIEAIKLRATVGEVSKALEQVYGRHF

SEQ ID NO: 157204 - protein, 143 aa, Unknown
  Bacterial polypetide isolated from the Sargasso Sea
MIPNFSTTPLYDDTKTTGSNASGNAREEDFYHDVLETPEGIDIKTLYEEVDTNGLDFLDTWPGMPPYVRGPYPTMYTTKPWTVRQYAGYSTAEESNAFYRRNLAAGQKGLSVAFDLATHRGYDSDHPRVAGDVGMAGVAIDSI

SEQ ID NO: 157205 - protein, 239 aa, Unknown
  Bacterial polypetide isolated from the Sargasso Sea
SFFFGIGMNYFMEIAKLRAARRLWAEMISEFKPENPKSMMLRTHCQTSGWSLTEQDPFNNIVRTTIEAMAAVQGGTQSLHTNAYDEALGLPTRISARVARNTQLIMQEETGMTRVIDPWGGSYFMESLTESLVVESRKLLDEVEELGGMTRAVEQGFPKQRIEEAAAIRQAKIDQGEEVIVGVNKYQTDESEQIEVREVDNTEVRNNQIQRLEQIRKSRDNTKVQDALKILEDRAFTGK

SEQ ID NO: 157206 - protein, 208 aa, Unknown
  Bacterial polypetide isolated from the Sargasso Sea
MPLSKSTSALKDWEKKASLELEGKPTSSVNWNTLENIEIKPLYTSEDLEKLGYTETLPGFSPFTRGPRATMYSGRPWTIRQYAGFSTADESNKFYRKNLALGQKGLSVAFDLATHRGYDSDHQRVLGDVGKAGVAIDSVEDMKILFDQIPLDQMSVSMTMNGAVLPILASYVVAAEEQGVKQEQLKGTIQNDILKEFMVRNTYIFLHH

SEQ ID NO: 157207 - protein, 201 aa, Unknown
  Bacterial polypetide isolated from the Sargasso Sea
MKTKNSDNYTKWQKSFERETKIDLNEASSETDEGIEIKPVYTKADIENLSFVDNDSLPGQLPYTRGPKASMYTNRPWTIRQYAGFSTAEESNDFYKKNLKSGQKGLSVAFDLPTHRGYDSDDDLVMGDVGKAGVAIDTVEDMKILFNDIPLDQMSVSMTMNGAVLPVLSSFIVAGEEQNVNKNLLSGTIQNDILKEFMVRN

SEQ ID NO: 157208 - protein, 320 aa, Unknown
  Bacterial polypetide isolated from the Sargasso Sea
DGMEYVRAALSKGLDIDDFAPRLSFFFAIGTDFFMEIAKLRAARTLWYKIMKDFGAKNEKSMILRTHCQTSGVSLTEKDPYNNIIRTSYEALSAILGGTQSLHTNSFDEAIALPTDESARIARNTQLILQNETGVTNTVDPLAGSYFIESLTDELSKKAWDIIEEIESLGGMTKAVKAGVPKLKIEESATKKQAKVDSGSRVVVGVNKFKNPEEPKVDVRVIDNNKVRDDQIKKINDIKASRDQKAVDESLAKLVTAAKEDSNLLARSIDAIKNRATVGEVSKALEQVYGRHFATSLSVSGVYGKHFEGDVDFMNVAKKV

SEQ ID NO: 157209 - protein, 206 aa, Unknown
  Bacterial polypetide isolated from the Sargasso Sea
MKISTSKKNSDFREWEEKVCSELKASNLSRFNWQTPEGIELKALYSASDLEKLEWIDSLPGLFPFIRGPQASMYAGRPWTIRQYAGFSTAEESNRFYRENLKAGQKGLSVAFDLATHRGYDSDHLRVRGDVGKAGVAIDTVEDMKMLFDGIPLDQMSVSMTMNGAVLPVLASYIVAAEEQGVQRSQMSGTIQNDILKEFMVPHTYI

SEQ ID NO: 157210 - protein, 295 aa, Unknown
  Bacterial polypetide isolated from the Sargasso Sea
MLRTHCQTSGVSLQEQDPYNNVVRTAYEALAAVLGGTQSLHTNALDEAIALPTEFSAKIARNTQLILQEELGITNVVDPLAGSYYVETLTNELCEKAWEQIQEIEKLGGMTKAVELGLPKRRIEESAAVRQAKVDSGEEVIVGVNKYVGDEEQNVEVRDVDNLKVRFEQIERLKKIKNSRDEERCKAALDKMKVAARDGTENILALAIDAARERATVGEMSYALEEVYTRYSTTSEVGKGQYAKSFKNKEEIEQTIDLVESFTRMEGRKPKMLVVKMGQDGHDRGAKVIASAFID

SEQ ID NO: 157211 - protein, 255 aa, Unknown
  Bacterial polypetide isolated from the Sargasso Sea
MPALGCADAAIQAQLAGSQPGIAPFLRGPYPSMYATRPWTIRQYAGFSTAEESNAFYRKNLAAGQMGLSVAFDLPTHRGYDSDNPLVADDVGLAGVAIDSIADMAVLFDSIPLDQMTVSMTMNGAVLPVLALFIVAAEEQGVSAEKLAGTIQNDVLKEFMVRNTYIYPPSPSMRVVSDIFAFCAKEMPKFNFISVSGYHMQEAGASADLELAYTLADGLAYIRAGVDAGLKVDDFAPRLSFFFGIGMNFYIEVAK

SEQ ID NO: 157212 - protein, 210 aa, Unknown
  Bacterial polypetide isolated from the Sargasso Sea
MEENAINELKNPNVDDIYINTPEGINIKPLYTSADNENISHLDSYPGEPPFLRGPKATMYTGRPWTIRQYAGFSTASESNKFYKKNLASGQKGLSVAFDLATHRGYDSDHERVYGDVGKAGVAIDSVEDMKILFDGIPLDKMSVSMTMNGAVLPVLAGYIVAAQEQGVSLRELSGTIQNDILKEFMVRNTYIYPPEPSMRIVSDIINFTS

SEQ ID NO: 157213 - protein, 174 aa, Unknown
  Bacterial polypetide isolated from the Sargasso Sea
MSKIPNFSKIELDQNIGINNEEIEKLASTNSDQGQVEPWETAEKISINNCYTHKDLESLDFLNGWPGLAPFLRGPHATMYKTRPWTIRQYGGFSTAEESNAFYRRNLEDGQRGISVAFDLATHRGYDSDHPRVAGDVGMAGVAIDSILDMQKLFDGIPLDKMSVSMTMNGAVLP

SEQ ID NO: 157214 - protein, 176 aa, Unknown
  Bacterial polypetide isolated from the Sargasso Sea
MTDNYKTDLASWEAQVKKDLKGGSHEQLIRHTPEGISLKPLYTAQDLEHIQHLNTLPGLPPFVRGPRATMYTGRPWTVRQYAGFSTAEESNQFYRENLKAGQRALSVAFDLATHRGYDSDHPRVVGDVGKAGVAIDTVEDMKILFADIPLSQMSVSMTMNGAVLPVLAAYIVAAEE

SEQ ID NO: 157215 - protein, 169 aa, Unknown
  Bacterial polypetide isolated from the Sargasso Sea
MNKKNFVNITLKDFSPKSTQKEKNVFFETDEQIKIKSNYYSKDFSKIKVSESIAGLPPFVRGPYSSMYTKKPWTIRQYAGFSTAKESNKFYRENLKAGQKGLSVAFDLPTHRGYDSDNPRVIGDVGKAGVAIDSVDDMKILFDGIPLDKMSVSMTMNGAVLPIMAFYIV

SEQ ID NO: 157216 - protein, 294 aa, Unknown
  Bacterial polypetide isolated from the Sargasso Sea
TLADGLEYVKAATEKGLDVDKFAPRLSFFFCIGMNFFMEAAKLRAARTLWARWMEKLFNPSDERSLMLRTHCQTSGASLAEQDPYNNIIRTTIEAMAATLGGTQSLHTNSFDEAISLPTDFSARIARNTQLILQHETGITDTVDPLAGSYYVENLTADLIQKANALITEIQDMGGMTKAVQDGLPKREIEKMATARQARVDSGQDVIVGVNKFKLSDEEPIDILDIDNDAVRARQTERLNEIRKRRDENAVSNALGKLKSAAKDEDNNLLAATIDAMRARASVGEVSDALEEIF

SEQ ID NO: 157217 - protein, 267 aa, Unknown
  Bacterial polypetide isolated from the Sargasso Sea
IKKLFNPKDKKSLMLRTHCQTSGVSLTEKDAYNNIIRTTIEAMAAVMGGTQSLHTNSFDEAVALPTEHSSRIARNTQLILQHETNISNVIDPLAGSYFIENLTNTVIINAGNLIDKVLKMGGMTKAIEKGYPNELIEKSALIKQAEVDSGKQVIVGVNKYLNENEKDFEILKIDNSLVIKNQLQTLNKIKKSRDKSKVTKSLENLKYAAKNNVNNLLALSVEAMKNRATVGEVSYALEEVFGRFEGKPAISKNIYASHFDELEKLEI

SEQ ID NO: 157218 - protein, 228 aa, Unknown
  Bacterial polypetide isolated from the Sargasso Sea
MKTKNSENYIKWQKSFERETKTDLNKASYETDEGIEIKPVYTKADIENLSFVDNDSLPGQLPFTRGPKASMYTNRPWTIRQYAGFSTAEESNEFYKKNLKSGQKGLSVAFDLPTHRGYDSDDDLVMGDVGKAGVAIDTVEDMKILFNDIPLDQMSVSMTMNGAVLPVLSSFVVAGEEQNVNKNLLSGTIQNDILKEFMVRNTYIYPPDPSMKIVADIIEFTSKEMPKF

SEQ ID NO: 157219 - protein, 293 aa, Unknown
  Bacterial polypetide isolated from the Sargasso Sea
VRGPKASMYKGRPWTIRQYSGFSTAKESNEFYKKNLSAGQKGLSVAFDLATHRGYDSDHERVQGDVGKAGVAIDTVEDMKILFDDIPLDRISVSMTMNGAVLPILSSYIVAAEEQGVSLKQLSGTIQNDILKEFMVRNTFIYPPEPSMRIVSDIISFTSKTMPKFNSISISGYHMHEAGANLVQELAFTIADGLEYVRAAKNRGLNVDDFAPRISFFFAIGMNFFMEAAKLRAARYLWSNWMKKLFNCKNNQSQILRTHCQTSGASLQEQDPYNNIIRTTIEALAAVLGGTQS

SEQ ID NO: 157220 - protein, 376 aa, Unknown
  Bacterial polypetide isolated from the Sargasso Sea
IEALGATLGGTQSLHTNAFDEALGLPTDFSARIARNTQIIIQEESEICRTVDPLAGSYYVESLTDQIVKQARTIIKQIDEAGGMAKAIEAGLPKRMIEEASAREQSLIDQGKRVIVGVNKYKLDKEDETSVLEIDNVKVRNEQIASLQHIRATRDTDAVNAALAALTHAAQHNENLLAAAVNAARVRATLGEISDALETAFDRYLVPSQCVTGVIAQSYHQSNKSADEFDAIVAQTEQFLAENGRRPRILIAKMGQDGHDRGAKVIASAYSDLGFDVDLSPMFSTPEEIARLAVENDVHVIGASSLAAGHKTLIPELVTALKKWGREDICVVAGGVIPPQDYAFLHEHGVAAIYGPGTPMLDSVRDVLTRISQHHD

SEQ ID NO: 157221 - protein, 373 aa, Unknown
  Bacterial polypetide isolated from the Sargasso Sea
MLRTHCQTSGASLQEQDPYNNIIRTTIEALAATLGGTQSLHTNSFDEAIGLPTEFSAKIARNTQLILQHETGITDTVDPLAGSYFVENMTKELIDKSNELIEKIEEMGGMTVAVINGFPKSEIEISATKRQAKIDSGEQVIVGVNKYKSDEKEKVDVLDIDNKAVREEQIKKLNEIKKVRNSKEVDNALQNLNEAAKENKGNLLDLTIVAIKARATVGEVSYALEEVYGRYGVKQDIIKDVYKSAYKNKADFKKVDIALSNFKDIAGENPKIFMAKLGQDGHDRGAKVIASAFTDIGFSVEIGTLFQTPKEAVDLAIDLGVHVIGVSSLAAGHKTLIPELIDELRKRQADDILVVCGGVIPAQDYQFLYDAGV

SEQ ID NO: 157222 - protein, 549 aa, Unknown
  Bacterial polypetide isolated from the Sargasso Sea
AVIPIMAMFVVAAEEQGVEQSKLKGTLQNDILKEFMVRNTYIYPPNDSMRIVADIIEYCSHNLPQFNTVSISGYHMLEAGATCTQELAYTLADGLEYVRSAMNKGLDIDDFAPRLSFFFGIGMNFFMEIAKLRAARFLWSEMIEKEFSPKNPKSLMLRTHCQTSGVSLTSQDPYNNIVRTTIEAMAAVLGGTQSLHTNSFDEALALPTPFSAQIARNTQLVLREESGLTKVVDPLAGSYYLESLTGSMINETKKLIQEVEDLGGMTKAIQAGVPKLRIEESAAIRQARVDKKEDVIVGVNAYQNKDQKEVDILSIDNEGVRDQQISKLESIKKERNEEACQNALAELEKCAADDGNLMASAIEAAKHRATVGEISMAMEKVFGRHQAVSQSISGVYRKEYEGDEDFMNVEDKVNEFEKSHGRRPRILVVKLGQDGHDRGAKVIATAFADMGFDVDIGPLFQTPEEAARDAIENDVHIIGVSTQAAGHKTLVPILMNSLAEQGSENILVVCGGIIPEQDIEALKDCGVAAVFGPGTNITKAALNVIDMIL

SEQ ID NO: 157223 - protein, 378 aa, Unknown
  Bacterial polypetide isolated from the Sargasso Sea
MSSVTIERIETRLVDLPTIRPHKLSVATMHGQTLMLVKVFCSDGVTGLGEGTTIAGMAYGPESPEAMKLAIDTYLAPAIIGKDATRIQTLMAFLGKLAKVNHFAKSALETALLDAHGKRLGVPVSELLGGRRRDRLPVAWTLASGDTATDIAEAERMLDLRRHNVFKLKIGAKAPEADIRHVAAIKQAVGDRASVRVDVNMAWSETQAARAIPALADAGCELVEQPVASAAALARLMRRFPVALMADEILQGPDSAFDIAKHHGADVFAIKIEQSGGLFAAQRVAAIADAAGIELYGGTMLEGAFSTVASAHLFASFANLQWGTELFGPLLITEEILTQPLDYSDFELTVPDGPGLGIELDEDKVRRFTRDGLTKVAR

SEQ ID NO: 157224 - protein, 196 aa, Unknown
  Bacterial polypetide isolated from the Sargasso Sea
RFGPVIAIKQALGDCASVLVDVNQGWDESQAIRACRVLGDNGIDLIEQPIARINRDGQVRLNQRSPAPIMADESIESVEDAFSLAADGAASVFALKIAKNGGPRAVLRTAAIAEAAGIALYGGTMLEGAIGTLASAHAFLTLKQLTWGTELFGPLLLTEEIVSEPPLYRDFALQVPRTPGLGLTLDEERLAFFARK

SEQ ID NO: 157225 - protein, 377 aa, Unknown
  Bacterial polypetide isolated from the Sargasso Sea
MIATAATIERIETLLVDVPTIRPHKLSVATMNCQTLVLVRVRCTDGIEGVGEATTIGGLAYGEESPESIKVNIDTYFAPLLQGMDATRPGAALARARKLFQGNRFAKCALETALFDAQARRLGVPLSELFGGRRTDAVDVAWTLASGDTQRDIAEAEAMLDARRHRAFKLKIGSNAVADDVAHVIAIKRALGERGDVRVDVNQAWSETDAIWAGARLAEAGVSLVEQPIAATNRAGLKRLTQLAQVPIMADEALHGPVDAFALAQDRAADVFAVKIAQSGGLQGAASVASIAAAAGIELYGGTMLEGAAGTMASAQLFSTFDSLKWGTELFGPLLLTEEILVEPLRYADFKLHLPAAPGLGITFDWARIERMRRDAR

SEQ ID NO: 157226 - protein, 188 aa, Unknown
  Bacterial polypetide isolated from the Sargasso Sea
MQPTVITYNASISACEKGGQWRSALELLSQLHAEWLQPNVITYSASISACEKGSQWRSALELLSQLRAEWLQPNVITCSASISACEKGGQWRSALELLPQLRAEWMQPTVITYNASISACEKGGQCRSALELLSQLRAEWLQPTVITYSASISACEKGGQWRRALELLSKLGLPGLLSGLPRQLLGLL

SEQ ID NO: 157227 - protein, 218 aa, Unknown
  Bacterial polypetide isolated from the Sargasso Sea
SINQFVNQINSEFSEIDVLYNNAGLIYRDFELTEEGYESMIAVNYFGSFRLALMLLENLHRSSGRIVQVTSLSMYLARTFNLSGLHSNESFSPSSRYNFTNLLRSMFAIELENKLKKTSISVSAAHPGVTKSRQSRPYEVKKIKKSFYTYFSTNIKTGIAPIIQAIEDENITADLVYAPKLIGIYGEPTLMRHNKLVYNQELRDKLWSYTANELNLDI

SEQ ID NO: 157228 - protein, 331 aa, Unknown
  Bacterial polypetide isolated from the Sargasso Sea
IDAVKKSTDDDGAKLYDLILKRTLASQMKSAKINQVTATILNQKSEFRANGKTILFPGYMAAYVESTDKRSGVAEDKETVLPKLEANQSLECNSLNFDEHSTKPPARFTEASLVKELEEKGIGRPSTFANIIDTIVRRTYVNRERSKLTPTFLGLAVTQLLENHFNSLVDDKFTATMEDGLDAISRGELESLPFMKEFYFGSDSQSGLVNMLDDKVDIGKACSVQLEDKEDSIEIRVGQYGPFVRQGENRKSVPPDIYLGDLNVDKALEILNQEINEDREIGLDPDSKEMVLLKNGPYGPYVQLGETNKRKAIPKGTEVSEVDLEFAQKLL

SEQ ID NO: 157229 - protein, 340 aa, Unknown
  Bacterial polypetide isolated from the Sargasso Sea
LCEREREIDLFIPKEFWEVIIEIEDENGNKMTSSIYSDNGKKIEKLSIESEIQATSIKDRLLKKKFLIEDVAKKEKKRSPYSPFSNSLLLQDASSKLGFSPKYTNSLAQQLKDGIGSLGALITYHRSDSNKMKKSEVDSLRQIISNDIGENFLSKEEIIYKEKSKFVQQGHEAVTPTQLQKKPEDVKKELNDDQFKLYDLIWKRTVASQMSQSKNLETSYFIKGEEFLLKSSGSIQIFEGFKKIYNYSEKNDDLQKLPNLKVGDIVNISKIEIKQNHTKPPNRYSEAGLIKKLEELGIGRPSTYVSIFTKLESNNYISIKNKSLIPSSRGKILSKFLDGF

SEQ ID NO: 157230 - protein, 359 aa, Unknown
  Bacterial polypetide isolated from the Sargasso Sea
EGEAISKHIYDILDKVKLLKGKNTYRVAFNEITENAVLNALKNPREISTDLWNAYVTRRTLDYLMGYDISEFLWKKVSRLARGGRVQSPALRLIVEKEIEISNFKPVEFWTGSILACSNKDCIDLDLVSIDGEKIKKGNITSIKNDSEASAIKKDLVQYNKIEIDDIKTSDRKLKPRPPFTTASLQQAAYSTLGFSVKMTSSIAQRLYQGMTLGADETVGLISYMRTDSTNLSKDCLDDINKYLSEKHPKYKSEETRIYSKKVKNAQEAHEAIRPTSISNTPDKIKKYLEDAEYKLYNLIWKRTVASQMIDATYQQVGINFLLADKYQFKYSGSFLKHNGFKEIYDLSENDEKEKLNKR

SEQ ID NO: 157231 - protein, 323 aa, Unknown
  Bacterial polypetide isolated from the Sargasso Sea
KTIKRSPREPFRTSVLQQQASNRFGFTPKRTMQVAQSLYAREGGGLITYIRTDSIEIDEGKVPAVRSQVASMFGEDFVQPRNYKNKKEAKNIQEAHGAITPVDISLVPADAKKILKDDEFKLYQLIWQRTVASQMKDAIFERTSIEFVPTGDESLATFSFSDQELIFSGYLEATQEEVTNNKPPLINENDAIGFKELVKTQHFTDPPPRYNDASMIKALEEKGIGRPSTYADILSKLTDRKYIWLKQKRYEPSDMGRLVSNFLNERFGGYISDEFTSNMENNLDEISSGQRSKQDVLNAFWSPLIDTVDEVSAVVTRKDVNPQ

SEQ ID NO: 157232 - protein, 338 aa, Unknown
  Bacterial polypetide isolated from the Sargasso Sea
QVAQSLYESGLITYMRTDGVGISAEIINEIRSLISSEFGEDYLPDSPKIYKSKAANAQEAHEPIRPTDIRNKPENNNGLNQDQMNLYSLIWQRTVASQLKNSRYLRKTILIEDNDEKFLLRTSGRELIFDGFERVLKDDTDSEESQKLKGIYDDSPLDISDVRTEQKFTSPPRRFSEASLIKNMEEEGIGRPSTYANTLKNLRDRKYTFGAKSINPSDLGRILVSYLSKAYETFFIEIDFTAELEKRLDQVSSGLMLWTDVLDDFFAKLLEHISRIEEYRTREVLDMLNEQIGHRAFPKNIKGQVIDNCPKCSNEISIKHGRWGFFVGCGECQWTKPV

SEQ ID NO: 157233 - protein, 359 aa, Unknown
  Bacterial polypetide isolated from the Sargasso Sea
FDGYTKISSQNAKKSDEENLPSLEEGQVLKLVEVKNEKKFTKPPARFSEAALVKELESKGIGRPSTYAAIISTIQARGYVKLENKRFFVNKIGLIVSDRLMESFNEIMDYDFTANLENELDEIASGNLEWKSVLNKFYQTFQDDLNNAGSAEDGMKPNEPTETNIICPSCNKSNMLIRNSANGVFLGCAGYFKSGDEQCKHTMNLISGDEAVSVDDQEEASNLFIKKRCHICGTSMDNYLIDENRKIHVCANNPECSGFLLEEGQFKIRGYDGPTLECHKCGSDMQLQTGRFGKYFLCQNDNCRATRQLMRNGEPKPIVMDPINTNIACEKVEDIFLLRDSLKGLFLAASQFPKNRKQG

SEQ ID NO: 157234 - protein, 318 aa, Unknown
  Bacterial polypetide isolated from the Sargasso Sea
AKLEKDGEYDAKLSVFKEETIKKFTFDSTTLVEEASKALEDSCKKGLIAKSITKKHIKRSPREPFRTSVLQQQASNRFGFTPKRTMQIAQSLYAREGGGLITYIRTDSIEIDEGKLPSVRDQVAFMFGDDFVQPRNYKNKKEAKNVQEAHGAITPVDISLIPTEAKKVLKDDEFKLYQLIWQRTVASQMKDALFERTSIEFVPTGDEGLATFSFSDQELIFSGYLEATQEEVTNNKPPLINENDSIEFKGLIKTQHFTDPPPRYNDASMIKALEEKGIGRPSTYADILSKLTDRKYVWLKQKRYEPSDMGRLVSNFLN

SEQ ID NO: 157235 - protein, 277 aa, Unknown
  Bacterial polypetide isolated from the Sargasso Sea
LKVDPKQAKRVTFDAITKSDVQRAFENPRGINMPRVEAQQARRIVDRIVGYRVSPILWKKVASGLSAGRVQSVASRLVVEREKQIRDFTPDESWELTGYLSFDTDGAEALQTVWDDFMSQRDDRNRPPTIKQRTAWLSDHRSLSAELVEVGGKTMKIEADKTSTEELVNQAVSAAEAAGLVDIDIQREENSIGKGRAKNIVRLTGKPDSNTRYSIDSIDVKRTKSRPYPPFITSTLQQAASSRLSMSTDRTMRVAQQLYEGIDLPGEGRVGLITYMR

SEQ ID NO: 157236 - protein, 268 aa, Unknown
  Bacterial polypetide isolated from the Sargasso Sea
KTIVLFLPKGSRSKASMGHVRDLPTNASEIPASPKGQKWANLGVNTDADFEPLYVVPKDKKKTVRELKDALKGADQLLLATDEDREGESISWHLLQLLAPKVPVKRMVFHEITKEAIGKALDQTRDLDMELVHAQETRRILDRLVGYTLSPLLWKKVAWGLSAGRVQSVAVRLLVQRERARRAFRSGSYWDLKAQLAQSGSAFEAKLTHVGGQRIATGNDFDESTGGLKAGSAVRLLSESEAKALAESVRTSAWTVDAVEEKPTGASR

SEQ ID NO: 157237 - protein, 328 aa, Unknown
  Bacterial polypetide isolated from the Sargasso Sea
TAEKLTGHSEEEVKLYDLIWRQFIACQMPDAKYLSINAKVVLDDYVFSAKGREVIFDGYTKISSQNTKKANEENLPSLEEGQVLKLVEVKNEKKFTKPPARFSEAALVKELESKGIGRPSTYAAIISTIQARGYVKLENKRFFVNKIGLIVSDRLIESFNEIMDYDFTANLENELDEIASGNLEWKSVLNKFYQTFQDDLKSAGSGEDGMKPNEPTETNIICPSCNKSNMLIRNSANGVFLGCAGYFKSGDEQCKHTMNLISGDEAVSVDDQEEASNLFIKKRCHICGTSMDNYLIDENRKIHVCANNPECSGFLLEEGQFKIRGYDG

SEQ ID NO: 157238 - protein, 262 aa, Unknown
  Bacterial polypetide isolated from the Sargasso Sea
MSAKHLVIVESPAKARSIGKYLGSDYVVKATIGHVIDLPPKELGVDVENGFEPKYVKIRGKGKVIAELKRAAKGKDSVILATDRDREGEMIAFHVAKELGYEKNPERFTRITFGEVTKNAVHQALERGGDLEQGQIDAQQTRRILDRLIGFKVSPFLWRPIRPGLSAGRVQSVALRIICDREDEIRAFVQDEYWSITASLLKDEQPFEARLHHIDEKTIDSKSKFKIGDEEQARTVLNAVRDLPFVVTEVRRREQKKNPPAP

SEQ ID NO: 157239 - protein, 258 aa, Unknown
  Bacterial polypetide isolated from the Sargasso Sea
FLGCSCYQNEGNDKCKETLNLISGDEAVSVDDSEEAENLLIKKRCPKCDTSMDNYLIDEFRKLHVCGKNPDCNGYIVEDGKFKIKGYDGPTLECHKCGSEMQLKTGRFGKYFGCLNDNCGATRALQRNGEPKPITMEPIEIPDLKCIKCEDHYLLRDSMKGLFLAASQYPKNRETRAPKVSEINKLHNEIIEACRFLPNKEKHMYLLEAPEKDVDGNPYIIRYNRTDDVHYLASEKDGKKTKWTATYSDGEWIQNLKS

SEQ ID NO: 157240 - protein, 227 aa, Unknown
  Bacterial polypetide isolated from the Sargasso Sea
NISTDEFINEQHFTQPPPRYSEASLVKKLEELGIGRPSTYASIISVISNRGYADIVNKRFFPTDRGKLLSAFLEKLFTKYVDYGFTAGLEEQLDDITSGKEEWIKVLDSFWKDFNNNISNVKEKRTREVLDLLNESLGELIFESDENGKINRKCKLCNNGELSLKNSFRGGAFIGCSNYPDCKFTRPLSKSKANDQIALAEPKLIGQNENGKDIYLKNGRFGPYLHI

SEQ ID NO: 157241 - protein, 34 aa, Unknown
  Bacterial polypetide isolated from the Sargasso Sea
MNLVIVESPAKAKTINKYLGKDYLVLASYGHIRD

SEQ ID NO: 157242 - protein, 244 aa, Unknown
  Bacterial polypetide isolated from the Sargasso Sea
KCKKTLKLVSGDEAISVDDNEEVENLLIKRRCPICSTSMDNYLIDENKKIHVCGKNPDCSGYEIEEGNFKIRGYDGPTLECHKCGSEMQLKTGRFGKYFACQNDNCGTTRALQRNGEPKPITMEPIELQELKCLKCEDHYLLRDSMKGLFLAASQYPKNRETRAPKVSEIKDLANEIREACRYLPDKNKHEYLLTAPEHDSDGNPYVIRYNRNEDVHYVASEKDGKKTKWTAAYSNGEWLETKK

SEQ ID NO: 157243 - protein, 234 aa, Unknown
  Bacterial polypetide isolated from the Sargasso Sea
EASLVKKLEELVIGRPSTYASIISVINNRGYAEIINKRFFPSDRGKLLSAFLEKLFSKYVDYDFTANLENQLDEITSGKENWISVLDSFWKDFFINVNGVKEKRTREVLDLLNESLGSLVFEVNKDGSINRKCSLCSTGELSLKNSFRGGAFVGCSNYPECKFTRPLSKSKAAQQLHLAEPKFIGKNENGKDIYLKNGRFGPYLQYEKLDTENDKKYIQKKKLKKEDSNFKNVS

SEQ ID NO: 157244 - protein, 300 aa, Unknown
  Bacterial polypetide isolated from the Sargasso Sea
DVKKSEVKFDDYIDEQHYTQPPPRYSEASLVKKLEELGIGRPSTYASIISVIANRGYADINNKRFFPTDRGKLLSAFLEKLFTKYVDYGFTAKLEDQLDDITSGKENWVNVLENFWKDFNSNVSGVKEKRTREVLDLLNESLGSLIFEVDKDGRINRKCQLCETGQLSLKNSFRGGAFIGCSNYPECKFTRPLSKSKAAQQLTLAEPKLMGKNDNGKDIYLKNGRFGPYLQFEKNAKDEVITKKKKSKFKNQENNLKNVSIPKGIEIDNIDLEKAKYLCSLPLNLGKNPENKKDITLNVE

SEQ ID NO: 157245 - protein, 301 aa, Unknown
  Bacterial polypetide isolated from the Sargasso Sea
VSNNKKTVIDDIKKFTKDADVIYFATDPDREGEAISKHLYDILDKAKILKEKETHRVVFNEITKNAVTEALKKPRAISTSLWDAYLARRTLDYLMGYDISEFLWKKVSRDARAGRVQSPALRLIVEREIKINSFIPEEFWNITASVSNSQRTIEIDLSQIKGEKVKKDNITIINDSKNANEIKSMIEAHDKVRVSNIKHGQRKTKPRAPFTTASLQQTAYTSLGLSVKQTSAIAQRLYQGMDIGGGQPEGLISYMRTDSTSLSKDALDDISTYLNNNHQGLASDEVRVYKGKTKNAQEAHE

SEQ ID NO: 157246 - protein, 244 aa, Unknown
  Bacterial polypetide isolated from the Sargasso Sea
PDGGLANKERILPDLKINEKLLCSSLNSEPHNTKPPARYRESSLVKALEENGIGRPSTFASILATIVKRAYVDRNNGKLTPTFLGLAVTQLLENHFTNLVSKEFTAKMEDGLDEVSRGEQKAVPFMNNFYSGGGRFLGLEKMLEEKVDIPLACTIPIPKKIKETTEGRIGRFGPYLRRGDDTRSIPDDIYLGDLTLNKIEEIFSQEAKEDEPIGKDPESGESIWLKKGPYGYYVQIGDTNKRKG

SEQ ID NO: 157247 - protein, 310 aa, Unknown
  Bacterial polypetide isolated from the Sargasso Sea
LYYDGATSLHKPPPRYSEASLVKKLEELGIGRPSTYASIISTIANRGYAEILNKRFFPTDRGKLISAFLEKLFSKYVDYNFTAGLEDQLDEITTGKESWIKVLELFWKDFHNNVSEVKEKRTREVLDLLNESLGDLVFDKDKDGNIVRKCQLCNSGTLSLKNSFRGGAFIGCSNYPDCKFTRPLSKAKAAAQAQLAEPKFIGKHENGNDIFLKNGRFGPYLQYEKILEEVEVEKNTKKKKKSKKLKSDVNELLKNISIPKGLDLDSIDLEKAQFLCSLPKSLGINPEHQKEITLNTGRFGPYLKCENKSA

SEQ ID NO: 157248 - protein, 226 aa, Unknown
  Bacterial polypetide isolated from the Sargasso Sea
MIFVQPRNYKNKKEAKNIQEAHGAITPVDISFIPDEAKKVLKDDELKLYQLIWQRTVASQMKDALFERTSIEFVPTGDEGLATFSFSDQELIFSGYLEATQEEVTNNKPPLINENDSIEFKGLIKTQHFTDPPPRYNDASMIKALEEKGIGRPSTYADILSKLTDRKYVWLKQKRYEPSDMGRLVSNFLNERFGGYISDEFTSNMENNLDEISSGKKSKEDVLNDF

SEQ ID NO: 157249 - protein, 282 aa, Unknown
  Bacterial polypetide isolated from the Sargasso Sea
MYKVYQEAKDDDKDEEKETILPVMNEEDILNLKEVEKTQHFTSPPPRYTEASLVKKLEELGIGRPSTYASIIKVLQDRDYVILDKKRFNPHDRGRIVSIFLEKYFNQYVEYDFTADLENQLDEISDGKLDWKEVIRKFWETFKKICDETVGKSNREVIDVLDEALGPHFFPPNGTDERRKCPTCENGRLGIKVGKFGGFIGCSNYPDCKYTVQFNQLNDKDGTSLSGPKEIGIYPETTEMITLRKGPYGFYMQVGEGTKEKKPKRVSIPKNFEPDEIGLNTA

SEQ ID NO: 157250 - protein, 275 aa, Unknown
  Bacterial polypetide isolated from the Sargasso Sea
FTDPPPRYSEASLVKKMEELGIGRPSTYASIISVLSTRNYVELINKRFNPTDRGKLISAFLEKLFSKYVDYNFTADLENQLDEITSGKIEWVQVLDNFWKDFYKNVGKVKEKRTREVLDLLNESLGALIFERDDKNAIDRKCKLCSNGELSLKNSFRGGAFIGCSNYPECKFTRPLSKAKAAAQYNLAEPKLLGQNEKGKDIYLKNGRFGPYLQYEKEKEELETKKKKGRKKKNENEHLKNVSIPKGIDVDSVDLDKAKYLCSLPKVLGQHPDNG

SEQ ID NO: 157251 - protein, 182 aa, Unknown
  Bacterial polypetide isolated from the Sargasso Sea
MFFLITESPAKAKKIQGFLSNQYTVKSSCGHITDLEKKKLSIDVENNFQPTYKVTSDKKDVVKMLKEGSKGKDVIFAADDDREGEAIAWHTANVLGVDIGKKNRIIFREISKKAILASLKKPIKVNMDEVNAQQARRIIDRLIGFKLSPCLWKHIHTSESGLSAGRVQSALLNLLEEREKMI

SEQ ID NO: 157252 - protein, 264 aa, Unknown
  Bacterial polypetide isolated from the Sargasso Sea
MSQKSVIIVESPSKAKTISKYLDDQYEVVACVGHVKDLPRGSLGVDVDNKFQMELVILDDKKEFFKNLASKAKSAPEIILATDPDREGEAIAAHIASEVPDSKISRVQFTEITNFGVKNGMQHKVDIDENLVEAQRTRRIIDRLVGYKISKVLWITLQKNMNFVKQSLSAGRVQSAALKIIIDRERKRAKFKKVTYFGLSAQLKTDKNESLSAKLFIMDSKRIAKGQDFDQESGELKKEGLIALSSSQAKALLKELNPGPWNCS

SEQ ID NO: 157253 - protein, 50 aa, Unknown
  Bacterial polypetide isolated from the Sargasso Sea
MTKSLVIVESPAKARTISKYLGSEFIVESSVGHIRDLPKKATPSGKRISI

SEQ ID NO: 157254 - protein, 213 aa, Unknown
  Bacterial polypetide isolated from the Sargasso Sea
KQYITGEEFKLYEIIWQRAVSSQMASAILDQVAIDIVDEDQKITLRANGSTIKFPGMYKVYQEAKDDDKDEEKETILPMMSEGEALDLKEVIKNQHFTMPPPRYTEASLVKKLEELGIGRPSTYASIIKVLQDRDYVILDKKRFNPHDRGRIVSIFLEKYFNQYVEYDFTADLENQLDEISDGKLDWKEVLRKFWETFKQLCDDTVGKSNREV

SEQ ID NO: 157255 - protein, 294 aa, Unknown
  Bacterial polypetide isolated from the Sargasso Sea
INSDNGLNQFKCSGSTIKFDGFLKLSRIDENEDEKILPEVNKEEVLVDDFIDEQHYTQPPPRYSEASLVKKLEELGIGRPSTYASIISVISNRGYADVINKRFFPTDRGKLLSAFLEKLFSKYVDYGFTAGLEDQLDDITTGKEEWIKVLDNFWKDFNSNVSNVKEKRTREVLDLLNESLGELIFEADESGKINRNCKLCNNGELSLKNSFRGGAFIGCSNYPECKFTRPLSKSKANDQYALAEPKLIGQNDNGKDIYLKNGRFGPYLQYEMIDEEVPTKKKKKKKENDNLKNV

SEQ ID NO: 157256 - protein, 339 aa, Unknown
  Bacterial polypetide isolated from the Sargasso Sea
HLSPDQAKLYELIYKRTIASQMIHATLDTVAVDLSCGPGNMFRANGSTIKNPGFMAVYLEGKDDNPNKKNATTDDTEDDSSGNSSNNKKEKILPELNVGEHVPLDKIICEQHFTEPPPRFSEASLIKTLEEHGIGRPSTYAAIISTLQNREYAIIEQKRFYPTDIGRLVNKFLTEYFSKYVDYAFTANLEDELDAISRGEKQWVPVLDNFWKPFIKLIEKNEAEVSREDVNKPIILGEDDKGNTISARLGRYGPYVQIGEKDDENNPPKYASLRKGQSIHDITIEEALELFKLPRALGEMPSGDAISANIGRFGPYVKYGTKSFCSIKKDSGLDPHTIY

SEQ ID NO: 157257 - protein, 284 aa, Unknown
  Bacterial polypetide isolated from the Sargasso Sea
LDAKYLSINAKVVLDDYIFSARGREVIFDGYTKISSQNAKKADEENLPSLEEGQVLKLVKVKNEKKFTKPPARFSEAALVKELESKGIGRPSTYAAIISTIQARGYVKLENKRFFVNKIGLIVSDRLIESFNEIMDYDFTANLENELDEIASGNLEWKSVLNKFYQTFQDDLKSAALPKDGMKPNEPTETNIICPSCNKSNMLIRNSANGVFLGCAGYFKSGDEQCKHTMNLISGDEAISVDDQEEASNLFIKKRCHICGTSMDNYLIDENRKIHVCANNPECS

SEQ ID NO: 157258 - protein, 273 aa, Unknown
  Bacterial polypetide isolated from the Sargasso Sea
DNSVQFTSSGSVIKFDGFLKIYSFQNDDEEKNLLPEVKVGEKLNLGELIDEQHFTSPPPRYSEASLVKKMEELGIGRPSTYASIISVLSTRNYTELLNKRFHPTDRGKLLSAFLEKLFSKYVDYNFTADLENQLDEITSGKTNYLNVLETFWKDFYNDVGSVKDIRTREVLDLLNDSLGDLIFDKNEQDEIDRKCKICDNGVLSLKNSFRGGAFIGCSNYPECKFTRPLSKAKASQQSFLAEPKLIGKNDDGKEIFLKNGRFGPYLQYQLNDE

SEQ ID NO: 157259 - protein, 295 aa, Unknown
  Bacterial polypetide isolated from the Sargasso Sea
DVDKGFKPVWKVSNNKKSVIDDIKKYTKDADVIYFATDPDREGEAISKHLYDILEKAKFLKGKETHRVVFNEITKNAVVDALKNPRTISISQWDAYLARRTLDYLMGYDISEFLWKKVSRDARAGRVQSPALRLIVEREIKINAFDPQEYWNLSASVSNNDRNIEIELIEINGEKIKKDNITSINDSKSSEEIKSKIEKYKNVKVSNIKNGQRKTKPKAPFTTASLQQTAYTSLGLSVKQTSAIAQRLYQGMDIGSGQPVGLISYMRTDSTNLSKDALSDISSYLKKNHPTLAED

SEQ ID NO: 157260 - protein, 273 aa, Unknown
  Bacterial polypetide isolated from the Sargasso Sea
KRFYAEKMGEIVNDRLMENFDDLMSFDFTANMEQQLDDIAEGNKDWKDVLNLFYSDFYGKLLNAEKAPEEGGMRLNQAIPAGITCDKCGREMNVRTASTGVFLGCSGYNLPPKERCTNTMNLTPGDEVVKVDDEEELETEALRAKKRCPICSTAMDSYLVDETRKLHVCGNTPTCDGTLVETGTFKIKGYDGPIIECDKCGSDMELKNGRFGKYFGCTNEECKNTRKLLRNGEAAPPKEDPVDLPELPCEKSDAHFVLRDGASGIFMAAHNFP

SEQ ID NO: 157261 - protein, 315 aa, Unknown
  Bacterial polypetide isolated from the Sargasso Sea
FTDPPPRYTEASLVKKLEELGIGRPSTYASTLSVLQDRNYVSLEKNRFFAEDRGQLVTAFLVSFFTKYVEYDFTAELEDRLDKISSGDAKWTDVLNDFWGDFTNAIDNTKELRIRDVLDSLNDILADHIFDKESENSRECPKCNQGTLSLKVGKFGAFVGCSLYPECKFTRAIANTNENESQEDDWPKEIGEDPNDNKKITIRKGPYGFYIQKGDTEGDEKPKRVGIPKNDDPGLLTLEKAMEYLSLPREVGKHPETSKKISAGIGRFGAFIRHDGDYRSLPKDDDVLSVGLNRAVSLLAEPKKRRGPEVLKNLG

SEQ ID NO: 157262 - protein, 311 aa, Unknown
  Bacterial polypetide isolated from the Sargasso Sea
LSSQWSLLPFDRNTITISSDNNDTICKASGSVLKFDGFLKIYNNQAKDDDENILPVMSKGPINIEALLDEQHYTQPPPRYSEASLVKKLEELGIGRPSTYASIISTIANRGYAEILNKRFFPTDRGKLISAFLEKLFSKYVDYNFTAGLEDQLDEITTGKESWIKVLELFWKDFNNNVSEVKEKRTREVLDLLNESLGSLVFDKDKNGNIVRKCRLCNDGTLSLKNSFRGGAFIGCSNYPECKFTRPLSKAKAAAQAQLAEPKFIGKHENGNDIYLKNGRFGPYLQYEKIATEIENEKATKKKKKSKKTKS

SEQ ID NO: 157263 - protein, 289 aa, Unknown
  Bacterial polypetide isolated from the Sargasso Sea
NYLPDSPRVYKSKAKNAQEAHECIRPTNINLTPKDVKQYITLEEFKLYEIIWQRAVSSQMASAILDQVAVDITNEVKKIILRANGSTIKFPGMYRVYQEAKDDDKDEEKETILPIMSEGETLNLKEVEKTQHFTSPPPRYTEASLVKKLEELGIGRPSTYASIIKVLQDRDYVVLDKKRFNPHDRGRIVSIFLEKYFNQYVEYDFTADLENQLDEISDGKLDWKEVLRKFWETFKQICDETVGKSNREVIDVLDEALGPHFFPPNGSDEKRKCPTCDNGRLGIKVESWR

SEQ ID NO: 157264 - protein, 74 aa, Unknown
  Bacterial polypetide isolated from the Sargasso Sea
MASKNLVIVESPSKAKTIGKYLGNEFIVKSSVGHVRRLPRGAKAIDKDKWTVSYEIDPKKEKVVKDLKKSAKNI

SEQ ID NO: 157265 - protein, 38 aa, Unknown
  Bacterial polypetide isolated from the Sargasso Sea
MNLVIVESPAKAKTINKYLGKDYKVLASYGHVRDLPSK

SEQ ID NO: 157266 - protein, 246 aa, Unknown
  Bacterial polypetide isolated from the Sargasso Sea
MNVLIVESPSKAKSINKYLGSNFKVLASVGHVRDLSAKNDAIDTENDFQMKWETSDRGKKVIKEITDAAKKSENLYLATDPDREGEAIAWHVEKLLRDDASLSKLNIHRVTFNEITKNAVLDSLKEPRGIDENLVNAYLARRALDFLVGFTLSPVLWRKLPGSKSAGRVQSVALRIISERELEIEKFIPQEYWSLKGEFNNKEDKIINSRLTVYNGNKVDKLDIKNENEATKIYNSIKNSNFIVGN

SEQ ID NO: 157267 - protein, 315 aa, Unknown
  Bacterial polypetide isolated from the Sargasso Sea
KLNDEQHFTDPPPRYSEASLVKKMEELGIGRPSTYASIISVLSTRNYVELINKRFNPTDRGKLISAFLEKLFSKYVDYNFTADLENQLDEITSGKIEWVQVLDNFWKDFYENVGKVKEKRTREVLDLLNESLGALIFERDEKDSIDRKCKLCADGELSLKNSFRGGAFIGCSNYPECKFTRPLSKAKAAAQYNLAEPKLLGQNDNGKDIFLKNGRFGPYLQYEKEKDEQELKKKKGRKKKNENDHLKNVSIPKGIDVDSIDLDKAKYLCSLPKVLGQHPENGQDITLNSGRFGPYLKCENKSARLENVEEIFSMV

SEQ ID NO: 157268 - protein, 108 aa, Unknown
  Bacterial polypetide isolated from the Sargasso Sea
MYLVVVESPAKAKTINKYLGKDYKVLASYGHVRDLPSKNGSVDPSNNFKMEWELDTFSKKYVKEITDAAAESEKIILATDPDREGEAIAWHVREILESKKLLKGKKVE

SEQ ID NO: 157269 - protein, 290 aa, Unknown
  Bacterial polypetide isolated from the Sargasso Sea
GRCCEKIKDEAKNAEQVILATDPDREGEAIAWHVADIISNAKFEQPDVKRAVFYEISEKAVKDAVSNPGEIAMDLVQSQETRRALDRHFGFTLSPLLWRLFPSNNHSAGRVQSPALRMIVEREREIEAFVPQEYWTISAKLEKDGEYDAKLSAFKQEPVKKFTFDSTTLVEKASKDLEEQCKKGLVAKSISKKTIKRSPREPFRTSVLQQQASNRFGFTPKRTMQVAQSLYAREGGGLITYIRTDSIEIDEGKVPAVRSQVASMFGEDFVQPRNYKNKKEAKNIQEAHGA

SEQ ID NO: 157270 - protein, 35 aa, Unknown
  Bacterial polypetide isolated from the Sargasso Sea
MNLVVVESPAKAKTINKYLGKDYIVLASYGHIRDL

SEQ ID NO: 157271 - protein, 297 aa, Unknown
  Bacterial polypetide isolated from the Sargasso Sea
ASLIWKEVLNSYYSAFQDDLSSAMDEENGMSPNLPTMTNINCPECKINKLTIRNASNGVFLGCAGYSLPAEMQCKKTLNLISGDEAVSIDDQEEAEHLVTKRRCPKCDMSMDNYLLDENHKLHVCSNNPDCDGFEVEEGAFKIKGYDGPTLSCHKCGSEMQLKTGRFGKYFGCMNDNCGATRALQRNGEPKPIVMEPIATEIPCIKFEDIYLLRDSMKGLFLAASKYPKNRETRAPSVEEFNKAVTEETLIDACKYLEDQEKHTHLLCAPKHDIEGNPYIIRYNKAEDTHYLASEKD

SEQ ID NO: 157272 - protein, 305 aa, Unknown
  Bacterial polypetide isolated from the Sargasso Sea
TYMRTDSVILSETAQNSIKNAIEKKFGSNYHQSRNFSNKSKNAQQAHEAVRPTNFLNNIQNLDADQSNLYDLIWRRSVASQMSDAKVDKTTVKIKSNNHEGLFQSDGEVIKFDGFLKLYIESKDNQNNDDSQNNVLPNFTEGERIAKDKILVTQIFSKPPFRFTEASLVKKLEELGIGRPSTYAPTITTVMNRKYVFKGTNNAQTREIVQYIIDSNINRNVNQENYGSNKGKLVPSEVGLLVNEFLTNNFKNIIDYNFTASVENEFDSIANGSKDWKSIIDKFYNPFSLVIDDVQKNAKRETGKE

SEQ ID NO: 157273 - protein, 47 aa, Unknown
  Bacterial polypetide isolated from the Sargasso Sea
MNLVIVESPAKAKTINKYLGKDYKVLASYGHVRDLPSKNGSVDPTNN

SEQ ID NO: 157274 - protein, 280 aa, Unknown
  Bacterial polypetide isolated from the Sargasso Sea
FLRIAQINLNGSGSTIKFDGFLKLTRIDDEDEKILPDVKKEKLSIQEFIDEQHFTQPPPRYSEASLVKKLEELGIGRPSTYASIISVISNRGYADVLNKRFFPTDRGKLLSAFLEKLFTKYVDYGFTAGLEEQLDDITSGKEEWIKVLDNFWKDFNNNVSNVKEKRTREVLDLLNESLGELVFESDENGKINRKCKLCDSGELSLKNSFRGGAFIGCSNYPECKFTRPLSKAKAKDQIALSEPKLIGKNDNGKEIFLKSGRFGPYLQFEVNEIENAVKNK

SEQ ID NO: 157275 - protein, 288 aa, Unknown
  Bacterial polypetide isolated from the Sargasso Sea
MTHLNGSRLKQFDVGSVEQAEAAVALLPDTWRVDTVKRSKRSTNPPPPYNTASLQQDASRTMGISPSRVMRLAQALYEGLPLGGGEENVALITYMRTDGIEMSSDGINGARRYISKAFGSEEKWLPSSPRLFKRKKRNAQEAHEAVRPVDLMLTPASLIGKIGGQELRLYELIWRRAIASQMASAIHEQLAISLVPEGGEGTAQARTSGSRLLSPGYKALTSQPRIKAAKAEEEEEEEEGEAEGGGEEEEEEEGGSNGLNPLLEGLGEGDTLSTLERLPSQKFTEPPP

SEQ ID NO: 157276 - protein, 293 aa, Unknown
  Bacterial polypetide isolated from the Sargasso Sea
MFGDSFVQPRNYKNKKAAKNIQEAHGAITPVDISLIPAEAKKVLKDDELKLYQLIWQRTVASQMKDALFERTSIEFVPTGDEGLATFSFSDQELIFSGYLEATQEEVTNNKPPLINENDSIEFKGLIKTQHFTDPPPRYNDASMIKALEEKGIGRPSTYADILSKLTDRKYVWLKQKRYEPSDMGRLVSNFLNERFGGYISDEFTSNMENNLDEISSGKKSKEDVLNDFWSPLIDTVDEVSDVVTRKDVNPQRPLGNHPETGRPVFARMTKNGPAVQVGDMDKDEKLEWAAIK

SEQ ID NO: 157277 - protein, 225 aa, Unknown
  Bacterial polypetide isolated from the Sargasso Sea
MGDGFTVLPTIGHIRELPKKDAIDPNNGYSMKYIVSPGKEDAVKKIKRDAKSAEQVILATDPDREGEAIAWHVADIISNAKFELPDIKRAVFYEISEKAVKDAVGNPGEIAMDLVQSQETRRALDRHFGFSLSPLLWRLFPSNNHSAGRVQSPALRMIVEREREIEVFVPQEYWTISAKLEKDGEYDAKLSVFKEEPVKKFTFDSTALVEEASKALEDSCKTGLV

SEQ ID NO: 157278 - protein, 343 aa, Unknown
  Bacterial polypetide isolated from the Sargasso Sea
NKWKIRKLFYEQMGSTIKFPGMYKVYQEAKDDDKDEEKETILPVMSEGESLILKEVEKTQHFTSPPPRYTEASLVKKLEELGIGRPSTYASIIKVLQDRDYVILDKKRFNPHDRGRIVSIFLEKYFNQYVEYDFTADLENQLDEISDGKQDWKEVLRKFWETFKQLCDETVGKSNREVIDVLDEALGPHFFPPNGADEKRKCPTCDNGRLGIKVGKFGGFIGCSNYPDCKYTVQFNQLNDKDGAALSGPKEIGIYPETGEMITLRKGPYGFYMQVGEGTKEKKPKRVSIPKNFEPDEIGLNTAIQLLGLPRKLGFHPETNKTVSAGIGMYGPYILHDKKYKAL

SEQ ID NO: 157279 - protein, 191 aa, Unknown
  Bacterial polypetide isolated from the Sargasso Sea
MNVLIVESPSKAKSINKYLGSDFKVLASVGHVRDLSAKNDAIDTENDFKMKWETSDRGKKVIKEITDAAKKSDNLYLATDPDREGEAIAWHVEKLLRDNSSLSKLNIHRVTFNEITKNAVLDSLKEPRSIDENLVNAYLARRALDFLVGFTLSPVLWRKLPGSKSAGRVQSVALRIISEREFEIEKFVPQE

SEQ ID NO: 157280 - protein, 166 aa, Unknown
  Bacterial polypetide isolated from the Sargasso Sea
NENLKIDKILDEQHFTEPPPRYSEASLVKKLEELGIGRPSTYASIISVLSTRNYVDLINKRFHPTDRGKLLAAFLEKLFSKYVDYNFTAELEDQLDEITSGKVKWIGVLEKFWKDFNENVKSVKEKRTREVLDLLNESLGELIFDTTSDGKINRKCQLCDTGQLSL

SEQ ID NO: 157281 - protein, 295 aa, Unknown
  Bacterial polypetide isolated from the Sargasso Sea
VLKFDGFLKVYKNLNSDDDDEILPGVKKGPINIESFLDEQHFTQPPPRYSEASLVKKLEELGIGRPSTYASIISTISNRGYAEITNKRFFPTDRGKLISAFLEKLFSKYVDYNFTAGLEDQLDEITTGKESWIKVLELFWKDFNSNVSEVKEKRTREVLDLLNESLGALIFDKDKSGNVVRKCKLCNTGSLSLKNSFRGGAFIGCSNYPECKFTRPLSKAKAAAQAQLAEPKYLGKHDNGNDIFLKNGRFGPYLQYEKILDQIEEEISKKKKRKTKKAKTDVNELLKNVSIPKGI

SEQ ID NO: 157282 - protein, 302 aa, Unknown
  Bacterial polypetide isolated from the Sargasso Sea
TDIIRTPQSVKKYLSTDQNKLYDLIWSRALSSQMESAKFDRNTITITSENNDTICKASGSVLKFDGFLKIYNNQSKDDDENILPTVSKGPINIEALIDEQHYTQPPPRYSEASLVKKLEELGIGRPSTYASIISTIANRGYAEILNKRFFPTDRGKLISAFLEKLFSKYVDYNFTAGLEDQLDEITSGKESWIKVLELFWKDFNNNVSEVKEKRTREVLDLLNESLGSLVFDKDKEGNIVRKCQLCSDGTLSLKNSFRGGAFIGCSNYPECKFTRPLSKAKAAAQAQLAEPKFIGKHENGND

SEQ ID NO: 157283 - protein, 233 aa, Unknown
  Bacterial polypetide isolated from the Sargasso Sea
PRYSEASLVKKLEELGIGRPSTYASIISVISNRGYADIINKRFFPTDRGKLLSAFLEKLFSKYVDYGFTAGLEDQLDDITAGKEEWIKVLDNFWKDFNTNVSNVKEKRTREVLDLLNESLGQLIFEADENGKINRKCKLCESGELSLKNSFRGGAFIGCSNYPECKFTRPLSKSKANDQFALAEPKLIGQNENGKNIYLKNGRFGPYLQYEMIEEEISIKKKKKKKENDNLKN

SEQ ID NO: 157284 - protein, 315 aa, Unknown
  Bacterial polypetide isolated from the Sargasso Sea
GASRTMQIAQRLFQGIEINGETTGLITYMRTDSTDLSKEAIDSYREFIKDNFDPAYLPKEIRSFKSKKAKNAQEAHEGIRPTDVLRKPEEMKKYLDVDGFKLYDLIWKRSLASQMNSATFERTAISISSEDESLKLRANGSIQTFDGFLNIYSEFNKKSDDTDLDENEENKDLPNIKLEDKIENVDPLSTQHFTLPPPRYSEATLVKKLEELGIGRPSTYASIISVLKMRNYVEVEKNRFIPEDRAILITGFLKGFFSKYVDYEFTAEMEESLDEITSGQIDWKEFLEKFWKNFSSNIGEVTDLRITNVLDHLND

SEQ ID NO: 157285 - protein, 304 aa, Unknown
  Bacterial polypetide isolated from the Sargasso Sea
DEDQKITLRANGSTIKFSGMYKVYQEAKDDDKDEEKETILPMMNEGEILDLNEVIKNQHFTMPPPRYTEASLVKKLEELGIGRPSTYASIIKVLQDRDYVILDKKRFNPHDRGRIVSIFLEKYFNQYVEYDFTADLENQLDEISDGKLDWKEVLRRFWETFKQLCDDTVGKSNREVIDVLDDALGAHFFPPEGKDETRKCPTCDNGRLGIKVGKFGGFIGCSNYPDCKYTLQFNQLNDKDGTALAGPKEIGVYPETKEMITLRKGPYGFYMQVGEGTPEKKPKRVSIPKNFEPEEIGLNTAIQL

SEQ ID NO: 157286 - protein, 198 aa, Unknown
  Bacterial polypetide isolated from the Sargasso Sea
MNVLIVESPSKAKSINKYLGSDFKVLASVGHVRDLSAKNDAIDTENDFKMKWETSDRGKKVIKEITDAAKKSENLYLATDPDREGEAIAWHVEKLLRDNASLSKLNIHRVTFNEITKNAVLDSLKSPREIDENLVNAYLARRALDFLVGFTLSPVLWRKLPGSKSAGRVQSVALRIISERELEIEKFNPEEYWSIQSN

SEQ ID NO: 157287 - protein, 215 aa, Unknown
  Bacterial polypetide isolated from the Sargasso Sea
EGEAIAWHVEKLLRDNKALSKLNIHRVTFNEITKNAVLESLKEPREIDENLVNAYLARRALDFLVGFTLSPVLWRKLPGSKSAGRVQSVALRIISERELEIEKFDPQEYWSIQGNFLNKDKKDINARLTLFDGNKIDKLDIKNEKQANNIYETIKNSNFKVGSISKKEARRNPYPAFTTSTMQIESSRKLGLSASQTMRTAQRLYEGTEINGDTT

SEQ ID NO: 157288 - protein, 143 aa, Unknown
  Bacterial polypetide isolated from the Sargasso Sea
SLKFQDEKKNSITASIYQLDSEKIEKFTFRKKEDIEKGISGLKNKKFNISDISSKIVNRNPSGPFTTSTLQQVASSRLGFGASRTMQIAQKLYQGIEIEGDTVGLITYMRTDGTNLSADAISDFRNYIKKSYGNEYIPEKANN

SEQ ID NO: 157289 - protein, 243 aa, Unknown
  Bacterial polypetide isolated from the Sargasso Sea
VKKLESEGIGRPSTYAPTISTIQDRGYVELTDEKKLKPTSIGEVVTDFLADHFTKIVNLGFTAEIERNFDRIAKGEEDWVEMMTDFYEPFHENVVEKDKSVTRAEVLKRRELGTDPESGKPVSVSVGRYGPMVQIGTREDEEKPRFASLPSSLNLNDVTLEEALQCFALPRVLGEYENGEEITANNGRYGPYVKLGKDFFSIPKGEKAEDIELVRAVELIREGLERKSKSIIHDFVEIQVLNG

SEQ ID NO: 157290 - protein, 267 aa, Unknown
  Bacterial polypetide isolated from the Sargasso Sea
PDAEYLSTSAKINLEGYEFVARGREVVFDGFTKVMPPRKDEDAILPPLAEGDTLNLVDLKNEKKFTKPPSRFSEAALVKELEKRGIGRPSTYANIISTIQDRGYVSIENRRFFVKKIGMIVSDRLMESFDDIMDYGFTANFETQLDDIANGTKDWITVLNSYYEAFQDDLKNASDPEMGMRGNKATPTNINCPQCGTNKLNIRNASNGVFLGCAGYRLEGDEQCKKTLNLISGDEAISVDDQEEAENLVIKKRCPLCDTSMDNYLID

SEQ ID NO: 157291 - protein, 288 aa, Unknown
  Bacterial polypetide isolated from the Sargasso Sea
TDQNKLYNLIWSRALSSQMETAQFDRNTIIITTDNNDTVCKASGSVLKFDGFLKVYNNPNKDDDEGILPEMSKGPVNIESLLDEQHFTQPPPRYSEASLVKKLEELGIGRPSTYASIISTIANRGYAEILNKRFFPTDRGKLISAFLEKLFSKYVDYNFTAGLEDQLDEITTGKESWIKVLELFWKDFNNNVSEVKEKRTREVLDLLNDSLGDLVFDKDNEGNIVRKCKLCSSGTLSLKNSFRGGAFIGCSNYPECKFTRPLSKAKAAAQAQLAEPKFIGKHENGNDI

SEQ ID NO: 157292 - protein, 65 aa, Unknown
  Bacterial polypetide isolated from the Sargasso Sea
MNLVIVESPAKAKTINKYLGKDYIVLASYGHVRDLPSKNGSVDPENSFKMEWELDTFSKKYVKEI

SEQ ID NO: 157293 - protein, 250 aa, Unknown
  Bacterial polypetide isolated from the Sargasso Sea
KIINSRLTVYEGNKVDKLDIKNESEATKIFNDIKNSTFTVGSITKKEARRNPYPAFTTSTMQIESSRKLGLSASQTMRTAQRLYEGTDIKGETTGLITYMRTDSVVMSKEAINQVRGFVTDNYGANYLPEAPRVYKSKAKNAQEAHECIRPTNIYLTPKDIKQYITLEEYKLYEIIWQRAVSSQMASAVLDQVAVDITNEDKKIVLRANGSTIKFPGMYKVYQEAKDDDKDEEKETILPSMSEGESLNLK

SEQ ID NO: 157294 - protein, 271 aa, Unknown
  Bacterial polypetide isolated from the Sargasso Sea
ASQMSDSVTESTRVEIDAVSTTTYELRSNGSKLIFDGFKRLYEESADSEDNNKDSKLLPNLSENMILGCKEINPIQHHTQAPPMYTEASLVKEMEENGIGRPSTYAPTINTILDRNYVEREQSRLKPTVLGMTVSDELIDYFGTTKLQPKEDSLEYVGTHNVEDGTKILELDFTAEMENHLDDIASNEKAWIDVLEQFYQPFIRSLDHATENMQSRKVEEPTDEVCEKCERPMVIKTGRFGRFIACTGFPDCKNAKPIVESTGVSCPECED

SEQ ID NO: 157295 - protein, 279 aa, Unknown
  Bacterial polypetide isolated from the Sargasso Sea
YKPPARYTEASLVKALEENGIGRPSTFASILATIVRRKYVNRKSGKLSPTYLGLAVTQLLENHFTNLVSKEFTVKMEDGLDEVSRGELDAVPFMTNFYKGGGRFAGLEKMLDEKVDIPAACSIALPKEISDNTEGRIGRYGPYLRRGDDTRSIPDDIYMGDLNLETIEKIFEEETKEDESLGDDPSTGDKIWIKKGPYGHYVQLGETKTRKGIPKTFQLSDVNLEYALKLLSLPREVGNHPDTNDVITADYGRYGPYIKCGRQNASLRGPETPLDITLE

SEQ ID NO: 157296 - protein, 101 aa, Unknown
  Bacterial polypetide isolated from the Sargasso Sea
MAVVVVESPAKAKTINKYLGSGYVVLASVGHVRDLASKDGAVDPKRDFSMRWEIDSNKQKNIKAIADALVETNKLILATDPDREGEAISWHLLEVLQKKKA

SEQ ID NO: 157297 - protein, 263 aa, Unknown
  Bacterial polypetide isolated from the Sargasso Sea
KDEEKETILPVMNEGQSLNLTKIEKTQHFTSPPPRYTEASLVKKLEELGIGRPSTYASIIKVLQDRDYVVLDKKRFNPHDRGRIVSIFLEKYFNQYVEYDFTADLENQLDEISDGKLEWKEVLRKFWETFKKLCDETVGKSNREVIDVLDEALGPHFFPPNGTDEKRKCPTCENGRLGIKVGKFGGFIGCSNYPDCKYTVQFNQLNDKDGAALSGPKEIGIYPETGEMITLRKGPYGFYMQIGEGTKEKKPKRVSIPKNFEPR

SEQ ID NO: 157298 - protein, 304 aa, Unknown
  Bacterial polypetide isolated from the Sargasso Sea
IKRVSVSIENGKTLFKANGKVILFPGYMAAYVESSDKRNPSHDDQETILPPLKQGELLNCEKLLPNEHQTKPPARFTEASLVKELESKGIGRPSTWANTIDTIVRRTYVMRNQGKLTPTFLGMAVTQLLENHFNSLVDSQFTAEMENRLDAISRGELDSIPFMKDFYFGNKDNIGLEKMLDDQIDIGKACSVQLTIDEEPIEIRVGMYGPFVRKGEVRKSVPENVFLGDLNVDKALDILNQEINEEKELGTDKETGEVVFLKNGPYGPYVQLGESTKRKAIPKGTKSEEINLNFGLRLLELPRT

SEQ ID NO: 157299 - protein, 286 aa, Unknown
  Bacterial polypetide isolated from the Sargasso Sea
GFKANGSTIKFEGFLKVYKFEEKDEDLKNILPDVKTGDKVDIKELIDDQHFTDPPPRYSEASLVKKMEELGIGRPSTYASIITVLSTRNYVELLNKRFHPTDRGKLLSAFLEKLFTKYVDYNFTADLENQLDEITSGKVEWIKVLDGFWKDFYSNVGQVKEKRTREVLDLLNDSLGDLVFERDDNDSIDRKCKACDKGELSLKNSFRGGAFIGCSNYPECKFTRPLSKSKASQQVNLAEPKLIGQNDLGKDIFLKNGRFGPYLQFEIDVDTSVENKKKRSKKKKEN

SEQ ID NO: 157300 - protein, 245 aa, Unknown
  Bacterial polypetide isolated from the Sargasso Sea
KCKETLNLVSGDEAISVDDSEEATNLLIKKRCPKCGTSMDNYLIDENRKLHVCGKNPDCDGYLIEEGQFKIKGYDGPTLECHKCGSEMQLKTGRFGKYFGCLNDNCGATRALQRNGEPKPITMEPIELKNLKCIKCEDHYLLRDSMKGLFLAASQYPKNRETRAPKVHEINKLNLEINEACRFLPNKDKHTYLLSAPEKDIDGNEYVIRYNRTDDIHYVASEKDGKKTKWTAVFSDGEWKQNKKD

SEQ ID NO: 157301 - protein, 277 aa, Unknown
  Bacterial polypetide isolated from the Sargasso Sea
VRGKQATVTEESKPTTQASPLLFDLTSLQREANGKFGFSAKTTLALAQSLYERHKALTYPRTDSRALPEDYLPVAKQTFEMLADSGMRHLAPHALTALNNNYIRPSKRIFDNSKVSDHFAIIPTTQAPSGLSEAEQKLYDLVVRRFMAVFFPSAEYTVTTRISTVAPHSFKTEGKVLVKPGWLAIYGKEAADEVEGGKDGDKGQNLVPVKPGEMVNTLAVDPKGLKTKPPARYSEATLLGAMESAGKQIDDDELREAMHEKGLGTPATRAAIIEGLL

SEQ ID NO: 157302 - protein, 294 aa, Unknown
  Bacterial polypetide isolated from the Sargasso Sea
KASSYLHFSPKQTMSYAQKLYEKGYITYMRTDCCCFSNTFLKQILPCIEEKYSKEYVSSSFWGLSTNKKSKSQEAHEGIRVTDPKRDNINIDDPNCKKLYSFIYKHTYQSCMSDYIGEKTIFYTPSPMESEMIYEEEKSIFMGWKIINNQEQQSKTFVSIVSYLELIKGFTMNRITATEVPCESLHHYGESTLIQILEKKNIGRPSTFANILDSIKEKQYIKKGNIEGIEYERKILTLQDGVIKTIKEKKMMHSEKSKLILLELGDLVDKFCYVYFEPLFNYTFTEEMETKLDK

SEQ ID NO: 157303 - protein, 66 aa, Unknown
  Bacterial polypetide isolated from the Sargasso Sea
MPKNLVIVESPAKAKTIEKFLGGDFKVVSSNGHISDLPSSELGIDVENNFQPNYQVSKEKKEIVKK

SEQ ID NO: 157304 - protein, 32 aa, Unknown
  Bacterial polypetide isolated from the Sargasso Sea
MNLVIVESPAKAKTINKYLGKGYKVLASYGHG

SEQ ID NO: 157305 - protein, 95 aa, Unknown
  Bacterial polypetide isolated from the Sargasso Sea
DAAKDSSKIILATDPDREGEAIAWHVKEYLNEKKLLKDKEIERVVFNEITKKAVIHGIENPRQIEPLLVDAYMARRALDYLVGFNISPILWDKIT

SEQ ID NO: 157306 - protein, 204 aa, Unknown
  Bacterial polypetide isolated from the Sargasso Sea
MIVESPTKVKSIEKFLGPDFKVIASVGHVRDLVSSARKGIDVDQGFKPVWKVSNNKKTVIDDIKKFTKDADVIYFATDPDREGEAISKHLYDILDKAKILKEKETHRVVFNEITKNAVTEALKKPRSISTSLWDAYLARRTLDYLMGYDISEFLWKKVSRDARAGRVQSPALRLIVEREIKINAFIPEDFGISLQVFQTVREIL

SEQ ID NO: 157307 - protein, 320 aa, Unknown
  Bacterial polypetide isolated from the Sargasso Sea
ISFKEETIKKFTFDSTALVEEASEALVDSCKEGLVAKSITKKTIKRSPREPFRTSVLQQQASNRFGFTPKRTMQIAQSLYAREGGGLITYIRTDSIEIDEGKLPSVRDQVAFMFGDDFVQPRNYKNKKEAKNVQEAHGAITPVDISLIPTEAKKVLKDDEFKLYQLIWQRTVASQMKDALFERTSIEFVPTGDEGLATFSFSDQELIFSGYLEATQEEVTNNKPPLINENDSIEFKGLIKTQHFTDPPPRYNDASMIKALEEKGIGRPSTYADILSKLTDRKYVWLKQKRYEPSDMGRLVSNFLNERFGGYISDEFTSNM

SEQ ID NO: 157308 - protein, 225 aa, Unknown
  Bacterial polypetide isolated from the Sargasso Sea
EVADDDELETEVLRHKKRCAKCGTAMDHYLIDEHRKLYVCGNNPGCDGYLVESGVFKLKGYDGPLIECEKCGSDMQLKSGRFGKYFGCTNDACKNTRKLLKNGEAAPPKEDPVHLPELKCEKSDTYFVLRDGAAGLFLAAATFPKSRETRAPLVSELARFKDRIMPKFHYLAEAPAADAAGNPTIIRWSRKTKQQYVMTEKDGKATGWSAWYENGRWVVTKEKAK

SEQ ID NO: 157309 - protein, 175 aa, Unknown
  Bacterial polypetide isolated from the Sargasso Sea
MGQKSNSLIIVESPSKAKTLKRFLGDEYAIEASVGHVRDLPKSDLGVDVDNGFSATYVPSKDKTKVISQLKSIIKKADILYLATDPDREGEAIAWHLMELLKPKIPVKRLAFHEITKTAIQESFDHTREIDQDLVSAQEARRILDRLWGYLVSKKLWFNVKGGLSAGRVQSPAIK

SEQ ID NO: 157310 - protein, 278 aa, Unknown
  Bacterial polypetide isolated from the Sargasso Sea
NNDTVCKASGSVLKFDGFLKIYNNQGKDDDENILPSVSKGLVNIESLIDEQHFTQPPPRYSEASLVKKLEELGIGRPSTYASIISTIANRGYAEILNKRFFPTDRGKLISAFLEKLFSKYVDYNFTAGLEDQLDEITTGKESWIKVLELFWKDFNNNVAEVKEKRTREVLDLLNDSLGDLVFDKDDKGNIVRKCQLCNSGTLSLKNSFRGGAFIGCSNYPECKFTRPLSKAKAAAQAQLAEPKFIGKHENGNDIYLKNGRFGPYLQYEKIPEDIKVEK

SEQ ID NO: 157311 - protein, 256 aa, Unknown
  Bacterial polypetide isolated from the Sargasso Sea
MQSAKFDRNTITIISDNNDTICKASGSVLKFDGFLKIYNNQSKDDDESILPAMSKGPVNIEALLDEQHFTQPPPRYSEASLVKKLEELGIGRPSTYASIISTIANRGYAEILNKRFFPTDRGKLISAFLEKLFSKYVDYNFTAGLENQLDEITTGKESWIKVLELFWKDFNNNVSEVKEKRTREVLDLLNDSLGDLVFDKDNEGNIVRKCQLCTSGTLSLKNSFRGGAFIGCSNYPECKFTRPLSKSKAAAQAQLA

SEQ ID NO: 157312 - protein, 72 aa, Unknown
  Bacterial polypetide isolated from the Sargasso Sea
MNLVIVESPAKAKTINKYLGKDYKVLASYGHVRDLPSKNGSVDPENNFKMEWELDSFSKKYVKEITDAAADS

SEQ ID NO: 157313 - protein, 311 aa, Unknown
  Bacterial polypetide isolated from the Sargasso Sea
YGAEYLPDSPRIYKSKAKNAQEAHECIRPTNINLTPKDIKKYITGEEFKLYEIIWQRAVSSQMSSAILDQVAVNIMTEDQQISLRANGSTIKFPGMYKVYQEAKDDDKDEEKETILPAMNEGEELDLKEVNKNQHFTMPPPRYTEASLVKKLEELGIGRPSTYASIIKVLQDRDYVVLDKKRFNPHDRGRIVSIFLEKYFNQYVEYDFTADLENQLDEISDGKLDWKEVLSKFWETFKKLCDDTVGKSNREVIDVLDEALGAHFFPPEGKDENRKCPTCENGRLGIKVGKFGGFVGCSNYPDCKYTGQFYQ

SEQ ID NO: 157314 - protein, 293 aa, Unknown
  Bacterial polypetide isolated from the Sargasso Sea
FDRKSITIESENKKIHFKANGSTIKFEGYLKVYKFEEKDEDLKNILPEVKVKDKVSIKELIDDQHFTDPPPRYSEASLVKKMEELGIGRPSTYASIISVLSTRNYVELLNKRFHPTDRGKLLSAFLEKLFTKYVDYNFTADLENQLDEITSGKVDWISVLDGFWKDFYSNVGQVKEKRTREVLDMLNESLGDLVFERDNNDVIDRKCKLCDTGQLSLKNSFRGGAFIGCSNYPECKFTRPLSKSKASQQINLAEPKLIGKNDLGKDIFLKNGRFGPYLQFEIDPLETNQIKKR

SEQ ID NO: 157315 - protein, 286 aa, Unknown
  Bacterial polypetide isolated from the Sargasso Sea
TDIKRTPDTLKKYLSSDQQKLYNLIWSRALSSQMEVAQFDRNTITIKSEDAQTVCKASGSVLKFDGFLKVYSNTSKDDDEEILPEMSKGPINIEALMDEQHFTQPPPRYSEASLVKKLEELGIGRPSTYASIISTIANRGYAEILNKRFFPTDRGKLISAFLEKLFSKYVDYNFTAGLEDQLDEITTGKESWIKVLEMFWKDFNNNVSVVKEKRTREVLDLLNESLGALIFDTDKDGKIVRKCQLCDTGSLSLKNSFRGGAFIGCSNYPKCKFTRPLSKAKAAAQS

SEQ ID NO: 157316 - protein, 271 aa, Unknown
  Bacterial polypetide isolated from the Sargasso Sea
MNVLIVESPSKAKSINKYLGSDFKVLASVGHVRDLSAKNDAIDTENDFQMKWETSDRGKKVIKEITDAAKKSENLYLATDPDREGEAIAWHVEKLLRDNSSLSKLNIHRVTFNEITKNAVLDSLKEPRKIDKNLVNAYLARRALDFLVGFTLSPVLWRKLPGSKSAGRVQSVALRIISERELEIEKFVPQEYWSLQGEFRNKEDKAINSRLTVYDGNKIDKLDIKNDSEASKIFNDVKNSTFTVGKITKKEARRNPYPAFTTSTMQIESSR

SEQ ID NO: 157317 - protein, 143 aa, Unknown
  Bacterial polypetide isolated from the Sargasso Sea
DTVGLITYMRQMGTQIRNEAIDSFRNFITDNYGKKYYPEHPNNYRGKKAKNAQEAHEAIRPTEISRSPNDVKKYLNSDQHKLYELIWNRALSSQMQSAEYDRNTILISSKDDSMKFRATGSVLKFDGFLKLYKDIDKDDNDKI

SEQ ID NO: 157318 - protein, 280 aa, Unknown
  Bacterial polypetide isolated from the Sargasso Sea
LEELGIGRPSTYASIISVISNRGYAEINNKRFFPTDRGKLLSAFLEKLFSKYVDYDFTAKLENQLDDITSGKENWITVLENFWKDFNSNVSSVKEKRTREVLDLLNESLGSLVFEIDKEGKIDRKCKLCSTGQLSLKNSFRGGAFIGCSNYPECKFTRPLSKSKAAQQFTLAEPKLIGQNDKGKEIYLKNGRFGPYLQYEKEPEEEIKRKKRKKKIKENENMKNVSIPKGVEIDSIDLDKAKYLCSLPIILGKNPENDKDITINVGRFGPYLKCESKSAK

SEQ ID NO: 157319 - protein, 190 aa, Unknown
  Bacterial polypetide isolated from the Sargasso Sea
MIVESPTKVKSIEKFLGPDFKVIASVGHVRDLVSSARKGIDVDQGFKPVWKVSNNKKTVIDDIKKFTKDADVIYFATDPDREGEAISKHLYDILDKAKILKEKETHRVVFNEITKNAVTEALKKPRAISTSLWDAYLARRTLDYLMGYDISEFLWKKVSRDARAGRVQSPALRLIVEREIKINSFIPEEF

SEQ ID NO: 157320 - protein, 261 aa, Unknown
  Bacterial polypetide isolated from the Sargasso Sea
MNVLIVESPSKAKSINKYLGSDFKVLASVGHVRDLSAKNDAIDTENDFKMKWETSDRGKKIIKEITEAAKKSDNLYLATDPDREGEAIAWHVEKLLRDNASLSKLNIHRVTFNEITKNAVLDSLKEPREIDENLVNAYLARRALDFLVGFTLSPVLWRKLPGSKSAGRVQSVALRIISEREFEIEKFVPQEYWSIQCDLINKANNVINSRLTFYNGKKIDKLDIKSEEAATKIYTTILNSKFKVGNITKKEAKRNPYAALQ

SEQ ID NO: 157321 - protein, 276 aa, Unknown
  Bacterial polypetide isolated from the Sargasso Sea
TIESEDGKTICKSSGSVLKFDGFLKVYSNQSKDDDQILPEMSKGPINIEAIIDEQHFTQPPPRYSEASLVKKLEELGIGRPSTYASIISTIANRGYAEIVSKRFFPTDRGKLISAFLEKLFSKYVDYNFTAGLEDQLDEITSGKESWLKVLEMFWKDFNSNVSEVKEKRTREVLDLLNESLGALIFDTDKEGNIVRKCQLCETGSLSLKNSFRGGAFIGCSNYPECKFTRPLSKAKAAAQSQLAEPKFLGKHENGNDIFLKNGRFGPYLQYEKVLE

SEQ ID NO: 157322 - protein, 275 aa, Unknown
  Bacterial polypetide isolated from the Sargasso Sea
MGRIKKRIMPEDIIINIGKGAKVPEPLSGHSWKQVIHNDTVTWLCGWNDTINTKDWKYVQFGATSSIKAESDIQKYEKARKLKLAVDAIRRDYFTKMKSGSILEQQLAVTTYLVDKLALRAGGEKDDDLADTVGVCTLRVGHIDFLPPSTIKFDFLGKDSIRYLQEHEVDPLVFHAMQRFCKGKKKDQDIFDHIDPTKVNKHLQTLMPGLTIKVFRTYNASYTLNKLLKETTPAGNATVPMKKAAYDAANKEVAVLCNHQKGVSKAHDAQMEKLR

SEQ ID NO: 157323 - protein, 294 aa, Unknown
  Bacterial polypetide isolated from the Sargasso Sea
ILPAMSEGESLNLKELEKTQHFTSPPPRYTEASLVKKLEELGIGRPSTYASIIKVLQDRDYVILDKKRFNPHDRGRIVSIFLEKYFNQYVEYDFTADLENQLDEISDGKLDWKEVLRKFWETFKQLCDETVGKSNREVIDVLDEALGPHFFPPNGADEKRKCPTCDNGRLGIKVGKFGGFIGCSNYPDCKYTVQFNQLNDKDGAALSGPKEIGIYPETGEMITLRKGPYGFYMQVGEGTKEKKPKRVSIPKNFEPDEIGLNTAIQLLGLPRKLGFHPETNKTVSAGIGMYGPYI

SEQ ID NO: 157324 - protein, 260 aa, Unknown
  Bacterial polypetide isolated from the Sargasso Sea
LEFTVVDVIKKEKSRNPYSPFSNSLLLQDASSKLGFSPKYTNTIAQQLKDGISELGALITYHRTDSNRMKKEEIINLREIIKKEFGNEFLSNEQIDYKEKSKFVQQGHEAVTPTQLKVKPEEVKNKLNQDQFKLYELIWKRTIASQMAQSKSLETTYILNGGNFVLKSTGSVEIFKGFKKIYNYSDKNDDQQPLPNLEIGHTMNKSKVDIKQNFTKPPNRFSEAGLIKKLEELGIGRPSTYVSIFTRLEGNSYITIKNKS

SEQ ID NO: 157325 - protein, 303 aa, Unknown
  Bacterial polypetide isolated from the Sargasso Sea
SKAKNAQEAHECIRPTNINLTPKDIKQYITLEEFKLYEIIWQRAVSSQMASAILDQVAVDITNEEKKIVLRANGSTIKFPGMYRVYQEAKDDDKDEEKETILPIMSEGEILNLKEVEKTQHFTSPPPRYTEASLVKKLEELGIGRPSTYASIIKVLQDRDYVVLDKKRFNPHDRGRIVSIFLEKYFNQYVEYDFTADLENQLDEISDGKLDWKEVLRKFWETFKQICDETVGKSNREVIDVLDEALGPHFFPPNGADEKRKCPTCDNGRLGIKVGKFGGFIGCSNYPDCKYTVQFNQLNDKDG

SEQ ID NO: 157326 - protein, 285 aa, Unknown
  Bacterial polypetide isolated from the Sargasso Sea
PPPRYSEASLVKKMEELGIGRPSTYASIISVLSTRNYVELINKRFNPTDRGKLISAFLEKLFSKYVDYNFTADLENQLDEITSGKIEWVQVLDNFWKDFYENVGKVKEKRTREVLDLLNESLGALIFERDDKDAIDRKCKLCSNGELSLKNSFRGGAFIGCSNYPECKFTRPLSKAKAAAQYNLAEPKLLGQNEKGKDIYLKNGRFGPYLQYEKEKDELETKKKKGRKKKNENEHLQNVSIPKGIDVDSVDLDKAKYLCSLPKVLGQHPDNGQDITLNSGRFGPY

SEQ ID NO: 157327 - protein, 178 aa, Unknown
  Bacterial polypetide isolated from the Sargasso Sea
MSKKPLLIVESPTKVKTIQQYLGNDYDVISCVGHVKDLPRNNLGIDIDNDFKIKLTVLPEKKKFITELRKKSKTAERVMIATDPDREGEAIAAHLASEVPEEKLERVQFTEITKAGIAEGIKNIRSIDQDLVSAQTARRVIDRLVGYKVSPVLWGTLQSNMKIVSTNLSAGRVQSAAV

SEQ ID NO: 157328 - protein, 181 aa, Unknown
  Bacterial polypetide isolated from the Sargasso Sea
GCDGYLVETGVFKLKGYDGPLIECEKCGSDMQLKSGRFGKYFGCTNDACKNTRKLLKNGEAAPPKEDPVHLPELKCEKSDTYFVLRDGAAGLFLAAATFPKSRETRAPLVSELARFKDRIMPKFHYLAEAPAADASGNPTIIRWSRKTKQQYVMTEKEGKATGWSAWFENGRWVVTKEKEK

SEQ ID NO: 157329 - protein, 311 aa, Unknown
  Bacterial polypetide isolated from the Sargasso Sea
NFQEIDENEDEKILPDVNKEEVLIDDFIDEQHYTQPPPRYSEASLVKKLEELGIGRPSTYASIISVISNRGYADVINKRFFPTDRGKLLSAFLEKLFSKYVDYGFTAGLEDQLDDITTGKEEWIKVLDNFWKDFNTNVSNVKEKRTREVLDLLNESLGELIFEADENGKINRSCKLCNNGELSLKNSFRGGAFIGCSNYPACKFTRPLSKSKAKDQYALAEPRLIGQNDNGKDIYLKNGRFGPYLQYEMIDEEVPTKKKKKKKENDNLKNVSIPKGINIDQIDLGKSKYLCSLPKVLGQHPENGKDITVNS

SEQ ID NO: 157330 - protein, 247 aa, Unknown
  Bacterial polypetide isolated from the Sargasso Sea
MVIRNSSNGVFLGCSGYQNSGDEKCKETLNLISGDEAISIDDNEEVENLLIKKRCPKCETSMDNYLIDENRKLHVCGKNPDCDGYIVEDGQFRIKGYDGPTLECHKCGSEMQLKTGRFGKYFGCLNDNCGATRALQRNGEPKPITMEPIEIKDLKCIKCEDHYLLRDSMKGLFLAASQYPKNRETRAPKVSEINSLREEIIEACRFLPDKEKHLYLLDAPETDKDGNPYVIRYNRTEDTHYVASEKD

SEQ ID NO: 157331 - protein, 290 aa, Unknown
  Bacterial polypetide isolated from the Sargasso Sea
KFLSTDQLKLYDLIWSRALSSQMEAAKFDRKTITIVSDDNKNQFKCSGSTIKFDGFLKLTRIDNDEDEKIIPNVSKDEVITDNFIDEQHFTQPPPRYSEASLVKKLEELGIGRPSTYASIISVISNRGYADVVNKRFFPTDRGKLLSAFLEALFSKYVDYGFTAGLEEQLDDITAGKEEWIKVLDNFWKDFNTNVSNVKEKRTREVLDLLNESLGELIFEADKSGKINRKCKLCNTGELSLKNSFRGGAFIGCSNYPECKFTRPLSKSKSNDQIALLEPKLIGQNDSGKD

SEQ ID NO: 157332 - protein, 171 aa, Unknown
  Bacterial polypetide isolated from the Sargasso Sea
SRALSSQMQSAQFDRNTITITSDNKETILKTTGSVIKFDGYLKVYKDPKKEDGESILPKMSNGPVNIENLIDEQHFTQPPPRYSEASLVKKLEELGIGRPSTYASIISVISTRGYVEILNKRFHPTDRGKLITAFLEKLFSKYVDYNFTAGLENQLDKITSGKEGWIKVLE

SEQ ID NO: 157333 - protein, 274 aa, Unknown
  Bacterial polypetide isolated from the Sargasso Sea
KLEELGIGRPSTYASIISVISNRGYADIENKRFFPTDRGKLLSAFLEKLFSKYVDYDFTAKLEDQLDDITAGKENWIKVLEEFWRDFNLNVADVKEKRTREVLDMLNESLGSLIFEVDKDGKINRKCKLCDSGQLSLKNSFRGGAFIGCSNYPDCKFTRPLSKSKAAQQLTLAEPKLIGQNDIGKDIYLKNGRFGPYLQYEKELNDVEETKKKKKKLKKEDNNMKNVSIPKGIDIKSIDLDRAKYLCSLPISLGKNPENDKDITVNVGRYGPYL

SEQ ID NO: 157334 - protein, 165 aa, Unknown
  Bacterial polypetide isolated from the Sargasso Sea
ARFSEAALVKELEKKGIGRPSTYANIISTIQDRGYVEIQNRRFFVKKIGMIVTDRLVSSFDDIMDYSFTANFEDQLDRIASGELNWKEVLNSYYSAFQDDLSSAMDEENGMSPNLPTMTNINCPECKINKLTIRNASNGVFLGCAGYSLPAEMQCKKTLNSYFRR

SEQ ID NO: 157335 - protein, 191 aa, Unknown
  Bacterial polypetide isolated from the Sargasso Sea
MNVLIVESPSKAKSINKYLGSDFKVLASVGHVRDLSAKNDAIDTENDFQMKWETSDRGKKVIKEITDAAKKSENLYLATDPDREGEAIAWHVEKLLRDNSSLSKLNIHRVTFNEITKNAVLNSLKEPREIDENLVNAYLARRALDFLVGFTLSPVLWRKLPGSKSAGRVQSVALRNNSERELEIEKFIPQE

SEQ ID NO: 157336 - protein, 294 aa, Unknown
  Bacterial polypetide isolated from the Sargasso Sea
ELPKKDAIDPNNGYSMKYIVSPGKEDAVKKIKSDAKSAEQVILATDPDREGEAIAWHVADIISKAKFEQPDIKRAIFYEISEKAVKAAVVNPGEIAMDLVQSQETRRALDRHFGFSLSPLLWRLFPSNNHSAGRVQSPALRMIVEREREIEAFVPQEYWTISAKLEKDGEYDAKLSVFKEETIKKFTFDSTALVEEASEALVDSCKEGLVAKSITKKTIKRSPREPFRTSVLQQQASNRFGFTPKRTMQIAQSLYAREGGGLITYIRTDSIEIDEGKLPSVRDQVAFMFGDDFV

SEQ ID NO: 157337 - protein, 318 aa, Unknown
  Bacterial polypetide isolated from the Sargasso Sea
ANTDFRASGQIIVFPGYMKIYVEGKDNPEAELANKEKILPEISEDEILMCNHISSQSHQTKPPARFTEASLVKEMENNGIGRPSTFASILDTIVRRGYVEKTKSNLSPTYLGLAITQLLENHFSTLVDRDFTAKMENELDAISRGELEPIPFMNDFYFGNDAHLGLEKMLEKKVDIGKACTIPLPIGYDDTVEARIGKFGPYLRKEEDTRSIPQDIYIGDLTDDIIDSLFKDQRKDATLGRDPKTKEDILLKKGPYGHYVQLGESTKRKAIPKGTDIESVDLDLAVKLLSLPRTVGEHPETGVSITADYGRYGPYLKM

SEQ ID NO: 157338 - protein, 211 aa, Unknown
  Bacterial polypetide isolated from the Sargasso Sea
MNVLIVESPSKAKSINKYLGSDFKVLASVGHVRDLSAKNDAIDTENDFQMKWETSDRGKKVIKEITDAAKKSENLYLATDPDREGEAIAWHVEKLLRDNSSLSKLNIHRVTFNEITKNAVLDSLKEPRKIDKNLVNAYLARRALDFLVGFTLSPVLWRKLPGSKSAGRVQSVALRIISERELEIEKFIPQEYWSLQGEFRNKEDKTINSRL

SEQ ID NO: 157339 - protein, 254 aa, Unknown
  Bacterial polypetide isolated from the Sargasso Sea
MNVVIVESPSKAKSINKYLGSSFKVLASVGHVRDLSPKNDAIDTENNFNMKWQTSDRGKKVIKDITDVAKNSENLYLATDPDREGEAIAWHVENMLRENPKLNNVNIVRISFNEITKNAVLEALKEPRKIDENLVNAYLARRALDFLVGFNLSPVLWRKLPGSKSAGRVQSVALKIITKRELEIEKFNPEEYWSIKGMFSLNDGHEFEGRLIKYNNEKIEKLSIKNEKSAKEKLDFIEKGSFHVSKIEKKETKR

SEQ ID NO: 157340 - protein, 245 aa, Unknown
  Bacterial polypetide isolated from the Sargasso Sea
ALSSQMESAKFDRNTITIISDNNDTVCKASGSVLKFDGFLKIYNNPSKDDDENILPAMTKGPVNIEALLDEQHFTQPPPRYSEASLVKKLEELGIGRPSTYASIISTIANRGYAEILNKRFFPTDRGKLISAFLEKLFSKYVDYNFTAGLEDQLDEITTGKESWIKVLELFWKDFNNNVSEVKEKRTREVLDLLNDSLGALVFDKDNEGNIIRKCQLCSSGKLSLKNSFRGGAFIGCSNYPDCKF

SEQ ID NO: 157341 - protein, 146 aa, Unknown
  Bacterial polypetide isolated from the Sargasso Sea
MDYLVGFNISPILWTKLPGSKSAGRVQSVALKLITEREHEIESFKPEEYWTINADFKNSKDKNIFSKLNLIDDKKVERFSFKNKNDINKATENINKHEYFVKDVNSKIVKRNPSAPFTTSTLQQTSSGKFGFGASRTMQIAQRLYQ

SEQ ID NO: 157342 - protein, 193 aa, Unknown
  Bacterial polypetide isolated from the Sargasso Sea
MNSLVIVESGAKAKKIKGYLEANFKQDIWQVEACLGHIRDLPDEETAVNPENWSELKWKETPKGKKTIKALRKVCKDIDTLYLATDPDREGEAIAWHLHSDFKEKNLIENVDVKRITFTEITSSAIKAAIENPRSIDQDLVDAYLTRRILDHLIGFKVSPLLWRHISRAKSAGRVSSPTLRLICEKKMREMRM

SEQ ID NO: 157343 - protein, 74 aa, Unknown
  Bacterial polypetide isolated from the Sargasso Sea
MYLVVVESPAKAKTINKYLGKDYKVLASYGHIRDLPSKNGSVDPDNNFQMLWEIDSFSKKYLKEITDTAADSNK

SEQ ID NO: 157344 - protein, 92 aa, Unknown
  Bacterial polypetide isolated from the Sargasso Sea
KTINKYLGGNYTVLASYGHIRDLPSKNGSVDPEDKFKMIWEVDTFSKKYLNEIIDAAKKSKKIILATDPDREGEAIAWHVKEYLDEKKLLKD

SEQ ID NO: 157345 - protein, 319 aa, Unknown
  Bacterial polypetide isolated from the Sargasso Sea
YKLYDLIWSRALSSQMQSAQFDRNTITITSENKETILKTTGSVIKFDGYLKIYKDPKKEDGERILPKMSIGPVNVESLVDEQHFTQPPPRYSEASLVKKLEELGIGRPSTYASIISVISTRGYVEILNKRFHPTDRGKLITAFLEKLFSKYVDYNFTAGLENQLDEITSGKEGWIKVLEMFWKDFNQNVTEVKEKRTREVLDLLNESLGELIFDTTNDGKIDRKCSVCDNGVLSLKNSFRGGAFIGCSNYPNCKFTRPLSKAKAAEQIALPEPKSIGLNENGKEMFLKSGRFGPYIQYEITDDCEKKIKKRKSKKDNEK

SEQ ID NO: 157346 - protein, 337 aa, Unknown
  Bacterial polypetide isolated from the Sargasso Sea
LISSKDESIKFRASGSVLKFDGFLKLYKDIENKEEKDKILPEVKKDEILKINKIIDEQHFTEPPPRYSEASLVKKLEELGIGRPSTYASIITVLSTRNYVDLINKRFHPTDRGKLLAAFLEKLFSKYVDYNFTADLEDQLDEITSGKIKWIGVLENFWKDFNKNVQEVKEKRTREVLDLLNESLGELIFDTTSDGKIDRKCPLCKIGELSLKNSFRGGAFIGCANYPECKFTRPLSKAKAAEQNALPEPKSLGANDKGKDMFLKNGRFGPYIQYELSDEENNLPKKKKSKKEKEKPLRNVSIPKGISIDSIDLDRAKFLCSLPKILGQHPDTGKDIT

SEQ ID NO: 157347 - protein, 202 aa, Unknown
  Bacterial polypetide isolated from the Sargasso Sea
MKLYDLIWSRALSSQMSPAEFDRSSIQIASDDETITFNASGSIMKFDGFLKVYSLPENDDEAKNILPVVKIGDKVKIKDIIDEQHFTNPPPRYSEASLVKKLEELGIGRPSTYASIISVLSTRNYVELLNKRFHPTDRGKLLSAFLEKLFARYVDYNFTANLENQLDEITSGKTDYIRVLEDFWKDFYSNVGSVKTSEHVKF

SEQ ID NO: 157348 - protein, 282 aa, Unknown
  Bacterial polypetide isolated from the Sargasso Sea
MAEEASKALEDSCKKGLVAKSITKKTIKRSPREPFRTSVLQQQASNRFGFTPKRTMQIAQSLYAREGGGLITYIRTDSIEIDEGKLPSVRDQIAFMFGDGFVQPRNYKNKKEAKNIQEAHGAITPVDISLIPAEAKKVLKDDEFKLYQLIWQRTVASQMKDALFERTSIEFVPIGEEGLATFSFSDQELIFSGYLEATQEEVTNNKPPLINENDSIEFKGLIKTQHFTDPPPRYNDASMIKALEEKGIGRPSTYADILSKLTDRKYVWLKQKDMSPPIWVGL

SEQ ID NO: 157349 - protein, 293 aa, Unknown
  Bacterial polypetide isolated from the Sargasso Sea
RYSEASLVKKLEELGIGRPSTYASIISTIANRGYAEILNKRFFPTDRGKLISAFLEKLFSKYVDYNFTAGLEDQLDEITTGKESWIKVLELFWKDFNNNVSKVKEKRTREVLDLLNDSLGDLIFDKDNEGNVVRKCQLCGSGTLSLKNSFRGGAFIGCSNYPECKFTRPLSKAKAAAQAQLAEPKFLGKHENGNDIYLKNGRFGPYLQYEKILSNDEVEKNTKKKKKNKKPKPDVNELLRNVSIPKGLELKSIDLEKAQFLCSLPKTLGVNPDNQKEITLNTGRFGPYLKCEN

SEQ ID NO: 157350 - protein, 420 aa, Unknown
  Bacterial polypetide isolated from the Sargasso Sea
NILPEVKVGDKVTIKELIDDQHFTDPPPRYSEASLVKKMEELGIGRPSTYASIISVLSTRNYVELLNKRFHPTDRGKLLSAFLEKLFTKYVDYNFTADLENQLDEITSGKIDWVKVLEGFWKDFYSNVGQVKEKRTREVLDLLNESLGDLVFERDDNDAIDRKCKVCDTGELSLKNSFRGGAFIGCSNYPECKFTRPLSKSKASQQVNLSEPKLIGKNDLGKDIFLKNGRFGPYLQFEIEPTELNENKNKRKKSKKIKENENLKNVSIPKGLSIENVDLDKAKYLCSLPKIIGKHPDLNENITINIGRFGPYLKCSNKSARIESVDELFSIGLNRAITLISEAKPGRMSSSEIKNLGEHPEDKKPVRIMKGQYGPYIKYKSINATIPEDKDPAEISMEEALILIEKRKEYDKSKKSRRKK

SEQ ID NO: 157351 - protein, 271 aa, Unknown
  Bacterial polypetide isolated from the Sargasso Sea
MNVLIVESPSKAKSINKYLGSDFKVLASVGHVRDLSAKNDAIDTENDFQMKWETSDRGKKVIKEITDAAKKSENLYLATDPDREGEAIAWHVEKLLRDNSSLSKLNIHRVTFNEITKNAVLDSLKEPRKIDKNLVNAYLARRALDFLVGFTLSPVLWRKLPGSKSAGRVQSVALRIISERELEIEKFIPQEYWSLQGEFRNKEDKTINSRLTVYDGNKIDKLDIKNDSEATKIFKDVKSSKFIVGNITKKKARRNPYPAFTTSTMQIESSR

SEQ ID NO: 157352 - protein, 433 aa, Unknown
  Bacterial polypetide isolated from the Sargasso Sea
IFHEITKTAICNAVKNPTTINMNVVQAQQSRQILDIIVGYKISPVLWKNISWNSKKGLSAGRCQTPALRLIYDNQMEINENPGEKSYDTIGYFTSKNIAFNLNHSFKEEKQVESFLELSLQHKHIYSCSQPKKLSKSPPLPLTTSGIQQLANNELRISPKDTMRICQKLYEAGLITYMRTDSKTFSKKFIESVKEYVNKTWDESYINTKADELSIRKTNTKEVTQDAHEAIRPTDINKNKIGAPFHPREQKLYSLIWKISCSACMSNAILNSISVAITAPLKHQYKYNTHIVTFLGWKILDPPNDTSDSYNYCLNISKNKQINYNKIQINMGLKKIKLHYTEAKLVNLLEDQGIGRPSTFSSIVEKIQEREYVKLMDVEGKKISCTNYELIEKDISKKIEEKEFGSEKKKLVIQPMGIIVLEFLIKYYDELFS

SEQ ID NO: 157353 - protein, 250 aa, Unknown
  Bacterial polypetide isolated from the Sargasso Sea
MNVLIVESPSKAKSINKYLGSDFKVLASVGHVRDLSAKNDAIDTENDFQMKWETSDRGKKVIKEITDAAKKSENLYLATDPDREGEAIAWHVEKLLRDNSSLSKLNIHRVTFNEITKNAVLDSLKEPRKIDKNLVNAYLARRALDFLVGFTLSPVLWRKLPGSKSAGRVQSVALRIISERELEIEKFIPQEYWSLQGEFRNKEDKTINSRLTVYDGNKIDKLDIKNDSEATKIFNDVKNSTFTGGKHIKK

SEQ ID NO: 157354 - protein, 224 aa, Unknown
  Bacterial polypetide isolated from the Sargasso Sea
MKSLVIVESGAKAKKIKGYLDSNFPDKDWQVEACVGHVRDLSDKENAVDPGDWSNLKWEFSSKGKKVMKDLRKFCKESQLLYLATDPDREGEAIAWHLLSDFESKKLIKDVDVKRVTFNEITSSAIKKAIESPREIDQDLVDAYLTRRILDHLIGFKVSPLLWRHISRAKSAGRVQSPTLRLLCEKEDQRDLHVPEEYWPFESSFDFLGTSFDAKLTPNFRKKR

SEQ ID NO: 157355 - protein, 77 aa, Unknown
  Bacterial polypetide isolated from the Sargasso Sea
MGKSLVIVESPAKAKTINQYLGKEYVVRSSVGHVRDLPVSGSKKKVDPKKRAEQAAKTRKMSPAQKARYRKQKARRD

SEQ ID NO: 157356 - protein, 394 aa, Unknown
  Bacterial polypetide isolated from the Sargasso Sea
MNRLFIAEKPSVARAIAEVLGVTRKGNGYIECGEDTVTWCFGHMLEQAEPDYYTPADAPARDGKKIWRVEDLPIIPQDWILHPKADAKTQLEQIGVLIKRAQVIVNAGDPDREGQNLIDETLIYHANSSPVLRYWSSGIDQVSVERALNSLFDNADKKTFGDASIGRQRADWLIGMNLSRAFTLRAERGGSRALITVGRVQTPVLSMVVNRDREIENFTPIPFHTLRATLQSSDGEFNAKWKAKEDQAGLDSEGRLTNTEIADALVTSMTGAAASITEAKSTAKKAHHPLTYSLSNLTVTASKKYGYSAQNVLDTCQALYEKHKLTTYPRTDCGYLPESQFTDVPGILESLKKVNPELIPIIDKADPKLKSKTWDDSKLTAHHGIIPTHEVQTK

SEQ ID NO: 157357 - protein, 192 aa, Unknown
  Bacterial polypetide isolated from the Sargasso Sea
EAINQVRSFVTDNYGENYLPDSPRVYKSKAKNAQEAHECIRPTNIYLTPKDIKQYITLEEFKLYEIIWQRAVSSQMASAVLDQVAIDITNEDKKIVLRANGSTIKFPGMYKVYQEAKDDDKDEEKETILPIMNEGESLNLKEVEKTQHFTSPPPRYTEASLVKKLEELGIGRPSTYASIIKVLQDRRLCYFR

SEQ ID NO: 157358 - protein, 334 aa, Unknown
  Bacterial polypetide isolated from the Sargasso Sea
MNSLVIVESGAKAEKIKSFLNKSFPDQNWSVEACVGHVRDLAEKEDAVDPNDWKNLKWEFSSKGKKVMKELRKLCKESDTIYLATDPDREGEAIAWHILNDFEEKGLLEGKKVYRITFNEITPAAVESSVKNPRDTVDFNLVDAYLARRILDHLIGFKVSPLLWRHVSRAKSAGRVQSPTLKIICEKENQRDHHIPEEYWPFLATFDYQGSSFEASLNKISDINIKKGLKDEEEVNRTKIDLDASNFLLTKIETKLQTSNPQPPFRTSSMIASANSQFGMSAKQTTQAAQSLFLAGHITYPRTDNISIAGSEIDDQDQYPGSPLEEIRNYILVN

SEQ ID NO: 157359 - protein, 273 aa, Unknown
  Bacterial polypetide isolated from the Sargasso Sea
GMYRVYKEAKDDDKDEEKETILPIMNEGEALDLKDVIKNQHFTMPPPRYTEASLVKKLEELGIGRPSTYASIIKVLQDRDYVILDKKRFNPHDRGRIVSIFLEKYFNQYVEYDFTADLENQLDEISDGKLDWKDVLRKFWETFKQLCDDTVGKSNREVIDVLDDALGAHFFPPEGKDESRKCPTCDNGRLGVKVGKFGGFIGCSNYPDCKYTVQFNQLNDKDGATLSGPKEIGIYPETNEMITLRKGPYGFYMQVGEGTPEKKPKRVSIPQEF

SEQ ID NO: 157360 - protein, 263 aa, Unknown
  Bacterial polypetide isolated from the Sargasso Sea
MSSNIVIVESPAKAKTIEKYLGKDFKVISTVGHLRNLPSKNGVDVSNNYQMKYEYIERDHNKPKQIVREIKKNLKGAERLYLATDQDREGEVIAWHLTDILEEEKALDGIEILRIVFSEITKKAILDSIDKPRKLSLDLIHAQFARRSIDYLFGMNISPLLWGIGIRKGSAGRVQSPALKMIVEREEEIRKFIPIEYWSIQAQLLKDKQGFISSLVNIKNEKLDKFFIKNKEQAEDIKNNIIDLANKELAVSKITKKQKKRQP

SEQ ID NO: 157361 - protein, 41 aa, Unknown
  Bacterial polypetide isolated from the Sargasso Sea
MSKNLVIVESPAKARTVGRFLGKSYVAKASMGHIRDLPKKT

SEQ ID NO: 157362 - protein, 257 aa, Unknown
  Bacterial polypetide isolated from the Sargasso Sea
AARKYISENFTKDHLPKDPNLYGDNKNAQAAHEAIRPSGDIFTEPKELLGKYKEDSDEYKLYSLIFNITVASQMTDAKGVTKSIEIEVQDEAFGPIILGISGTTWTFGGYRDLIKDLSEKSQELPDLTEGDLINIINSKSEEKFTTPPNRYSSTSLINKLEELGIGRPSTYVSIIESITSVFINSESSLKPRILAIAMINNFMKPYFDLYIDYEFSKLMEDELDKILESKNPEEAKVKFLEDSYTKIKKHIEGYENA

SEQ ID NO: 157363 - protein, 327 aa, Unknown
  Bacterial polypetide isolated from the Sargasso Sea
MNNILHNHHQGFSEASLVKKLEELGIGRPSTYASIISVISNRGYADILNKRFFPTDRGKLLSAFLEKLFSKYVDYGFTAGLEDQLDNITSGKEEWIKVLDNFWKDFNLNVANVKEKRTREVLDLLNESLGTLIFESDENGKVQRKCKLCSTGELSLKNSFRGGAFIGCSNYPECKFTRPLSKSKANDQYALAEPKFIGKNDNEKDIYLKNGRFGPYLQYEIEADQMSIKKKKKKKENENFKNVSIPKGINIDQIDLEKAKYLCSLPKVIGQHPENGKDITINSGRFGPYLKCENKSARLENVDELFTIGLNRAITLIAEAKPGRISS

SEQ ID NO: 157364 - protein, 215 aa, Unknown
  Bacterial polypetide isolated from the Sargasso Sea
INQVRGFVIDNYGANYLPEVPRVYKSKAKNAQEAHECIRPTNIYLTPKDIKQYITLEEYKLYEIIWQRAVSSQMASAVLDQVAVDITNEDKKIVLRANGSTIKFPGMYKVYQEAKDDDKDEEKETILPAMSEGESLNLKEVEKTQHFTSPPPRYTEASLVKKLEELGIGRPSTYASIIKVLQDRDYVILDKKRFNPHDRGRIVSIFLEKYFNQIC

SEQ ID NO: 157365 - protein, 280 aa, Unknown
  Bacterial polypetide isolated from the Sargasso Sea
MNVVIVESPSKAKSINKYLGDSFKVLASVGHVRDLSAKNDAIDTENDFQMKWETSDRGKKVIKEITDVAKKSENLYLATDPDREGEAIAWHVEKLLRDNSSLSKLNIHRVTFNEITKNAVLDSLKKPREIDENLVNAYLARRALDFLVGFTLSPVLWRKLPGSKSAGRVQSVALKIISERELEIEKFIPQEYWSLQGKFTNKEEKIINSRLTVYEGNKVDKLDIKDEAQATKIYNNIINSNFTVGNITKKEAKRNPYPAFTTSTMQIESSRKLGLSANQT

SEQ ID NO: 157366 - protein, 374 aa, Unknown
  Bacterial polypetide isolated from the Sargasso Sea
DSITDLRKMINNEYGDSYCPENLKIYKSKVANAQEAHEAIRPTDVKRMPKTIKAYLDDDCYKLYDLIWKRTVSSQMASAIINKTIIDVESINKTDIQNFVSLRANGSVIKFDGFLKIYNEGVDEKNSSEMDDNIIPQVNINEKLIAEKNTSEQHFTQPQPRYTDASIIKKLEELGIGRPSTYASILEKLQDRGYVFKDGSRYVADDIGRIVTSFLENYFEKYVEYSFTADLEKKLDLVSEGKLDWKILLKEFWEQFKVAIDNTSEIQRTDVIQKIDLALENHFFNLNDEGKVDRVCPTCSNGSLSLKVGKFGSFIACSNYPECKYTRKLSENDGDELNGSSGFDGEKSFGFDPVTNDEVYLKKRTLWHLFATWK

SEQ ID NO: 157367 - protein, 429 aa, Unknown
  Bacterial polypetide isolated from the Sargasso Sea
DDDENILPTVSKGPINIEALIDEQHYTQPPPRYSEASLVKKLEELGIGRPSTYASIISTIANRGYAEILNKRFFPTDRGKLISAFLEKLFSKYVDYNFTAGLEDQLDEITTGKESWIKVLKLFWKDFNNNISEVKEKRTREVLDLLNDSLGELIFDKDNEGNVVRKCQLCSSGTLSLKNSFRGGAFIGCSNYPECKFTRPLSKAKAAAQAQLAEPKFIGKHKNGNDIYLKNGRFGPYLQYEKIQSDIEVEKISKKKKKTKKLKSDVNELLKNVSIPKGLELESINLEKAQFLCSLPKSLGINPDNQKEITLNVGRFGPYLKCENKSARIENVEEIFSIGLNRAIILIAEAKPGRISSSMIKDLGEHPEDKKPVRVMKGQYGPYIKYKSINATIPEEKDPTELTMEEALILIEKRKEYDKSKKSKGKKKK

SEQ ID NO: 157368 - protein, 523 aa, Unknown
  Bacterial polypetide isolated from the Sargasso Sea
YIRTDSIEIDEGKVPAVRSQVASMFGEDFVQPRNYKNKKEAKNIQEAHGAITPVDISLVPADAKKILKDDEFKLYQLIWQRTVASQMKDAIFERTSIEFVPTGDESLATFSFSDQELIFSGYLEATQEEVTNNKPPLINENDAIGFKELVKTQHFTDPPPRYNDASMIKALEEKGIGRPSTYADILSKLTDRKYIWLKQKRYEPSDMGRLVSNFLNERFGGYISDEFTSNMENNLDEISSGQRSKQDVLNAFWSPLIDTVDEVSGVVTRKDVNPQRPLGSHPETGRPVFARMTKNGPAVQVGDMEKDEKLEWAAIKEGQSLFSINLETACELLNKPSENILGYHPETNEPVIVREARYGPTVQLGSKEDGNKPRYVGLLKTDTIEEMTFERALDYLSLPKELGVDPESGEKILVTIGPYGPYFKRGSKNFRGRKGLDPFSVDLEEALSSISSSKGSGALKTFDDSPVKIVDGRWGAYVTDGKKNASIPKDKDPESLELQDCLELLEKAPAKKRGKRKSKKKTK

SEQ ID NO: 157369 - protein, 70 aa, Unknown
  Bacterial polypetide isolated from the Sargasso Sea
MSKLVIVESPAKAKTIQKYLGDGYTVLPTIGHIRELPKKDAIDPKNGYSMKYIVSPGKEDAVKKIKSDAK

SEQ ID NO: 157370 - protein, 362 aa, Unknown
  Bacterial polypetide isolated from the Sargasso Sea
VRFDGFLKVYQVQETDEDAKNILPEVKVGEEISILKLSDEQHFTDPPPRYSEASLVKKMEELGIGRPSTYASIISVLSTRNYVELINKRFNPTDRGKLISAFLEKLFSKYVDYNFTADLENQLDEITSGKIEWIQVLDNFWRDFYENVGKVKEKRTREVLDLLNESLGALIFERNNDGNIDRSCKLYNKTCVSGEGTLSLKNSFRGGAFIGCSNYPECKFTRPLSKAKAAAQYNLAEPKLLGQNEKGKDIYLKNGRFGPYLQYEKEKDELEKKKKKGRKKKNENEHLQNVSIPKGIDVDSIDLDKAKYLCSLPKVLGQHPDNGQDITLNSGRFGPYLNVKINLHGFEILKIFFLSEIIGGIH

SEQ ID NO: 157371 - protein, 282 aa, Unknown
  Bacterial polypetide isolated from the Sargasso Sea
MRSLVIVESGAKAKKIKGYLDSNFPDIEWKVEACVGHVRDLADNENAVDPYDWNNLKWEFSSKGKKVMRDLRKLCKESNLLYLATDPDREGEAIAWHLLSDFENKKLTKDIDVKRVTFNEITSSAIKKAIESPREIDQDLVDAYLTRRILDHLIGFKVSPLLWRHVSRAKSAGRVQSPTLRILCEKEDERDLHIPEEYWPFESSFDFLGTAFEAKLTQISERSINKEPLKDEGEVKNLIDGLGTASFKLRNIESKAQSSSPKPPFRTSTLQMSAASSLGLQQ

SEQ ID NO: 157372 - protein, 421 aa, Unknown
  Bacterial polypetide isolated from the Sargasso Sea
MLPAKLKQTSVIISNTDTDFRASGQIIVFPGYMKIYVEGKDNPDAELANKEKLLPAIVVSEELICSEIVSQIHKTKPPARFTEASLVKEMEMNGIGRPSTFASILDTIVRRGYVEKTKSNLSPTYLGLAITQLLENHFSTLVDKDFTAKMENELDAISRGELEPIPFMENFYFGNKKHLGLEKMLEEKVDIGKACTIPLPIGYDDIVEARIGKFGPYLRKEEDTRSIPQNIFVGDLTDDIIDSLFKDQREDEVLGKDPESKEDILLKKGPYGHYVQLGETTKRKAIPKGTEIDSVDLELAIKLISLPRVVGKHPDTGVDITADYGRYGPYLKMDKSNARLIGPATPLTVTVDEAVELLSKSKKGSSELKTLGKHPDTGEELVLKEGRYGPYISDGKLNAALRSGNDPNAITLDEAVELINL

SEQ ID NO: 157373 - protein, 379 aa, Unknown
  Bacterial polypetide isolated from the Sargasso Sea
FTQPPPRYSDASLIKKMEELGIGRPSTYASILRTLVDREYVQKEKNRFIPHERGRIVTAFLNNFFGKYIEYDFSAELEKQLDIVSDGKLDYKIFLREFWDNFKIHLDKMHDLNREKITKAIENELSELFFPNNKNNKKSNEFSKKCPNCPDGNLGLSIGKYGAYISCSNYPECRYNRQTANNENDDENDNNNLFQPENDGILGVDNETGLNVIIKKGPYGLYLQLGENKKPKRTSIPKLIDPKSIDLDKALKLLSLPRNIGLHPETSKEIIAGIGRYGPYIKYDINFISLPADETVINIGINHAVILISENSQKLGKVLGKHPMDNVEVLAKSGRFGPYVEHGKNRATLPKTLNLSSVTLEDAIELINKKLLKSKKNKK

SEQ ID NO: 157374 - protein, 172 aa, Unknown
  Bacterial polypetide isolated from the Sargasso Sea
MSKNEKLLIIVESPSKTKTISKYVDNASVIASVGHFKDLPKKDMGIDIDNNFAMQIESMPDKKKFLSQLKKEVKIADRILIATDPDREGEAIAADIASEIRGDIERVEFTEITKQAVLEAVNNSRKINYDLVDAQRARRAIDRIVGFSFSPVLWKTLRSLKNKGLSAGRVQS

SEQ ID NO: 157375 - protein, 363 aa, Unknown
  Bacterial polypetide isolated from the Sargasso Sea
RTRKGRVLNRELAELVQRKTSHQPAVWEQVQQQPKKQYAPLPFSLSALQIDAAKLYGMTAQQVLDTCQQLYERHQLITYPRSDCRHLPEQQFCQSAAVCRAIVANSPELAEMQQQASISLRSKAWDDSKITAHHAIIPTDKALKSASLNSFEAKLYWLIARQFLWQFFPPYCYLEQHALIKIAGGLFKAQARLEQSLGWKAFYKTSQKEEQDEDSDEQQSLPPLTKGQQLQSGQSELLSKQTQPPAYFTDATLLAAMTGISRFVTDPELKRILKETAGLGTEATRAGILELLFKRGYLQRQGKQIRASQLGRVFIQSLPQRITAPDLTALWEAQLEQICHQQQDYPEFMAQLQPEIIRLVQQA

SEQ ID NO: 157376 - protein, 351 aa, Unknown
  Bacterial polypetide isolated from the Sargasso Sea
KGIGRPSTYASIISVLQDRNYVRLDKRYFYPEDKGRLVTSFLESFFRQYVGYDFTAQLEENLDKVSNGEMNWKDFLNNFWGEFNSCSEKALELRTRDILDQLNESLGNHIFKDDKGEINRKCPKCEEGILSLKTSRNGAFIGCSAYPDCKYTRTFGSNSNVEPRIIGVHPETNKEINLLIGRYGPYLEIQADDPDAKPKRSTIPKTIDPDEVNLELALNLLSLPKIIGIHPEDGNEIKAGLGRFGPYVVHEGIFASLTNVEELFSIGLNRAIDLIEEKKANPGRGRASKTIKELGKHPKDEKDIVLMEGRYGPFVKHGKVNASIPKDINLDDVNLELAVELIKNRKKKKKK

SEQ ID NO: 157377 - protein, 634 aa, Unknown
  Bacterial polypetide isolated from the Sargasso Sea
MPAAETIVAACRGQIGTVTEESKPSTQLSPALFDLTSLQREANGRFGFSAKNTLGLAQALYEKHKVLTYPRTDARALPEDYMDTVKQTLGMLKESNNYLPFAKQVLDKGWVKPNKRIFDNSKISDHFAIIPTLQAPKNLSEPEQKLYDLVVKRFLSVFFPAAEFRVTTRITEVVGHHFKTEGKVLVEPGWLQIYGREIGGEDANLVPVQKDEKVKTDKIAAQQLVTKPPARYNEATLLSAMEGAGKLVEDDELREAMAAKGLGTPATRAAIIEGLLGEKYLVREGRDLIPTAKAFQLMTLLRGLGVKELTAPELTGEWEYKLSQMERGNLPRDAFMQEIARMTQTIVKRAKEYDSDTIPGDYATLQTPCPNCGGQVKENYRRFACSKCEFSISKIPGGRQFEIPEVEELLQNKTIGPLSGFRSKMGRPFSAILKLSLDDEIKNYKLEFDFGQDSGGEDGEPPDFSDQQPVGACPKCKGRVFEHGMSYVCENSVANPKTCDFRSGKVILQQEIAREQMAKLLEEGRTDLLTNFKSSRTGRNFKAFLVKQNDGKIGFEFEKKEPSAKTAAKTAAAKAAAKAAPESDDEDASVAVKAVPATKKVAAKKAPATKAAATKTAAAKKAPAKKTAARKTGS

SEQ ID NO: 157378 - protein, 473 aa, Unknown
  Bacterial polypetide isolated from the Sargasso Sea
ITLEEFKLYEIIWQRAVSSQMASAILDQVAIDITNKDKKIVLRANGSTIKFPGMYKVYQEAKDDDKDEEKETILPIMNEGEILNLKEVEKTQHFTSPPPRYSEASLVKKLEELGIGRPSTYASIIKVLQDREYVILDKKRFNPHDRGRIVSIFLEKYFNQYVEYDFTADLENQLDEISDGKLNWKEVIRKFWETFKQLCDETVGKSNREVIDVLDEALGPHFFPPNGTDEKRKCPTCENGRLGIKVGKFGGFIGCSNYPDCKYTVQFNQLNDKDGTSLSGPKEIGIYPETGEMITLRKGPYGFYMQIGEGTKEKKPKRVSIPKNFEPNEIGLNTAIQLMGLPRKLGFHPETNKTVSAGIGMYGPYILHDKKYKALEKTDNILDIELERAIELIAKPTQRGNATLKTFGEHPTEKKNITAHDGKFGPYVKCGKINASILGDQTIDSLKLEDAIRLIDERKTKMGSKKKKKKVKN

SEQ ID NO: 157379 - protein, 310 aa, Unknown
  Bacterial polypetide isolated from the Sargasso Sea
DAVVAFRDYIKKEIGNEYCPESALNYSGKKAKNAQEAHEAIRPTDVIRTPQSVKKYLSTDQNKLYDLIWSRALSSQMQSAKFDRNTITIKSNNSDTVCKASGSVLKFDGFLKIYNNQGKDDDENILPSVSKGLVNIESLIDEQHFTQPPPRYSEASLVKKLEELGIGRPSTYASIISTIANRGYAEILNKRFFPTDRGKLISAFLEELFSKYVDYNFTAGLEDQLDEITTGKESWIKVLELFWKDFNNNVTEVKEKRTREVLDLLNDSLGDLVFDKDDKGNIVRKCQLCNSGTLSLKNSFRGGAFIGCSN

SEQ ID NO: 157380 - protein, 68 aa, Unknown
  Bacterial polypetide isolated from the Sargasso Sea
MSKSLVIVESPAKAKTISKYLGSEYIVQSSVGHIRDLPKKGTGITKRSSIPKNISPEEKARLKAVNDR

SEQ ID NO: 157381 - protein, 292 aa, Unknown
  Bacterial polypetide isolated from the Sargasso Sea
AHEAIRPTDIERNPDSLKKYLSTDQFKLYNLIWSRALSSQMESAKFDRKTIMIESKDKSNIFKASGSVIKFDGFLKLYKIENDDENEKILPDVSKGLVNIDNFIDEQHFTQHPPRYSEASLVKKLEELGIGRPSTYASIISVISNRGYADIVNKRFFPTDRGKLLSAFLEKLFTKYVDYGFTANLENQLDDITSGKEDWVKVLEQFWSDFNKNVSSVKDKRTREVLDLLNESLGELIFEVDNNGKIDRKCKLCDKGELSLKNSFRGGAFIGCSSYPECKFTRPLSKSKAANN

SEQ ID NO: 157382 - protein, 308 aa, Unknown
  Bacterial polypetide isolated from the Sargasso Sea
SVALRLLTEREHEIEIFKPEEFWTLNLNFLTKENLNINTSITQLDGKKIEKFTFKNKDDINNALDLIKNKKYNITDITSKIYTRNPSGPFTTSTLQQTSSSKLGFGASRTMQIAQRLYQGIDIDGETVGLITYMRTDGTNISKDAVTTFRNFITQNYGETYLPPLPLNYSGKKAKNAQEAHEAIRPTEITRVPEEMKKYLSIDQYKLYNLIWSRSLSSQMESAKFDRKTITITSEDNKNICKASGSTLNFDGFLKVSRLEENSGDENILPDVDKGNVEFKDHTDEQHFTQPPPRYSEASLGKKLEEIR

SEQ ID NO: 157383 - protein, 82 aa, Unknown
  Bacterial polypetide isolated from the Sargasso Sea
MSKSLVIVESPAKAKTISKYLGKEYIVKSSVGHIRDLPKGKSKAKRQNSIPKDASPEEKARLKIEQERRRIIRRMGVNSLID

SEQ ID NO: 157384 - protein, 307 aa, Unknown
  Bacterial polypetide isolated from the Sargasso Sea
MSKLVIVESPAKAKTIQKYLGDGYTVLPTIGHIRELPKKDAIDPKNGYSMKYIVSPGKEDAVKKIKSDAKSAEQVILATDPDREGEAIAWHVADIITKAKFEQPDIKRAIFYEISEKAVKAAVGNPGEIAMDLVQSQETRRALDRHFGFSLSPLLWRLFPSNNHSAGRVQSPALRMIVEREREIEAFVPQEYWTISAKLEKDGEYDAKLSVFKEETIKKFTFDSTTLVEEASKALEDSCKKGLIAKSITKKHIKRSPREPFRTSVLQQQASNRFGFTPKRTMQIAQSLYTREGGGLITYIRTDSIEI

SEQ ID NO: 157385 - protein, 319 aa, Unknown
  Bacterial polypetide isolated from the Sargasso Sea
QMQQKNSENLYLATDPDREGEAIAWHVEKLLRNNSSLSKLNIHRVTFNEITKNAVLDSLKEPREIDENLVNAYLARRALDFLVGFTLSPVLWRKLPGSKSAGRVQSVALRIISERELEIEKFIPQEYWSLQGEFRNKEDKIINSRLTVYDGNKVDKLDIKNESEATKIFNDIKNSTFTVGNIIKKEAKRNPYPAFTTSTMQIESSRKLGLSASQTMRTAQRLYEGTDIKGETTGLITYMRTDSVVMSKEAIKQVRAFVTDNYGANYLPEAPRVYKSKAKNAQEAHECIRPTNIYLTPKDIKQYITLEEYKLYEIIGKER

SEQ ID NO: 157386 - protein, 321 aa, Unknown
  Bacterial polypetide isolated from the Sargasso Sea
STLQQEASRKLRFSARKTMRAAQGLYEQGFITYMRTDSTALSDEGMKASRSEILDRFGKEYLPEKGNIYSTKVKNAQEAHEAIRPSGIKFKSIDALKKSTDDDGAKLYDLILKRTLASQMKSAKINQVTATILNQKSEFRANGKTILFPGYMAAYVESTDKRSGVAEDKETVLPKLEANQSLECNSLNFDEHSTKPPARFTEASLVKELEEKGIGRPSTFANIIDTIVRRTYVNRERSKLTPTFLGLAVTQLLENHFNSLVDDKFTATMEDGLDAISRGELESLPFMKEFYFGSDSQSGLVNMLDDKVDIGKACSVQLEDK

SEQ ID NO: 157387 - protein, 266 aa, Unknown
  Bacterial polypetide isolated from the Sargasso Sea
QQAVFNQVALRLVTEREHEIELFKPQEFWTISCDFKNHDKIIKSKLSIFNNEKIEKFSFKKKAESENALKVIKSKSYQITDVSSKVYKRNPLAPFTTSTLQQTASGKFGFGASRTMQIAQRLYQGIDIEGEAVGLITYMRTDGTQISKDAIEDFRNFINKIHGKEYLPENPNSYIGKKAKNAQEAHEAIRPTDITKKPSDMKKYLSTDQSKLYELIWNRALSSQMTPAEFDRKSILIESPDKKIGFKANGSTIKFEGFLKVYKFEE

SEQ ID NO: 157388 - protein, 247 aa, Unknown
  Bacterial polypetide isolated from the Sargasso Sea
IYNLIARQYLMQFCADAVFRKCVIELDIAKGKFVAKARFLAEAGWRTLLGNKERDEDNDGTPLPVVAKDDELLCEKGEVVERQTQPPRHFTDATLLSAMTGIARFVQDKDLKKILRATDGLGTEATRAGIIELLFKRGFLVKKGRYIHSTDAGKALFHSLPEMATRPDMTAHWESILTQISETQCRYQDFMQPLVGTLYQLIDQARSTPVRRFRGIAAPGGSGGDKKKGAPRKRPAKKSPPSEEAGL

SEQ ID NO: 157389 - protein, 260 aa, Unknown
  Bacterial polypetide isolated from the Sargasso Sea
QEAHEAIRPVDLSLKPKDVKLHLSSDQFRLYSLIWQRTISSQMASADIAKTTLKIEAGFEKEYLFISQGHRVVFPGFLIAYSREDSNQENSIVGKDLILPSLKQNQKLETKNPKKPLKMEQLYTKPPPRYSEASLVKKLESEGIGRPSTYAPTISTIQERGYVEITPEKKLKPTSIGEVVTDFLTNHFSEIINLGFTAKIERNFDRIAQGEEDWVDMMSKFYKPFNERVEEKDESVSRAEVLKRRIFDEPDPKSGKQVSV

SEQ ID NO: 157390 - protein, 304 aa, Unknown
  Bacterial polypetide isolated from the Sargasso Sea
YGRKLPGSKSAGRVQSVALRIISERELEIEKFIPQEYWSLQGEFRNKEDKTINSRLTVYDGNKIDKLDIKNDSEATKIFNDVKNSTFTVGNITKKEARRNPYPAFTTSTMQIESSRKLGLSASQTMRTAQRLYEGTDIKGETTGLITYMRTDSVIMSNEAINQVRSFVTENYGANYLPDSPRVYKSKAKNAQEAHECIRPTNIYLTPKDIKQYITLEELKLYEIIWQRAVSSQMASAVLDQVAIDISNEDKKIVLRANGSTIKFPGMYRVYQEAKDDDKDEEKETILPIMDEGESLNLKEVKKH

SEQ ID NO: 157391 - protein, 302 aa, Unknown
  Bacterial polypetide isolated from the Sargasso Sea
LLKSFTQGVDIEGETIGLITYMRTDGTNLSKDAVVAFRDYIKKEIGNEYLPESALNYSGKKAKNAQEAHEAIRPTDIIRTPQSVKKYLSSDQNKLYDLIWSRALSSQMQSAKFDRNTITITSNNNDTVCKASGSVLKFDGFLKIYNNQGKDDDENILPSVSKGLVNIESLIDEQHFTQPPPRYSEASLVKKLEELGIGRPSTYASIISTIANRGYAEILNKRFFPTDRGKLISAFLEKLFSKYVDYNFTAGLEDQLDEITTGKESWIKVLELFWKDFNNNVAEVKEKRTREVLDLLNDSLGD

SEQ ID NO: 157392 - protein, 327 aa, Unknown
  Bacterial polypetide isolated from the Sargasso Sea
KQLTILKKLIKQASTLVHAGDPDREGQLLVDEVIEQAKISKAKKQGIQRLLISDLNLAAVKKALGSMHSNRDFIPLSVSALARSRADWLFGMNLTRAYTLAGQKAGFGNVLSVGRVQTPILGLVVNRDTEIANFISKPFYEVLASLVTPEKQVFKAKWVPSKACEPYQDEEGRVLNKALAENVASRITNQTGEVTALEQKQKKQSAPLPYNLSALQIDAAKAFGMAAQQVLDICQTLYERHKLITYPRSDNRYLPKEHHLDAPSILKAIATNDGQKVELVNGANDKQRSKCFNDSKVAAHHAIVPTAKQLKSASLAKDEAKSVSAYL

SEQ ID NO: 157393 - protein, 62 aa, Unknown
  Bacterial polypetide isolated from the Sargasso Sea
MNLVIVESPAKAKTINKYLGDNYTVLASYGHIRDLPSKNGSVDPDQNFKMKWEVDSFSKKIS

SEQ ID NO: 157394 - protein, 292 aa, Unknown
  Bacterial polypetide isolated from the Sargasso Sea
VKRVVFSEITKNAVKNGIANPRDIDTDLVDAYLARRALDYLFGFNLSPVLWRKLPGAKSAGRVQSVALRLICERELAIESFEPDEYWKIKGNVKFEDGFNIDANLLSVGGKKVEKFSFKSEDDAKKIVNLFSDNKFEIIDITKKPASRNPEPPFSTSTLQQTASSIYGFGASRTMQIAQKLFQGIEISGETVGLITYMRTDSTDISKEAIETYRNYLKKNFENGYCPNEVRTYKSKKAKNAQEAHEGIRPTDIELTPDQVSKYLDTDSLKLYSLIWKRALASQMSSAVLKEQ

SEQ ID NO: 157395 - protein, 233 aa, Unknown
  Bacterial polypetide isolated from the Sargasso Sea
MILYIAEKPSLGRAIADVLPKPHKKGDGFIEDAQGNCVSWCVGHLLEQAEPDAYNPEFKSWKFEHLPIVPEKWQLKPKAATRSQLTVLKKLVKQADTLVNAGDPDREGQLLVDEVIAYLGVTGDKLQQTQRLLISDLNPQAVKRALSQLRSNREFIPLSTSALARSRADWLYGMNMTRAYTIQGKKVGYQGVLSVGRVQTPLLGLIVRRDEEIANFQSKPFYEVLAHLVTDKD

SEQ ID NO: 157396 - protein, 298 aa, Unknown
  Bacterial polypetide isolated from the Sargasso Sea
YINEKYGKEYLPKEPLNYSGKKAKNAQEAHEAIRPTDIKRSPNDLKKYLSTDQQKLYNLIWSRALSSQMEQAKFDRKTIIIESNDSKNIFKSTGSVVKFDGFLKVYKAENIDDDDKILPNVSKGPINIENFVDEQHFTQPPPRYSEASLVKKLEELGIGRPSTYASIISVIANRGYAEIINKRFFPTDRGKLISAFLEKLFSKYVDYDFTANLENQLDDITSGKEDWLKVLEQFWIDFNENVINVKEKRTREVLDLLNESLGNLIFDTDKEGNIDRNCKNSKNGTLSLKNSFRGGAFI

SEQ ID NO: 157397 - protein, 89 aa, Unknown
  Bacterial polypetide isolated from the Sargasso Sea
MNLVIVESPAKAKTINKYLGDDYKVLASYGHIRDLPSKNGSVDPDQDFKMEWEVDSFSKKYLKEITDAAKDSSKIILATDPDREGEAIA

SEQ ID NO: 157398 - protein, 269 aa, Unknown
  Bacterial polypetide isolated from the Sargasso Sea
FTTSTLQQEASRKLGFGVTRTMSTAQKLYEAGLITYMRTDSVTISNDAKTSIVQKIESKYGEDYVNTRNYKNKNKSAQEAHEAVRPTDINVEEITSDYDQQRLYQLIWKRTISSQMSDAQIERTVVNINSEAYSQFFVAKGEVIKFDGFLRVYNEGTDDEIEEEKGVLPVLTIDENLNLLSISSRESFSRPPSRYTEASLVKKLEELGIGRPATYATTISTIQNRGYIAKGVNEGTDRSYNFIEFSQSGIKETQLKEKTGSNKGKTSSY

SEQ ID NO: 157399 - protein, 290 aa, Unknown
  Bacterial polypetide isolated from the Sargasso Sea
RLYQGIDIEGETIGLITYMRTDGTNISNEALNVFRNYIENNYGKDYLPNEANNYSGKKAKNAQEAHEAIRPTDISKSPDQLKKYLSTDQHKLYNLIWSRALSSQMQTAKFDRKTILIESEDSKNILKASGSVIKFDGFLKLYKNENDEDNEKILPNVNKGPVNIESFIDEQHFTQPPPRYSEATLVKKLEELGIGRPSTYASIISVIANRGYADIVNKRFFPTDRGKLISAFLEKLFTKYVDYSFTAKLENQLDEITAGNEDWVKVLEEFWVDFNKNVSNVKEKRTREVL

SEQ ID NO: 157400 - protein, 322 aa, Unknown
  Bacterial polypetide isolated from the Sargasso Sea
LNIGDKYLPNEIRSYSGKKAKNAQEAHEAVRPTDIKRSPNDLRSILDRDQMKLYELIWNRTVASQMQSAEFERTVVDIADESKKNIFRANGSIEKFDGFLKVYKEIKDDDSKDNNDEENKLPKLLSNENLKINEIINEQHFTQPPPRYSEASLVKKLEELGIGRPSTYASIISVLSTRNYVELTNKKFIPTDRGKLITAFLDKLFNKYVDYNFTAGLEDSLDDITSGKIQWVDVLTKFWNDFNSNVNEVKELRTREILDMMNDSLGDIIFDKKDNGEQNRVCSCGDGELSLKIGRFGAFIWLLKNIRIGKFTRPLSRIKAAN

SEQ ID NO: 157401 - protein, 305 aa, Unknown
  Bacterial polypetide isolated from the Sargasso Sea
EEYLTEKPRIYSGKENAQEAHEAIRPTSASLTPEKLTGHSEEEVKLYDLIWRQFIACQMPDAKYLSINAKVALDDYVFSARGREVIFDGYTKISSQNAKKADEENLPSLEEGQTLKLVEVKNEKKFTKPPARFSEAALVKELESKGIGRPSTYAAIISTIQARGYVKLENKRFFVNKIGLIVSDRLMESFNEIMDYDFTANLENELDEIASGNLEWKSVLNKFYQTFQDDLNNAGSAEDGMKPNEPTETNIICPSCNKSNMLIRNSANGVFLGCAGYFKSGDEQCKRTMNLISGDEAVSVDDQEE

SEQ ID NO: 157402 - protein, 64 aa, Unknown
  Bacterial polypetide isolated from the Sargasso Sea
MNLVIVESPAKAKTINKYLGDDYKVLASYGHIRDLPSKNGSVDPDQDFKMEWEVDSFSKKYLKE

SEQ ID NO: 157403 - protein, 88 aa, Unknown
  Bacterial polypetide isolated from the Sargasso Sea
MNLVVVESPAKAKTINKYLGKDYIVLASYGHIRDLPSKNGSVDPEKNFEMQWELDAFSKKYLKEITDAAKESDKIILATDPDREGEAI

SEQ ID NO: 157404 - protein, 266 aa, Unknown
  Bacterial polypetide isolated from the Sargasso Sea
VESPAKAKTIEGYLGSDYKVIASLGHIRDLPSSEGSVKPDEDFKMIWELGDKGKKQAKTLNEAVKNSESLILATDPDREGEAIAWHVLEVLQEKGSLADKKISRVTFNAITKKEINEAINNPREIDTEMVQAYLARRALDYLVGFTLSPVLWRKLPGARSAGRVQSVALRLICEREIEIESFIPQEYWSINGHFSYEDNDPFEAKLTHFDNKKLEKFDINNEDRSEEIKIAIQEANFKITDIKEKNVSRKPSPPFITSTLQMEASR

SEQ ID NO: 157405 - protein, 180 aa, Unknown
  Bacterial polypetide isolated from the Sargasso Sea
MSKLVIVESPAKAKTIQKYLGDGFTVLPTIGHIRELPKKDAIDPNNGYSMKYIVSPGKEDAVKKIKSDAKSAEQVILATDPDREGEAIAWHVADIISKAKFEQPDIKRAVFYEISEKAVKAAVGNPGEIAMDLVQSQETRRALDRHFGFSLSPLLWRLFPSNNHSAGRVQSPALRMIVER

SEQ ID NO: 157406 - protein, 291 aa, Unknown
  Bacterial polypetide isolated from the Sargasso Sea
AKNAQEAHEAVRPTDIKRTPNDLRSILDRDQIKLYELIWNRTVASQMQSAEFERTVVDIADETKKNIFRANGSVEKFDGFLKVYKEIKDDDSKDNNDEENKLPKLLSNENLKINEIINEQHFTQPPPRYSEASLVKKLEELGIGRPSTYASIISVLSTRNYVELTNKKFIPTDRGKLITAFLDKLFNKYVDYNFTAGLEDSLDDITSGKIQWVDVLTKFWNDFNSNVNEVKELRTREILDMMNDSLGDIIFDKKDNGEQNRVCTCGDGELSLKIGRFGAFIGCSKYPEIVN

SEQ ID NO: 157407 - protein, 304 aa, Unknown
  Bacterial polypetide isolated from the Sargasso Sea
VQSVALRLITEREHEIELFKPEEFWSIASNFQYDDKLIKSKLSIFAGEKVEKFSFKKKNESEKALNEITKQSYKITDVSSKVYRRNPLAPFTTSTLQQTASGKFGFGASRTMQIAQRLYQGIDIQGDTVGLITYMRTDGTQISNEAISDFRNFINKEHGKEYLPENPNNFTGKKAKNAQEAHEAIRPTDVSRKPSDMKKYLSTDQSKLYELIWNRALSSQMNPAEFDRKSITIESENKKINFKANGSTIKFEGYLKVYKFEDKDDDLKNILPEVKVGDKVSIKELIDDQHFTDPPPRYSEASLV

SEQ ID NO: 157408 - protein, 289 aa, Unknown
  Bacterial polypetide isolated from the Sargasso Sea
MSEGDKIEKETIHLDQKYTKPPSRFSEAALVRELEKKGIGRPSTYANIISTIQDRGYVEIQNKRFFVKKIGHIVAERLLESFENIMDYDFTANFENDLDKVANGEAEWKNVLDTFYKSFQKDLITASDENTGMRPGNIPTETDLLCPDCNENNLVIRNSSNGVFLGCSGYKNLGDDKCKKTLNLISGDEAVSIDDTEEAENLIIKERCNICSTSMDNYLIDENRKLHVCALSPDCKGYKVEEGAFKIKGYDGPTLECHKCGSEMQLKTGRFGKYFACLNDNCGTTRALQ

SEQ ID NO: 157409 - protein, 244 aa, Unknown
  Bacterial polypetide isolated from the Sargasso Sea
HIRDLPSKNGSVDPDKDFKMEWEIDSFSKKYLKEITDAAKESSKIILATDPDREGEAIAWHVKEYLNEKKLLKDKEIERVVFNEITKKAVIQGIKNPRQIEPLLVDAYMARRALDYLVGFNISPILWTKLPGSKSAGRVQSVALKLITEREHEIESFKPEEFWTLSIKFTDKKNQNITASISQLNNNKVEKFSFRNKNEINTAISSIKEKKFSITDISSKVVNRNPSGPFTTSTLQQTASSRLG

SEQ ID NO: 157410 - protein, 249 aa, Unknown
  Bacterial polypetide isolated from the Sargasso Sea
INARKSLVRRMGVDPDNGWDADWQIIPEKEKVLKALKKAAKNVDNIYLATDLDREGEAIAWHLKEALGPQKYNYSRVRFNQITKDAIIESFSDPKEIDLNLVKAYRARRFLDKVIGFELSPLLWKKIARGLSAGRVQSVALRLLDERERSIQEFIPEEYWEISFSATTNNDETITFNLATKKTDPLLSKEKVETIKQQIESCNLSINEISKKPVKVKPKAPFITSTLQQSASTRLGFNVKRTMRVAQKL

SEQ ID NO: 157411 - protein, 38 aa, Unknown
  Bacterial polypetide isolated from the Sargasso Sea
MNLVIVESPAKAKTINKYLGSNYTVLASYGHIRDLPSK

SEQ ID NO: 157412 - protein, 312 aa, Unknown
  Bacterial polypetide isolated from the Sargasso Sea
KRITDAAKKSENLYLATDPDREGEAIAWHVEKLLRDNSSLSKLNIHRVTFNEITKNAVLDSLKEPREIDENLVNAYLARRALDFLVGFTLSPVLWRKLPGSKSAGRVQSVALRIISERELEIEKFIPQEYWSLQGEFRNKEDKIINSRLTVYDGNKVDKLDIKNEGEATKIFNDIKNSTFTVGNITKKEARRNPYPAFTTSTMQIESSRKLGLSASQTMRTAQRLYEGTDIKGETTGLITYMRTDSVVMSKEAINQVRGFVTDNYGANYLPEAPRVYKSKAKNAQEAHECIRPTNIYLTPKDIKQYITLEEI

SEQ ID NO: 157413 - protein, 186 aa, Unknown
  Bacterial polypetide isolated from the Sargasso Sea
AAKDSSKIILATDPDREGEAIAWHVKEYLNEKKLLKDKEIERVVFNEITKKAVIQGIENPRQIEPLLVDAYMARRALDYLVGFNISPILWTKLPGSKSAGRVQSVALKLITEREHAIESFKPEEFWTLSVKFADNINQNFTASISQLDNNKIEKFSFRNKEEINKAISSINKKKFNINDISSKIVN

SEQ ID NO: 157414 - protein, 319 aa, Unknown
  Bacterial polypetide isolated from the Sargasso Sea
AQRLYEGAGTGEGLITYMRTDGTYVAPHAIQTLRTTATEVFGEEYVPESPRYFKKKQKNAQEAHEAIRPTNAGRLPAQVARQLGPGSDEARLYGLIWARTMASQMSPALTDRIAAEIESAEGDLKLKANGHRLKFPGYLAAYRASRPDAPPPSDDAWLPVLDGGEGLRVVPGRDDDESTGCEATEHKTSPPPRYTDGSIVKALEERGIGRPSTYAPILKVLAQREYVVKQGAALVPTTRGRLVSAFLTNYFETYVDYGFTADLEEKLDEITSEQVQWKPLLEEWWVPFKDKISSLSNLRVSEVIDALDEKLGQHLFGEA

SEQ ID NO: 157415 - protein, 291 aa, Unknown
  Bacterial polypetide isolated from the Sargasso Sea
MAAITRRFLDKFFGYKISPITTRRTIFGKSAGRVQSPTLGILCAREKEIDLFVPEEFWDLIIELSDVNGNIIQCDLVKDGEKKFGKQTVKSQSEANILKERILNLSFSIDEVVKKEKNRNPYSPFSNSLLLQDASSRLGFSPKYTNTLAQQLKDGISNLGALITYHRSDSNKMKKEEVQKLRTLIRDQLGNNYLSTNEIDHKEKSKFVQQGHEAVTPTQLTMKPEDVKSVLDADQHRLYELIWKRTVASQMSQSKSLETTYLINGGGISLKATGSIQIFDGFKKVYNYSEK

SEQ ID NO: 157416 - protein, 298 aa, Unknown
  Bacterial polypetide isolated from the Sargasso Sea
MKKYLSTDQYKLYNLIWSRSLSSQMESAKFDRKTITISSDDEKNIFKTSGSTLKFDGFLKVSKLDGNKDEEENILPDVRKGEVSYKDFSDEQHFTQPPPRYSEASLVKKLEELGIGRPSTYASIISVISNRGYADIENKRFFPTDRGKLLSAFLEKLFSKYVDYDFTAKLENQLDDITSGKENWIKVLEEFWRDFNLNVTDVKEKRTREVLDLLNESLGSLIFEVDKDGNINRKCKLCDSGQLSLKNSFRGGAFIGCSNYPDCKFTRPLSKSKAAQQLILAEPKLIGQNDLGKDIYLK

SEQ ID NO: 157417 - protein, 296 aa, Unknown
  Bacterial polypetide isolated from the Sargasso Sea
KAIANIKIKKFNITDISSKVVSRNPSGPFTTSTLQQVASSRLGFGASRTMQIAQKLYQGIEIEGDTVGLITYMRTDGTNLSADAVSDFRNFIKKKYGNEYLPENPNNYSGKKAKNAQEAHEAIRPTDINRNPDSVKKYLSSDQQKLYSLIWSRALSSQMETAKFDRNTITIESEDNKTICKSSGSVLKFDGFLKIYSNQNKDDDEQILPEMSKGPINIEALIDEQHFTQPPPRYSEASLVRKLEELGIGRPSTYASIISTIANRGYAEIVNKRFFPTNRGKLISAFLEKLFQDMWI

SEQ ID NO: 157418 - protein, 280 aa, Unknown
  Bacterial polypetide isolated from the Sargasso Sea
GKNPLKNEMEVNQVDSELKGGGFILKTIDSKSQTSNPKPPFRTSTLQMSAATSLGFTADRTMQSAQKLYEGGLITYLRTDGISISTSPNTGEPFSEENPGPPPLQEIRNFISSHFEKSYLSKETRVYKSKVQNSQEAHEAIRPTDVSKQPDQLNLTGDEEKLYSLIWNRTVASQMESSKYERKTLVITSMDGKYEFKASSRKNIFQGFEILTGTDEKKETFFPSDLDEGMALELISNTYEQKFTSPPNRYSEASLIKKMEEEGIGRPSTYATIVKGLRTK

SEQ ID NO: 157419 - protein, 266 aa, Unknown
  Bacterial polypetide isolated from the Sargasso Sea
PEEDYKPNYEVPTDKKKVIRELKKDIEKDTTVYLATDEDREGESISWHPISALKFKNQKIHRIVFHEITKRAIEEALANPRELDQSLVDAQQARRILDRAVGYKLSPLLWRKIKGGLSAGRVQSVAVRILVDREREIRAFKPAEFWKIKADFSDPKFQADLMRVEGKQKKISNEAAARKIDGSAKASTFDVKEVVEREGVRKPVAPFITSTLQQEASRKLSFSVAQTMRIAQQLYEGNFEIPGYEGGLITYMRTDSVNLSDEALTQ

SEQ ID NO: 157420 - protein, 312 aa, Unknown
  Bacterial polypetide isolated from the Sargasso Sea
KNAQEAHEAIRPTNIERKPSDIKKYVNADQFKLYELIWSRALSSQMTPAEFDRNTIVISSENNKINFRASGSLVKFDGFLRIYQVQETDEDSKNILPEVKVGEEINILKLIDEQHFTDPPPRYSEASLVKKMEELGIGRPSTYASIISVLSTRNYVELMNKRFHPTDRGKLISAFLEKLFSKYVDYNFTADLENQLDEITSGKIEWVQVLNNFWKDFYENVGKVKEKRTREVLDLLNESLGALIFDRDSNDSIDRKCKLCSNGELSLKNSFRGGAFIGCSNYPECKFTRPLSKAKAAAQYSLAEPKLLGQND

SEQ ID NO: 157421 - protein, 261 aa, Unknown
  Bacterial polypetide isolated from the Sargasso Sea
RQGADDIFLATDPDREGEAISWHIAEILKERGLLKDKSMQRVVFTEITPRAIKEAMAQPRAIADNLVDAQQARRALDYLVGFNLSPVLWRKVQRGLSAGRVQSPALRMIVEREEEIEAFKAREYWSIQADCAHPTQHFSAKLIKLDGQKFEQFTITDGDTAEAARLRIQQAAQGRLHVTDVASKERKRRPAPPFTTSTLQQEASRKLGFTTRKTMQVAQKLYEGVAIGEEGTVGLISYMHTDSVNLSQDALVEIRDVIARD

SEQ ID NO: 157422 - protein, 296 aa, Unknown
  Bacterial polypetide isolated from the Sargasso Sea
RDLSAKNDAIDTENNFQMKWETSDRGKKVIKEITEAAKKSENLYLATDPDREGEAIAWHVEKLLRDNSALSKLNIHRVTFNEITKNAVLDSLKQPREIDDNLVNAYLARRALDFLVGFTLSPVLWRKLPGSKSAGRVQSVALKIISERELEIEKFIPQEYWSLQGEFRNKEDKVINSRLIIYKGNKIDKLDIKNESEATKIFNDVKISRFSVGNITKKESKRNPYPAFTTSTMQIESSRKLGLSANQTMRTAQKLYEGTEINGETTGLITYMRTDSVVMSNEAISQIRNFVTNNYG

SEQ ID NO: 157423 - protein, 250 aa, Unknown
  Bacterial polypetide isolated from the Sargasso Sea
EHQIEQFKPDEFWTLNVNFKTTKGDILNSNIVLLDNSKVEKFSFKNKEDINKAIELIKKNKYKISDISSKIYTRNPLGPFTTSTLQQTASGKLGFGASRTMQIAQRLYQGIDIEGDTVGLITYMRTDGTNISKDAITEFRKFITKSYGNDYLPKDPNNYSGKKAKNAQEAHEAIRPTDITRTPESMKKFLGSDQIKLYDLIWSRALSSQMEVAKFDRKTISIVSDNGLNQFKSSGSTIKFDGFLKLTRIE

SEQ ID NO: 157424 - protein, 59 aa, Unknown
  Bacterial polypetide isolated from the Sargasso Sea
MNLVIVESPAKAKTINKYLGGDYTVLASYGHIRDLPSKNGSVDPEDKFKMIWEVDSFSK

SEQ ID NO: 157425 - protein, 265 aa, Unknown
  Bacterial polypetide isolated from the Sargasso Sea
KKIQSFFRGDVIVKSSFGHINDLDTTKLEKMISNGFEPIYKNTKNKVIQSLKSVKCNRIILAADDDREGDAIAWHTGNLFELDYTQNNRIKFNEISKRAIQNALDNPGKLDLNSVNAQKARQFIDLMIGYKLSPLLWQHIKTDKKGLSAGRVQSCLLYILQQHQETIKNHKPEYSYKMNSELNHDDINLNSEFQFEKKEITDDTIKEIMNYIINERDCIVTNREKTEVKQYSQPPLITSTLQQSAQSELGFPVKMTMNIAQKLYE

SEQ ID NO: 157426 - protein, 328 aa, Unknown
  Bacterial polypetide isolated from the Sargasso Sea
KKSRHTWYENPRQIEPLLVDAYMARRALDYLVGFNISPILWTKLPGSKSAGRVQSVALKLITEREHEIELFKPEEFWTLNVNFQDKNKSKITASISQLDGEKIEKFSFKNKEEIEKAISNIKIKKFNITDISSKVVSRNPSGPFTTSTLQQVASSRLGFGASRTMQIAQKLYQGIEIEGDTVGLITYMRTDGTNLSADAVSNFRNFIKKEYGNEYLPENPNNYSGKKAKNAQEAHEAIRPTDINRNPDSVKKYLSSDQQKLYSLIWSRALSSQMETAKFDRNTITIESEDGETICKSSGSVLKFDGFLKVYSNQSKDDDEQILPESQK

SEQ ID NO: 157427 - protein, 290 aa, Unknown
  Bacterial polypetide isolated from the Sargasso Sea
MKLVVVESPAKAQTINRYLGKDYKVLASIGHIRDLPSKNGAVSPEENFKMQWDLSKEKEKVVKEIIKDLKKSNSLILATDPDREGEAISWHIKEILKEKQLVDDVKIERVVFNEITKNSILNAMKNPREINFELVEAYLARRALDHLIGFSISPILWRKLPGSKSAGRVQSVALRLICERELEIEKFITKEYWTISAIFLNPNDEKFSAKLIIFDNNKLKKFDIINEESAKNIIDKVNKSTFQIEKIEKKRVKRNPIPPFTTSSLQQEASRKLGFSAYKSMRIAQKLTKE

SEQ ID NO: 157428 - protein, 57 aa, Unknown
  Bacterial polypetide isolated from the Sargasso Sea
MSKSLVIVESPAKAKTISKYLGNEYIVKSSVGHIRDLPKGKSKAKRTNFIPKDASPE

SEQ ID NO: 157429 - protein, 83 aa, Unknown
  Bacterial polypetide isolated from the Sargasso Sea
MNLVIVESPAKAKTINKYLGSDYTVLASYGHIRDLPSKNGSVDPENSFKMIWEIDSFSKKYLKEITDTARNSQKIILATDPDR

SEQ ID NO: 157430 - protein, 290 aa, Unknown
  Bacterial polypetide isolated from the Sargasso Sea
WSRSLSSQMESAKFDRKTITIMSEDNKNICKASGSTLKFDGFLKVSRLEENKEDENILPEVVKSEVEFKDFTDEQHFTQPPPRYSEASLVKKLEELGIGRPSTYASIISVISNRGYADIENKRFFPTDRGKLLSAFLEKLFSKYVDYDFTAKLEDQLDDITAGKENWIKVLEEFWRDFNLNVTDVKEKRTREVLDMLNESLGSLIFEVDKDGKINRKCKLCDSGQLSLKNSFRGGAFIGCSNYPDCKFTRPLSKSKAAQQLTLAEPKLIGQNDIGKDIYLKNGRFGPYLQ

SEQ ID NO: 157431 - protein, 275 aa, Unknown
  Bacterial polypetide isolated from the Sargasso Sea
MHKYLSTSVSAESGAYELRVRGRVMQFDGFTRVLPPVSRKKDEDEVLPDFQVGQNLALLDVQTVQHFTKPVARFGEASLVKELEKLGIGRPSTYSSIISTIQDRGYVRLESKRFYAEKIGEVVTDRLCENFGDLLDYGFTATMEEELDKVAKGERVWNQLLDNFYQDFSSNLDTAKDPDKGMRLNEPANIDYDCPACSRQMQVRNGSTGVFLGCSGYALKPKERCKQTINLIRGEEVVDVDDEEGESKLLMERRKCPKCGSIMLSHLIDENKKLH

SEQ ID NO: 157432 - protein, 284 aa, Unknown
  Bacterial polypetide isolated from the Sargasso Sea
ALASQMTAAEIARTTINIEAGKEKEYLFEGQGQRVVFSGFLQIYSETSDEQSDTLSEKDVILPKVEQGQMLALKDQQKPVSLEQMFTKPPPRYTEASLVKKLESEGIGRPSTYAPTISTIQDRGYVELTDEKKLKPTSIGEVVTDFLADHFTKIVNLGFTAEIERNFDRIAKGDEDWVEMMTDFYEPFHENVVEKDKSVSRAEVLKRRELGTDPESGKPVSVSIGRYGPMVQIGTREDEEKPRFASLPSSINLNDVSLEEALECFALPRVLGEYENGEEISANN

SEQ ID NO: 157433 - protein, 252 aa, Unknown
  Bacterial polypetide isolated from the Sargasso Sea
IWEVDSFSKKYLKEITDAAKKSEKIILATDPDREGEAIAWHVKEYLDEKKLLKDKKIERVVFNEITKKAVTNGIDNPRNIESNLVDAYMARRALDYLVGFNISPILWTKLPGSKSAGRVQSVALRLLTEREHEIEQFKPEEFWTLNVKFKTSSGDILNSNIIMLNNNKVEKFTFKNKEDINNATDIIKKLKYKISDISSKIYTRNPLGPFTTSTLQQTASSKLGFGASRTMQIAQRLYQGIDVEGDTVGLIT

SEQ ID NO: 157434 - protein, 271 aa, Unknown
  Bacterial polypetide isolated from the Sargasso Sea
RSFKKASYWGIKASLIKDNITFETKLFSLKGQRISNGSDFDEQTGKLKEGNKSLIIGEEQVNDLLKTFSSEDWLVSKIEKKPSTRKPVPPFTTSTLQQEANRKLRLSARETMRCAQGLYERGFITYMRTDSVHLSEQATRAARECVSSMYGKEYLSNSPRQFNSTARNAQEAHEAIRPAGEVFKTPKETNLTGRDLSLYDLIWKRTVASQMAEARLTMINAEISVGDGLFKSSGKSIDFAGFFRAYVEGSDDPSSSLEQQEIILPNLTTGT

SEQ ID NO: 157435 - protein, 169 aa, Unknown
  Bacterial polypetide isolated from the Sargasso Sea
MGVNKVEDVTALVIVESPAKAKTIEKYLGDGYIVDSSVGHIRDLISPKDVPEDKKERFGKLGIDVYNNFEPLYEISPNSKKQVSQLKKALKKVDELFLATDEDREGEAIAWHLLEVLKPSVPVKRMVFNEITKEAITEALNNTRDLGKDLVEAQEARRILDRIYGLNFP

SEQ ID NO: 157436 - protein, 72 aa, Unknown
  Bacterial polypetide isolated from the Sargasso Sea
MNLVIVESPAKAKTINKYLGKNYTVLASYGHIRDLPSKNGSVDPENKFKMIWEIDSFSKKYLKEITDAAKSQ

SEQ ID NO: 157437 - protein, 145 aa, Unknown
  Bacterial polypetide isolated from the Sargasso Sea
MTKSLVIVESPAKAKTISKYLGPEYIVESSVGHIRDLPKKGGTIRTRLVVPKDLSPEEKARQKEINARKSLIRRMGVDPDNGWDADWQIIPEKEKVLKALKKAAKNVDNIYLATDLDREGEAIAWHLKEALGPQKYNYSRVRFNQ

SEQ ID NO: 157438 - protein, 286 aa, Unknown
  Bacterial polypetide isolated from the Sargasso Sea
LKLITEREKEIELFKPDEYWTLTSDFTNKNNKNIFSKLSLFNEEKIEKFSFKNKEEIQKAVDVINKTKFRITDVNTKVFRRNPLAPFTTSTLQQTASGRFGFGASRTMQIAQRLYQGVDIEGETTGLITYMRTDGTNISKEAIEDFRKFITDDYGDKYLPEAPNSYTGKKAKNAQEAHEAIRPTNISRKPSDVKKYVNADQFKLYELIWSRALSSQMTPAEFDRNTIIISSNDNKINFRASGSVVKFDGFLKVYQVQETDEDAKNILPEVKVGEEISILKLHDEQH

SEQ ID NO: 157439 - protein, 142 aa, Unknown
  Bacterial polypetide isolated from the Sargasso Sea
MNLVIVESPAKAKTINKYLGKDYKVLASYGHVRDLPSKNGSVDPENNFKMEWELDSFSKKYVKEITDAAADSERIILATDPDREGEAIAWHVREILESKKLLKGKKVERVVFNEITKKAVTNGINNPREIESLLVNAYMARR

SEQ ID NO: 157440 - protein, 217 aa, Unknown
  Bacterial polypetide isolated from the Sargasso Sea
MPVVVVESPAKAKTINKYLGTDYSVFASYGHVRDLPPKDGSVDPKNNFEMLWEVSTDSKKHIKAISDALKKDNTLILATDPDREGEAISWHLEEALRKRRAINGNTQIQRVVFNAITKSAVSEAMKAPREIDSPLVEAYLARRALDYLVGFNLSPVLWRKLPGARSAGRVQSVCLRLIVEREMDIEAFNAQEYWSVHASLKSPRGQIFDARLVNLAG

SEQ ID NO: 157441 - protein, 252 aa, Unknown
  Bacterial polypetide isolated from the Sargasso Sea
VESPAKAKTINKYLGKDYKVLASYGHVRDLPSKNGSVDPENNFKMEWELDTFSKKYVKEITDAAAESEKIILATDPDREGEAIAWHVREILESKKLLKGKKVERVVFNEITKKAVTNGINNPREIESLLVDAYMARRALDYLVGFNISPILWTKLPGSKSAGRVQSVALRLITEREHEIELFKPEEFWTIASNFQYDDKLIQSKLSVFNERKIEKFSFKKKIDSEKALNAIKDQSYKITDVSSKVFRRNPLA

SEQ ID NO: 157442 - protein, 289 aa, Unknown
  Bacterial polypetide isolated from the Sargasso Sea
TFHETKPPARYTEAALVKVLEKEGIGRPSTYASIIGTIVDRGYANLSSNTLAPTFTAFAVTALLEEHFPDLVDTTFTAKMESSLDEISSGNLEWLPYLETFYKGKNGLEVKVQKTEGDIDGKAYRQVDFEDLPCVVRIGSNGPWLEGTKIDESGNEIQAKGNLPMDITPGDLDIKQVDQILSGPSDLGTDPKTGEKVFLRFGPYGPYVQLGNNDQDKAKPRRASLPKELKTDDLTLDEALVLLSLPRLLGVHPEGGVVEADRGRFGPYIKWIKNENESENRSLKKEDDV

SEQ ID NO: 157443 - protein, 263 aa, Unknown
  Bacterial polypetide isolated from the Sargasso Sea
HIRDLPSKNGSVNPEKDFEMQWELDSFSKKYLKEITDAAKESKKIILATDPDREGEAIAWHVKKVLEDKKLLTGKKLERVVFNEITKNAVLNGINNPRQIEKSLVNAYLARRALDYLVGFNISPILWTKLPGSKSAGRVQSVALKLITEREHEIESFKPEEYWSLIVNFQDEKDNLINSKINVFKNNKIERFSFRDKSSINNATDLIKTKNYSIKNVSNKVFKRNPVAPFTTSTLQQSASGKYGFGASRTMQIAQRLYQGIDI

SEQ ID NO: 157444 - protein, 262 aa, Unknown
  Bacterial polypetide isolated from the Sargasso Sea
NTENRFSSKVKNAQEAHEAIRPAHRIFKPISEVENIINKEAANLYELIWKRTIASQMKPAKLKQTSITITNQKAKFRANGQVIVFPGYMRAYVEGRDNPDKDLANKEKTLPLLQLGDVLTCNKLESEIHNTKPPARFTEASLIKSLEENGIGRPSTFASIIGTIVRRNYVNRASNKLSPTFLGLAVTQLLENHYANLVDKEFTAKMEDGLDEVSRGELEAIPFMKNFYFGGGPFKGLEKMLEEKVDIPSACKIEIPQKYIRN

SEQ ID NO: 157445 - protein, 291 aa, Unknown
  Bacterial polypetide isolated from the Sargasso Sea
RVYKSKAANAQEAHEAIRPTAISRHPESMSSYLDGEQFKLYELIWKRTISSQMQSAELDETSADISNKDKTIIFRATGSQVLFPGFYIYRNRNDDKILPNLVENENLDLEKADGEQHFTQPPPRYTDASLIKKMEELGIGRPSTYAAILQVLVNRNYVEKDRGKHIPQERGRILTAFLNNFFGQYIEYDFTADLEKKLDKVSDGKLNYKKLLEEFWNGFKPHLNKMSELEREKILAALEKELADLFFPKNEEDTNAQPSRKCPTCSNGNLGLELGRYGAFIGCSNYPECKF

SEQ ID NO: 157446 - protein, 307 aa, Unknown
  Bacterial polypetide isolated from the Sargasso Sea
SAGRVQSVALKLITQREHEIESFKPEEYWSINAKFKNLKSDILFSRLNIIDNKKVERFSFKNKKDINEVIEKINKHKYLIKDVSSKIVRRNPSAPFTTSTLQQTSSGKYGFGASRTMQIAQRLYQGIEIEGETIGLITYMRTDGTNISNEAVKDFRSFIKNDIGKNYLPESPNNFKGKKAKNAQEAHEAIRPTDIKKKPAEMKKYLSSDQFKLYDLIWSRALASQMKSAEFNRNTIQINSDDSTIQFISSGSVIKFDGFLKVYSLQDDDEEKNILPEVKLGEKISIAELIDEQHFTSPPPRYSEASL

SEQ ID NO: 157447 - protein, 302 aa, Unknown
  Bacterial polypetide isolated from the Sargasso Sea
GYQGVLSVGRVQTPVLGLVVQRELQIENFVSRDFYQVKAHLTGADWPFTAIWQPSEACAPYQDEEGRVLSRELAELVQRKTSHQVAVVEQVQQLPKKQYAPLPFSLSALQIEAAKLYGMTAQQVLDNCQQLYERHQLITYPRSDCRHLPEQQFSQSAAVCRAIVANSPELAEIQQQASMSLRSKAWDDSKITAHHAIIPTDKSLKSASLNSFEAKLYWLIARQFLWQFFPPFCYLEQQALLKIAGGLFKAQARLEQSLGWKAFYKASQKEQQDEDTDEQQSLQRLTKGQELQSGQSELVSKQ

SEQ ID NO: 157448 - protein, 290 aa, Unknown
  Bacterial polypetide isolated from the Sargasso Sea
ASAKDFDKNGQKTSENKRYLDENETLEIVKILKNQIAKISSIKETTRSGRPPKPFKTTSLQSAASSSLSFQPATTMRIAQRLYQEGLITYMRTDSIRLSDVAIKASRAYIRENFSEKHLPDSPNLYGDSKNAQAAHEAIRPSGEIFITPQELLKTYKKDSDEFKLYKLIFNTTVASQMTDAQGITKTIEIETKENTYSPLILGISGTTWTFGGYRDLIKDLSEKSQELPDLNESDEIKIIKPESEEKFTKPPNRYSSTSLINKLEELGIGRPSTYVSIIDKITNIFINKD

SEQ ID NO: 157449 - protein, 298 aa, Unknown
  Bacterial polypetide isolated from the Sargasso Sea
MKVNTVGLITYMRTDGTNISNDAVTDFRNYIDKSYGKDYLPNEPNNYSGKKAKNAQEAHEAIRPTDISREPNSVKKFLSTDQFKLYDLIWSRALSSQMEAAKFDRKTITIISEDNLNQFKCSGSTIKFDGFLKLTRIDEDEDEKILPDVSKEEVFTNDFIDEQHFTQPPPRYSEASLVKKLEELGIGRPSTYASIISVISNRGYADIVNKRFFPTDRGKLISAFLEKLFTKYVDYSFTANLEEQLDDITAGKEEWVKVLDNFWKDFNLNVNNVKEKRTREVLDFINDSLGDLIFEVDE

SEQ ID NO: 157450 - protein, 251 aa, Unknown
  Bacterial polypetide isolated from the Sargasso Sea
MTKKILVICESPSKIKSLQKYLGPRYIVKASFGHIRDLDRKELSIDLDNNFKPKYISNPDKSRVISELKKAMKECNELLIASDCDREGEAIGWHVTKMLKVKPENTKRIIFTEITKTAIQNAVQNPTTIDINMFYAQQARRILDRIIGYLISPILWKQIQSSYKEKQSLSAGRVQSVVVKLIKEREEDIEKFQSETYYKVSGQFSLPIKSKVLYLNAELNKDINKKNTLDEFLTNCQSDEFYIHSIKTKKT

SEQ ID NO: 157451 - protein, 42 aa, Unknown
  Bacterial polypetide isolated from the Sargasso Sea
MNLVIVESPAKAKTINKYLGGDYTVLASYGHIRDLPSKNGSV

SEQ ID NO: 157452 - protein, 279 aa, Unknown
  Bacterial polypetide isolated from the Sargasso Sea
VGFTIVFDGFMKVINLDDDNNDENILPKVEKGEVNISDFIDEQHFTQPPPRYSEASLVKKLEELGIGRPSTYASIISVIANRGYADVVNKRFFPTDRGKLLSAFLEKLFTKYVDYDFTAKLEDQLDDITSGKENWLSVLDQFWKDFNKNVSSVKEIRTREVLDMLNESLGDLIFERNNDGKIDRNCKLYNKTCVSGQGTLSLKNSFRGGAFIGCSNYPDCKFTRPLSKIKASQQINLAEPKLIGKNDNDKEIYLKNGRFGPYLQYELLEDEIVKTKKRK

SEQ ID NO: 157453 - protein, 286 aa, Unknown
  Bacterial polypetide isolated from the Sargasso Sea
KFLPSNFEVLASMGHVRDLPKGAAEIPAAVKKEKWSRIGVNTTEDFEPLYIVPKDKKKVVKELKDALKGATQLLLATDEDREGESISWHLMQILKPKIPTKRMVFHEITKKAINKALDQTREIDMELVQAQETRRILDRLFGYELSPLLWKKVAPRLSAGRVQSVSVRLLVRRERERRSFKKASYWGIKASLVKDNVTFETKLFSLNGQRISNGSDFDEQTGKLKPGNKSLIIGEEKVNDLLKTFSSEDWLVSKIEKKPSNRKPVPPFTTSTLQQEANRKLRFLPE

SEQ ID NO: 157454 - protein, 275 aa, Unknown
  Bacterial polypetide isolated from the Sargasso Sea
ASSKLGFGASRTMQIAQKLYQGIEIEGETIGLITYMRTDGTNISNDALITFRDYIQNEIGNEYLPEKSLSYSGKKAKNAQEAHEAIRPTDIIRTPESVKKYLSADQNKLYNLIWSRALSSQMASAKFDRNTITITSDDDSTICKASGSVLKFDGFLKIYNNISKDDNENTLPDVCKGQINIEALIDEQHYTQPPPRYSEASLVKKLEELGIGRPSTYASIISTIANRGYAEILNKRFFPTDRGKLISAFLEKLFSKYVDYNFTASLEDQLDEITS

SEQ ID NO: 157455 - protein, 304 aa, Unknown
  Bacterial polypetide isolated from the Sargasso Sea
ASRTMQIAQKLYQGIEIDGETIGLITYMRTDGTNLSKDAVSAFRDYIQKEIGKEYLPKEALNYSGKRAKNAQEAHEAIRPTDIIRTPQSVKKYLSADQNKLYDLIWSRALSSQMESAKFDRNTITITSDNNDTVCKTSGSVLKFDGFLKIYNNQNKDDDENILPAVSKGPINIEALLDEQHYTQPPPRYSEASLVKKLEELGIGRPSTYASIISTIANRGYAEILNKRFFPTDRGKLISAFLEKLFSKYVDYNFTAGLEDQLDEITTGKESWIKVLELFWKDFNNNVSEVKEKRTREVLDLLNE

SEQ ID NO: 157456 - protein, 185 aa, Unknown
  Bacterial polypetide isolated from the Sargasso Sea
MSKPLVIVESPTKVKTISKILGSEYIVKSSVGHIRDLPRNTKSIPPQYTKEEILWGAVKPDEFENIYVIPEDRKKIVKELRELADKAPDVYLATDDDREGEAIAYHLKEALELKKEPKRIKFNEITEPAVINAIENPEVIDIGKFKSYEARRTLDRMIGYEISPKLRDLGGAFISTGRVQGPAIR

SEQ ID NO: 157457 - protein, 274 aa, Unknown
  Bacterial polypetide isolated from the Sargasso Sea
SKSAGRVQSVALKLITEREHEIESFKPEEFWTLSVKFTDQKKQNITASISQLDNTKIEKFSFRNKEEINKAISNINEKKFSITDISSKIVNRNPSGPFTTSTLQQTASSRLGFGASRTMQIAQKLYQGIEIEGETIGLITYMRTDGTNLSKDAILAFRDYIKKEIGNVYLPKESLNYSGKKAKNAQEAHEAIRPTDIIRTPQSIKKYLSTDQNKLYDLIWSRALSSQMESAKFDRNTITITSDNNDTICKASGSVLKFDGFLKIYNNQAKDDDE

SEQ ID NO: 157458 - protein, 290 aa, Unknown
  Bacterial polypetide isolated from the Sargasso Sea
EIREFEPEEYWKVRADFEGFHAELSKVDGKAVKIQNEEEANRVTQSIRAGECVLKEIDEREASRNPAAPFTTSTLQQEASNKLGFSVKKTMLIAQQLYEGNFEIPDYSGGLITYMRTDSVTLSKEALAMANEVIEKRFGNEFTLEKPRSFRNRTKNAQEAHEAIRPVNLEILPDQVIPHLERDQGRLYGLIWKRTLATQMKAAKIARTTFRINAGEKSEYQFEAKGQQILFPGFLKVYMDSSSDAQSVLGEKDLLLPRVEQGQRLPLKDLNAEQLFTKPPPRYSEASLVK

SEQ ID NO: 157459 - protein, 305 aa, Unknown
  Bacterial polypetide isolated from the Sargasso Sea
LIIIPGKKAKNAQEAHEAIRPTDVSKKPSDMKKYLSTDQSKLYELIWNRAVSSQMNPAEFDRKSITIESDDKKINFKANGSTIKFEGYLKVYKFEEKDEDLKNILPEVKVGDKVSIKELMDDQHFTDPPPRYSEASLVKKMEELGIGRPSTYASIISVLSTRNYTELLNKRFHPTDRGKLLSAFLEKLFTKYVDYNFTADLENQLDEITSGKADWVKVLDGFWKDFHSNVGQVKEKRTREVLDLLNESLGDLVFERDNNDVIDRKCKLCETGQLSLKNSFRGGAFIGCSNYPECKFTRPLSKSKA

SEQ ID NO: 157460 - protein, 280 aa, Unknown
  Bacterial polypetide isolated from the Sargasso Sea
LIEDKTKPPARYTQHGLVALMKSEGIGRPSTYATTIKKLLDRKYCSDSKGRLKPTEQGIMLCDEVVPYYNSNEKSLSLFSSNFTAEMETDLDQIETGQHSGAEVWEDFVDSFRELHESAVAKKKEKPTKRQLDYYLRLADLVSQEELVRIIGDDDPREMDGKRIGEVIDDLRTATEDMPMPASPKQISYAKSLAESLEMDESAACELVGLSNFSELTGGKSGTASELIGNLKGKVDSTPRPPSPKQLNFIKNLAKKAELDEEGACKMVGISSYSELSGGR

SEQ ID NO: 157461 - protein, 218 aa, Unknown
  Bacterial polypetide isolated from the Sargasso Sea
MSKPLVIVESPTKVKTISKILGDGYIVKSSVGHIRDLPRNTKSIPSAFKKEDILWGAVKPENYENIYVIPEDRKKIVNELKGLADKAPEVYLATDDDREGEAIAYHLKEALELKKEPKRIKFNEITNTAVLSAIKNPETIDIGKFKSYEARRTLDRMIGYEISPKLRDLGGAFISTGRVQGPAIRLIVEREEERLSFVKSKYFEIKASCKSQGFEFAA

SEQ ID NO: 157462 - protein, 305 aa, Unknown
  Bacterial polypetide isolated from the Sargasso Sea
ASGRLGFGASRTMQIAQKLYQGIEIEGDTVGLITYMRTDGTNLSADAVSNFRNFIKKEYGNEYLPKNPNNYSGKKAKNAQEAHEAIRPTDINRNPDSVKKYLSSDQQKLYSLIWSRALSSQMETAKFDRNTITIESEEGKTICKSSGSVLKFDGFLKVYSNQNKDDDEQILPEMSKGPINIEALIDEQHFTQPSPRYSEASLVKKLEELGIGRPSTYASIISTIANRGYAEIVNKRFFPTDRGKLISAFLEKLFSKYVDYNFTAGLEDQLDEITSGKESWLKVLEMFWKDFNSNVSEVKEKKNKE

SEQ ID NO: 157463 - protein, 136 aa, Unknown
  Bacterial polypetide isolated from the Sargasso Sea
MNLVIVESPAKAKTINKYLGKNYKVLASYGHVRDLPSKNGSVDPENNFKMEWELDSFSKKYVKEITDAAADSEKIILATDPDREGEAIAWHVREILESKKLLKGKKVERVVFNEITKKAVTNGINNPREIESLLVN

SEQ ID NO: 157464 - protein, 94 aa, Unknown
  Bacterial polypetide isolated from the Sargasso Sea
MNLVIVESPAKAKTINKYLGKDYIVLASYGHVRDLPSKNGSVDPENNFKMEWELDSFSKKYVKEITDAAADSERIILNTDPDREGEAIAWHVRE

SEQ ID NO: 157465 - protein, 268 aa, Unknown
  Bacterial polypetide isolated from the Sargasso Sea
KTINKYLGPDYTVLASYGHVRDLPAKDGSVDTEHDFEMKWEIGTDSRKHVKAIADALADDNNLILATDPDREGEAISWHLEEALRKRKVIKKDTPVSRVVFNAITKSAVTEAMQNPRQVDAPLVHAYLARRALDYLVGFNLSPVLWRKLPGARSAGRVQSVCLRLIVEREMEIEAFNPQEYWSVKAMIETPRGQNFEARLTVLGGKKLEKFDIATATAAELAVGAVAARAMHIKSVEAKPATRNPSAPFMTSTLQQEASRKFGMGARQ

SEQ ID NO: 157466 - protein, 240 aa, Unknown
  Bacterial polypetide isolated from the Sargasso Sea
AKAKTINKYLGKDYKVLASYGHVRDLPSKNGSVDPENNFKMEWELDTFSKKYVKEITDAAADSERIILATDPDREGEAIAWHVREILESKKLLKGKKVERVVFNEITKKAVTNGINNPREIESLLVNAYMARRALDYLVGFNISPILWTKLPGSKSAGRVQSVALRLITEREHEIELFKPEEFWTISSNFNYDDKLIKSKLSIYNSNKIEKFSFRSKSESEKALNEIKKQSYKITDVSSK

SEQ ID NO: 157467 - protein, 224 aa, Unknown
  Bacterial polypetide isolated from the Sargasso Sea
EWEVDSFSKKYLKEITDAAKDSSKIILATDPDREGEAIAWHVKEYLNEKKLLKDKEIERVVFNEITKKAVIQGIENPRQIEPHLVDAYMARRALDYLVGFNISPILWTKLPGSKSAGRVQSVALKLITEREHEIESFKPEEFWTLSINFADQNNQKITASISLLDNNKIEKFSFRNKDEINIAVASINKKRFNITDISSKIVNRNPLGPFTTSTLQQTASSRLG

SEQ ID NO: 157468 - protein, 62 aa, Unknown
  Bacterial polypetide isolated from the Sargasso Sea
MNLVIVESPAKAKTINKYLGKDYTVLASYGHIRDLPSKNGSVDPENKFKMIWEVDSFSKKYL

SEQ ID NO: 157469 - protein, 330 aa, Unknown
  Bacterial polypetide isolated from the Sargasso Sea
MRVLKNFYEAGRITYMRTDAPSLSNDSIDDARLFIKDTLADEYLTDKPRIYSGKENAQEAHEAIRPTSASLTSEKLTGHSEEEVKLYDLIWRQFIACQMPDAKYLSINAKVVVDDYVFSARGREVIFDGYTKISVPNAKKSDQENLPSLEQGQVLKLVEVKNEKKFTKPPARFSEAALVKELESKGIGRPSTYAAIISTIQARGYVKLENKRFFVNKIGLIVSDRLIESFNEIMDYDFTANLENELDEIASGNLEWKSVLNKFYQTFQDDLKSAESAEDGMKPNEPTETNILCPSCNKSNMLIRNSANGVFLGCAGYFKCGDEQCKHTRT

SEQ ID NO: 157470 - protein, 305 aa, Unknown
  Bacterial polypetide isolated from the Sargasso Sea
GLITYMRTDGTNLSKDALSAFRDYIKKEIGNDYLPKEALNYSGKKAKNAQEAHEAIRPTDIIRNPQSIKKYLSTDQNKLYDLIWSRALSSQMQSAQFDRNTITITSDNNDTICKASGSVMKFDGFLKIYNNQAKNDDENILPSMSKGPINIEAFLDEQHYTQPPPRYSEASLVKKLEELGIGRPSTYASIISTIANRGYAEILNKRFFPSDRGKLISAFLEKLFSKYVDYNFTAGLEDQLDEITTGKESWIKVLELFWKDFNNNVSEVKEKRTREVLDLLNDSLGDLVFDKDDKGNIIRKCQLCS

SEQ ID NO: 157471 - protein, 303 aa, Unknown
  Bacterial polypetide isolated from the Sargasso Sea
GKENAQEAHEAIRPTSASLTPEKLTGHSEEEVKLYDLIWRQFIACQMPDAKYLSINAKVVLDDYVFSARGREVIFDGYTKISKQNAKKADEENLPSLEEGQVLKLVEVKNEKKFTKPPARFSEAALVKELESKGIGRPSTYAAIISTIQARGYVKLENKRFFVNKIGLIVSDRLIESFNEIMDYDFTANLENELDEIASGNLEWKSVLNKFYQTFQDDLESAGSAEDGMKPNDPTKTDIVCPSCKKSNMLIRNSANGVFLGCEGYHKSGDDQCKHTMNLISGDEAISIDDQEEASNLFIKKRC

SEQ ID NO: 157472 - protein, 272 aa, Unknown
  Bacterial polypetide isolated from the Sargasso Sea
ESKLISNINLLNGDKIEKFSFKNKEDINLAIDKIKEKKYQITDISSKVYSRNPLGPFTTSTLQQTASSKLGFGASRTMQIAQRLYQGIDIDGDTVGLITYMRTDGTNISKDAINSFRNYINENYGDEYLPDNPLNYSGKKAKNAQEAHEAIRPTEINRSPENLKKYLSSDQLKLYNLIWNRSLSSQMKSAQFDRKTITISSNDEKNIFKVSGSTIKFDGYLKLSKIDDEEEEKILPDVEKGEIKLESFKDEQHFTQPPPRYSEASLVKRWKN

SEQ ID NO: 157473 - protein, 301 aa, Unknown
  Bacterial polypetide isolated from the Sargasso Sea
ILVFVQVLASIGHVRDLSPKNDAIDTEDNFKMKWETSDRGKKVIKDITDAAKNSENLYLATDPDREGEAIAWHVENMLRENPKLENVNIKRITFNQITKNAVLESLKEPRKIDENLVNAYLARRALDFLVGFNLSPVLWRKLPGSKSAGRVQSVALKIITKRELEIEKFDPQEFWSIKALFNIDKSQQFEARLINFHSEKIDKLTIKNEDSASKKQELIDKSNYKISKIEKKEVKRNPYPAFTTSSMQIEASRKLGFSANQTMRVAQKLYEGTEINGEPTGLITYIRTDSVVMSNDAIKRN

SEQ ID NO: 157474 - protein, 43 aa, Unknown
  Bacterial polypetide isolated from the Sargasso Sea
MSKTLVIVESPAKAKTISKYLGSDYIVKSSVGHIRDLPKGKSK

SEQ ID NO: 157475 - protein, 282 aa, Unknown
  Bacterial polypetide isolated from the Sargasso Sea
RYSEASLVKKLEELGIGRPSTYASIISVISNRGYADIENKRFFPTDRGKLLSAFLEKLFSKYVDYDFTAKLEDQLDDITAGKENWIKVLEEFWRDFNLNVSEVKEKRTREVLDMLNESLGSLIFEVDKNGKINRKCKLCDSGQLSLKNSFRGGAFIGCSNYPDCKFTRPLSKTKAAQQLTLAEPKLIGQNDIGKDIYLKNGRFGPYLQYEKEIDDVEEEKKKKKKIKKEDNNMKNVSIPKGIDIKSIDLDRAKYLCSLPISLGKNPENDKDITVNVGRFGPY

SEQ ID NO: 157476 - protein, 66 aa, Unknown
  Bacterial polypetide isolated from the Sargasso Sea
MNLVIVESPAKAKTINKYLGDDYKVLASYGHIRDLPSKNGSVDPDQDFKMEWEVDSFSKKYLKEIT

SEQ ID NO: 157477 - protein, 293 aa, Unknown
  Bacterial polypetide isolated from the Sargasso Sea
LAGHITYPRTDNIAIGGSEEKEYAGSPLEEIRNYITGNFDQAFLSKQVRVYKGKLTAAQEAHEAIRPAIISVKPSDLDLPTSEERLYKLIWNRTVASQMESSKYERKSLTISSEDSKFEFTASSRKNIFAGFEILSTAEEKNIAEFPEGLEEGSKVKIISKQAEQKFSPPPNRYSEASLIKKMEEEGIGRPSTYATILEGLRTKKYIYGGKSMIPSDLGRILTAYLQKVFEDFFIETKFTANLESTLDEIASGNEEYETVLNEFYIELQDYLNRKINDIEISNKDEFKTRQVL

SEQ ID NO: 157478 - protein, 285 aa, Unknown
  Bacterial polypetide isolated from the Sargasso Sea
AQRLYEAGHITYMRTDSVTLSETAQNFIKNAIETKFGSNYHQSRNFNNKSKNAQQAHEAVRPTNFLNNIQNLDADQSNLYDLIWRRSVASQMSDAKVDKTTVKIKSNNHEGLFQSDGEVIKFDGFLKLYIESKDNQNNDDSQNNVLPNFTEGERITKDKILVTQMFSRPPFRFTEASLVKKLEELGIGRPSTYAPTITTVMNRKYVFKGTNNAQTREIVQYIIDSNINRNVNQENYGSNKGKLVPSEVGLLVNEFLTNNFKNIIDYNFTASVENEFDSIANGSKD

SEQ ID NO: 157479 - protein, 40 aa, Unknown
  Bacterial polypetide isolated from the Sargasso Sea
MNLVIVESPAKAKTINKYLGSDYTVLASYGHIRDLPSKNG

SEQ ID NO: 157480 - protein, 149 aa, Unknown
  Bacterial polypetide isolated from the Sargasso Sea
MSKSLVIVESPAKAKTISKYLGSEYIVQSSVGHIRDLPKKGTGTSKRSSIPKHISPEEKARLKVINDRKRLIRRMGIDPDNGWKADWQIIPEKEKVLKSLKKAAKNVDNIYLATDLDREGEAIAWHLKEALGSDKYNYSRVRFNQITKD

SEQ ID NO: 157481 - protein, 297 aa, Unknown
  Bacterial polypetide isolated from the Sargasso Sea
MQIAQKLYQGVEIDGDTVGLITYMRTDGTNLSADAVNDFRNFIKNEYGNEYLPASANNYSGKKAKNAQEAHEAIRPTDINRAPDTLKKYLSSDQQKLYNLIWSRALSSQMEVAQFDRNTITIESEDNKTICKTSGSVLKFDGFLKVYSNTSKDDDEEILPEMSLGPINIEALIDEQHFTQPPPRYSEASLVKKLEELGIGRPSTYASIISTIANRGYAEIVNKRFFPTDRGKLISAFLEKLFSKYVDYNFTAGLEDQLDEITSGKESWIKVLEMFWKDFNNNVSEVKEKRTREVLDL

SEQ ID NO: 157482 - protein, 328 aa, Unknown
  Bacterial polypetide isolated from the Sargasso Sea
KEIGNEYLPESALNYSGKKAKNAQEAHEAIRPTDIIRTPQSVKKYLSTDQNKLYDLIWSRALSSQMQSAKFDRNTITITSNNNDTVCKASGSVLKFDGFLKIYNNQGKDDDENILPSVSKGLVNIESLIDEQHFTQPPPRYSEASLVKKLEELGIGRPSTYASIISTIANRGYAEILNKRFFPTDRGKLISAFLEKLFSKYVDYNFTAGLEDQLDEITTGKESWIKVLELFWKDFNNNVSEVKEKRTREVLDLLNESLGDLVFDKDDKGNIVRKCQLCNSGILSLKNSFRGGAFIGCSNYPECKFTRPLYKAKAAAQAQLAEPKIYGK

SEQ ID NO: 157483 - protein, 280 aa, Unknown
  Bacterial polypetide isolated from the Sargasso Sea
YAQIISTIQDRGYVEIQNRRFFVKKIGHIVIDRLIESFDDIMNYDFTAKFEDNLDKVANGELDWKIVLDNFYNAFQNDLISASDDDGGMRGNQPISTNIKCPCEKTNMVIRNSSNGVFLGCSGYQNLGDDKCKKTLNLVSGDEAISVDDTEEAANLMIKKRCEKCDTSMDNYLIDENRKLHVCGKSPDCDGYFVEDGQFKIKGYDGPILECHKCGSEMQLKTGRFGKYFGCLNEDCGTTRALQRNGEPKPLSMEPISIPNLLCEKCEDHFLLRDSMKGLF

SEQ ID NO: 157484 - protein, 212 aa, Unknown
  Bacterial polypetide isolated from the Sargasso Sea
VGFTLSPVLWRKLPGARSAGRVQSVALRLICEREIEIESFIPQEYWSINGHFSYEDNDPFEAKLTHFDNKKLEQFDINNEDRSEEIKIAIQEANFKITDIQEKNVSRKPSPPFITSTLQMEASRKLNMTAKVTMMTAQKLYEAGLITYMRTDGVQIGKESIEEIRSSIGAIYGEDFLPDELRDYQGNIANAQEAHEAIRPTDPKKNTRYCKK

SEQ ID NO: 157485 - protein, 273 aa, Unknown
  Bacterial polypetide isolated from the Sargasso Sea
NPDAPFSTSTLQQTSSSIFGFGASRTMQIAQKLFQGIEIHGETVGLITYMRTDSTEISKEAIESYRTYLNNNFDSNYLPQEIRTYKSKKAKNAQEAHEGIRPTDINLRPDDLSKFLDTDSLKLYKLIWKRALASQMSSAIFERTALEISSEDNSVKLRANGSIPKFDGFLNIYSEFKVKNEDSEKKNEDEESEDEGSLPSVDLNTKINNVTPENTQHFTLPPPRYSEASLVKKLEELGIGRPSTYASIISVLKMRSYVEVEKNRFIPEDRAIL

SEQ ID NO: 157486 - protein, 248 aa, Unknown
  Bacterial polypetide isolated from the Sargasso Sea
AIRPTEIIRKPEDMKKYLSTDQYKLYNLIWSRSLSSQMQSAKFDRKTITINSDDDKNIFKASGSTLKFDGFLKLYKIDENDDDNENTLPDVEKGDVMFEDHVDEQHYTQPPPRYSEASLVKKLEELGIGRPSTYASIISVIANRGYADINNKRFFPTDRGKLLSAFLEKLFTKYVDYDFTAKLEDQLDDITSGKENWITVLENFWKDFNSNISGVKEKRTREVLDLLNESLGSLIFEVDKDGNIDRKC

SEQ ID NO: 157487 - protein, 294 aa, Unknown
  Bacterial polypetide isolated from the Sargasso Sea
VAVRILVDREREIREFEPEEYWKVRADFEGFHAELSKVDGKAVKIQNEEEANQVTQSIRAGECVLKEIDEREASRNPAAPFTTSTLQQEASNKLGFSVKKTMLIAQQLYEGNFEIPDYSGGLITYMRTDSVTLSKEALAMANEVIEKRFGNEFNLEKPRSFRNRTKNAQEAHEAIRPVNLEILPDQVIPHLERDQGRLYGLIWKRTLATQMKAAKIARTTFRINAGEKSECQFEAKGQQILFPGFLKVYMDSSSDAQSVLGEKDLLLPRVEQGQRLPLKDLNAEQLFTKPPPRY

SEQ ID NO: 157488 - protein, 293 aa, Unknown
  Bacterial polypetide isolated from the Sargasso Sea
REKEDLLKKQVTGGIKASLLKDNITFETKLFSLNGQRISNGSDFDEQTGKLKQGNKSLIISEEKVNDLLKAFSSEDWLVSKIEKKPSTRKPVPPFTTSTLQQEANRKLRLSARETMRCAQGLYERGFITYMRTDSVHLSEQAVRAARECVSSKYGKEYLSNSPRQFNSNARNAQEAHEAIRPAGEIFKTPKETNLTGRDLSLYDLIWKRTVASQMAEARLTMINAEITVGDGLFKSSGKSIDFAGFFRAYVEGSDDPSSSLEQQEIILPNLTAGTSLDVTNKESTHHETKPPA

SEQ ID NO: 157489 - protein, 290 aa, Unknown
  Bacterial polypetide isolated from the Sargasso Sea
GEFKNKEDKIINSRLTVYNGKKVDKLDIKNESEATKIFNDIKNSTFTVGNITKKEAKRNPYPAFTTSTMQIESSRKLGLSASQTMRTAQRLYEGTDIKGETTGLITYMRTDSVVMSKEAINQVRSFVTDNYGANYLPEAPRVYKSKAKNTQEAHECIRPTNIYLTPKDIKQYITLEEYKLYEIIWQRAVSSQMASAVLDQVAVDITNEDKKIVLRANGSTIKFPGMYKVYQEAKDDDKDEEKETILPVMSEGESLNLNEVEKTQHFTSPPPRYTEASLVKKLEELGIGRP

SEQ ID NO: 157490 - protein, 218 aa, Unknown
  Bacterial polypetide isolated from the Sargasso Sea
MPVVVVESPAKAKTINKYLGSDYTVLASYGHVRDLPPKDGSVDPERGFDMKWEIGADSKKHVKAIADALKEDNELILATDPDREGEAISWHLEETLRKKRVIKSDTPVSRVVFNAITKSAVSDAMANPREIDAPLVHAYLARRALDYLVGFNLSPVLWRKLPGARSAGRVQSVCLRLIVEREIEIEAFKPKEYWSVKASLKTPRGQIFTGKLINFAGT

SEQ ID NO: 157491 - protein, 254 aa, Unknown
  Bacterial polypetide isolated from the Sargasso Sea
STSTLQQTASSIFGFGASRTMQIAQRLFQGVEIDGDTTGLITYMRTDSTDLSKEAIHSYRDFIQKNFNSSYLPEEVRSFKSKKAKNAQEAHEGIRPTDILRKPEEMKKYLDEDGFKLYNLIWKRSLASQMSSASFERTAISISSENETIKLRANGSIQTFDGFLNIYSEFNKKPETIESEDNEDDKDLPSITLNDSIDNVKPTSSQHYTLPPPRYSEATLVKKLEELGIGRPSTYASIISVLKMRNYVEVEKNR

SEQ ID NO: 157492 - protein, 276 aa, Unknown
  Bacterial polypetide isolated from the Sargasso Sea
SFSKKYLKEITDKAKNSNKIILATDPDREGEAIAWHVKEFLDEKKLLKDKKVERVVFNEITKKAVTNGIDNPRSIENELVDAYMARRALDYLVGFNISPILWTKLPGSKSAGRVQSVALRLLTEREHEIEVFQPKEFWTLNVNFLTKDNLIINTNINQLDGKKIEKFSFKNKVEVNSGVELIKNKKYKISDITSKTYTRNPSGPFTTSTLQQTSSNKLGFGASRTMQIAQRLYQGIDIDGETVGLITYMRIGWYKYLNRMLLHHLEISLLRTTEMI

SEQ ID NO: 157493 - protein, 248 aa, Unknown
  Bacterial polypetide isolated from the Sargasso Sea
YVPDKPRIFSSSNNSAQEAHEAIRPTDAARDPESLSGALTEEQMRLYRLIWQCFVACQATEAQWDSTSVRLRRTDQDTGAVFKAHGRVLRFDGFYAISGIPRDDGDQVLPDFQKGAELAPFTIEPRQKFQSPPSRYSEASLVKKLEEEGIGRPSTYASIINVIENRGYVEQQDRRFYATALGEKVTEFLEEGFESQFIEIGYTREIEQELDQIAEGSKLWTDMLHEFYKALESRIEVAKELPHVKGKG

SEQ ID NO: 157494 - protein, 183 aa, Unknown
  Bacterial polypetide isolated from the Sargasso Sea
MNSVVVVESPAKAKTIEGYLGDSYSVIASFGHVRDMEEKDGAVVPGDWTNIKWSLNKRGKQQVDEILSLIRNADRLILATDPDREGEAIAWHICQLLEEKKVLEDKQVYRAVFNSITKNSITESINNLKEIDIDRVESYLARRVLDYLVGFNISPLLWRRLPGARSAGRVQSVALKLICEREA

SEQ ID NO: 157495 - protein, 224 aa, Unknown
  Bacterial polypetide isolated from the Sargasso Sea
PSKNGSVDPDNNFQMLWEIDAFSKKYLKEITDTAADSNKIILATDPDREGEAIAWHVKEVLGQKKLLKDKKVERVVFNEITKKAVTKGIENPRDIEPQLVDAYMARRALDYLVGFNISPILWTKLPGSKSAGRVQSVALRLITEREKEIELFNPKEYWTLTSNFTNKDNKSILSKLSLYNGQKIERFTFKNKNEIDQAKDVINKSKFTINDVNTKIFKRNPLTP

SEQ ID NO: 157496 - protein, 307 aa, Unknown
  Bacterial polypetide isolated from the Sargasso Sea
ILCEKEDERDLHIPEEYWPFESSFDFLGTSFEAKLTQIFERSINKEPLKDEQEINNLVNELEATSFKLKNIESRAQSSSPKPPFRTSTLQMSAASGLGFTADRTMQAAQKLYEGGLITYLRTDGISISTSPNTGEPFSEEKPGPPPLQEIRNFISSNYDSTFLSKEPRIYKSKVQNSQEAHEAIRPTDISMTPSDAGLSGDEEKLYTLIWNRTVASQMESSKYERKTLVISSEDNKYEFRASSRKNIFKGFEILTGTEDEKVTLFPEGLEEGSQLNLISNKYEQKFTSPPNRYSEASLIKKMEEEGI

SEQ ID NO: 157497 - protein, 120 aa, Unknown
  Bacterial polypetide isolated from the Sargasso Sea
MSKLVIVESPAKAKTIQKYLGDGFTVLPTIGHIRELPKKDAIDPNNGYSMKYIVSPGKEDAVKKIKSDAKSAEQVILATDPDREGEAIAWHVADIISKAKFEQPDIKRAVFYEISEKAVK

SEQ ID NO: 157498 - protein, 67 aa, Unknown
  Bacterial polypetide isolated from the Sargasso Sea
MNLVIVESPAKAKTINKYLGDNYTVLASYGHIRDLPSKNGSVDPDQNFKMEWEVDSFSKKYLKEITD

SEQ ID NO: 157499 - protein, 277 aa, Unknown
  Bacterial polypetide isolated from the Sargasso Sea
RALDYLVGFNISPILWTKLPGSKSAGRVQSVALKLITEREHEIESFKPEEFWTLSIKFADQKNQNITASISQLDDSKIEKFSFRNKDEINKAISSINKKKFSITDISSKVINRNPSGPFTTSTLQQTASSRLGFGASRTMQIAQKLYQGIEIEGETIGLITYMRTDGTNLSKDAVSTFRDYIKKEIGNEYLPKDALNYSGKKAKNAQEAHEAIRPTDIIRTPQSVKKYLSTDQNKLYDLIWSRALSSQMESAKFDRNTITITSDNNDNICKAQWVQY

SEQ ID NO: 157500 - protein, 274 aa, Unknown
  Bacterial polypetide isolated from the Sargasso Sea
GLVTDRENEINAFIPEEFWNINASFSSNSKKYEGQLFKLPGVSQKDFKINNVSEAENIENIIKTSKFNIESIKVTKRSSKPSAPYTTSSLQQDASTRLNMSPSNTMRNAQELFEGVEGQEGLITYMRTDSPSLSNEAMKDIHNQIINSYGDKYFEKRIFKAKVANAQEAHEAIRPTSVSRTPESVKSLLNEYQYKLYQLIWNRTVASQMTNSLTEKTTLITSSSTEEDGYKFKSEADKLVFDGFKKLIKSNEKYDELPDLSENQAVDLEEIEKE

SEQ ID NO: 157501 - protein, 170 aa, Unknown
  Bacterial polypetide isolated from the Sargasso Sea
MNLVIVESPAKAKTINKYLGKDYKVLASYGHVRDLPSKNGSVDPENNFRMEWELDSFSKKYVKEITDAAAESEKIILATDPDREGEAIAWHVREILESKKLLKGKKVERVVFNEITKKAVTNGINNPREIESLLVNAYMARRALDYLVGFNISPILWTKLPGSKSAGRVQ

SEQ ID NO: 157502 - protein, 150 aa, Unknown
  Bacterial polypetide isolated from the Sargasso Sea
MSKSLVIVESPAKAKTISKYLGSEYIVESSVGHIRDLPKKASPNSKRASIPKDVSPEEKLRLKSINDRNRLIRRMGIDPDNGWKADWQIIPEKEKVIKSLKKAAKGVDHIYLATDLDREGEAIAWHLKEALGPEKYEYSRVRFNQITKSA

SEQ ID NO: 157503 - protein, 286 aa, Unknown
  Bacterial polypetide isolated from the Sargasso Sea
SYLPNEPNNYSGKKAKNAQEAHEAIRPTDISRTPDSIKKFLSTDQIKLYDLIWSRALSSQMEAAKFDRKTITIVSNNNLNLFKCSGSTIKFDGFLKLTKIDDEDEKILPDVNKEEVLAEEFIDAQHFTQPPPRYSEASLVKKLEELGIGRPSTYASIISVISNRGYADVINKRFFPTDRGKLLSAFLEKLFKKYVDYNFTAGLEEQLDDITSGKEEWIKVLDNFWKDFNSNVSNVKEKRTREVLDLLNESLGELIFESDENGKIDRKCKLCNTGELSLKIVSEVVL

SEQ ID NO: 157504 - protein, 263 aa, Unknown
  Bacterial polypetide isolated from the Sargasso Sea
EYNVSDSKQVVKKPPLPFSTSILQQKASNELGYSPKQTMRVAQNLYEAGHITYMRTDNKVYSPEFIKTIKKFIQNRWDKNYVSKNLSKVTLGGKKKKKKDDTAQEAHEAIRPTNIENNILEIAGKISNKEKRLYELIWKNTMKSCMSDAVFDSITAFISAPYEKKYKCNEEKCIFSGWKIIDNITVHDDFKIYEYLFKKKKGSIVKYNEIRSRVILKNLKTHYTEARLVNQLEKMGIGRPSTFSSLISKIQDRNYVKKEDVQG

SEQ ID NO: 157505 - protein, 257 aa, Unknown
  Bacterial polypetide isolated from the Sargasso Sea
MHVVVVESPAKAKTISKYLGDDFVVLASYGHVRDLPSKDGSVRPDDDFAMTYETNPNSVKHIREIVRALKNAEHLYLATDPDREGEAISWHVLKELEQRNAVNGVDVKRIVFNEVTRGAVRESISQPRDLDMDLINAQQARRALDYLVGFTLSPVLWRKLPGSRSAGRVQSVALRLICERELEIEAFKPQEYWSIEAALRAADGTPFTARLTSLEGEQLDKFSLGNAEDAECAVEILREHTHLTVTGIEAKELQRHP

SEQ ID NO: 157506 - protein, 295 aa, Unknown
  Bacterial polypetide isolated from the Sargasso Sea
MNRQSVTPEQHFTQPPPRFSEASLVKKLEELGIGRPSTYASIISVLQDRNYVRLDKRRFFPEDRGRLVTAFLSSFFTKYVEYDFTADLEEKLDDISGGRMEWKAVLRDFWASFNEAIGGTSDLRVREVLDALNELLGPHFFGLDNDGNLKRSCPSCDGGKLSLKLGRHGAFIGCSNYPDCKHTRPLAVPNGEDEGAALTDNGPKELGIEPETGFAVSLRRGPYGYYIQLGEQEGKKKPKRATLTKDMDPAEVDLKMALGLLALPREVGIHPETGDIITAAIGRFGPYIKMGGTYV

SEQ ID NO: 157507 - protein, 270 aa, Unknown
  Bacterial polypetide isolated from the Sargasso Sea
KYKLTGVVTDNNDNTLDVSFKFKNKNISTKELNMLMNLFVTTIMFSVSNYEIKQEKSHPSPPLITSTLQQLAQKTHGFKVAHTMSIAQKLYENGLITYMRTDSTFINNEFESILEGKIIKDYGKEYFYKKTRKKVKGAQEAHEAIRPTKLNAQLTDDKYNDCDKKLYHLIVKRTIQAYMSPAIYDVHLLEFSNESIDRYGLFTSKEQFIQFDGYLKYSNNNDTIKGINQKLYTEDITEKEFTLKTGKAINSISNPPQYYNESSIVKQLNQ

SEQ ID NO: 157508 - protein, 109 aa, Unknown
  Bacterial polypetide isolated from the Sargasso Sea
MILVIVESPAKAKTINKYLGSEYKVLASMGHVRDLPAKSGSIDPENNFEMKWEKTTSRAKTLREIEHAVEKSEKIVLATDPDREGEAISWHLFELLNKKKSKNFEKGCF

SEQ ID NO: 157509 - protein, 243 aa, Unknown
  Bacterial polypetide isolated from the Sargasso Sea
FWTLNIIFKNNKNEKINTTISQLDGNKVEKFSFKNKQDINNALSQIKNKKYNITDISSKTYNRNPSGPFTTSTLQQTASSKLGFGASRTMQIAQRLYQGIDIDGETVGLITYMRTDGTNISKDAIISFRDFIIQNYGDKYLPEQPLNYSGKKAKNAQEAHEAIRPTEIIRKPEDMKKYLSTDQYKLYNLIWSRSLSSQMQSAKFDRKTITINSNDDKNIFKASGSTLKFDGFLKLYKIDESDD

SEQ ID NO: 157510 - protein, 203 aa, Unknown
  Bacterial polypetide isolated from the Sargasso Sea
MAKKIIIVESPAKARTITKFLDKDYSVMASMGHVRDLPSSKLGFDPENNFIPQYEISKDKRKVVSDLKKQIDKNTEVFLATDEDREGEAISWHLLEALGLKSSSVKRIVFHEITESAIINALENPRDVDQQLVNAQQARRILDRAVGYKLSPLLWKKIKPGLSAGRVQSVSVYILVEREREIRKFVPEEYWKIKAEFKDFSAD

SEQ ID NO: 157511 - protein, 305 aa, Unknown
  Bacterial polypetide isolated from the Sargasso Sea
VITSEFGKKYILKEPRKYKSRAVNAQEAHEAIRPVDFSQKPTMVQTHLSHDQFRLYSLIWKRALASQMTAAEIARTTINIEAGQEKEYLFEAQGQRVIFPGFLNVYAETSDEQSDTLSEKDVILPKVEKGEMLALKDSEEPVDMDKLFTKPPPRYTEASLVKKLESEGIGRPSTYAPTISTIQDRGYVELTDEKKLKPTSIGEVVTDFLANHFTKIVNLGFTAEIERNFDRIAKGDEDWVEMMTDFYEPFHENVVEKDKSVSRAEVLKRRELGTDPESGKPVSVSVGRYGPMVQIGTREDEEKHG

SEQ ID NO: 157512 - protein, 304 aa, Unknown
  Bacterial polypetide isolated from the Sargasso Sea
YSGKKAKTAQEAHEAIRPTDINRTPESMKKFLSTDQIKLYDLIWSRALSSQMESAKFDRKTITIVSNDNLNQFKCSGSTIKFDGFLKLTRIEESEDDKILPDVNKEEVSINDFIDEQHFTQPPPRYSEASLVKKLEELGIGRPSTYASIISVISNRGYADVVNKRFFPTDRGKLLSAFLEKLFSKYVDYGFTAGLEDQLDDITAGKEEWIKVLDNFWKDFNLNVSNVKEKRTREVLDLLNESLGELIFESDENGKINRKCKLCKVGELSLKNSFRGGAFIGCSSYPECKFTRPLSKSKANDQIA

SEQ ID NO: 157513 - protein, 228 aa, Unknown
  Bacterial polypetide isolated from the Sargasso Sea
IEKAIDNIKNKKFNITDISSKIVSRNPSGPFTTSTLQQVASSRLGFGASRTMQIAQKLYQGIEIEGDTVGLITYMRTDGTNLSADAVTNFRNFIKKEYGNEYLPENPNNYSGKKAKNAQEAHEAIRPTDINRNPDAVKKYLSSDQQKLYSLIWSRALSSQMETAKFDRNTITIESEDGKTICKSSGSVLKFDGFLKVYSNQNKDDDEQILPEMSKGPINIEALIDEQH

SEQ ID NO: 157514 - protein, 276 aa, Unknown
  Bacterial polypetide isolated from the Sargasso Sea
MPKNLVIVESATKAKTIEKILGQDFKVVSCVGHISDLPVKELGVDVENNFKPKYIIPTEKKPVIKDLKKYVNESDKIWLASDEDREGEAIAWHLYENLNLINKDYDRIVFHEITKNAILSALDSPREINYNLVNAQQARRVLDRLVGYELSPVLWRKVKTGLSAGRVQSVSVRLIVEKEREIKNFLTNSTYKSIATFKNSSGVNLKAELNKKFDSAEAVKAFLVKNINSSYNVSNVEKKPAKKSPTPPFTTSTLQQEASRKLGFGVTRTMSTAQKL

SEQ ID NO: 157515 - protein, 255 aa, Unknown
  Bacterial polypetide isolated from the Sargasso Sea
TNLSADAVTDFRNFIKKEYGNEYLPENPNNYSGKKAKNAQEAHEAIRPTDINRNPDSIKKYLSSDQQKLYSLIWSRALSSQMETAKFDRNTITIESEDGKTICKSSGSVLKFDGFLKVYSNQSKDDDEQILPEMSKGPINIEALIDEQHFTQPPPRYSEASLVKKLEELGIGRPSTYASIISTIANRGYAEIVNKRFFPTDRGKLISAFLEKLFSKYVDYNFTAGLEDQLDEITSGKESWLKVLEMFWKDFNSNV

SEQ ID NO: 157516 - protein, 287 aa, Unknown
  Bacterial polypetide isolated from the Sargasso Sea
ENFIKTIYGDNYLPKELNNYSGKKAKNAQEAHEAIRPTDISRTPDSMKKFLSTDQIKLYDLIWSRALSSQMESAKFDRKTITIVSDDNLNQFKCSGSTIKFDGFLKLTRMDDENEKILPNVDKEKVLADEFNDEQHFTQPPPRYSEASLVKKLEELGIGRPSTYASIISVISNRGYADVVNKRFFPTDRGKLLSAFLEKLFSKYVDYGFTAGLEEQLDDITSGKEEWIKVLDNFWKDFNNNVSNVKEKRTREVLDLLNESLGELIFEADENGKINRKCKLCNTGELS

SEQ ID NO: 157517 - protein, 263 aa, Unknown
  Bacterial polypetide isolated from the Sargasso Sea
KKKSQSVERVYIASDPDREGEAIAAHLASEIPKEKVERVEFTEITKAGIKQGMRQSHSLNDNLVNAQKSRRIIDRLVGYKVSPVLWATLQKNMNFVSTTLSAGRVQSACVKILIERDRKRQKYLKTEYYDLKANLNDEQSETSFAANLNKVGNKNIISSNDFDSDTGKQTNPNALILSKKEAENLASKLEKGSWIVSSVNKKPRTSNPKPPFTTSTLQQEAARKLRFSAKNTMRVAQQLYENGFITYMRTDSTNLSEEAINGS

SEQ ID NO: 157518 - protein, 301 aa, Unknown
  Bacterial polypetide isolated from the Sargasso Sea
FLNIYSEFKVKNEDSEKKNEDEESEDEGSLPSVDLNTKINNVTPENTQHFTLPPPRYSEASLVKKLEELGIGRPSTYASIISVLKMRSYVEVEKNRFIPEDRAILITAFLKGFFGQYIDYEFTAGMEESLDEITSGKIKWTDFLEKFWNGFSANVGSVTDLRITNVLDSLNEILKNHIFEKSSDNETSVSRACPSEGCKGQLSLKVSRFGAFVGCSDYPECKFTRPISYKKIKEAFEDEVLGIDEVSNKEIKLLNGRFGPYVQLGEQEGKEKPQRSSVPKGVSPSIIDFRKAKYLLSLTRE

SEQ ID NO: 157519 - protein, 297 aa, Unknown
  Bacterial polypetide isolated from the Sargasso Sea
SVAVRLIYEKEIEIEQFEPEKFYKINVQGEINGAKLDTSITSLEGEKVDKLFFRDEALANKAKNYLKSNSFFIRKIDERTISRKPKAPFNTSTLQQTANSQLNFSASQTMTIAQGLYMGIDINKETIALITYMRTDSITLSKDSIDTIRENISKEYGDKYLPDKPIEYNSRKKNAQEAHEAIRPTDISIKPEDIKDFLNEEQFKLYDLIWKRTIASQMTSAETNQNTLQIDCEEKNITLKATLGKLIFDGYKKVYNLQEDDEEQIISLLENIKQNDKYIVYEVEALESFTSPPSRYT

SEQ ID NO: 157520 - protein, 321 aa, Unknown
  Bacterial polypetide isolated from the Sargasso Sea
FSVEEVKNFLEKNYNSIFNISSIDKKPAKKSPTPPFTTSTLQQEASRKLGFGVTRTMSTAQKLYEAGLITYMRTDSVTISNEAKSSIVQKIESKYGEDYVYLRDYKNKNKSAQEAHEAVRPTDINIEEITSDYDQQRLYHLIWKRTISSQMSDAQIERTVVNIKSDSYNEFFVARGEVIKFDGFLRVYNEGTDDEIEEEKGVLPALSINENLNLLSISSRESFSRPPSRFTEASLVKKLEELGIGRPATYATTISTIQNRGYIAKGVNEGLDRNYNLIEFSKNGIKESQLKEKTGSNKGKLVPTDIGMIVNDFLVDNLNIF

SEQ ID NO: 157521 - protein, 282 aa, Unknown
  Bacterial polypetide isolated from the Sargasso Sea
EEFWTLNVNFKTTKGDILNSNIVLLNNLKIEKFSFKNKEDINNAIELIKKSKYKISDINSKIYTRNPLGPFTTSTLQQTSSTKLGFGASRTMQIAQRLYQGIDIEGDTVGLITYMRTDGTNISNDAVNDFRKFIKNSYGDNYLPKEPNNYSGKKAKNAQEAHEAIRPTDITKTPESLKKFLSVDQIKLYDLIWSRALSSQMEAAKFDRKTITIVSNDSINQFKCSGSTIKFDGFLKLTRIDENDDEKILPDVNKEEVSTNEFIDEQHFTQPPPRYSEASLVK

SEQ ID NO: 157522 - protein, 164 aa, Unknown
  Bacterial polypetide isolated from the Sargasso Sea
GSDMELKNGRFGKYFGCTNEECKNTRKLLRNGEAAPPKEDPVDLPELPCEKSDAHFMLRDGASGIFLAAHNFPKSRETRAPKVEELARFRDRISPKFYYLADAPQTDPDGNPAIVRYSRKTKQQYVMSENDSGKATGWSAWYENGKWQEQAAKKPAAKPKAKKK

SEQ ID NO: 157523 - protein, 270 aa, Unknown
  Bacterial polypetide isolated from the Sargasso Sea
SNGIDNPRNIETNLVDAYMARRALDYLVGFNISPILWTKLPGSKSAGRVQSVALRLVTEREHEIEQFKAEEFWSLNVNFKSLKGDILSSNIILLNNSKIEKFSFKNKEDINNAIEIIKKSKYKISDISSKVYTRNPLGPFTTSTLQQTSSSKLGFGASRTMQIAQRLYQGIDIEGDAVGLITYMRTDGTNISNDAVNKFRNFIKNSYGGNYLPKEPNNYSGKKAKNAQEAHEAIRPTDINRTPESLKKFLSTDQNKLYNLIWSRALSSQM

SEQ ID NO: 157524 - protein, 252 aa, Unknown
  Bacterial polypetide isolated from the Sargasso Sea
MTTKSLVIVESPSKAKTISKYLGKDFVVKSSIGHVRRLTKGNKAINLNDWSISYEIDPKKEKVVKDLKSSAKGVENIFLATDLDREGEAIAWHLKEILGKKFNYSRVRFNEITKGAIQEAFETPGDLDEGLIDAQKTRRILDRIVGYDLSSLLWQKIGSYGKLSAGRVQSVAVRLVVEREKEIKAFSPQEYWEFEVNVRHDERDIVLKLNTKKSGLEVNSKEEAEKIASALKENEIEITSNEKTKRKIPVKP

SEQ ID NO: 157525 - protein, 287 aa, Unknown
  Bacterial polypetide isolated from the Sargasso Sea
QIEPLLVDAYMARRALDYLVGFNISPILWTKLPGSKSAGRVQSVALKLITEREHEIESFKPEEFWTLSVKFINEKNQNITASISQLDNNKIEKFSFRNKDEINKAISNIKKKKFSITDISSKVVNRNPSGPFTTSTLQQTASSRLGFGASRTMQIAQKLYQGVEIEGETVGLITYMRTDGTNLSKDAVSDFRSYIEKEIGNEYLPENPLNYSGKKAKNAQEAHEAIRPTDIIRTPQSVKKYLSTDQNKLYDLIWSRALSSQMETAKFDRNTITILSDNNDTVCKASG

SEQ ID NO: 157526 - protein, 282 aa, Unknown
  Bacterial polypetide isolated from the Sargasso Sea
VIVESATKAKTIEKILGEDYKVVSCVGHISDLPVSEIGVDVDNDFKPKYIIPDEKQQVIKDLKKHVKQSEKVWLASDEDREGEAIAWHLYENLNLSNKESDRIVFHEITKNAILKALDNPRSIDYNLVNAQQARRVLDRLVGYELSPVLWKKVKTGLSAGRVQSVCVRVIVEREREIQKHESKSSFKTQGIFNNLEGKSIKSELDTRFNSDEEIRNFLIQNENATFHINSLSKKPSKRSPTPPFTTSTLQQEASRKLGFGVSRTMSTAQKLYEAGLITYMRT

SEQ ID NO: 157527 - protein, 89 aa, Unknown
  Bacterial polypetide isolated from the Sargasso Sea
MNLVVVESPAKAKTINKYLGKDYIVLASYGHIRDLPSKNGSVDPENNFQMLWEIDSFSKKYLKIITDTAADSSKIILATDPDREGEAIA

SEQ ID NO: 157528 - protein, 251 aa, Unknown
  Bacterial polypetide isolated from the Sargasso Sea
YEGIKLNNETSGLITYMRTDGVQIGNEAIKNVRDKISTDYGDEFLPSSPRIYKSKAANAQEAHEAIRPTNFDLDPQSMQSFLDADQFKLYELIWKRTISSQMESASLDKTSIDILSNDQKIIFRTNGSQIIFPGFLKVYKEGIDNINENNNDSDNDENKIIPPLNEKDKVKLLSSKEEQHFTQPPPRFTDASLVKRMEELGIGRPSTYASILKVLVDRNYVKKEGSKHIPEERGRILTAFLSNFFGKYIQY

SEQ ID NO: 157529 - protein, 255 aa, Unknown
  Bacterial polypetide isolated from the Sargasso Sea
KLPGSKSAGRVQSVALRLLTEREHEIEQFKPEEFWSLNVSFKTSKGDILDSNIVLLDNSKIEKFSFKNKDDINNAIELIKNSKYKISDISSKIYTRNPLGPFTTSTLQQTSSSKLGFGASRTMQIAQRLYQGIDIEGDTVGLITYMRTDGTNISNDAVTNFRNFIKNSYGDNYLPYEPNNYSGKKAKNAQEAHEAIRPTDITRTPESIKKFLSTDQNKLYNLIWSRALSSQMEPAKFDRKTITINSDNGLNQFKC

SEQ ID NO: 157530 - protein, 298 aa, Unknown
  Bacterial polypetide isolated from the Sargasso Sea
SWHLLEAASIDPNKVKRVVFHEITKPAIEEAFANPRSLDLDLVDAYQARRVLDRVVGFKLSPVLWRKVKRDLSAGRVQSVAVRIIVDKEDEINSFEKDEYWTLDAILETGNSSSFKASLVSINGNKGNDKKHLIKNEKESKSILKELSNSEFQVSKFETKETKRRPSAPFITSTLQQESSRRLRLSATRTMNIAQGLYEGKAIGGTDDVVGLITYMRTDSTEVSSAALTEIASFIKDKYGPNYLPEKPRLYSKKVQGAQEAHEAIRPTSILRTPDSLRDFLDNDELRLYTLIGNAASS

SEQ ID NO: 157531 - protein, 197 aa, Unknown
  Bacterial polypetide isolated from the Sargasso Sea
MSSVVIVESPAKAKTINKYLGSDYTVLASYGHVRDLPPKDGSVRPDDNFSMSWQIDDKSQKHVREIAKALKSADRLYLATDPDREGEAISWHVQEILNETKSLDTVEVKRVVFNEITKDAILAAFETPRELDNELIEAYLARRALDYLVGFTLSPVLWRKLPGSRSAGRVQSVALRLICERETEMKISCRANTGRSR

SEQ ID NO: 157532 - protein, 277 aa, Unknown
  Bacterial polypetide isolated from the Sargasso Sea
HFTQPPPRYSEASLVKKLEELGIGRPSTYASIISVISNRGYADIDNKRFFPTDRGKLLSAFLEKLFSKYVDYDFTAKLEDQLDDITAGKENWIKVLEEFWRDFNLNVSEVKEKRTREVLDMLNESLGSLIFEVDKDGKINRKCKLCESGQLSLKNSFRGGAFIGCSNYPDCKFTRPLSKSKAAQQLTLAEPKLIGQNDIGKDIYLKNGRFGPYLQYEKEIDNVEEEKKKKKKIKKEDNNMKNVSIPKGIDIKSIDLDRAKYLCSLPISLGKNPENDK

SEQ ID NO: 157533 - protein, 317 aa, Unknown
  Bacterial polypetide isolated from the Sargasso Sea
NISQWGAQVRKQKEPFDPFLLKLARINNESVGTKDRKLLAGAVKTVEQLNCIELELRDSALEVTDISTKEVTRKARPPFITSTLQQSASGALSFTPARTMGVAQKLYESGLITYMRTDSFNIAQTAQSECREFIKIYYGEEFIPEKANIYSRKSSSAQEAHEAIRPTDVAVKPNDNGLNLEPAEQKLYKLIWERFVASQMVPARISRRTVEAEAGNENSYLFRATSSDILFPGYMQASGIEAAEDRKKQDDEEDGIIPPLELNESLDVIDWLTEEKETKPVARYSEASLIKALEENGVGRPSTYAAIMSKLDKREYV

SEQ ID NO: 157534 - protein, 163 aa, Unknown
  Bacterial polypetide isolated from the Sargasso Sea
MNLVIVESPAKAKTINAYLGNNFKVLASYGHVRDLPSKNGSVDPENNFEFEWETSDKSKKNLSEIYKAAEQSDTLFLATDPDREGEAIAWHILELLKKKKLLKDKSVKRVVFSEITKTAVSRGIENPREIDNSLVSAYLARRALDYLVGFNLSPSTLEKTSWS

SEQ ID NO: 157535 - protein, 255 aa, Unknown
  Bacterial polypetide isolated from the Sargasso Sea
MAHTLVIVESPTKARTIRGFLPKGFRVEASMGHVRDLPNNASEIPASAKGQKWANLGVNTEADFEPLYVVPKDKKKIVRELKDALKGAEQLLLATDEDREGESISWHLLQLLSPKVPVKRMVFHEITKEAIGKALDQTRELDMELVHAQETRRILDRLVGYTLSPLLWKKVAWGLSAGRVQSVAVRLLVQRERARRAFRSGSYWDLKAQLELNGSGFEAKLTHVDGRRIANGSDFDKSTGGLKAGSDVRLLRSRR

SEQ ID NO: 157536 - protein, 236 aa, Unknown
  Bacterial polypetide isolated from the Sargasso Sea
MPVLVVESPAKAKTINSYLGSNYTVIASYGHVRDLPSKNGSVDPQNDFKMKWQADSNAQKQIKKIVDALKNDNDLILATDPDREGEAISWHVVESLKNRKVIKKDTPVKRVVFNAITKSSILEAMKYPRQIDMPLVEAYLARVALDYLMGYEISPVLWRKLPGSRSAGRVQSPTLKLIVEREMEIESHVPLEYWLVEVKLKNSNGNFLTAKLFSLDGKRVKDHDITSKNESEKVVD

SEQ ID NO: 157537 - protein, 317 aa, Unknown
  Bacterial polypetide isolated from the Sargasso Sea
TKRIIFHEITKPALIKALESPTTINMNIVRAQHARQCLDILVGFKVTPLLWKHICPYYSKGLSAGRCQTPALRLIYDNANEINNCKGEQTNVVSGYFTKLNARFTLNKTINSDEEVKDFFDEVKTFEFVLNKEPAKKQKVDPPTPFSTSLLQQKSNSLLNMSPKDTMSNCQKLYEAGLITYMRTDNKKYSAEFCKGCEDFIVSNFGEKYVGDIKKNISGDKSAHEAIRPTKISLRPNELPVDYHSKTKRLYELIWTNSIQSLMSAVERLMLHVNITAPLGYKFQSIFHKNIFDGWQVVGTKKEASQYDYIMMVCDNS

SEQ ID NO: 157538 - protein, 276 aa, Unknown
  Bacterial polypetide isolated from the Sargasso Sea
RVAQTLYEQALFTYMRTDSTNVVGEAISEMRQLIKTKYGDDYLPGSPKFYSKKNQQAQEAHEAVRPTQVNITPKESGLRGDELKLYSLIWNRAVSSQMESAKLTQTEVFIDSHDKEFTFKANGSQVVFNGFLEVYEEGSDDQQEDDAKEYRLPSSLNINDSLDKEAIETDQHFTKPPARYTEASLIKELEEKGIGRPSTYASIMNSIKKRDYASLENKQFKPASRGRVVVSFLDAYFSDYFKYEFTAEMEESLDYIAKGDQEWTTLLDNFWEWFWS

SEQ ID NO: 157539 - protein, 300 aa, Unknown
  Bacterial polypetide isolated from the Sargasso Sea
TDVNKKPSDMKKYLSTDQSKLYELIWNRAVSSQMNPAEFDRKSITIESENKEISFKANGSTVKFEGYLKVYKFEEKDEDLKNILPEVKVGDKVSIKELIDEQHFTDPPPRYSEASLVKKMEELGIGRPSTYASIISVLSTRNYVELLNKRFHPTDRGKLLSAFLEKLFTKYVDYNFTADLENQLDEITSGKIDWVKVLDGFWKDFYSNVGQVKEKRTREVLDLLNESLGDLVFERDNNDAIDRKCKLCENGQLSLKNSFRGGAFIGCSNYPECKFTRPLSKSKASQQVNLAEPKLMEKMT

SEQ ID NO: 157540 - protein, 246 aa, Unknown
  Bacterial polypetide isolated from the Sargasso Sea
VFNEITKKAVTHGIDNPRQIEPLLVDAYMARRALDYLVGFNISPILWTKLPGSKSAGRVQSVALKLITEREHEIELFKPEEFWTLNIKFNDSNKNSFTANISQLDNKKVEKFSFKNKTDVNSAIDNIKTKKFKIIDISTKIVNRNPSGPFTTSTLQQVSSGRLGLGASRTMQIAQKLYQGIEIDGETIGLITYMRTDGSNISKEAVPLFRDYIQKEYGDKYLPKEPLNYSGKKAKNAQEAHEAIRP

SEQ ID NO: 157541 - protein, 211 aa, Unknown
  Bacterial polypetide isolated from the Sargasso Sea
TLIWNRTVASQMESSRYERKTLVITSTDNKLEFRASSRKNIFKGFEILTGTDDEKVTLFPEGLEEGSELSLISNKYEQKFTLPPNRYSEASLIKKMEEEGIGRPSTYATIVKGLRTKKYAYGAKSIIPSDLGRVLTSYLKKVFEDFFIETEFTARMEADLDEVASGNKNYEEVLNAFWAELQNYLNRKINDIEISNKDEFKTRQVLDLLNE

SEQ ID NO: 157542 - protein, 298 aa, Unknown
  Bacterial polypetide isolated from the Sargasso Sea
IYSEFKEKNEDSEKKNEDEESEDEGSLPSVDLNTKINNVTPENTQHFTLPPPRYSEASLVKKLEELGIGRPSTYASIISVLKMRSYVEVEKNRFIPEDRAILITAFLKGFFGQYVDYEFTAGMEESLDEITSGKIKWTDFLEKFWNGFSTNVGNVTDLRITNVLDSLNEILKNHIFEKSSDNETSVSRACPSEGCKGQLSLKVSRFGAFVGCSDYPECKFTRPISYKKIKEAFEDEVLGIDEVSNKEIKLLNGRFGPYVQLGEQEGKEKPQRSSVPKGVSPSIIDLEKAKYLLSLPRE

SEQ ID NO: 157543 - protein, 47 aa, Unknown
  Bacterial polypetide isolated from the Sargasso Sea
MNLVIVESPAKAKTINKYLGNNYTVLASYGHIRDLPSKNGSVDPDHD

SEQ ID NO: 157544 - protein, 50 aa, Unknown
  Bacterial polypetide isolated from the Sargasso Sea
MNLVIVESPAKAKTINKYLGDKYKVLASYGHIRDLPSKNGSVDPDKIFEM

SEQ ID NO: 157545 - protein, 246 aa, Unknown
  Bacterial polypetide isolated from the Sargasso Sea
MEKYDLKSSSEAELAAQAITTRELVVASVESKPTSRNPFAPFMTSTLQQEAGRKYGMGARQTMQAAQRLYEAGHITYMRTDGIDMAPEAVTSTREAIRERYGDKFLPASPRFYKNKAKNAQEAHECIRPTSISRDAKQLKLSDTDQFKLYDLIWKRTISCQMESAKLERTSVDLQSLDKEVTLRANGQVVLFDGFLKVYEESSDDAEQSEDESRLPQMSEGENIEKLSVDPEQHFTQPPPRYTEAS

SEQ ID NO: 157546 - protein, 281 aa, Unknown
  Bacterial polypetide isolated from the Sargasso Sea
SNFRNFIKNTYGNEYLPKDPLNYSGKKAKNAQEAHEAIRPTDIDKSPNKVKKYLSPEQYKVYDLIWSRALSSQMQSAQFDRNTITITSDNKETILKTTGSVIKFDGYLKVYKDPKKEDGETILPKMSNGPVNIEDLIDEQHFTQPPPRYSEASLVKKLEELGIGRPSTYASIISVISTRGYVENLNKRFHPTDRGKLITAFLEKLFSKYVDYNFTAGLENQLDEITSGKEGWIKVLEMFWKDFNQNVTEVKEKRTREVLDLLNDSLGTLIFERDNDGNIDR

SEQ ID NO: 157547 - protein, 143 aa, Unknown
  Bacterial polypetide isolated from the Sargasso Sea
MGKSLVIVESPAKAKTINQYLGKEYVVRSSVGHVRDLPVSGSKKKVDPKKRAEQAAKTRKMSPAQKARYRKEKARRDLVVNMGINPDKGWEANYQVLPDKVKVVNELQKLAAESDAIYLATDLDREGEAIAWHLKEVIGSDSQ

SEQ ID NO: 157548 - protein, 288 aa, Unknown
  Bacterial polypetide isolated from the Sargasso Sea
DYLPDQPNNYSGKKAKNAQEAHEAIRPTDINNDPSMLKKYLSSDQHKLYNLIWSRALSSQMQTAKFDRKTIIINSDDGKNIFKASGSVVKFDGFLKLYKIDENNDEEKILPEVSKGPINIESFIDEQHFTLHPPRYSEASLVKKLEELGIGRPSTYASIISVIANRGYADILNKRFFPTDRGKLISAFLEKLFTKYVDYNFTAKLEDQLDDITSGKEDWIKVLEQFWSDFNQNVSQVKEKRTREVLDMLNESLGSLIFETDDNGNIDRKCKLCQTGQLSLKNSFRGGA

SEQ ID NO: 157549 - protein, 285 aa, Unknown
  Bacterial polypetide isolated from the Sargasso Sea
AQYERTSVDITSDDKILELRANGSIQKFDGFLNVYGEFKENDTSTSDESNENTDNNEKLLPDLTMDTVFATHNPESSQHFTLPPPRYSEASLVKKLEELGIGRPSTYASIISVLKMRAYVDLEKNRFVPVDRAILITAFLKGFFDKYVDYDFTADMENKLDDITTGKISWTEFLSLFWKDFSKNINQVTELRITNILDNLNESLKSHIFKTEESTNKITRVCPTGCGGELSLKVSRFGAFVGCTNYPDCKFTRPISHKKVKEVFDDIILGIDEATSKEIKLLNGR

SEQ ID NO: 157550 - protein, 254 aa, Unknown
  Bacterial polypetide isolated from the Sargasso Sea
IESSRKLGLTASQTMRTAQKLYEGTEINGETTGLITYMRTDSVMMSNEAINQVRNFVSQNYGNEYLPESPRVYKSKAKNAQEAHECIRPTDINLTPKDIKQYITGEEFKLYEIIWQRAVSSQMASAVLDQVAVDIVDEDQKITLRANGSTIKFPGMYKVYQEAKDDDKDEEKETILPMMNEGETLDLQEVIKNQHFTMPPPRYTEASLVKKLEELGIGRPSTYASIIKVLQDRDYVILDKKRFNPHDRGRIVSI

SEQ ID NO: 157551 - protein, 333 aa, Unknown
  Bacterial polypetide isolated from the Sargasso Sea
INDAVSDFRNFIKNSYGDDYLPNEPNNYSGKKAKNAQEAHEAIRPTDITRTPESLKKFLSTDQNKLYNLIWSRALSSQMEAAKFDRKTITINSDNSLNQFKCSGSTIKFDGFLKLTRIDENEEEKILPDVNKEEVLVNEFIDEQHFTQPPPRYSEASLVKKLEELGIGRPSTYASIISVISNRGYADVINKRFFPTDRGKLLSAFLEKLFTKYVDYGFTAGLEDQLDNITSGKEEWIKVLDKFWKDFNINVSSVKEKRTREVLDLLNESLGELIFESDENGKINRSCKLCNNGELSLKNSFRGGAFIGCSYYPECKFTRPLSKSKANDQYALA

SEQ ID NO: 157552 - protein, 256 aa, Unknown
  Bacterial polypetide isolated from the Sargasso Sea
KAHLKKSSKEIEAVLTHYDGEKLATGKDFDDKTGKLIEGRKVILIGEQKIRELKERFTSQPWLVDSIEEKKSTRKPSPPFTTSTLQQESNRKLKLSARDTMRIAQSLYERGLITYMRTDSVHLSDQAITAARTHVEQMYGKEYLSPKIRQFTTKSKGAQEAHEAIRPSGVTFQLPQHTGLSGVELRLYDLIWKRTMATQMADAKQTHVSLNVKVDEGIFRAAGKRIDFPGFFRAYVEGSDDPEAALDDRELHLPKV

SEQ ID NO: 157553 - protein, 317 aa, Unknown
  Bacterial polypetide isolated from the Sargasso Sea
SLIAAANSQFGMLAKQTMKAAQSLFLAGHITYPRTDNIAIGGSEEKEYSGSPLEEIRNYIADNFDQPFLSKQVRSYKGKLTTAQEAHEAIRPALISVKPSDLDLSTSEERLYKLIWNRTVASQMESSKYERKSLTISSEDSKFEFTASSRKNIFAGFEILSTAEEKNIAEFPEGLEEGSEVKIIARQAEQKFSPPPNRYSEASLIKKMEEEGIGRPSTYATILEGLRTKKYIYGGKSMIPSDLGRILTAYLQKVFEDFFIETKFTANLEATLDEIASGNEEYETVLNEFYIELQDYLNRKINDIEISNKDEFKTRQV

SEQ ID NO: 157554 - protein, 48 aa, Unknown
  Bacterial polypetide isolated from the Sargasso Sea
MNLVIVESPAKAKTINKYLGDNYTVLASYGHIRDLPSKNGSVDPDQNF

SEQ ID NO: 157555 - protein, 306 aa, Unknown
  Bacterial polypetide isolated from the Sargasso Sea
VQSVSVRLLVRRERERRSFKKASYWGIKASLVKDNVTFETKLFSLNSQRISNGSDFDEQTGKLKQGNKSLTIGEEKANDLLKNFSSEDWLVSKIEKKSSTRKPVPPFTTSSLQQEANRKLRLSARETMRCAQGLYERGFITYMRTDSVHLSEQATKAARECVSSMYGKEYLSNSPRHFNSTARNAQEAHEAIRPAGEVFKTPKETNLTGRDLSLYDLIWKRTVASQMAEARLTMINAEISVGDGLFKSSGKSIDFPGFFRAYVEGSDDPSSSLEQQEIILPNLTTGTCLEVTNKESTFHETKPPAR

SEQ ID NO: 157556 - protein, 75 aa, Unknown
  Bacterial polypetide isolated from the Sargasso Sea
MNLVIVESPAKAKTINKYLGDDYKVLASYGHIRDLPSKNGSVDPDQDFKMEWEVDSFSKKYLKEITDAAKNSSKI

SEQ ID NO: 157557 - protein, 248 aa, Unknown
  Bacterial polypetide isolated from the Sargasso Sea
KNLTEIIIFQKNQTTISGKKAKNAQEAHEAIRPTDISRNPDSMKKFLSTDQIKLYDLIWSRALSSQMEPAKFDRKTITIVSDDNLNQFKCSGSTIKFDGFLKLSRIDDEDEKILPNVDREAVSTEEFIDEQHFTQPPPRYSEASLVKKLEELGIGRPSTYASIISVISNRGYADVVNKRFFPTDRGKLLSAFLEKLFSKYVDYGFTAGLEEQLDDITSGKEEWIKVLDNFWKDFNNNVSNVKEKRTRE

SEQ ID NO: 157558 - protein, 299 aa, Unknown
  Bacterial polypetide isolated from the Sargasso Sea
SLLNYKLQTSARSNLGFQPKKTMGIAQRLYQEGLITYMRTDSIRLSDNAIKASRDYISENFSSKHLPPQPNLYGDTKNAQAAHEAIRPSGDKFITPEELLSTHKEDSDEYKLYKLIFNTTVASQMTDAQGITKTIEIEVTDPEYSSLTLSISGTTWTFGGYRDLIKDATEKSQELPDLKENDEVSIVSAEKEEKFTNPPNRYSSTSLINKLEELGIGRPSTYVSIIDSITSVFINAESSLKPRILAMALINNFMKPHFNQYIDYEFSKSMEDDLDKILESSDPEKSKIEFLENSFNTIN

SEQ ID NO: 157559 - protein, 264 aa, Unknown
  Bacterial polypetide isolated from the Sargasso Sea
MTQKSLVIVESPTKAKTIRKFLPKNFEVIACVGHIRDLPSSAASIPKKYKDYEWAKIGVNVNENFSPIYVLSKGKSKIIQDIKKSLKEKTTLYLATDEDREGESISWHLCEVLKPKITTKRMVFHEITKAAIEKSLKNPRELDMNLVRAQEARRILDRLFGYTLSPLLWKKIAYGLSAGRVQSTGLRLIVERERERRKFVPAHFSSIKAKLNKKDSSQNENMIASLVLYKNKKIAIGSDFNPYTGKLKEEKEKTHYILSKKEAE

SEQ ID NO: 157560 - protein, 289 aa, Unknown
  Bacterial polypetide isolated from the Sargasso Sea
LIQDAVSAFRDYIEKEIGNEYLPKEALNYSGKKAKNAQEAHEAIRPTDIIRTPQSVKKYLSTDQNKLYDLIWSRALSSQMQSAQFDRNTITITSDNNDTICKASGSVIKFDGFLKIYNNQAKSDDENILPSMSKGPINIEALLDEQHYTQPPPRYSEASLVKKLEELGIGRPSTYASIISTIANRGYAEILNKRFFPTDRGKLISAFLEKLFSKYVDYNFTAGLEDQLDEITTGKESWIKVLELFWKDFNNNVSEVKEKRTREVLDLLNDSLGDLVFDKDDKGNIVRKC

SEQ ID NO: 157561 - protein, 305 aa, Unknown
  Bacterial polypetide isolated from the Sargasso Sea
TNGIDNPRNIESNLVEAYMARRALDYLVGFNISPILWTKLPGSKSAGRVQSVALRLLTEREHEIEQFKPEEFWTLNINFKTSKGDILNSSIVILNNSKIEKFSFKNKQDINKAIEVINKCKFKISDINSKIYTRNPLGPFTTSTLQQTASSKLGFGASRTMQIAQRLYQGIDIEGDTVGLITYMRTDGTNISNDAINDFRSFIKKSYGDNYLPKDANNYSGKKAKNAQEAHEAIRPTDITKTPDSIKKFLSTDQAKLYDLIWSRALSSQMESAKFDRKTITIVSEDDMHHFKCTGSTVKFDGFLK

SEQ ID NO: 157562 - protein, 289 aa, Unknown
  Bacterial polypetide isolated from the Sargasso Sea
LSLYDLIWKRTVASQMAEARLTMINAEISVGDGIFKSSGKSIDFAGFFRAYVEGSDDPSSSLEQQEIILPNLTTGTCLDVTNKESTFHETKPPARYTEAALVKVLEKEGIGRPSTYASIIGTIVDRGYANISSNTLAPTFTAFAVTALLEEHFPDLVDTTFTAKMESSLDEISSGNLEWLPYLETFYKGKNGLEVKVQKTEGDIDGKAYRQVDFEDLPCVVRIGSNGPWLEGTKIDESGNEIQAKGNLPMDITPGDLDIKQVDQILSGPSDLGTDPKTGEKVFLRFGPY

SEQ ID NO: 157563 - protein, 150 aa, Unknown
  Bacterial polypetide isolated from the Sargasso Sea
MTKSLVIVESPAKAKTISKYLGPEYIVESSVGHIRDLPKKGGTARTRLVVPKDLNPEEKARQKEINARKSLVRRMGVDPDNGWDADWQIIPEKEKVLKALKKAAKNVDNIYLATDLDREGEAIAWHLKEALGTQKYNYSRVRFYQITKDA

SEQ ID NO: 157564 - protein, 305 aa, Unknown
  Bacterial polypetide isolated from the Sargasso Sea
IERQSIDFAGFFRAYVEGSDDPSSSLEQQEIILPNLTTGTLLKVTNKESTFHETKPPARYTEAALVKVLEKEGIGRPSTYASIIGTIMDRGYANISSNSLAPTFTAFAVTALLEEHFPDLVDTTFTAKMESSLDEISSGNLEWLPYLETFYKGKNGLEVKVQKTEGDIDGKAYRQVDFEDLPCVVRIGSNGPWLEGTKIDESGNEIQAKGNLPMDITPGDLDIKQVDQILSGPSDLGTDPKTGEKVFLRFGPYGPYVQLGNNDQDKAKPRRASLPKELKTDDLTLDEALVLLSLPRLLGVHPERG

SEQ ID NO: 157565 - protein, 70 aa, Unknown
  Bacterial polypetide isolated from the Sargasso Sea
MSKSLVIVESPAKAKTISKYLGNEYIVKSSVGHIRDLPKGKSKAKRQNSIPKDASPEEKARLKKSKKEEG

SEQ ID NO: 157566 - protein, 288 aa, Unknown
  Bacterial polypetide isolated from the Sargasso Sea
SSGSVLKFDGFLKVYSNQSKDDDEQILPEMSKGPINIEALVDEQHFTQPPPRFSEASLVKKLEELGIGRPSTYASIISTIANRGYAEIVNKRFFPTDRGKLISAFLEKLFSKYVDYNFTAGLEDQLDDITSGKESWLKVLELFWKDFNSNVSEVKEKRTREVLDLLNDSLGALIFDTNKEGKIVRECKLCNTGSLSLKNSFRGGAFIGCSNYPECKFTRPLSKAKAAAQSQLAEPKFLGKHENGNDIFLKNGRFGPYLQYEKILQENTEEEKPKKAKKTKKKKTEVNE

SEQ ID NO: 157567 - protein, 290 aa, Unknown
  Bacterial polypetide isolated from the Sargasso Sea
KLYQGVEIEGETIGLITYMRTDGTNLSKDAISAFRDYIKKEIGNEYLPETALNYSGKKAKNAQEAHEAIRPTDIIRTPQSIKKYLSPDQNKLYDLIWSRSLSSQMESAKFDRNTITITSDSNDTICKASGSLLKFDGFLKIYKNPSKDEDENILPSMSKGLVNIEALLDEQHFTQPPPRYSEASLVKKLEELGIGRPSTYASIISTIANRGYAEILNKRFFPTDRGKLISAFLEKLFSKYVDYNFTAGLEDQLDEITSGKESWIKVLELFWKDFNNNVTEVKEIRTREVL

SEQ ID NO: 157568 - protein, 361 aa, Unknown
  Bacterial polypetide isolated from the Sargasso Sea
GASRTMQIAQRLYQGIDVEGDTVGLITYMRTDGTNISNDAINDFRDFIKKSYGHNYLPKEPNNYSGKKAKNAQEAHEAIRPTDITRTPETMKKFLSSDQIKLYDLIWSRSLSSQMEAAKFDRKTITINSDNGLNQFKCSGSTIKFDGFLKLSRIDENEDEKILPDVNKEEVLANDFIDEQHFTQPPPRYSEASLVKKLEELGIGRPSTYASIISVISNRGYADVVNKRFFPTDRGKLLSAFLEKLFSKYVDYGFTAGLEDQLDDITTGKEEWIKVLENFWKDFNSNVSNVKEKRTREVLDLLNESLGELVFEADENGKVNRKCKLCDNGELSLKNSFRGGAFIGLSNYPECKFTRPLSKSK

SEQ ID NO: 157569 - protein, 439 aa, Unknown
  Bacterial polypetide isolated from the Sargasso Sea
AIRPTEIIRKPEDMKKYLSTDQYKLYNLIWSRSLSSQMQSAKFDRKTITINSDDDKNIFKASGSTLKFDGFLKLYKIDENDDDNENILPEVEKGVVMFEDHIDEQHYTQPPPRYSEASLVKKLEELGIGRPSTYASIISVIANRGYADINNKRFFPTDRGKLLSAFLEKLFTKYVDYDFTAKLENQLDDITSGKENWIKVLENFWEDFNSNVSGVKEKRTREVLDLLNESLGSLIFEVDKDGNIDRKCKLCESGQLSLKNSFRGGAFIGCSNYPDCKFTRPLSKSKAAQQLTLAEPKFIGKNDKGKDIFLKNGRFGPYLQFEKEIIEEDEKTKKKKRKLKKEENNLKNVSIPKGIEIENIDLEKAKYLCSLPLSLGKNPENDKDITVNVGRFGPYLKCENKSARLENVDELFTIGLNRAVTLIAEAKPGRISSSMIKDL

SEQ ID NO: 157570 - protein, 562 aa, Unknown
  Bacterial polypetide isolated from the Sargasso Sea
IDIEGDTVGLLTYMRTDGTNISKDAVNDFRTYIKKSYGENYLPKEPNNFSGKKAKNAQEAHEAIRPTDITRSPETLKKFLSTDQIKLYDLIWSRALSSQMEAAKFDRKTITIISDNNLNQFKCSGSTIKFDGFLKLTRIDEDEDEKIIPDVNKEEVSINKFIDEQHFTQPPPRYSEASLVKKLEELGIGRPSTYASIISVISNRGYAEVVNKRFFPSDRGKLLSAFLEKLFSKYVDYGFTAGLEDQLDDITAGKEEWIKVLEKFWKDFNLNVSSVKEKRTREVLDLLNESLGELIFESNNEGEIDRKCKLCDKGKLSLKNSFRGGAFIGCSNYPECKFTRPLSKSKANEQFSLAEPKLIGKNDNNKDIFLKSGRFGPYLQYEKIEEESITKKKNKKKKKENDNFKNVSIPKGLDIDQIDLDKAKYLCSLPKIIGQHPENGKDITINSGRFGPYLKCENKSARLENIEDLFTIGLNRAITLIAEAKPGRISSSLIKDLGEHPEDKKPVRIMKGQYGPYIKYKSLNATIPEEKDPAEVNMEEALILIEKRKEYDRNKKKKKKNK

SEQ ID NO: 157571 - protein, 447 aa, Unknown
  Bacterial polypetide isolated from the Sargasso Sea
TDGTNLSKDAISAFRNYIQKEIGDEYLPKNALNYSGKKAKNAQEAHEAIRPTDIIRTPQSIKKYLSSDQNKLYELIWSRALSSQMASAKFDRNTITITSENNGTICKASGSVLKFDGFLKVYNNQNKDDDESILPSMSKGPINIESLLDEQHYTQPPPRYSEASLVKKLEELGIGRPSTYASIISTIANRGYAEILNKRFFPTDRGKLISAFLEKLFSKYVDYNFTAGLEDQLDEITTGKESWVKVLELFWKDFNNNVSDVKEKRTREVLDMLNDSLGDLIFDKDNKGNIVRNCKLCDSGTLSLKNSFRGGAFIGCSNYPECKFTRPLSKAKAAAQAQLAEPKFIGKHENGNDIYLKNGRFGPYLQYEKLPTIIETEKTTKKKKKIKKSKPDTNQLIKNVSIPKGLELESIDLEKAQFLCSLPISLGINPENQKEITLNTGRFGPYL

SEQ ID NO: 157572 - protein, 691 aa, Unknown
  Bacterial polypetide isolated from the Sargasso Sea
MDLVQSQETRRALDRHFGFSLSPLLWRLFPSNNHSAGRVQSPALRMIVEREREIEAFVPQEYWTISAKLEKDGEYDAKLSVFKEETIKKFTFDSTALVEEASEALVDSCKEGLVAKSITKKTIKRSPREPFRTSVLQQQASNRFGFTPKRTMQIAQSLYAREGGGLITYIRTDSIEIDEGKLPSVRDQVAFMFGDDFVQPRNYKNKKEAKNVQEAHGAITPVDISLIPTEAKKVLKDDEFKLYQLIWQRTVASQMKDALFERTSIEFVPTGDEGLATFSFSDQELIFSGYLEATQEEVTNNKPPLINENDSIEFKGLIKTQHFTDPPPRYNDASMIKALEEKGIGRPSTYADILSKLTDRKYVWLKQKRYEPSDMGRLVSNFLNERFGGYISDEFTSNMENNLDEISSGKKSKEDVLNDFWSPLIDTVDEVSDVVTRKDVNPQRPLGNHPETGRPVFARMTKNGPAVQVGDMDKDEKLEWAAIKEGQSLFSIDLEIACELLNKPSENILGYHPQTNEPVIVREARYGPTVQLGSKEGGNKPRYVGLLKTDSIEEITFERALDYLSLPKELGLDPESGEKVLVTIGPYGPYFKRGSKNFRGRKGLDPFSVELEEALLSISSSKGSGALKTFDDSSVKIVDGRWGAYVTDGKKNASVPKDKDPESLELQDCLELLEKAPAKKRGKRKSKKAAK

SEQ ID NO: 157573 - protein, 429 aa, Unknown
  Bacterial polypetide isolated from the Sargasso Sea
ANNFQGADLEITENEKKKRKVSVRPPFITSTMQQSASSFLGYSLKKTNKLAQDLYTGGYITYIRTDSPNISVLAQNNCKQYLLDTYGEAYSTPRNFASKSSNSQEAHEAIRPTDVTFKTDELSLSEDHKKLYKLIWDRFVASQMPQPELTVNSIKAKIDNNIFETSLSSISFDGFYKVMPPSKSSGYVDYELSGLDVGINKTIELVDKSQHFTKPPSRYSEASLVKELEKKGIGRPSTYQETITTIQDRGYVRSENKRLYATKIANLVTDRLQNSFKNIMDYGFTAEMEKNLDKVAEGKEDWKKLLEDFNKVFEDAKSKADESMERNPPIDTDVECPCGTGKRMHLRTNHNGQFLGCEGYLLEGDEQCKKTSSLISVDLFSDDDDKEAESIFNKTKCDLCGSTMDGFIIDENKKLHICSNSPICPGTKF

SEQ ID NO: 157574 - protein, 245 aa, Unknown
  Bacterial polypetide isolated from the Sargasso Sea
MNIVVVESPAKAKTINQYLGNDYKVLASYGHIRDLPNKKGSVIPEDDFFMKYEVQDDKKKQIQAISKSISKGDTLWLATDSDREGEAIAWHIHSFLSEKNKLKDVDIKRVIFNEITKNAILEAFNNPNTIDINMVDAYQARRALDYLMGFSLSPVLWKTLPRAKSAGRVQSVALKLICDRETEREKFSPKEYWTINSAFKKGESETFTAHLNILDNNKLKKFDIDNKNSADEAIKKITNVNNFYI

SEQ ID NO: 157575 - protein, 370 aa, Unknown
  Bacterial polypetide isolated from the Sargasso Sea
MEEHNTKPPARFTEASLVKELEMKGIGRPSTYAMIIETIVKRTYVHKKQSKLTPTFLGLAVTQLLENHFSSLVDSKFTAEMENGLDAISRGELDSLPFMKEFYFGSDNQNGLVKMLDEKVDIGKACSVQLDEKDEPIEVRVGQYGPFLRQGENRKSVPAEVYLGDLNIEKALEILNQEINEDKEIGTDPETNETILLKTGPYGPYVQVGDSSKRKAIPKGTEIAEVNLEMALKLLALPRVLGIHPETNQEVKADYGRFGPYVTAGKGKNGRIPPEYSPLTIELDAALELIAKRSSGPQELKTLGDHPKTGEALILKDGRYGPYITDGKLNASMPSDLEVETITLEDAVKLIDKKRAAPPRKKKAKRKKKK

SEQ ID NO: 157576 - protein, 184 aa, Unknown
  Bacterial polypetide isolated from the Sargasso Sea
MIVFQKKYLKEITDAAKKSEKIILATDPDREGEAIAWHVREYLGEKKLLKDKKIERVVFNEITKKAVTNGIDNPRSIETNLVDAYMARRALDYLVGFNISPILWTKLPGSKSAGRVQSVALRLLTEREHEIEQFKPEEFWSLNVNFKNTKGDILNSNIVLLNNSKIEKFSFKNKEDINGAIELI

SEQ ID NO: 157577 - protein, 384 aa, Unknown
  Bacterial polypetide isolated from the Sargasso Sea
FRNYIKKEIGKEYLPENILNYSGKKAKNAQEAHEAIRPTDISRTPESVKKYLSTDQNKLYNLIWSRALSSQMESAKFDRNTITIKSENDDTICKASGSVLKFDGFLKIYNTTNKDDDENILPKMSEGPVNIEALLDEQHFTQPPPRYSEASLVKKLEELGIGRPSTYASIISTIANRGYAEILNKRFFPTDRGKLISAFLEKLFSKYVDYNFTAGLEDQLDEITTGKESWIKVLELFWKDFNNNVSEVKEKRTREVLDLLNDSLGDLVFDKDQDGNIVRKCQLCSSGILSLKNSFRGGAFIGCSNYPDCKFTRPLSKAKAAAQAQLAEPKLIGKNDNGKDILLKNGRFGPYLQYESLSHEENIELNKKKKTKKKTDNNLKNVSI

SEQ ID NO: 157578 - protein, 557 aa, Unknown
  Bacterial polypetide isolated from the Sargasso Sea
MRTAQRLYEGTEINGDTTGLITYMRTDSVVMSSEAITQVRSFVSENYGAKYLPDSPRVYKSKAKNAQEAHECIRPTNINLTPKDIKQYITGEEFKLYEIIWQRAVSSQMSSAILDQVAVNIMNEDQQISLRANGSTIKFPGMYIVYQEAKDDDKDEEKETILPAINEGEELDLNEVIKNQHFTMPPPRYTEASLVKKLEELGIGRPSTYASIIKVLQDRDYVVLDKKRFNPHDRGRIVSIFLEKYFNQYVEYDFTADLENQLDEISDGKLDWKEVLSKFWETFKKLCDDTVGKSNREVIDVLDDALGSHFFPPEGKDESRKCPTCENGRLGIKVGKFGGFVGCSNYPDCKYTVQFNQLNDKDGASLSGPKEIGVYPETNEMITLRKGPYGFYMQVGEGTPEKKPKRVSIPKNFEPDEIGLNTAIQLLGLPRKLGFHPDNNKTVSAGIGMYGPYILHDKKYKALEKTDNILDIELERALELIAKPTQRGNATLKSFGEHPTEKKNITAHDGKYGPYVKCGKINASLLGDQTIDSLSIEDAVKLIDDRKLKMGLKKKKK

SEQ ID NO: 157579 - protein, 262 aa, Unknown
  Bacterial polypetide isolated from the Sargasso Sea
MNLLIVESPAKAKTINKYLGSDYIVLASYGHVRDLPSKNGSVDTENNFNMTWEIDTSSKKYIKEITDAAKKANKIILATDPDREGEAIAWHVKHILEQKDLTKDKKVERVVFNEITKKAVTNGINNPRDINIELVNAYLARRALDYLVGFNISPILWTKLPGSKSAGRVQSVALKIISEREHEVELFKPEEYWTIKCIFQNHENEKINAKLNLLNNQKIEKFSFKNKSESDKAKSNLENLNFSIKSIESKPYKRNPYAPFRT

SEQ ID NO: 157580 - protein, 337 aa, Unknown
  Bacterial polypetide isolated from the Sargasso Sea
KEARRNPYPAFTTSTMQIESSRKLGLSASQTMRTAQRLYEGTDIKGETTGLITYMRTDSVVMSKEAINQVRGFVTDNYGANYLPEAPRVYKSKAKNAQEAHECIRPTNIYLTPKDIKQYITLEEYKLYEIIWQRAVSSQMASAVLDQVAVDITNEDKKIVLRANGSTIKFPGMYKVYQEAKDDDKDEEKETILPAMSEGESLNLKEVEKTQHFTSPPPRYTEASLVKKLEELGIGRPSTYASIIKVLQDRDYVILDKKRFNPHDRGRIVSIFLEKYFNQYVEYDFTADLENQLDEISDGKLDWKEVLRKFWETFKQLCDETVGKSNREVIDVLDEAL

SEQ ID NO: 157581 - protein, 286 aa, Unknown
  Bacterial polypetide isolated from the Sargasso Sea
GGMRANQMVLTDIDCPDCGRKMGIRTATTGVFLGCSGYALPPKERCKKTINLVSADEFVSATDGEEAETEALRAKHRCGVCGTAMDAYIIDDSRKLHVCGRNPDCDGYEIEKGQFKLKGYEGPSIECDRCGSEMQLKNGRFGKYMGCTNDTCKNTRKILKNGDIAPPKEDPVPLPELKCTQSDAHFVLRDGAAGLFLAASNFPKSRETRAPLVEELKRFKERLSPKHQYLADAPASDPDGNPAIVRFSRKTKEQYVMTEVNGKATGWTAHYDNGKWQESLAKSKKA

SEQ ID NO: 157582 - protein, 255 aa, Unknown
  Bacterial polypetide isolated from the Sargasso Sea
MAKKIIIVESPAKARTITKFLDKDYSVMASMGHVRDLPSSKLGFDPENNFIPQYEISKDKRKVVADLKKQIDKDTEVFLATDEDREGEAISWHLLEALELKSSSVKRIVFHEITESAIINALGNPRDVDQQLVNAQQARRILDRAVGYKLSPLLWKKIKPGLSAGRVQSVSVYILVEREREIRKFVPEEYWKIKAWFTDFSADLKKIGGKPAKVRNETEALAIESSVKQGNFVVSEIKERMANRNPGAPFTTSTI

SEQ ID NO: 157583 - protein, 650 aa, Unknown
  Bacterial polypetide isolated from the Sargasso Sea
MRLFIAEKPSLGRAIADVLPKPHKKGDGFIETAQGDVVTWCIGHLLEQAEPDAYDAAYKQWRMESLPIVPAQWQLVAKPKTKTQLTVIKRLIKQADCVVNAGDPDREGQLLVDEVIDFLGYGKTRPVLRCLISDLNPPAVRRALDKLRDNKEFVPLAVSALARSRADWLYGINMTRAYTLLGRKGGCSELLSVGRVQTPLLGLVVRRDLEIEAFVPKPFFEVLAHLQTEGNERFSAKWLPSEACLPWQDEEGRVLNRALAAKVVERIQGEPALVEEVEEQARKQAAPLPYNLSSLQIDAAKRFGMDAKRVLDVCQGLYERHKLITYPRSDSRHLPSDHFNRAGQVREAIASTAPALAKAVSEADGKIRSKAWNDSKVDAHHAIIPTEKQGNPATLGADEAKLYGLIARQYLLQFYPPFEYNDSKVLLRIAGGLFQAKARRILKAGWKALLGVEEDDEEEAGTLPALRKGEQLLCERGELQEKMTQPPKSFTDATLLAAMTGIARYVQDPEIRKTLRETDGLGTEATRAGIIDLLFKRRFLVRQGKSIKATPTGRALIQALPATATTPDMTALWEQHLGRIAERQTSYQQFMGPLTEQLNGLIDGARQDSGASFSALPKAAPGADKRRFTKRKRSTAAGGTSGTAKRGSKR

SEQ ID NO: 157584 - protein, 424 aa, Unknown
  Bacterial polypetide isolated from the Sargasso Sea
LYSLIWKRALASQMTAAEIARTAINIEAGQEKEYLFEAQGQRVIFPGFLKVYAESNDVQLDTLSEKDVILPNVEQGKMLALKDPEKPVDMEKLFTKPPPRYTEASLVKKLESEGIGRPSTYAPTISTIQDRGYVELTDEKKLKPTSIGEVVTDFLADHFTKIVNLGFTAEIERNFDRIAKGDEDWVEMMTDFYEPFHENVVEKDKSVSRAEVLKRRELGTDPKSGKPVCVSVGRYGPMVQIGTREDEEKPRFASLPSSLNLNDVTLEEALECFALPRVLGKYENGEEISANNGRYGPYVKLGKDFFSIPKGEKAENIELVRAVEIIREGLEIKSKSVIHDFGVIKVLNGRYGPYIKSGKNNYKIPKDVEPEVLDEDSCKKIIEESPPKGSRRGRNKVSKNITDKKIIKEYPPKGIKSSNFPKKF

SEQ ID NO: 157585 - protein, 126 aa, Unknown
  Bacterial polypetide isolated from the Sargasso Sea
MSKPLVIVESPTKVKTISKILGDGYIVKSSVGHIRDLPRNTKSIPSAFKKEDILWGAVKPENYENIYVIPEDRKKIVNELKGLADKAPEVYLATDDDREGEAIAYHLKEALELKKEPKRIKFNEIT

SEQ ID NO: 157586 - protein, 304 aa, Unknown
  Bacterial polypetide isolated from the Sargasso Sea
MDHTLVIVESPTKAKTIRKFLPSNYEVLASMGHVRDLPKGAAEIPASVKKEKWSRIGVNTTEDFEPLYIVPKEKKKVVKDLKNALKDATQLLLATDEDREGESISWHLMQILKPKIPTRRMVFHEITKKAINKALDETREIDMELVQAQETRRILDRLFGYELSPLLWKKVAPRLSAGRVQSVSVRLLVKKERERRAFKKASYWGLKASLLKDNISFESKLFSLDDQKISNGSDFDEKTGNLKKGNKSLILTEDRAKSLLKNLSKEKWKVLKVEKKPTIRKPVPPFTTSTLQQEANRKLRLSAR

SEQ ID NO: 157587 - protein, 174 aa, Unknown
  Bacterial polypetide isolated from the Sargasso Sea
MTSKSLVIVESPSKAKTISKYLGKDFVVKSSVGHVRRLPKGSKAINLDDWSISYEIDPKKEKVVKDLKSSAKGVENIFLATDLDREGEAIAWHLKEILGKKFNYSRVRFNEITKGAIQEAFESPGDLDEGLIDAQKTRRILDRIVGYDLSSLLWQKIGSYGKLSAGRVQSVAVR

SEQ ID NO: 157588 - protein, 83 aa, Unknown
  Bacterial polypetide isolated from the Sargasso Sea
MNLVIVESPAKAKTINKYLGDNYTVLASYGHIRDLPSKNGSVDPDQNFKMEWEVDNFSKKYLKDITDAAKESSKIILATDPGS

SEQ ID NO: 157589 - protein, 104 aa, Unknown
  Bacterial polypetide isolated from the Sargasso Sea
MNLVIVESPAKAKTINKYLGENFKVLASYGHIRDLPSKNGSVDPNNQFKMIWEVDSFSKKYLKEITDVAKDSDKIILATDPDREGEAIAWHVKQFLEEKKFLKE

SEQ ID NO: 157590 - protein, 168 aa, Unknown
  Bacterial polypetide isolated from the Sargasso Sea
MSKSLVIVESPAKAKTISKYLGSEYIVQSSVGHIRDLPKKGTGITKRSSIPKNISPEEKARLKAVNDRNRLIRRMGIDPDNGWKADWQIIPEKEKVLKSLKKAAKNVDNIYLATDLDREGEAIAWHLKEALGSNKYNYSRVRFNQITKDAILESFSDPKEIDLNLVKA

SEQ ID NO: 157591 - protein, 87 aa, Unknown
  Bacterial polypetide isolated from the Sargasso Sea
MNLVIVESPAKAKTINKYLGDNYKVLASYGHIRDLPSKNGSVDPNQDFKMEWEIDSFSKKYLKEITDAAKDSSKIILATDPDREGEA

SEQ ID NO: 157592 - protein, 325 aa, Unknown
  Bacterial polypetide isolated from the Sargasso Sea
MSKLVIVESPAKAKTIQKYLGDGYTVLPTIGHIRELPKKDAIDPNNGYSMKYIVSPGKEDAVKKIKSDAKSAEQVILATDPDREGEAIAWHVADIITKAKFEQPDIKRAVFYEISEKAVKAAVGNPGEIAMDLVQSQETRRALDRHFGFSLSPLLWRLFPSNNHSAGRVQSPALRMIVEREREIEAFVPQEYWTISAKLEKDGEYDAKLSVFKEETIKKFTFDSTTLVEEASKALEDSCKKGLIAKSITKKHIKRSPREPFRTSVLQQQASNRFGFTPKRTMQIAQSLYAREGGGLITYIRTDSIEIDEGKLPSVRDTGCFYVWG

SEQ ID NO: 157593 - protein, 76 aa, Unknown
  Bacterial polypetide isolated from the Sargasso Sea
MSKPLVIVESPTKVKTISKILGSEYIVKSSVGHIRDLPRNTKSIPPQYTKEEILWGAVKPDEFENIYVIPEDRKKK

SEQ ID NO: 157594 - protein, 865 aa, Unknown
  Bacterial polypetide isolated from the Sargasso Sea
MSKALIIAEKPSVANDIARALGGFTKHDEYYESDDFVLSSAVGHLLEIAAPEEYEVKRGKWSFAHLPVIPPHFDLNPIAKSESRLKVLTKLLKRKDVDRLINACDAGREGELIFRLIAQHAKAKQPVQRLWLQSMTPQAIRDGFANLRSDADMLPLADAARCRSEADWLVGINGTRAMTAFNSKGGGFFLTTVGRVQTPTLSIVVEREEKIRRFVPRDYWEVKAEFACAGGFYEGKWYDPKFKRDEFDPEKRDSRLWSLPAAETIVAACRDQVGTVSEESKPSTQLSPLLFDLTSLQREANSRFGFSAKNTLGLAQALYEKHKVLTYPRTDARALPEDYLSTVQSTLEMLKESNNYLPHAKQVLDKGWVKPNKRIFDNSKISDHFAIIPTLQAPKSLSEPEQKLYDMVVKRFLAVFFPAAEFRVTTRITEVAGHHFKTEGKVLVEPGWLQVYGRDAEGADANLVPVQKDEKVKTDEIAAVALVTKPPARYSEATLLSAMEGAGKLVEDDELREAMAAKGLGTPATRAAIIEGLLGEKYLVREGRELIPTAKAFQLMTLLRGLGVKELTAPELTGEWEYKLSQMERGNLGREAFMQEIARMTQQIVKRAKEYDSDTIPGDYATLETPCPNCGGQVKENYRRFACTKCEFSISKIPGSRQFEIAEVEELLREKTIGPLSGFRSKMGRPFSAILKLSFDDETKNYKLEFDFGQDTGGEEGEAPDFSAQEPVGACPKCKGRVFEHGMSYVCEHSVANPKTCDFRSGKVILQQEITREQMGKLLADGRTDLLPNFKSSRTGRNFKAFLVKQPDGKIGFEFEKKEPKAAAAKKTAKSATKDAETVTEGAEEKPAPARKTAARKTTARKTGS

SEQ ID NO: 157595 - protein, 229 aa, Unknown
  Bacterial polypetide isolated from the Sargasso Sea
MSKNLVIVESPAKAKTIEKFLGSEYKVVSSNGHIADLPSNELGIDIENDYAPKYKITNDKKDLVKKLKNELKGVDTVWLASDEDREGEAIAWHLAENLNLNESNTKRIVFREITEKAIKNAIENPRQINKSLVDAQQARRVIDRLVGYKISPILWRKVKGGLSAGRVQSVVLRLIAEREKEILNFNPVSSYKTTAEFINSNNVKFKAKYSINTNDDDNFNSFLDGFKNA

SEQ ID NO: 157596 - protein, 176 aa, Unknown
  Bacterial polypetide isolated from the Sargasso Sea
MTKSLVIVESPAKARTITKYLGSEFIVESSVGHIRDLPKKATATGTRSSIPKDASPEEKAKLKNINDRNRLIKRMGIDPDNEWEAEWQIIPEKEKVLKALKKAAKSVDHIYLATDLDREGEAIAWHLKEALGPKHNYSRVRFNQITKTAILDSFSDPKEIDLDLVKAYRARRFLDK

SEQ ID NO: 157597 - protein, 71 aa, Unknown
  Bacterial polypetide isolated from the Sargasso Sea
MNLVIVESPAKAKTINKYLGSNFTVLASYGHIRDLPSKNGSVDPENKFKMIWEIDSFSKKYLKEITDAAKD

SEQ ID NO: 157598 - protein, 263 aa, Unknown
  Bacterial polypetide isolated from the Sargasso Sea
MADKSLVIVESPAKAKTISKYLGKEYIVKSSVGHVRKLPKGEKAIDRKDWSISYEIDPKKTKVVKELKSAAKGVEDIFLATDLDREGESIAWHLKEILGKKHNYIRVRFNEITKTAIKDAFDNPSKLNEELINAQKARRILDRVVGYDLSGMLWKKIGSYGKLSAGRVQSVAVRLVVEREIGIKAFTPEEYWEIEIEIKHDDRNIRFKLNTKKSNLEIKNESKALELANNFQGADLEITENEKKKRKVSVRPPFITSTMQQSA

SEQ ID NO: 157599 - protein, 167 aa, Unknown
  Bacterial polypetide isolated from the Sargasso Sea
MSKPLVIVESPTKVKTISKILGDGYIVKSSVGHIRDLPRNTKSIPSAFKKEDILWGAVKPENYENIYVIPEDRKKIVNELKGLADKAPEVYLATDDDREGEAIAYHLKEALELKKEPKRIKFNEITNTAVLNAIKNPETIDIGKFKSYEARRTLDRMIGYEISPKLR

SEQ ID NO: 157600 - protein, 496 aa, Unknown
  Bacterial polypetide isolated from the Sargasso Sea
KSFDEARKVDDNLVSAYLARRSLDYLAGYSLSPVLWRKMPGSRSAGRVQSVAVRLIYEKEIEIEQFEPEKFYKINVHGEINGAKLDTSITSLEGEKVDKLFFRDEALANKAKNYLKSNSFFIRKIDERTISRKPKAPFNTSTLQQTANSQLNFSASQTMTIAQGLYMGIDINKETIALITYMRTDSITLSKNSIDTIRENISKDYGDEYLPNKPIEYKSRKKNAQEAHEAIRPTDISIKPEDIKNFLNEEQFKLYDLIWKRTIASQMTSAETNQNTLQIDCEEKNITLKATLGKLIFDGYKKVYNLQEDDEEQIISLLENIKENDKYIVSEVEALESFTSPPSRYTDASLVKKLEELEIGRPSTYASIIQTIVNRGYVLKSGKSFILNDRGRVVNVFLCNYFKKFLEYKFTADLENQLDDVAEDKAEWKNIVLNFWKDFEFFINEVMGKPNREVIDVINDELSPVIFRKIGGDIDIKCSSWANTENCEGNLGVKVG

SEQ ID NO: 157601 - protein, 57 aa, Unknown
  Bacterial polypetide isolated from the Sargasso Sea
MNLVIVESPAKAKTINKYLGSDYTVLASYGHIRDLPSKNGSVDPENSFKMIWEVDSF

SEQ ID NO: 157602 - protein, 563 aa, Unknown
  Bacterial polypetide isolated from the Sargasso Sea
YQGIDIEGDTVGLITYMRTDGTNISKDAVADFRDFIKNSYGDNYLPNEPNNYSGKKAKNAQEAHEAIRPTDITRTPESIKKFLSTDQKKLYDLIWSRALSSQMEAAKFDRKTITITSDDNLNQFKCSGSTIKFDGYLKLTRIDENEDEKILPDVIKEEVLTNDFIDEQHFTQPPPRYSEASLVKKLEELGIGRPSTYASIISVISNRGYADVINKRFFPTDRGKLLSAFLEKLFSKYVDYGFTAGLEDQLDDITTGKEEWIKVLDEFWKDFNTNVSNVKEKRTREVLDLLNQSLGELIFEADENGKVNRKCKLCDTGELSLKNSFRGGAFIGCSNYPNCKFTRPLSKSKAKDQYALAEPKLIGQNENGKDIYLKNGRFGPYLQYEKIEEEISTKKKKNKKENDNLKNVSIPKGINIDEINLEKAKYLCSLPKIIGHHPENGKDITVNSGRFGPYLKCENKSARLENVEEIFTIGLNRAITLIAEAKPGRISSSLIKDLGEHPEDKKPVRIMKGQYGPYIKYKSLNATIPEEKDPLEINMEDALILIEKRKEYDKNKKSKKRRK

SEQ ID NO: 157603 - protein, 255 aa, Unknown
  Bacterial polypetide isolated from the Sargasso Sea
MKLVLVESPAKAKTINKYLGSDYDVMATIGHIRNLPNKNGVDPEENFSMQWELLERSNRFLKEIKQSLKSANKLILATDPDREGEAISWHVLELLNEKKIKINIPIERVVFHEITKMSVLDAIDNPRELDQELINASLARNALDYLIGFKLSPVLWQKLPGAKSAGRVQSVALRLICEREFDIQSFIPQEYWTIESELQKDSKEKFKARLIIWKGDKLEKLSLNNEKSAKKAIRSIENSDLEVVKSEEKKEFRNP

SEQ ID NO: 157604 - protein, 576 aa, Unknown
  Bacterial polypetide isolated from the Sargasso Sea
MSKNLVIVESPTKARTLQRFLGKEYLVEASIGHINNLQSGYKAEYTGPVVGLDQDFQPIWEYERGAKTRIDNLSKIAKSCENIYLAADPDREGEGIAFHVANALIEKGQSDEKFKRVVFHEITEKAVKEAFDKAGKLNMDLVDAHIGRRLVDRLVGFSLSGLTSSLLRLKRLSVGRVQSVAVSIIKDKEDEIKAFIPEEYWNITNNFSKNKDHYQGKLFDINGTSGKNLTITNETDAKNIEQEISKLNYKIHSIKANTRKTKPRPPFTTSSLQQDASSRLRMAPSRTMSIAQQLFQGINLGSGEEGLITYMRTDSNVLSADSLGQIGNFIQTSYGNEYHSEKKYKTRSANAQEAHEAIRPTSINRTPESIEKFLSEDQLKLYDLIWKRTVASQMKESENKKTTVITSSEDEKYKFLSEYDELVFDGFKKLFPQKETDKLPNIAENDKINLESVIKEQKFTQHTPRYSEASLIKTMEELGVGRPSTYASILNTIKEKKYIWVINRSIYISPVGNALVEELKKHFSESVMDYKFTEKMENDLDLISNGSLNRNDFIKSFWSNFEPIKNNYEKIADENP

SEQ ID NO: 157605 - protein, 399 aa, Unknown
  Bacterial polypetide isolated from the Sargasso Sea
MLIENPSDLKKYLSTDQSKLYELIWNRAVSSQMNPAEFDRKSITIESEDKKIHFKANGSTIKFEGYLKVYKFEEKDEDLKNILPEVKVGDKVSIKELIDDQHFTDPPPRFSEASLVKKMEELGIGRPSTYASIISVLSTRNYVELLNKRFHPTDRGKLLSAFLEKLFSKYVDYNFTADLENQLDEITSGKIDWVKVLDDFWKDFYSNVGHVKEKRTREVLDLLNESLGDLVFERDDNDIIDRKCKLCNTGELSLKNSFRGGAFIGCSNYPECKFTRPLSKSKASQQVHLAEPKLIGKNDLGKDIFLKNGRFGPYLQFEIEPTESIENKTKKSKKKKENENLKNVSIPKGLQIENVDLEKAKYLCSLPKIIGRHPELNDDITVNVGRFGPYLKCSNKSAR

SEQ ID NO: 157606 - protein, 306 aa, Unknown
  Bacterial polypetide isolated from the Sargasso Sea
MSTLVIVESPNKVSKISAILGEGYKVMASVGHVRDLPPKELGIEQPSFKLTYKPTERGQGVLAKLKGAVAQASRVLLATDPDREGEAIAWHLADALRLKNPERVTFTAITKEKILAAFASPRPLDMQRVHAQEARRALDRMIGYRVSPALSDATGQRLGVGRVQSPAVRLVVDRERAIATFQVTQHYGAELIFLNDDSTKWKAQWDTKPHLPEGENYLLDSMLAKLAAAVRNVSAAEYEDSQKGRAPAAPFTTSTLQQAAGQRLKLKPKRTMELAQRLYEQGAITYHRTDAPTWTTKGVQTLPPMR

SEQ ID NO: 157607 - protein, 66 aa, Unknown
  Bacterial polypetide isolated from the Sargasso Sea
MNLVIVESPAKAKTINKYLGVNYTVLASYGHIRDLPSKNGSVDPEDKFKMIWEVDSFSKKIFKRNN

SEQ ID NO: 157608 - protein, 350 aa, Unknown
  Bacterial polypetide isolated from the Sargasso Sea
MVNINSKPLLIVESPSKAKTISKYLGGEYNVIASVGHIKDLPRKEIGIDIENDFSMVEDVLEDKKEFVKELRSMAKGTNKVVIATDPDREGEAIAAHIASEVDNEKISRVQFTEITKEGVDEGMNNPRQIDKDLVEAQTARRIIDRLIGYKISPVLWSTLKKNMKFVSVNLSAGRVQSAALKIMIERERLRQAFNSATYYDIIASFKSGNTEFNALLSKIDNKRIAVGKDFDPNTGKLNNEDVILLSESQASTLIKELDNGNWTVTNVEEKIVNSNPKPPFTTSTLQQEAARKLISSAKKTMRDAQQLYEKGFITYMRTDSTSLSEEGINGARNLILKKYGDEYLPSTSK

SEQ ID NO: 157609 - protein, 91 aa, Unknown
  Bacterial polypetide isolated from the Sargasso Sea
MGKSLVIVESPAKAKTINKYLGKDYVVKSSVGHVRDLPTSGSASNEPKKPVIRGIKLSEAEKAAKDRNALFSRMGINPTAGWQANYQILPG

SEQ ID NO: 157610 - protein, 68 aa, Unknown
  Bacterial polypetide isolated from the Sargasso Sea
MGKSLVIVESPAKAKTINKYLGSQYVVKSSIGHIRDLPTSGSASATKEPAKRGKAAAGEAPALSPKEK

SEQ ID NO: 157611 - protein, 461 aa, Unknown
  Bacterial polypetide isolated from the Sargasso Sea
AKFDRKTITISSDDGKNICKASGSVIKFDGYLKLVKIDEGNDEEKILPDVKKGIVEINEYIDEQHFTQPLPRYSEASLVKKLEELGIGRPSTYASIISVISNRGYADINNKRFFPTDRGKLLSAFLEKLFAKYVDYDFTAKLEDQLDDITSGKEDWIKVLENFWIDFHSNVSSVKEKRTREVLDLLNESLGSLIFEIDKEGKVNRKCLICTNGELSLKNSFRGGAFIGCSNYPECKFTRPLSKAKAAQQLNLAEPKLIGKSINDEDIFLKNGRFGPYLQFESKNLEIDKNPKKKRKNKKKEANIKNVSIPKGLEIDSIDLMKAQFLCSLPISLGKNPDSDKDITLNVGRFGPYLKCENKSARIENVEEIFSIGLNRAITLIAEAKPGRISSSIIKDLGEHPDDKKLVRVMKGQYGPYIKYKSLNATIPEEKDPTELTMEEALILIEKRREYDKSKKSKKNK

SEQ ID NO: 157612 - protein, 560 aa, Unknown
  Bacterial polypetide isolated from the Sargasso Sea
EASRKLGFGVSRTMSTAQKLYEAGLITYMRTDSVTISNEAKESIINKIKSKFGDKFVYSRDFQNKNKSAQEAHEAVRPTKIDVEEITSDFDQQRLYKLIWKRTISSQMADAEIEKTIVKIQSDKYDYKFTSTGEVIIFEGFLKVYLEGTDDESEEEKAVLPKITEGEKLELDKITSKEMFSRPPSRYTEASLVKKMEELGIGRPATYATTISTIQKRGYIEKGSNEGSERDYKLFEFSNNEVSDRILKEKTGSNKGRLIPTDIGVIVNDFLVENFRNILDYGFTAEVEKNFDEIASGNEQWSEIIKRFYNDFHSNVTEVNETAERQSGEKILGNDPKSGRVVKVRLGRFGPLAQIGNTEDEEKPIFASLTKDQQLENITLEEALDLFKFPKEIGEYKNETITVNNGRYGPYIKFSSKSISIPTNLDPHTIEITDAIKLIDEKLKADEPIHFYDELPVTKGVGRFGPYIKWNEGFINVNKTYDFDNLTIENIEELIKNKIQKDKDKLIKEWPEHEIKIEKTRWGRSAISNPKKKVEIPKEIDPTKISLEEAQNYLKTKKKK

SEQ ID NO: 157613 - protein, 46 aa, Unknown
  Bacterial polypetide isolated from the Sargasso Sea
MTKSLVIVESPAKAKTISKYLGPEYIVESSVGHIRDLPKKAIGASN

SEQ ID NO: 157614 - protein, 279 aa, Unknown
  Bacterial polypetide isolated from the Sargasso Sea
MNLLVVESPAKAKTINKYLGNNFEVIATVGHFRDLAKKDGVKVTEDYSDVELNWETTTAGMKMLDSIEKKAEGYEKIYLATDPDREGEAITWHLVKSLEKKIDKNKFERITFNEITKNAVINSFKESRKVDDNLVSAYLARRSLDYLAGYSLSPVLWRKMPGSRSAGRVQSVAVRLIYEKEIEIEQFEPEKFYKINVHGEINGAKLDTSITSLDGQKVDKLFFKNEALAEKAKNYLNNNKFFIRKIDEKTISRKPKAPFNTSTLQQTANSQLNFSASQT

SEQ ID NO: 157615 - protein, 77 aa, Unknown
  Bacterial polypetide isolated from the Sargasso Sea
MSKPLVIVESPTKVKTISKILGDGYVVKSSVGHIRDLPRNTKSIPSAFKKEDILWGAVKPENYENIYVIPEGIEKKL

SEQ ID NO: 157616 - protein, 455 aa, Unknown
  Bacterial polypetide isolated from the Sargasso Sea
RDLSLYDLIWKRTVASQMAEARLTMINAEISVGDGLFKSSGKSIDFAGFFRAYVEGSDDPSSSLEQQEIILPNLTTGTCLEVTNKESTFHETKPPARYTEAALVKVLEKEGIGRPSTYASIIGTIVDRGYANISSNTLAPTFTAFAVTALLEEHFPDLVDTTFTAKMESSLDEISSGNLEWLPYLETFYKGKNGLEVKVQKTEGDIDGKAYRQVDFEDLPCVVRIGSNGPWLEGTKIDESGNEIQAKGNLPMDITPGDLDLKQVDQILSGPSDLGTDPKTGEKVFLRFGPYGPYVQLGNNDQDKAKPRRASLPKELKTDDLTLDEALVLLSLPRLLGVHPEGGVVEADRGRFGPYIKWIKNENESENRSLKKEDDVFTVDIKRALEILAMPKMGRGGQEVLKDFGKPKEFKEKIQILNGRYGIYLKCGKTNVSIAKDTDIEKFTIDDAVSLLEKN

SEQ ID NO: 157617 - protein, 527 aa, Unknown
  Bacterial polypetide isolated from the Sargasso Sea
LPKDALNYSGKKAKNAQEAHEAIRPTDIIRTPQSIKKYLSTDQNKLYDLIWSRALSSQMESAKFDRNTITITSNNNDTICKASGSVLKFDGFIKIYNNQSKDDDESILPSMSKGIVNIEALLDEQHFTQPPPRYSEASLVKKLEELGIGRPSTYASIISTIANRGYAEILNKRFFPTDRGKLISAFLEKLFSKYVDYNFTAGLEDQLDEITTGKESWIKVLELFWKDFNSNVSEVKEKRTREVLDLLNDSLGDLIFDKDNHGNIVRKCQLCSSGTLSLKNSFRGGAFIGCSNYPECKFTRPLSKAKAAAQVHLAEPKLIGKHANGNDIYLKNGRFGPYLQYEKIPTEVEIEITTKKKKKTKKSKSDVNELLKNVSIPKGLEIESIDLEKAQYLCSLPKSLGINPDNQKEITLNTGRFGPYLKCENKSARIENVEEIFSIGLNRAITLIAEAKPGRISSSMIKDLGEHPEDKKPVRVMKGQYGPYIKYKSLNATIPEEKDPTELTMEEALILIEKRKEYDKTKKKKKK

SEQ ID NO: 157618 - protein, 337 aa, Unknown
  Bacterial polypetide isolated from the Sargasso Sea
AITKSDVQRAFENPRGINMPRVEAQQARRIVDRIVGYRVSPILWKKVASGLSAGRVQSVASRLVVEREKQIRDFTPDESWELTGYLSFDTDGAEALQTVWDDFMSQRDDRNRPPTIKQRTAWLSDHRSLSAELVEVGGKTLKIEADKTSTEELVNEAVSAAEAAGLVDIDIQREENSIGKGRAKNIVRLTGKPDSNTRYSIDSIDVKRTKSRPYPPFITSTLQQAASSRLSMSTDRTMRVAQQLYEGIDLPGEGRVGLITYMRTDSTNLSGEAIRLARRYLEEKVGAEYLPEKPRFYSSSNQSAQEAHEAIRPTDPFRDPDTIGSALNKEQLKLYRL

SEQ ID NO: 157619 - protein, 409 aa, Unknown
  Bacterial polypetide isolated from the Sargasso Sea
VASFRNFITQNYGETYLPPAPLNYSGKKAKNAQEAHEAIRPTEISRVPEDMKKYLSTDQYKLYNLIWSRSLSSQMESAKFDRKTITITSEDNKNICKASGSTLKFDGFLKVSRIDENKDDENILPDVVKGEVKFKDFTDEQHFTQPPPRYSEASLVKKLEELGIGRPSTYASIISVISNRGYADIENKRFFPTDRGKLLSAFLEKLFSKYVDYDFTAKLEDQLDDITAGKENWIKVLEEFWRDFNLNVADVKEKRTREVLDMLNESLGSLIFEVDKDGKINRKCKLCDSGQLSLKNSFRGGAFIGCSNYPDCKFTRPLSKSKAAQQLTLAEPKLIGQNDIGKDIYLKNGRFGPYLQYEKEFNDVEETKKKKKKLKKEDNNMKNVSIPKGIDIKSIDLDRAKYLCSLPIS

SEQ ID NO: 157620 - protein, 423 aa, Unknown
  Bacterial polypetide isolated from the Sargasso Sea
QFKLYELIWSRALSSQMNPAEFDRNTIIISSNDNKINFRASGSVVKFDGFLKVYQVQETDEDAKNILPEVKVGEEISILKLNDEQHFTDPPPRYSEASLVKKMEELGIGRPSTYASIISVLSTRNYVELINKRFNPTDRGKLISAFLEKLFSKYVDYNFTADLENQLDEITSGKIEWVQVLDNFWKDFYKNVGKVKEKRTREVLDLLNESLGALIFERDDKDAIDRKCKLCSNGELSLKNSFRGGAFIGCSNYPECKFTRPLSKAKAAAQYNLAEPKLLGQNEKGKDIYLKNGRFGPYLQYEKEKDELETIKKKGRKKKNENEHLKNVSIPKGIDVDSVDLDKAKYLCSLPKVLGQHPENGQDITLNSGRFGPYLKCENKSARLENVEDLFSIGINRAITLIAEAKPGRISSSLIKDLGEHPE

SEQ ID NO: 157621 - protein, 448 aa, Unknown
  Bacterial polypetide isolated from the Sargasso Sea
QEAHEAIRPAHKIFLSVDEVKSTLGEEASKLYELIWQRTIASQMLPAKLEQTSVVISNQETEFKTTGQIIIFPGYMKIYVEGRDNPDAELANKEKILPPLSVNQELTCSRIESVPHQTKPPARFTEASLVKEMESNGIGRPSTFASILDTIVRRGYVDKTKSNLSPTYLGLAITQLLENHFTALVDKEFTAKMENELDAISRGELDPLPFMKNFYFGDKDFPGLESMLDEKVDIGKACTIPLPIMEGNGIEARIGRFGPYLRKDDDSRSIPQEIYIGDLTSNIIDSLFQEQRKDESLGEDPDTGEDILLKKGPYGYYVQLGETTKRKAIPKGKDIDTVDLDLGIKLLSLPRTVGTHPETKETVTADYGRYGPYLKMEKSNARLIGDITPLNVTIEQAVEILSKSKKGPSELKTLGKHPDTGEDLILKEGRYGPYISDGKVNAALKSDN

SEQ ID NO: 157622 - protein, 343 aa, Unknown
  Bacterial polypetide isolated from the Sargasso Sea
TGKIKSEDLAKSYIERYDKFEKNVKAWAHYDKNFILKKSIDCDDLKNIGRPIGPLHGLPIAVKDIFGTDEMPTECGTILRKKKYSKGDAFVVNLLRSSGAYVMGKTVTTELAYFDPGDTTNPHDYTRTPGGSSSGSAAAVASFMAPFAIGSQTNGSIIRPASYCGVIGYKPSYGLISRTGVLKQSSFLDHVGIFTRSIKDLALITKELVIKDLEDSHSIPYSIGNIRETAIEKPPFDPRFIFFKTNMWKNLDKDAIKSFDQLIKNLGKNVDLLDTPSYFDDILRYHKIIHESDMSYAFSDYYKNSKSKLGKKLVEAIERGQKYSSSDYVEAVENREYLYKLFS

SEQ ID NO: 157623 - protein, 292 aa, Unknown
  Bacterial polypetide isolated from the Sargasso Sea
LLNGASGIAVGMSTNIPPHNFKELANAIIAQIKNPKISVEKLIEIIPGPDFPTGGIIHGSKEIIKQVYSTGRGIIKLRGKAFVETETNSIVITEIPYQVNKSKLIEKIADLVKDEKIKGISDIRDETNRDGMRIVIDPKRNEDPNVILNNLFSLTPLSTTFGIILLAIDKNKPQLLGLKQINQCFIDHRFEIITKRFLFELSKAKDRLHLLDGFKIALDKLDQTIKIIRSSKEPSDARESLIKKLKISIIQANAILDLRLQRLTGMEQEKIFEERKNLIKRIKEIEKILSSD

SEQ ID NO: 157624 - protein, 273 aa, Unknown
  Bacterial polypetide isolated from the Sargasso Sea
NTHDTLLCFSSVGKVYWLKVFQIPVASRTSRGRPIVNLLPLETSERITSMLPVSKFDDERFVFMATSNGTVKKTSIANFARQRSVGLKAIELDEGDELIGTAITDGSHDVMLISNSGKTIRFKESDVRAMGRTARGVRGIRMSDGFKMISLIIPSPEKQILTVSENGYGKRTNSDEYPVYGRGGQGVIGMQASDRNGKVVGAVQVSESDEIMLISDKGTLVRTRVDEVSVQGRNTQGVRLIRLRDGETLVGLEQVDEPDVEEDLSEASEETDE

SEQ ID NO: 157625 - protein, 64 aa, Unknown
  Bacterial polypetide isolated from the Sargasso Sea
MSETIIPSDIVDEMRDSYMEYAMSVIVGRALPDVRDGLKPVHRRVLFSMNEQGNEFNKPFRKSA

SEQ ID NO: 157626 - protein, 200 aa, Unknown
  Bacterial polypetide isolated from the Sargasso Sea
SLSKMISSNEIVTLINALGLDPKNEDIDLKDLRYGKIIIMTDADVDGSHIRALLLTFFNNKPFDKLIEFGHVYLAQPPLFKISKGTKSIYIKDENELESYLIKNSKNIKKYKKNSKEFNNVLQIEKSKLNIQRFKGLGEMNPDELWNTTLNPETRNLLQVQYSKNSKKDQDLIQTLMGNDVSSRKDFIVENAINVSNLDI

SEQ ID NO: 157627 - protein, 191 aa, Unknown
  Bacterial polypetide isolated from the Sargasso Sea
MPAKKKTTKKPAAKKTTTKKPAAKKTTTKKPAAKKTTTKKPAAKKTTTKKPETQNGAIAVEDEISKSFLDYAMSVIVSRALPDVKDGLKPVQRRILYSMYETGIRPTGPFRKCSKVVGDVMGNYHPHGNEAIYGTLVRLGQHFSTRYPLIEPQGNFGTPDDPPAAMRYTESRMSLLASQLLDGIDEETVDL

SEQ ID NO: 157628 - protein, 72 aa, Unknown
  Bacterial polypetide isolated from the Sargasso Sea
MKNTEEFKDKNIKLISMHDEMSSSYLSYAMSVIVSRALPDVRDGLKPVHRRILYAMYKGGYDWSKQFRKSAR

SEQ ID NO: 157629 - protein, 315 aa, Unknown
  Bacterial polypetide isolated from the Sargasso Sea
DSRRRNGLTITHNGYIKRTSLSTYRSQRRGGRGVQGASSREEDFVEHLFVANTHSYILFFTDKGKCYWVKVYDIPEGGRAAKGRAIVNLIGCEPDEKVSAFISVKEFNDDHYVVMATEKGMVKKTKLSAYSNPRKKGIYAVEIRDGDKLIEARVSTGDNDILLGTRNGKSIRFSEEQIRASGRKTMGVKGITLNSEDDRLVGMLLIKREGTVLVATEKGFGKRTEISQYRAQKRGGKGVLTMKTTDKVGKMVTIKEVVDKDDLMIITNQGVLIRLPVAQIRSIGRATQGVKLIKLGEGTLVSSITRIMSEEEEEK

SEQ ID NO: 157630 - protein, 31 aa, Unknown
  Bacterial polypetide isolated from the Sargasso Sea
MTDNKAYDSSSIKVLRGLDAVRKRPGMYIGD

SEQ ID NO: 157631 - protein, 282 aa, Unknown
  Bacterial polypetide isolated from the Sargasso Sea
MAKNTYDSKAIEVLSGLDPVKKRPGMYTDTSCPNHLIQEVLDNSVDEAIAGHCSNIKIKIQKDGFIKISDDGRGMPVDIHPEHKLTGVELILCKLHAGAKFSGEEYNFSGGLHGVGVSVVNALSESLQVNIKRDSKEHEMQFSNGDKKNDIKIVGDVGIRNTGTTIKFRPNLKYFESDKIKTNELKHLLKAKAVLCPGLTIDFHNENKKEKIKWYFEDGLKSYLDEASDGVDQILDESIVSSNASKTQEVEFVINWTSKVQKNKLEETYVNLIPTAQGGSHL

SEQ ID NO: 157632 - protein, 151 aa, Unknown
  Bacterial polypetide isolated from the Sargasso Sea
NIDYDDDGIGYINTEEQIGGVTHQGKIANSFLRSNDYKIFSRVQKAQKVFSGPVVIDNGSEITEYPNIEDCLNQIVNTSKRGLNVQRYKGLGEMNPDQLWETTLDPTTRSLLQVKADDDAGLTFETLMGDEVPPRREFIEENALNAGNVDI

SEQ ID NO: 157633 - protein, 169 aa, Unknown
  Bacterial polypetide isolated from the Sargasso Sea
LRYGKIIIMTDADVDGSHIRALLLTFFNNEPFNKLIENGHIYLAQPPLFKINKGTKGIYIKDEKELEDYILNNNKEIKKIKKGSKEFTKALDLEKSKMNIQRFKGLGEMNPEELWSTTLDPETRNLLQVQYSKDLKKDQSLIHTLMGNDVALRKDFIVSNAINVQNLDI

SEQ ID NO: 157634 - protein, 277 aa, Unknown
  Bacterial polypetide isolated from the Sargasso Sea
IAELVKEKKIDSISEIRDESDKDGMRIVIDVKKGESVEVLENNLFSQTQLEQSFGINFTVLVNGQPKVLNLKEILAEFIKHRKDVVTKRTKFELKKSKERGHIVEGLMVAIANIDAIIKIIKQSKDPKVAAEELIKKKWKAGPIEAILKKVGKDSCRPNGLSKDVGLTGKSYKLSKLQAKAILELRLGRLTGLEQENLSNEFNDLIDKILSLQEILDKKDVLNDLIASELNEVQNNFGDDRRTDINDTRQDISNEDLIPEETRVLTISRSGYAKTQP

SEQ ID NO: 157635 - protein, 67 aa, Unknown
  Bacterial polypetide isolated from the Sargasso Sea
MSDDNITENHETIAIADELKKSYLDYAMSVIVSRALPDVRDGLKPVHRRILYAMIKGGYDWSKPYKK

SEQ ID NO: 157636 - protein, 268 aa, Unknown
  Bacterial polypetide isolated from the Sargasso Sea
ASASEYSEGSIRVLKGLEPVKQRPGMYTRTDNPLHIIQEVLDNAADEALAGYGKKIRVTLHADGSVSVEDDGRGIPFGMHPEENAPVIELVFTRLHAGGKFDKGKGGAYSFSGGLHGVGVSVTNALATRLEATSYREGKVARLVFAAGDVIEPLVARPLEAGERKQGTSVRVWPDAKYFESSALPMGELTHLLRSKAVLMPGVTVQLVNEKTRDTQTWQYKGGLRDYLMQTLNGDPVIPLFEGEGFADRNNESFAEGEGAAWAVAFTE

SEQ ID NO: 157637 - protein, 48 aa, Unknown
  Bacterial polypetide isolated from the Sargasso Sea
MSKKSYYSAKNIEVLEGLEPVRKRPGMYIGSTNEQGLHHLVNEVLDNS

SEQ ID NO: 157638 - protein, 118 aa, Unknown
  Bacterial polypetide isolated from the Sargasso Sea
KDQKIISLVVLEEGNILVATENGYGKQTLKDEFSIQKRGGKGVIAIQTSDRNGNLIGAKQVNTGDEIMFISTSGNLIRTRTDDISIIGRNTQGVRLIRLSEDDNLLGMEKVISEDDEE

SEQ ID NO: 157639 - protein, 225 aa, Unknown
  Bacterial polypetide isolated from the Sargasso Sea
MAKNSYDSKAIEVLSGLDPVRKRPGMYTDTSCPNHLIQEVLDNSVDEAIAGHCSNIKIKIEKDGHIKVSDDGRGMPVDIHPEHKVSGVELILCKLHAGAKFSGDEYNFSGGLHGVGVSVVNALSDSLQVNIKRDSKEHEMHFDNGNKKTELKVVGDVGVRNSGTTIKFKPNSKYFESDQINLKELKHLLKAKAVLCPGLTIDFHYEKKKEKIKWFYEDGLKSYLE

SEQ ID NO: 157640 - protein, 83 aa, Unknown
  Bacterial polypetide isolated from the Sargasso Sea
MAKKSDKAKYDSSNIQVLKGLEAVKKRPGMYIGDTDDGSGLHHMVFEVLDNCIDEAMAGHCSDINVILNKDQSVTIEDNGRGI

SEQ ID NO: 157641 - protein, 87 aa, Unknown
  Bacterial polypetide isolated from the Sargasso Sea
MNDLLSVENEVQYDASSIEVLEGLEPVRKRPGMYIGGTDERALHHLVSEILDNSMDEAVAGQANRIEVELHSDYSISVKDNGRGIPT

SEQ ID NO: 157642 - protein, 218 aa, Unknown
  Bacterial polypetide isolated from the Sargasso Sea
NIKKNGNGNGQVSDLRTKALAKMISSNEIVTLINALGLDPKSQEIDLKDLRYGKIIIMTDADVDGSHIRALLLTFFNNKPFNKLIENGHVYLAQPPLFKINKGSKGIYIKDEKELEDHIVKNNKELKKLKKGSKEYFNVLDLEKSKMNIQRFKGLGEMNPEELWNTTLDPETRNLLQVQYSKDLKKDQILIHTLMGSDVALRKDFIVSNAINVKNLDI

SEQ ID NO: 157643 - protein, 287 aa, Unknown
  Bacterial polypetide isolated from the Sargasso Sea
MTTLKETVYDESKILTLSSLEHIRLRPGMYIGRLGNGSHPSDGIYVLLKEIVDNSIDEFIMGHGKRIDIRMDNGSVNIRDFGRGIPLGKVVECVSIINTGAKYNDEVFQFSVGLNGVGSKAVNALSENFEVISYREKKMLSACFKSGELETKPLTQDTNENNGTKISFTPDTKIFPNYSYDLGTIRKQLWNYAYLNRKLTITLNGEKFKSENGLLDLLNEEVNDTNLYPIVHCHSGQLEMSLTHTERYGEEYYSYVNGHHTNDGGTHLSSFREGILKAVNQFFNSKF

SEQ ID NO: 157644 - protein, 78 aa, Unknown
  Bacterial polypetide isolated from the Sargasso Sea
INFGKKGMYIQRYKGLGEMNPEQLWETTLNPEVRALKKVTIEDIVESDGIFTILMGDQVEPRRNFIEENALRVKNLDV

SEQ ID NO: 157645 - protein, 310 aa, Unknown
  Bacterial polypetide isolated from the Sargasso Sea
IDNPDSTIEDFQEFILGPDFPTGGQLIGKKGIKEAFETGRGACVIRSKTTIETFKKDREAIIINEIPYQVNKAKLLEKIAETVKNNIIEGISDLRDESDRNGVRVVIELKKDVDSNIILNQLYKHTLLQTTFNSNMLALNKGKPEQMNLKDILKSFIDFREEVITKRTIYDLNKARDKAHILLGLVVANANIDEIINLIKSSKDSKDAKNKLVNKKWKLSKSNSDFIKLVEEQSSQVKNDTFQFSDSQVKAILELRLHRLTSLEREDIQKDLEKIILEIKGYLEILNSRQKLLKEIKNELMKSKKNCNTQ

SEQ ID NO: 157646 - protein, 164 aa, Unknown
  Bacterial polypetide isolated from the Sargasso Sea
MTDIIISNEGTEQLPLRRFTEEAYLNYSMYVIMDRALPFIGDGLKPVQRRIIYAMSELGLSHLAKYKKSARTVGDVLGKFHPHGDSACYEAMVLMAQPFSYRYPLVDGQGNWGAPDDPKSFAAMRYTEAKLSRFSEVLLNELGQGTVDWVPNFDGTMEEPRTLP

SEQ ID NO: 157647 - protein, 263 aa, Unknown
  Bacterial polypetide isolated from the Sargasso Sea
LCRLHAGGKFSNKNYQFSGGLHGVGISVVNALSKRVEVNVRRDGQVYNIAFENGDKVQDLQVVGTCGKRNTGTSVHFWPDESFFDSPRFSVSRLTHVLKAKAVLCPGVEITFKDEVNNSEQRWCYQDGLNDYLSEAVNGLPTLPEKPFIGNFSGETETVDWALLWLPEGGELLTESYVNLIPTMQGGTHVNGLRQGLLDAMREFCEYRNILPRGVKLSAEDIWDRCAYVLSVKMQDPQFAGQTKERLSSRQCAAFVSGVVKDA

SEQ ID NO: 157648 - protein, 254 aa, Unknown
  Bacterial polypetide isolated from the Sargasso Sea
IRDESDRDGMRIVVELRRDSYPQVVLNNLFKLTPLQTNFSANMLALVNGEPIILSLRKMLQVFLDFRVETIEKRTKYLLKKAESRDHILLGLLLALDQLDEIIHLIRSASDSANAKRELQELHGLTDIQSDAILQMQLRRLTALEADKIRLEHEDLVKKIIDLKDILNKRERVFEITKVELNEIKEKYNTPRRTKILDLGGGLEDIDLIANERSVVLLTETGYLKRMPVNEFEATSRGTRGKAGTRSQGEEEVK

SEQ ID NO: 157649 - protein, 306 aa, Unknown
  Bacterial polypetide isolated from the Sargasso Sea
KSSLKINEIPYMVNKAKMLERIAELVKEKKIDGISEIRDESDKDGLRVVIEVKRGESVEVLENNLFSQSQLEQSFGINFTVLVDGQPRVLNIKEILQEFIKHRKDVVIKRTKFDLRKAKERGHIVEGLMVAIANIDEIIKIIKKSKDTKIAANDLCKKSWKAGPIVAILKKAGKDACRPKGLSSEYGLKGKNYKLSPDQAKSILELRLGRLTGLEQDNLSTEFNEILEVILELQKILDDKETLLQLIKDELIEVRENFGDDRRTDINDTRHDISNEDLIPEEKRVLTLSRSGYAKTQPLDEYREQR

SEQ ID NO: 157650 - protein, 256 aa, Unknown
  Bacterial polypetide isolated from the Sargasso Sea
NHPKYPNKSALEVILTTLHSGGKFNDKNYTTSGGLHGVGVSVVNALSSELIVEITRNNRVYQQKYIRGLATNKLLEISKVSKKSGTSIQFTPDNQIFDNCSFNPNTIINMAKIKAYLTKGIEIIWKCDKSLVKDYNIEEKLIFKFPNGIVDFLHNSTSGKSFISSENFFGSIPFNNNRIDWVMNWLGPSEDGFFKSHCNTISTPLGGTHENGFKNAILKGFKNWGELSGIKKSQELIIDDIFNETAVIISIFLSNP

SEQ ID NO: 157651 - protein, 120 aa, Unknown
  Bacterial polypetide isolated from the Sargasso Sea
FNYMRELVERGNIYIATPPLYLVKKGSKKVYAWNDEERDNIAKDLGSGVSIQRYKGLGEMNADQLWDTTMNPESRTLRQITLNNDNAKEAQEWFATLMGDEVPPRRKFIEDNAIYAKIDV

SEQ ID NO: 157652 - protein, 264 aa, Unknown
  Bacterial polypetide isolated from the Sargasso Sea
MYKHTQLQDTFGIILLALVEGVPQIMSLKTVLQHFVDFRHRVVVRRTEFELREAEARAHILEGLKIALDNIDEVISIIRGSKDPVMAKEGLMNGFNLSEIQSQAILDMRLQRLTSLEVDKVVKEYKELIKHIAHLKGILESKSQRMDIIKKELIEIRDQYGDERRTEIVPVDSDFSMEDMIAEEEVVLTITHQGYIKRTALNTYRTQRRGGRGVQGAMSKEEDFVEHLFIANTHNYMLFFTDQGKCYWLKVYDIPQGGRAARGR

SEQ ID NO: 157653 - protein, 152 aa, Unknown
  Bacterial polypetide isolated from the Sargasso Sea
MSDLFDNAASSDSYDASKIEVLEGLEPVRHRPGMYIGGTDERALHHLAAEILDNAMDEAVAGHANRIDFILESATTLTIRDNGRGMPTGKHPKFPEKSTVEVIMTTLHTGGKFSGESYATSGGLHGVGASVVNALSSALTVEIAREKLLYRQ

SEQ ID NO: 157654 - protein, 196 aa, Unknown
  Bacterial polypetide isolated from the Sargasso Sea
MISSNEIVTLINALGLDPKAQEIDLKDLRYGKIIIMTDADVDGSHIRALLLTFFNNKPFNKLIENGHVYLAQPPLFKINKGTKGIYIKDEQELEEYILHNNKELKKLKKTSKEYSAAIDLEKSKLNIQRFKGLGEMNPEELWNTTLDPDARNLLQVQYSKDSKKDQSLIHTLMGNDVALRKDFIVSNAINVRNLDI

SEQ ID NO: 157655 - protein, 276 aa, Unknown
  Bacterial polypetide isolated from the Sargasso Sea
TGRGSFKIRATHSIEQHKDKNSIIINELPYQVNKAKLIESIAILVRDKKITGISHLRDESDRDGLRVVIELKKGEQPDVILSSLYKQTNLQTSFSANMVCLVDGEPCTISVPQALLEFIRHRREIITRRTLYLLNKTYDKAHILEGLSIALNSIDEMIDLIKKSKSTEEAKKRIVSKSWVTSKNKWNLSKLMQECSDYMTIDDAVGLNDKNYTISNEQAQAILDMRLNKLTNLEQEVILKDYNDAIESIKKYLKILSNPSELDNLMITELEEIKSL

SEQ ID NO: 157656 - protein, 72 aa, Unknown
  Bacterial polypetide isolated from the Sargasso Sea
MAEGEKLIPINIEEAMKSAYIDYSMSVIVSRALPDVRDGLKPVHRRVLFGMSELGLRSNSKYKKSAFIVGEV

SEQ ID NO: 157657 - protein, 73 aa, Unknown
  Bacterial polypetide isolated from the Sargasso Sea
MSDFAKEILPINIEEELKQSYLSYAMSVIHGRALPDVRDGLKPVHRRILFAMYDLRNFYNRPYKKSARVVGDV

SEQ ID NO: 157658 - protein, 199 aa, Unknown
  Bacterial polypetide isolated from the Sargasso Sea
QYPRHILEQAAIAGAFVPGAVDKDLQGTADSIATRLNLIALEYEQGWSGRITQDQGIRLARVLRGVEELRTLDGPMLRSGEARKTGTFTESLKEVYESPATLIRKDQSQTIYGPLELLSSILKEGEKGLTLQRYKGLGEMNPDQLWETTLDPDARTLFQVKITDAAEADDLFTKLMGDVVEPRREFIQSNALTVANLDF

SEQ ID NO: 157659 - protein, 272 aa, Unknown
  Bacterial polypetide isolated from the Sargasso Sea
DEDFVSKLFLANTHDTLLCFSSYGKVYWIKVYRLPRGGRNAKGRPIVNLLPLEKDERIQAVLPVKEFNDDQFIFMATETGSVKKTKLSAYSRPMKSGIKAIKLRDGDRVVNAEITDGSKEIMLFSNSGKSIRFKESDARPMGRVSQGVRGMRIDKDQKIISLVVLEEGNILVATQNGYGKQTLKNEFSIQNRGGKGVIAIQTSKRNGNLIGAKQVSTGDEVMFISTSGNLIRTRTDDISVIGRNTQGVRLIRLSEDDNLLGMEKVISEDDDE

SEQ ID NO: 157660 - protein, 164 aa, Unknown
  Bacterial polypetide isolated from the Sargasso Sea
MAKDELNSISLKKYAEESYLNYAMYVILDRALPNVGDGLKPVQRRILYAMSELGLDASSKYKKSARTVGDVIGKFHPHGDSAAYEAMVLMAQNFSFKYPLVDGQGNWGSQDDPKSFAAMRYTESKLTDFSNLLISELKSGTVDWQPNFDGSLLEPSHISIKRYL

SEQ ID NO: 157661 - protein, 290 aa, Unknown
  Bacterial polypetide isolated from the Sargasso Sea
YSQTYSRGKPKTKIKIQKCNKNLRGTSISFIPDKEIFENIIFSPKKLYSFIKMKAVLVKGTKISFSIDKELISDKTPFKEEFIYPKGIIDYMNENYLNRKKAISKDFHTNLDINSKERCEVYISFNNSDHSSILSFCNTIQTPDGGSHENSLKNSIIKSLKLFGQKNQLTKSANIIASDLFDYVDSFISIFITSPSFEGQTKKRIAMPKLQKKLEELLQNQFILWLNSNKKESIKLIEILIERSLLRTDITKFKELERKTVKEKNRLPGKLVDCSNKNVQGTELFIVEGD

SEQ ID NO: 157662 - protein, 276 aa, Unknown
  Bacterial polypetide isolated from the Sargasso Sea
MSTQYNADAIEVLNGLEPVRRRPGMYTDTTRPNHLGQEVIDNSVDEALAGHARTLEVTLYEDQSLEVIDDGRGMPVDIHPEEGVCGVELILCKLHAGGKFSNKNYQFSGGLHGVGISVVNALSERVEVTVRRDGQVYDIAFEKGEKVQELTITGTCGRRNTGTRVRFWPEAHYFDSPRFSVSKLEHLLKAKAVLCPGLTIKFLDKNTGIKLEWCYEDGLKDYLVDAVKQFTCLPEQPFVGAFSTELSAVDWALCWLPEGGECLAKSYVNLIPTAQG

SEQ ID NO: 157663 - protein, 284 aa, Unknown
  Bacterial polypetide isolated from the Sargasso Sea
PHNLGEVIDASLYLIKNPDCKISDLQKYIFGPDFPTGGQIIGKKGITEAFETGKGGCVVRSKTSIENFKKDREAIILHEIPYQVNKSKLLERIAEIVKNGIVEGISDLRDESDRNGVRVVIELKKDVDSNIILNQLYKHTLIQTTFNSNMLALNKGKPEQMNLKEILSSFLDFREEVIIKRTLFDLNKAREKAHILVGLVVTNEHIDEIIELIKSSKDTKEAKEKLIKKKWKVSKQNLNFIKSVEDDTVELKNNTFNFSDAQAKAILELRLQKLTALEREDIQK

SEQ ID NO: 157664 - protein, 157 aa, Unknown
  Bacterial polypetide isolated from the Sargasso Sea
MALKKLCSFQILGKSIRFKESDARPLGRVSQGVRGMRIDKDQKIISLVVLEEGNILVATENGYGKQTLKDEFSIQKRGGKGVIAIQTSDRNGNLIGAKQVGTGDEVMFISTSGNLIRTRTDDISIIGRNTQGVRLIRLSEDDNLLGMEKVISEDDEE

SEQ ID NO: 157665 - protein, 271 aa, Unknown
  Bacterial polypetide isolated from the Sargasso Sea
KPAKRLTCLEGLAVALSNIDPVIELIKASPSGAEAKAKLLDKGWKPGDVLQMLERAGGENAARPDGLDEQYGLVDGLYHLSPEQAQAILDLRLQKLTGLEREKLINDYQELLEQIAELLKILGNPERLMEVIREELQAVREEYADERRSEIVASRQDFSMEDLIAEETVVVTLSNGGYAKMQPIDTYRAQKRGGRGKSAGQLKDQDYVEHLLVAGTHDTLLLFTNAGKVFWLRTFELPQGGRASRGKPIVNLLPALGADERITAILRLDAD

SEQ ID NO: 157666 - protein, 207 aa, Unknown
  Bacterial polypetide isolated from the Sargasso Sea
VNALSKKLQLEINRDSKKYFIEFSNGEAKAPLKVIGNSKQTGTKITFLPSTKIFSSIKFSANILIKRMRELAFLNKGIKITFIDASLKKEKVSEFKYDGGLIEFVDFLDEKRERLQNKNGNDLFRKPIYIEGKKNNIEIECSLKWNAGYSEEIFPYTNNIYQKDGGTHLLGFRSALTRVVNKYANENNLLKKNKLTISGDDIKEGLT

SEQ ID NO: 157667 - protein, 79 aa, Unknown
  Bacterial polypetide isolated from the Sargasso Sea
MTDSDNQTPKENTDKKHSIVPILIDTEMQNSYLDYAMSVIVSRALPDVRDGLKPVHRRILYAMHEAGYLWNKPHRKSAR

SEQ ID NO: 157668 - protein, 190 aa, Unknown
  Bacterial polypetide isolated from the Sargasso Sea
VLPSQLPNILINGAMGIAVGMATNIPPHNVVELIDALKLILRKDKVSLSEILKIINGPDLPTGGSIILETNEKKEIYKYGKGSFTINSQYQIEELKNGLYQIVVTEIPFQVNKVKIIEQLANNINNKKLPLDDVVDESDENIRIVLRPKTRNINAKKLISLCFKLTDLSIKYSCNFNVLIDGLEPKQVGI

SEQ ID NO: 157669 - protein, 298 aa, Unknown
  Bacterial polypetide isolated from the Sargasso Sea
GVGVSVVNALSEKLDLTIYRDQKEYFVSFEHGKTIKPIKFLNKTKKSGTKINFLPSKETFSSIKFSAATLQKKIKELAFLNKGLKVDLIDETHSKPKVYENKYDGGISEFVTFLDQKKSILINKNEKAVFKKPLYLQGQKNNVTVECSLQWNAGYSEEVLSFTNNIHQKDGGTHLLGFRSSLTRIINKYASEKNLTKKNKVTIGGEDIKEGLTAILSIKMPDPKFSSQTKDKLVSSEIRNIVETIVGEKIAVWFDQNPSIVKSVLDKVLQAALARDLARKARDSVRRKGTLELSGLPR

SEQ ID NO: 157670 - protein, 52 aa, Unknown
  Bacterial polypetide isolated from the Sargasso Sea
MKNKNYQADSIKVLKGLEAVRKRPGMYIGDTDDGTGLHHMVYEVIDNSIDEA

SEQ ID NO: 157671 - protein, 60 aa, Unknown
  Bacterial polypetide isolated from the Sargasso Sea
MQKVELKKEKISKQISLHDEMKSSYLSYAMSVIVSRALPDVRDGLKPVHRRILYAMYKGG

SEQ ID NO: 157672 - protein, 236 aa, Unknown
  Bacterial polypetide isolated from the Sargasso Sea
HAGGKFESGAYTVSGGLHGVGISVVNALSTVVKVEVQRDGHFWNQDFDLGKPKTKIKKGKVSKKTGTKINFLPDPKIFDETQLFEYNIVSERLRQTAFLNKGLKINLTDSRVKPATKENFHYKGGLVDFVDYLNEGFEVLHEKTISFSDQSKDSEIEVAMQWKTEDDINIKSFANNIHTLEGGTHEEGLRTAVTKAINDFAKSRNLHSDISLTGDDIREGITGVVSVRVKEPQLKA

SEQ ID NO: 157673 - protein, 47 aa, Unknown
  Bacterial polypetide isolated from the Sargasso Sea
MEKEKLIPIKIEDEMKSAYIDYSMSVIVSRALPDVRDGLKPVHRRVL

SEQ ID NO: 157674 - protein, 34 aa, Unknown
  Bacterial polypetide isolated from the Sargasso Sea
MNVENYSSESIKVLKGLEAVRKRPGMYIGDTDDG

SEQ ID NO: 157675 - protein, 228 aa, Unknown
  Bacterial polypetide isolated from the Sargasso Sea
GGVKIVFRDERPEACGADGQAREEIYFYEGGIREYVAYMNTEKDPLHPDIIYVNAEKDGVQVEAALQWCIDAYSDSILGFANNIRTVDGGTHIEGLKTVLTRTLNVFARKRGKRKEADGNLAGENIREGLTAVLSVKVPDPEFEGQTKTKLGNTEVRGIVDTVVGEALAEYLEFHPQVIDLILEKAIQAFNAAEAARRARELVRRKSVLESSTLPGKLADCSSRDPAE

SEQ ID NO: 157676 - protein, 279 aa, Unknown
  Bacterial polypetide isolated from the Sargasso Sea
LSGYCKRIKVNIYKDNSVEVSDNGRGMPVDVHPEHKLTGVELIMCKLHAGAKFSGEDYGFSGGLHGVGVSVVNALSTKLNVKIKRDSKEYEINFSAGDKDNDLKSIGDVGATNSGTTIRFYPDKQYFETLEINKKSLKHLLKAKAVLCPGLQIDYFDEKKNERIKWIFDEGLSDYLDEFSGCNEKLLDETIILSKTSDDQALDVAVNWTEEASNNLLKETYVNLIPTALGGSHLNGFKSGLLEAIKEFCDYRNLIPKGIKINSDDILANCIFVISSKLK

SEQ ID NO: 157677 - protein, 196 aa, Unknown
  Bacterial polypetide isolated from the Sargasso Sea
MISSNEIVTLINALGLDPKSHEIDLKDLRYGKIIIMTDADVDGSHIRALLLTFFNNKPFNKLIENGHVYLAQPPLFKINKGSKGIYIKDEKELEEYILDNNKDLKKIKKGSKEFIKLLDIEKNKMSIQRFKGLGEMNPEELWSTTLNPETRNLLQVQYSKDTKKDQNLIHTLMGNDVALRKDFIISNAINVQNLDI

SEQ ID NO: 157678 - protein, 67 aa, Unknown
  Bacterial polypetide isolated from the Sargasso Sea
MSDIVDSGNSGLNEDNDRIIQTDLRNEMSRSYLEYAMSVIVGRALPDARDGLKPVHRRILYAMYELG

SEQ ID NO: 157679 - protein, 114 aa, Unknown
  Bacterial polypetide isolated from the Sargasso Sea
MKKKKLDNYDASEIEILEGLEPVRRRPGMYIGGTDNNALHHLATEIIDNSMDEVVAKHATTINVNLLDNNTINISDNGRGIPVDNHPKFKKKSALEIIMTTLHSGGKFSNKNYT

SEQ ID NO: 157680 - protein, 229 aa, Unknown
  Bacterial polypetide isolated from the Sargasso Sea
MGGYIKRVPVSTYRSQRRGGKGRSGMSTRDEDFVSNVYVVNTHTPVLFFSSRGMVYKLKVYKLPLGTPQARGKALVNLLPLQEEETITTLMPLLEDEEACEKLDVMFATSKGSVRRNRLSDFVNVMSNGKIAMKLGEGDHLVDVTVCDSNHDVLLSTGKGKCIRFPTIDVRLFVGRSSSGVRGIRLAPKDTVISMSTLKHVSFSIEERDAYLRRRRLERLENEDNIEEE

SEQ ID NO: 157681 - protein, 167 aa, Unknown
  Bacterial polypetide isolated from the Sargasso Sea
SLGCGIGKNFDLSKLRYEKIILMTDADVDGSHIATLLITFIYKYMRPIIDHNRLFLAMPPLFKIQHKDKFFYAYDEVEKNKIIKKEFSNTTNITLSRYKGLGEMPAEQLKSTTMNPEKRKLLNININQGKKELKETENLFESLMGKKAEYRFKFIQENANFTDQIDI

SEQ ID NO: 157682 - protein, 281 aa, Unknown
  Bacterial polypetide isolated from the Sargasso Sea
LVDGVPKIMPLKTVLEQFIEFRHEVVVRRTEFDLKAAEARAHILEGLKIALDNIDEVISIIKGSKDPSQAKEGLMNAFNLSEIQSQAILDMRLQKLTGLEVDKIVDEYKEVIKLIAFLKGILESKSQRMDIIKEEMLAVKTEFGDERRTEIIPVDANFSMEDMIAEEEVVLTITHSGYIKRTALNTYRTQRRGGRGVQGATSNDEDFVEHLFIANTHNYMLFFTNLGKCYWLKVYDIPQGGRATKGRAIVNLIGCEPGEKVEAFVSVKEFDDNHFIVMATR

SEQ ID NO: 157683 - protein, 164 aa, Unknown
  Bacterial polypetide isolated from the Sargasso Sea
IIIMTDADVDGSHIRALLLTFFNNKPFDKLIEFGHVYLAQPPLFKINKGTKSIYIKDENELESYLIKNSKDIKKYKKNSKEFNNFLQIEKSKLNIQRFKGLGEMNPDELWNTTLNPETRNLLQVQYSKNSKKDQDLIQTLMGNDVSSRKDFIVENAINVSNLDI

SEQ ID NO: 157684 - protein, 278 aa, Unknown
  Bacterial polypetide isolated from the Sargasso Sea
IEAGYLYIAQPPLYRAKKGSSEVYLKDDTALDDYLIQSGLKEAKLITGDGSEIAGPDLEDAAKTSLNASRNIETLDNLTGSKGVIEQAAIAGLLNSEHLFNKDAADYLAKRMDTVSTEYEKGWKGSVNEHGLLVSRVLRGVKEETIINNDIISRIEAQNLDDMAIKLQELFGNGSNQVLFKNTSSLTEVIIGPISLRDAIFKIGKKGAQVSRYKGLGEMNPEQLWETTLDPDARVLLQVKVDQEEDAQEAFSSLMGEAVEERRAFIQENALKVSNLDI

SEQ ID NO: 157685 - protein, 206 aa, Unknown
  Bacterial polypetide isolated from the Sargasso Sea
NDQRTKALSKMISSNEILTLINALGLDPKAHEIDLKDLRYGKIIIMTDADVDGSHIRALLLTFFNNKPFNKLIENGHVYLAQPPLFKINKGSKGTYIKDEKELEEFIILNNSKLKKLKKGSKEFLRELEAEKSKMNIQRFKGLGEMNPEELWSTTLDPKKRNLLQVKYSKDLQKDQNLIHTLMGNDVALRKDFIISNAINVENLDI

SEQ ID NO: 157686 - protein, 291 aa, Unknown
  Bacterial polypetide isolated from the Sargasso Sea
SKWLKLQIKRGGKKFILEFKEGLCVKPLTQVDMCDDTGTEIHFKPSEEIFNSIEFKYSILVKRLRELSFLNDGVNINLSDETTGKKENFANSEGLAGYVEFLNQSKHPIHSKIFQAKKEANNIIVEVALQWNNSYYENVMCFTNNIPQRDGGTHLTGLRSGMTRCINRYLEINDLGKKTKINITGDDLREGLTCVLSIKLAEPKFSSQTKDKLVSSEVRQPVEDVISKFFEDYLNENPKEAKQIISKIIDAARAREAARKAKEITRRKGILDSIGLSAKLADCQERDPEKS

SEQ ID NO: 157687 - protein, 196 aa, Unknown
  Bacterial polypetide isolated from the Sargasso Sea
MISSNEILTLINALGLDPKNEELNLKDLRYGKIIIMTDADVDGSHIRALLLTFFNNQPFNKLIKEGHVYLAQPPLFKINKGSKGIYIKDEKELENYILKNSKDLKKFKKDTKEHKKLFQFEKSKLSIQRFKGLGEMNPEELWSTTLDPQTRNLLKVEYSKNYKKDQDLIQTLMGSDVASRKDFIVDNAINVLNLDV

SEQ ID NO: 157688 - protein, 177 aa, Unknown
  Bacterial polypetide isolated from the Sargasso Sea
NEEIDLKDLRYGKVIIMTDADVDGSHIKALLLTFFNNKPFNKLIENGHVYIAQPPLFKINKGSKGIYIKDEKELDKYILNNSKELKNTKKGSKEFEKKLQEEKLKISIQRFKGLGEMNPEELWNTTLNPETRNLLQVKYSKDLKKDYELIHTLMGNDVTLRRDFIVENAINVSNLDI

SEQ ID NO: 157689 - protein, 268 aa, Unknown
  Bacterial polypetide isolated from the Sargasso Sea
MEKNIFVEFNNGEAKKPLKEIGNSKETGTLITFLPSKKIFSSIKFSGNILIKRMRELAFLNKGIKITFIDSSQKKEKIQDFKFDGGILEFVEFLDEKREKLLNKNGNDLFKKPIYIEGKKDNIEVECSLKWNADYSEDVLPYTNNIYQKDGGTHVLGFRSALTRIINKYVSDNNLLKKNKLTISGDDIKEGLTCVLSAKIPDPKFSSQTKDKLVSSEVRTIVETIINEKLSIWFDQNPSISKIILAKIIQAATARDVARKARENVRRK

SEQ ID NO: 157690 - protein, 93 aa, Unknown
  Bacterial polypetide isolated from the Sargasso Sea
GNKKEYAWDNDQRDKIMLDFGQGASVQRYKGLGEMNAEQLWDTTMNPEYRTLRKIVVENQKRADETFSILMGDDVPPRREFIENNAVYANIDA

SEQ ID NO: 157691 - protein, 116 aa, Unknown
  Bacterial polypetide isolated from the Sargasso Sea
DYKVLGRVQKAQKVFSGPVVIDNGSEITEYPNIEECLNQIVNASKRGLNVQRYKGLGEMNPDQLWETTLDPNTRSLLQVKADDDAGLTFETLMGDEVPPRREFIEENALNAGNVDI

SEQ ID NO: 157692 - protein, 187 aa, Unknown
  Bacterial polypetide isolated from the Sargasso Sea
KLSAYSRPMKSGIKAIKLKDGDRVVNAEITDGTKEIMLFSNSGKSIRFKESDARPMGRVSQGVRGMRIDKDQKIISLVVLEKGNILVATENGYGKQTLKDEFSIQKRGGKGVIAIQTSDRNGNLIGAKQVSTGDEVMFISTSGNLIRTRTDDISIIGRNTQGVRLIRLTEDDNLLGMEKVISEDDEE

SEQ ID NO: 157693 - protein, 299 aa, Unknown
  Bacterial polypetide isolated from the Sargasso Sea
NHLIQEVLDNSVDEALSGYCKRIKVNLYKDNSVEVSDNGRGMPVDIHPEHKLTGVELIMCKLHAGAKFSGEDYGFSGGLHGVGVSVVNALSTKLNVKIKRDSKEYEINFSEGDKDNDLKSIGDVGATNSGTTIRFYPDKQYFETLEINKKSLKHLLKAKAVLCPGLQIDYFDEKKNERIKWIFDEGLSDYLDEFSGCNEKLLDETIILSKTSDDQALDVAVNWTEEASNNLLKETYVNLIPTGLGGSHLNGFKSGLLEAIKEFCDYRNLIPKGIKINSDDILANCIFVISSKIKKSSVC

SEQ ID NO: 157694 - protein, 221 aa, Unknown
  Bacterial polypetide isolated from the Sargasso Sea
RKCSKVVGDVMGNYHPHGNEAIYGTLVRLGQHFSTRYPLIEPQGNFGTPDDPPAAMRYTESRMSLLASQLLDGIDEETVDFEPNYSGETTEPKVLPGRFPNLLINGAEGIAVAMATNMPPYNLQEITEAVKFTLKTKEPKPRDYLKIIKGPDFPTGGLIVKTPTIKDAILKGRGSIKLIAVADVEELGKGRSAIVVKELPYQASIYRIMEKIASLVQDKKL

SEQ ID NO: 157695 - protein, 178 aa, Unknown
  Bacterial polypetide isolated from the Sargasso Sea
KDEEIDIKNLRYGKIIIMTDADVDGSHIRALLLTFFNNKPFNKLIKNGNIYLAQPPLFKINKGGKVTYIKDEKELEKFIHNNSKELKKFKKGSKDFQKYYSQEKSKLNIQRFKGLGEMNPDELWNTTLNPVTRNLLKIEYSKNIEKDAKIIHTLMGNDVSLRKDFIVSNAIDVQNLDI

SEQ ID NO: 157696 - protein, 143 aa, Unknown
  Bacterial polypetide isolated from the Sargasso Sea
MSKKAYDSKAIEVLSGLDPVKKRPGMYTDTSCPNHLIQEVLDNSVDEALSGFCKRIKVNLYKDNSVEVSDNGRGMPVDVHPEHKLTGVELIMCKLHAGAKFSGEDYGFSGGLHGVGVSVVNALSTKLNVKIKRDSKEYEINFS

SEQ ID NO: 157697 - protein, 84 aa, Unknown
  Bacterial polypetide isolated from the Sargasso Sea
MAEERVQPIALHQEMQRSYLEYAMSVIVGRALPDARDGLKPVQRRILYAMQELGLTPDRPYRKCARVVGDVLGKYHPHGDQAVY

SEQ ID NO: 157698 - protein, 282 aa, Unknown
  Bacterial polypetide isolated from the Sargasso Sea
GSQDDPKSFAAMRYTESKLTNFANLLISELKAGTVDWQPNFDGSLLEPVIFPSKIPIILLNGTSGIAVGMATDIPSHNINEVIEATIRILEKPKSDLNDLLKIIKGPDFSNDAPIVASPEELHEMYLTGRGGFKIQSQWKQEKNQIIINALPYQASGSKILEQIAEQMLNKKLPMVIDLSDEGDHMEPVRLVITLKSNRVNAEDVMNHLFASTDLQKTYRMNMNLISLKGGPKVFSLVDLLKEWLTFRKDTVKRKLEHRLNQVNDRLHILERLTKPYFIDFG

SEQ ID NO: 157699 - protein, 105 aa, Unknown
  Bacterial polypetide isolated from the Sargasso Sea
GIAVGMATNILPHILGEVIDACVAYIDDPEISFEKINEIIKGPDFPTGGKIVGTKGIRDSQNSGRGSIIVQAKSTFEEFKSDREAIIFSELPYQVNNSTLIEKIA

SEQ ID NO: 157700 - protein, 216 aa, Unknown
  Bacterial polypetide isolated from the Sargasso Sea
FRTAMQIRLYRTHYDRLCYNPNLNMLINLLLTHQIEIDLGGAEHIINCISALKNIYQDYKLTVDPEKKGSNVLIEANGQKIELSFNLLENLSAYDYSQLFDEHLRLKAALGEKGVVLTEEKEGESNFFKSWFELLDFIINFGKKGMYIQRYKGLGEMNPEQLWETTLNPEVRALKKVTIEDIVESDGIFTILMGDQVEPRRNFIEENALRVKNLDV

SEQ ID NO: 157701 - protein, 128 aa, Unknown
  Bacterial polypetide isolated from the Sargasso Sea
MLAQPPLYKINKGSKATYIKDDKQLENYILKNSKDLTKLKKGSKDFVKIFEIEKSKLNIQRFKGLGEMNPEELWSTTLNPETRNLLQVEYSKNIKKDQEIVHTLMGNDVTARKDFIIENAINVLNLDI

SEQ ID NO: 157702 - protein, 47 aa, Unknown
  Bacterial polypetide isolated from the Sargasso Sea
MSTNNKKNQYSADSIQALEGMEHVRKRPSMYIGDVGSRGLHHLVYEV

SEQ ID NO: 157703 - protein, 317 aa, Unknown
  Bacterial polypetide isolated from the Sargasso Sea
KNKDIKINELMKHIPGPDFPTGGLIIGKDIIKQGYKTGRGSFKIRGDISVENLKNGKDRLVISSIPYQINKANLNERIAELVRDKKIEGISDIRDESNSEGIRVSIDLRRNIEPETVKRQLYKYTSIETSFGFNSLAIVDQKPKTCSLKDFLENFLKFREDVVIKRTKFDLKKAEERVHILLGLSVSVENIDKVIKIIRSSKNPDEAKTSLLKTTWKINKSSKLIKLVDTKNYKGKYTLSLDQVTSILELRLQKLTAIGINEIEIEIKKLAEEISKFKKIINSKNELLKVISNDLQMIKDKFSFPRRTKIIDAVLNY

SEQ ID NO: 157704 - protein, 301 aa, Unknown
  Bacterial polypetide isolated from the Sargasso Sea
SNIIKGPDFPTGGELIYNEAIKELYETGKGSLTIRGVINTEEVYLGKGKHKKNALIITELPYQINKAGWIEKLAELVNSGKINGISDIRDESDRDGMRIVIELKKDSNSELVISNLYKKTTLQTNYGAIFLALIKGKPIQLNLKKYLNYFLEFREETIRKRTFYFLKNTLNKLEISEGLSKATKNIKKVIAIIEESENSVQARSKLVENFFLSEKQANSVLDMPLKKLTNLEKNQIDNEIKNLEEKKNYFEKLLNERELFLKLLIEELLILKKKYNVIRKTKIIKNINQNEELETLNNQIL

SEQ ID NO: 157705 - protein, 131 aa, Unknown
  Bacterial polypetide isolated from the Sargasso Sea
MKNNEKISSLSLKNYAEESYLNYAMYVILDRALPNIGDGLKPVQRRILYAMSELGLDASSKYKKSARTVGDVIGKFHPHGDTAAYEAMVLMAQNFSFKYPLVDGQGNWGSQDDPKSFAAMRYTESKLTSFA

SEQ ID NO: 157706 - protein, 243 aa, Unknown
  Bacterial polypetide isolated from the Sargasso Sea
VQQNRGRNRENQAVLPLRGKILNTYVDLNDSKKNGNSSELRTKTLSKMISSNEIVTLINALGLDPKAEEIDIKDLRYGKIIIMTDADVDGSHIRALLLTFFNNTPFNKLIENGNIYLAQPPLFKINKGTKGIYIKDDNELENYILKNTKSLKKYKKGSKEFNSFIESEKSFLSIQRFKGLGEMNPDELWNTTLNPETRNLLQVQYSKDIKKDQEIIHTLMGNDVSSRRDFIVSNAINVLNLDI

SEQ ID NO: 157707 - protein, 225 aa, Unknown
  Bacterial polypetide isolated from the Sargasso Sea
GKILNTYVEEDTKKNNSNGNNHRTKTLSKMISSNEIVTLINAMGLDPKSDNIETKDVRYGKIIIMTDADVDGSHIRALLLTFFNNVPFNKLIKEGYIYLAQPPLFKINKGTKGIYIKDEKELEKYIQKNSKILSNLKKGTKEYERSFDEEKSKFNIQRFKGLGEMNPEELWSTTLNPETRNLLKVEYSKNIKKDQDIIHTLMGNDVASRKDFIVSNAINVSNLDV

SEQ ID NO: 157708 - protein, 291 aa, Unknown
  Bacterial polypetide isolated from the Sargasso Sea
MEDMIAEEEVVLTITHQGYIKRTALNTYRTQRRGGRGVQGAMSKDEDFVEHLFIANTHNYMLFFTDMGKCYWLKVYDIPQGGRAARGRAIVNLIGCDPGERVEAFVSVKDFDDDHYIVMCTKNGIVKKTVLSAYGNPRKGGIYAIDIRDNDKLIEARITNGEHDILLGTHEGKSIRFSENNIRPSGRKTMGVKGITLSSSDDYVVGMLVVRREGTVLVATEKGYGKRTEVIQYRTQTRGGKGVLTMRCTDKTGKMVNIMEVVDSDDLIVITNSGVLMRQSVSEIRAIGRVT

SEQ ID NO: 157709 - protein, 42 aa, Unknown
  Bacterial polypetide isolated from the Sargasso Sea
MTKNKSYQADSIKVLKGLEAVRKRPGMYIGDTDDGTGLHHMV

SEQ ID NO: 157710 - protein, 72 aa, Unknown
  Bacterial polypetide isolated from the Sargasso Sea
MKNTEKFKDKNIKLISMHDEMSSSYLSYAMSVIVSRALPDVRDGLKPVHRRILFAMYKGGYDWSKQFRNQPE

SEQ ID NO: 157711 - protein, 74 aa, Unknown
  Bacterial polypetide isolated from the Sargasso Sea
MDKSQLENKNNIKPIEMYDEMSSSYLSYAMSVIVSRALPDIRDGLKPVHRRIIYAMHKGGFDWSKQYRKSARIV

SEQ ID NO: 157712 - protein, 283 aa, Unknown
  Bacterial polypetide isolated from the Sargasso Sea
STTFSDNYDGQNLEPDVLPSKLPNILLNGSTGIAVGMATNIPPHNLIEINDCLTKLILKPNSSESELLKIIKGPDLPTGGEIILSSSEKKNIYKRGFGSFLINSKWHDEKIKNGLYEIVITEIPFQVNKVKIIEQLANLINQKKIPLDDVRDESDEKIRIVLKPKNRNIDKKKLVDLCLKLTDLSIKYSCNFNVLEKGRIPKQLGLKSILSQFIDFRKITVKRKSKYNINKNNQRLEILKGYLIVFANLDKIIKIIRIKEDPKKEIIKAFKLSILQVEAILNM

SEQ ID NO: 157713 - protein, 55 aa, Unknown
  Bacterial polypetide isolated from the Sargasso Sea
MATASTRERILARSLEAEMRESFLDYSMSVIVQRALPDVRDGLKPVHRRILYAMQ

SEQ ID NO: 157714 - protein, 289 aa, Unknown
  Bacterial polypetide isolated from the Sargasso Sea
MGTKDEDFVEQLFVANTHDYLLFFTNKGQVFRKIVFELPQAGPTGRGKAVINMLPLREGESICACLNVPKESENKYIFLCTEGGVAKKTPMLDCAKIRVSGLRVITLDEGDSVISVQLTGGDQELFFATREGMGLRVNEKTLRPMGRQARGVRGVRLRKLDRVVSALALSGSGELLTVTEGGYGKKTPIADYTLAKNRGNFGMRTIRITDTNGPVVNVLEVEEHFQLFLITQLGKLIRIPVENIRTIGRVTQGNRLIHLEKDEQVIGIAPVIENEEEEEIEALQQDSGS

SEQ ID NO: 157715 - protein, 92 aa, Unknown
  Bacterial polypetide isolated from the Sargasso Sea
MENEDLENEDIQHTTFSKAISERYLAYALSTITSRSLPDVRDGLKPVHRRVLYAMMQLKLNHNVSFKKSARVVGDVMGKFHPHGDGAIYESH

SEQ ID NO: 157716 - protein, 60 aa, Unknown
  Bacterial polypetide isolated from the Sargasso Sea
MNPEQLWETTMDPNTRRMLRVTIEDAIGADQLFNTLMGDDVEPRRNFIEENALRVANLDV

SEQ ID NO: 157717 - protein, 79 aa, Unknown
  Bacterial polypetide isolated from the Sargasso Sea
MTDETQNTDTSSDDEKPISIYHGPSVSITKELKTSYLDYAMSVIVSRAIPDLRDGLKPVHRRILYAMHDSGNTHDKGYR

SEQ ID NO: 157718 - protein, 46 aa, Unknown
  Bacterial polypetide isolated from the Sargasso Sea
MKTNNTYKADSIKVLKGLEAVRKRPGMYIGDTDDGTGLHHMVYEVV

SEQ ID NO: 157719 - protein, 242 aa, Unknown
  Bacterial polypetide isolated from the Sargasso Sea
KQGRDRSNQAVLPLRGKILNTYVEDMTLKKNGNSNGTDQQTKALSKMISSNEIVTLINALGLDPKAQEIDLKDLRYGKIIIMTDADVDGSHIRALLLTFFNNKPFNKLIEYGFVYLAQPPLFKISKGSKGIYIKDEKELEEYIIHNNKDLKKFKRGSKEFYKAIDLEKSKMNIQRFKGLGEMNPEELWSTTLDPKTRNLLQVQYSKDLKKDRDLIHTLMGNDVSLRKDFIISNAINVQNLDI

SEQ ID NO: 157720 - protein, 64 aa, Unknown
  Bacterial polypetide isolated from the Sargasso Sea
KGLGEMNPSQLAETTMNPETRSLLKVSQIPDDDYSIFDTLMGEDVEKRKDFIISTANTIDHVDI

SEQ ID NO: 157721 - protein, 238 aa, Unknown
  Bacterial polypetide isolated from the Sargasso Sea
VGMATNVPPHNLTEVINGSLKLLENPKLSIDQIIESISGPDFPTGGTIDGKMGIYEAYKTGRGIIYVRSKSKVEENKAGRKSLVIYEIPFMVNKARTLEKIAELVKEKKIDGISEIRDESDKDGLRIVIDVKKGESVEVLENNLFAQTQLEQSFGINFTVLVDGQPKVLNLKEILQEFLKHRKDVVLKRTKFALRKSKDRGHIVEGLMVAIANIDEIIKIIKKSKDPKIAAQELIKKK

SEQ ID NO: 157722 - protein, 231 aa, Unknown
  Bacterial polypetide isolated from the Sargasso Sea
FPLRGKILNTYVEDFTIKKNGNGHASDKRTKALSKMISSSEIVTLINALGLDPKAQEIDLKDLRYGKIIIMTDADVDGSHIRALLLTFFNNEPFNKLIENGHIYLAQPPLFKVNKGIKGIYIKDEKELEDYIVNNNKEIKKIKKGTKEFTKALDLEKSKMNIQRFKGLGEMNPEELWSTTLDPETRNLLQVQYSKDLKKDQSLIHTLMGNDVALRKDFIVSNAINVQNLDI

SEQ ID NO: 157723 - protein, 260 aa, Unknown
  Bacterial polypetide isolated from the Sargasso Sea
HGVGVSVVNALSEKLELEINRDGKKYFVEFYNGEAKKPLKEIGKSKENGTQITFLPSKEIFSSIKFSGTILIKRMRELAFLNKGIKITFIDGSQKKEKIQEFKFEGGILEFVEFLDEKRDKLLNKNENDLFKKPIYIEGNKDNIYIECSLKWNASYTEDVLPYTNNIYQKDGGTHVLGFRSALTRIINKYVSDNNLLKKNKLTISGDDIKEGLTCVLSAKIPDPKFSSQTKDKLVSSEVRTIVETIINEKLSIWFDQNPS

SEQ ID NO: 157724 - protein, 300 aa, Unknown
  Bacterial polypetide isolated from the Sargasso Sea
PPHNLNEVLNGCINLIKNPKISIDDLIKDISGPDFPTGGTIDGKAGIYEAYKTGRGIIHTRSNTSVEEDKSGKQSLIINEIPFMVNKAKMLEKIAELVKEKKIEGITEIRDESDKDGLRVVIEVRKGDSVDVLENNLFAQTQLEQSFGINFTVLSEGQPKEVNLKEMLQAFVKHRKDIITKRTKYDLRRAKDRGHVVEGLMVAIANIDQIIAIIKKSKDPKIAANELCKKIWKSGPLEAVLKKVGSDACKPKGLSKDLGLKGKKYKLSENQAKAILELRLGRLTGLEQDNLNKEFSEIVE

SEQ ID NO: 157725 - protein, 196 aa, Unknown
  Bacterial polypetide isolated from the Sargasso Sea
MISSNEILTLINALGLDPKTEDIDIKDLRYGKIIIMTDADVDGSHIRALLLTFFNNKPFNKLIESGHVYLAQPPLFKINKGSKVIYIKDEKDLNKYILNNSKNLKKFKKGSKEFLNAYDEEKSKMNIQRFKGLGEMNPEELWSTTLNPETRNLLKVQYSKDLKKDQNIIHTLMGNDVALRKDFIVSNAINVSNLDI

SEQ ID NO: 157726 - protein, 60 aa, Unknown
  Bacterial polypetide isolated from the Sargasso Sea
MYIGSTNEQGLHHLVNEVLDNSIDEVVAGHASEVFFHYKKNGSILIKDNGRGIPIDFHPK

SEQ ID NO: 157727 - protein, 268 aa, Unknown
  Bacterial polypetide isolated from the Sargasso Sea
GLDPVKKRPGMYTETSRPNHLALEVIDNSIDEALGGFASKIDVVLHKDGSLGVEDDGRGMPVDLHPEEGVPAVELIFTRLHAGAKFSNEDYKFSGGLHGVGVSVVNALSTFLEAEIKRDGQKYSIRFEDSEKKKDLKAIDKVGQKNTGTKVTFLPDPQYFDNPKISVSQLTSALKAKAVLSPGLKISFKDENTGQSESWCFVEGLAAYLASSNKGGEVVPSDPFEGEFLSDEGGLTWALQWVQGIADPISESYVNLIPTSQGGTHVNG

SEQ ID NO: 157728 - protein, 284 aa, Unknown
  Bacterial polypetide isolated from the Sargasso Sea
IMTKLHAGGKFDNEAYKVAGGLHGVGVSAVNAVSESLIMTIHREGKEWQQTYNKGVPQGKLKSIGSSDRTGTIISFKPDLEEVFSDIIEFDFEQINTRLRRTAFLNAGLQIIARDLRGESAVEIEHKYDGGLKEYVESMNKNKEVVHEDVLHVLGSKQGDKGEVYVEVAMQWTDAYSESIHCFTNIIHNTDGGTHLSGLKSSLTRTVNGYAQSKNLLKNVKGLSGDDVREGISAVISIKHPDPSFNAQTKAKLVTSEVAGIVEQIVNDKLGEFFEENPSVAKQI

SEQ ID NO: 157729 - protein, 61 aa, Unknown
  Bacterial polypetide isolated from the Sargasso Sea
MEKTSTENKSFKPIFVQDEMSSSYLSYAMSVIVSRALPDVRDGLKPVHRRIIYAMYRGGYD

SEQ ID NO: 157730 - protein, 282 aa, Unknown
  Bacterial polypetide isolated from the Sargasso Sea
MPVDKHPKHNVSGAEVIMTNLHSGAKFSEKNYKFSGGLHGVGVSVVNALSEKLELIINRKGDKNEYFMSFQKGILSQKLIPKNKSKKQQGTKISFKPDTKYFDSVNIDLDALVHLIRAKSILQPELKLILYDNKNNLEPREFYHSGDLKDYLVSVNSNLGELLPENSYYGKIETDNYMMDWSVLWIDENNDLVQESYVNLIPTALGGTHVNAMRSGLVDAIREFCLKRKLLPKNIKLSPEDIWKNVSYVLSFKMTNPQFSGQTKGKLQSNHLSAILVSQIER

SEQ ID NO: 157731 - protein, 301 aa, Unknown
  Bacterial polypetide isolated from the Sargasso Sea
DAPMEKPSVLPARLPHVLLNGTTGIAVGMATDIPPHNVREVTAACIRLLDQPDASVDELCEHIKGPDFPTRAEIITPRKDLRQMYETGRGSLRMRARWIRENGEVVITDLPHQVSGNRVLEQIAQQMQTKKLPMVADLRDESDHENPTRLVIVPRSNRVDLDGLMAHLFASTDLEKTYRVNINVIGNDGRPGVKGLYTILTEWLAFRKTTVTRRLQHRLDKVLARLHLLEGLLIAYLNIDEVIEIIRTEDKPKAELMARFGLSAEQAEAILELKLRHLAKLEEMKIRGEQDELSAERDELQ

SEQ ID NO: 157732 - protein, 276 aa, Unknown
  Bacterial polypetide isolated from the Sargasso Sea
HLVIEVLDNAIDEAVAGYANLIEIEQISNNTIKISDNGRGIPVDSHPKYPNKSALEIIMTTLHSGGKFTDKNYKTSGGLHGVGISVVNALSSKLIVEVSRDRKLYSQTYSKGIPQNTLSVEGKISKKTGTSIQFTPDYTIFPKDSSFKPQIVIEMAKTKAYLTKGIEIKWKCNNELSKQLGIEESLTFKFPNGILDYLNDLTSNKPILTSDPFLGFVNFDDNSIEWIINWLAPGEEGIFKSHCNTISTPLGGTHENGFKNAILKGFKNWGDLSGNK

SEQ ID NO: 157733 - protein, 291 aa, Unknown
  Bacterial polypetide isolated from the Sargasso Sea
SWDGISDLRDESTEETRIVVELKLGEIERVTMNKLYKLTALESSFGVILLALDKLRPRQLNIKEALECYVEHRREVTLRRTQFRLRKAEDRAHILEGYKIALDNLDDFVKIIRASSNRTEAKEKLMEKYSLSERQANAILDLRLYQLTGMEREKIDAEYLELMKLIEGFKDVIENEHKLLGVIKEELQELKSSYADERKTVISDVEGDVRMEDLIPNDGCVVTITKTGFIKRTGVEEFRVQNRGGKGVIGSGQKDEDPVDILTTCNAHDTLMFFMQNGRVYVEKAYEIPEG

SEQ ID NO: 157734 - protein, 266 aa, Unknown
  Bacterial polypetide isolated from the Sargasso Sea
KFNDSAYKTSGGLHGVGISVVNALSSNLIVKVFKKGKVYSQKYSRGKAKSKILIEKCSIKLKGTEISFCPDKEIFDEISFIPKKLYEFIKMKSVLVAGTSINFKIDKDLITDSTPSKALFYYKNGIQDYINEKNSKIDKIFEKNFSLKNSLSENEKCEIFISFNKKEKSSFISFCNTIETPDGGSHENALKNGILKSLKLFGKKNQFSKIANININDLIDYSDVFISIFINEPSFEGQTKKRIIMPNLQKKLENLCQNGIFTMVKF

SEQ ID NO: 157735 - protein, 263 aa, Unknown
  Bacterial polypetide isolated from the Sargasso Sea
EWLWVEVKRDGKVHRQEYKIGDPQNKLKIIGDSKKTGTKVCFFPDSTVFKTIRFEYSIIAERLRELAYLNSGLEIVLRDERTEDGESDSFKFKGGLSDFVKYLDENNNPLHNKVVTVKKEDGDVPVDVALRYGNTYNDNILTFVNNINTIEGGTHLSGFRSALTRAMNNHASKNNLIKSKKNEKLTLTGEDFREGLTAIISVKVAEPQFEGQTKTKLGNGEIKGFVDKIVYEGILDFLEQNPSIGRRIIEKALLAARSRSAAR

SEQ ID NO: 157736 - protein, 153 aa, Unknown
  Bacterial polypetide isolated from the Sargasso Sea
MSDEIIISNDGVEQLPMRRFTEDAYLNYSMYVIMDRALPHISDGLKPVQRRIIYAMSDLGLSANAKYKKSARTVGDVLGKFHPHGDSACYEAMVLMAQPFSYRYPLVDGQGNWGAPDDPKSFAAMRYTEAKLSRFAEVLLNEIGQGTVDWVPN

SEQ ID NO: 157737 - protein, 112 aa, Unknown
  Bacterial polypetide isolated from the Sargasso Sea
WGERLDGLIEADGFFQRGEKRHETQDFAAGLDWLLAEAKKGCAIQRYKGLGEMNPEQLWETTMDPEARRMLQVTIEDAFLADQMFSTLMGDDVEPRREFIEQNALAVANLDI

SEQ ID NO: 157738 - protein, 285 aa, Unknown
  Bacterial polypetide isolated from the Sargasso Sea
QQSFDLTDKEAIKQLLFNFEWHYALGIRDESDKSTYVSEKTLWNTRYLLTENDLYQSLFDIPTRQLADLCGVDPSRQRLDSVHIFSNMRHLGRIGLFVRTIKKFLQYLKRHHPGTSGFGRLEKSLRDRYLSKEESSVFSMVKPSETPKTLQNLAEDLFSIIRCYRDDPKVTSMKYYKLMLRLLEEQCIVGNEQDDGEKITIKPNREVPSDSLQNPSDPDATYDGLKGKGYQVQVAETYRTGDEAPALSLITHINVEPAHHHDSEALVPAIERTKKMGFAPKQMLA

SEQ ID NO: 157739 - protein, 175 aa, Unknown
  Bacterial polypetide isolated from the Sargasso Sea
MDFNKTGGGSKSDSQPLSEFVEKAYLDYSMYVILDRALPFIGDGLKPVQRRIIFAMSELGLSAQSKPKKSARTVGDVLGKYHPHGDTACYEAMVNMAQDFSYRYPLIIGQGNWGSYDDPKSFAAMRYTEAKLSAYTKLMLSELGQGTTDWKQISTALSRSLNSFLPDYPTSFSMV

SEQ ID NO: 157740 - protein, 237 aa, Unknown
  Bacterial polypetide isolated from the Sargasso Sea
RSNQAVLPLRGKILNTYVEELSIKKNGNGNGSDQRTKALSKMISSNEIVTLINALGLDPKAHEIDLKDLRYGKIIIMTDADVDGSHIRALLLTFFNNKPFNKLIEHGHVYLAQPPLFKINKGSKGIYIKDEEELENYIMTNNKELKKLKKGSKEISRLIEIEKSKMSIQRFKGLGEMNPEELWSTTLNPETRNLLQVQYSKNSKKDQELIHTLMGNDVTLRKDFIISNAINVQNLDI

SEQ ID NO: 157741 - protein, 230 aa, Unknown
  Bacterial polypetide isolated from the Sargasso Sea
HAWSKIFRRGLNFSGGLHGVGVSVVNALSKKLSVEIKREGHKFEMNFNGGEKISDLKKVGDIGARNTGTAINFLPDDQYFETTKIDKSNLKHLLKAKAVLCSGLTVEYFDEKKNEKILWNFESGLISYLSESSEDLELLLDESISCSKSGDDNALDFVLNWSTKPVKNLMNESYVNLIPTAQGGSHLNGFKAGLLESVKEFCEFRNLIPKGLKITADDVVQHSTFIVSSK

SEQ ID NO: 157742 - protein, 46 aa, Unknown
  Bacterial polypetide isolated from the Sargasso Sea
MTDKISQINLEDEMKKSYLDYAMSVIIGRALPDVRDGLKPVHRRVL

SEQ ID NO: 157743 - protein, 84 aa, Unknown
  Bacterial polypetide isolated from the Sargasso Sea
IIERMKKDNKNTKVSIQRYKGLGEMNAEQLWETTMDPERRTLLQVTVESAGEAAETFQNLMGSDVEARRTFIEKNAKFVVNLDI

SEQ ID NO: 157744 - protein, 196 aa, Unknown
  Bacterial polypetide isolated from the Sargasso Sea
MISSNEILTLINALGLDPKTEDIDLKDLRYGKIIIMTDADVDGSHIRALLLTFFNNKPFNKLIENGHVYLAQPPLFKINKGSKVIYIKDEKDLNKYILNNSKNLKKFKKGSKEFLNAYDDEKSKMNIQRFKGLGEMNPEELWSTTLNPETRNLLKVQYSKDLKKDQNIIHTLMGNDVALRKDFIVSNAINVSNLDI

SEQ ID NO: 157745 - protein, 81 aa, Unknown
  Bacterial polypetide isolated from the Sargasso Sea
MADPTGAGNPSERIIQTDLRIEMSRSYLEYAMSVIVGRALPDARDGLKPVHRRILYAMYELGLIAERPYRKCARVVGEVLG

SEQ ID NO: 157746 - protein, 221 aa, Unknown
  Bacterial polypetide isolated from the Sargasso Sea
EAMAGRCNSIEVRLEKNGSVTVTDNGSGIPVKPRPKTKESALTTVLTTLHAGGKFESEAYSVSGGLHGVGISVVNALSVFVKAEVQRDGFFWNQNFDFGKPVSKIKKGKATKKTGTKINFLVDPEIFEETQSFEYNIVSERLRQTAFLNKGLKITLVDNRVKPATKDKFLYKGGLVDFVDYLNDGFEVLHEKTISFSDQSKDSEIEVALQWKKEDDVNIKS

SEQ ID NO: 157747 - protein, 213 aa, Unknown
  Bacterial polypetide isolated from the Sargasso Sea
MSTEQLATESESVAEVSSSLLEQAIGATKQTESSRAEELLKTLTEEALKGTVQWNKNMTVTFNEAIQLIDQKISKQLSVVMHTDEFQKLEGSWRGLHHLVMNSETSSTLKIRVLNMKKKELHKDLSKAVEFDQSQTFKKIYESEFGTPGGEPYGTIVGDFEFTNHPEDVETLSLMSNVAAAGFCPFIAASSPSLFGFDNWEELTKPRDLEKSV

SEQ ID NO: 157748 - protein, 27 aa, Unknown
  Bacterial polypetide isolated from the Sargasso Sea
MKNLRYDKIVIMTDADVDGSHIRTLLL

SEQ ID NO: 157749 - protein, 37 aa, Unknown
  Bacterial polypetide isolated from the Sargasso Sea
MVKNSNYQADSIKVLKGLEAVRKRPGMYIGDTDDGTG

SEQ ID NO: 157750 - protein, 196 aa, Unknown
  Bacterial polypetide isolated from the Sargasso Sea
MISSNEIVTLINALGLDPKAEEIDLDDLRYGKIIIMTDADVDGSHIRALLLTFFNNKPFNKLIENGNIFLAQPPLFKINKSGKSIYIKDEKSLEDFILNNSKSSKKYKRGSKEFEKVLSEEKSKLNIQRFKGLGEMNPDELWNTTLDPERRNLLQVKYSNDKKKDQKIIHTLMGNDVSIRKDFIISNALEISNLDI

SEQ ID NO: 157751 - protein, 186 aa, Unknown
  Bacterial polypetide isolated from the Sargasso Sea
VFSVSLSKIADNNEIQNLIQSLGCGIGKNFDLGKLRYEKVILMTDADVDGSHIATLLITFIYKYMRPIIDNNRLFLAMPPLYKIQNKEKIFYAYDEDEKDKIIKSEFKKINPTLSRYKGLGEMPADQLKSTTMNPEKRKLLNVNINQGKKELNETEKLFESLMGKKAEYRFKFIQENANFTNQIDI

SEQ ID NO: 157752 - protein, 68 aa, Unknown
  Bacterial polypetide isolated from the Sargasso Sea
MSDSEDKSEEGRSSVVERKPYDGPSISITKELKTSYLDYAMSVIVSRAIPDLRDGLKPVHRRILYAMH

SEQ ID NO: 157753 - protein, 307 aa, Unknown
  Bacterial polypetide isolated from the Sargasso Sea
EVVLKLFMQGGKFNSNAYKTSGGLHGVGISVVNALSSSLKVDVFKSGKVYHQEYSRGKVVTKIKIGKCNKKLRGTQISFVPDKNIFEETNFIPKKLYNFINMKSVLVGGTIINFDIDKEIIKDKTPNKKEFYYKNGVDDFFKLEYSNNIKLFEKFFSLKCKLKDNENFSVHISFNQNETSTFYSYCNTIETPDGGSHEIGVRNGILKAIKIYGQKNQFSKINNINHNDFIDFSNIIISIFISDPSFEGQTKKRIIMPSLQKEIETKTQQEFLLWLNSNKKNSKILLDIMIERALQRTDLSKIKELDR

SEQ ID NO: 157754 - protein, 184 aa, Unknown
  Bacterial polypetide isolated from the Sargasso Sea
ALGLDPKAQEIDLKDLRYGKIIIMTDADVDGSHIRALLLTFFNNKPFNKLIENGHVYLAQPPLFKINKGSKGIYIKDEKELEDYIVNNNKELKNIKKGSKEFLKKIDIEKSKMSIQRFKGLGEMNPEELWSTTLDPDTRNLIQVQYSKDIKKDQTLIHTLMGNDVSLRKDFIISNAINVQNLDI

SEQ ID NO: 157755 - protein, 245 aa, Unknown
  Bacterial polypetide isolated from the Sargasso Sea
SKQGRNRANQAVLPLRGKILNTYVDSLPTKKNGNGKSNGDDQRTKALSKMISSNEIITLINALGLDPKANDIDLKDLRYGKIIIMTDADVDGSHIRALLLTFFNNKPFNKLIENGNVYLAQPPLFKINKGSKGIYIRDEKELEEYIISNSKELKKTIKGSKNFLKLIEDEKSKMNIQRFKGLGEMNPEELWGTTLNPETRTLLQVQYSKDLKKDQMLIHTLMGSDVSLRKDFIVSNAINVQNLDI

SEQ ID NO: 157756 - protein, 207 aa, Unknown
  Bacterial polypetide isolated from the Sargasso Sea
GNEIRTKTLAKLISSNEIVTLINALGLDPKNEDLDLKDLRYGKVIIMTDADVDGSHIRALLLTFFNNKPFNKLIENGNIYLAQPPLFKINKGSKGIYIKDEKDLENYIINNSKEFKKIKKGSKDFEKKLQEEKSKISIQRFKGLGEMNPEELWNTTLNPETRNLLQVKYSKDLKKDYGLIHTLMGNDVALRKDFILENAINVSNLDV

SEQ ID NO: 157757 - protein, 316 aa, Unknown
  Bacterial polypetide isolated from the Sargasso Sea
TPEETEIQDTYEEHEEEDLIQSEEMVITVSHLGYIKRVPLSTYRAQKRGGKGRSGMSTRDEDFVSQVFVVNTHTPILFFSSYGKVYRLKTYKLPLGTPQARGKPMVNLLPIADGEVIQTLLPLNKENTNYKDFVAVFVTANGLVRPIGLDNFERILSTGLKAIKLNQDDKLISVVLATKKNDILLAASSGKCIRFSMKGLRVFGGRNTSGVKGMNLTKDDSVVSMTVLNNVEVTTEIRSEYLQAVSASRRLNNSESKNNDNYLRDKELSELLESNKFRSLKEKEEYILSVTENGYGKRTSEYEYRLTNRGGSGIIN

SEQ ID NO: 157758 - protein, 59 aa, Unknown
  Bacterial polypetide isolated from the Sargasso Sea
MAKKSSEAKYDSSNIQVLKGLEAVKKRPGMYIGDTDDGSGLHHMVFEVLDNCIDEAMAG

SEQ ID NO: 157759 - protein, 238 aa, Unknown
  Bacterial polypetide isolated from the Sargasso Sea
GRNRENQAVLPLRGKILNTYVEENVSKKNGNGNDFRTKTLSKMISSNEIITLINALGLDPKVEELDLKDLRYGKIIIMTDADVDGSHIRALLLTFFNNKPFNKLIENGHIYLAQPPLFKINKGSKGIYIKDEKELDQYIMKNSKELKKLKKGSKEFFKVYDEEKSKMSIQRFKGLGEMNPEELWSTTLNPETRNLLKVEYSKNIKKDQDIIHTLMGNDVALRKDFIVSNAINVSNLDI

SEQ ID NO: 157760 - protein, 86 aa, Unknown
  Bacterial polypetide isolated from the Sargasso Sea
QAILPLRGKILNVISAGRDKINANQEITDLMQAIGCKRGDKFNSKDIRYEKIIIMTDADVDGAHISTLLMAFFYKEFPKLIDEGHL

SEQ ID NO: 157761 - protein, 141 aa, Unknown
  Bacterial polypetide isolated from the Sargasso Sea
YINTEEEIGGVTHHGKIANSFLRSNDYKVFGRVQKAQKVFSGPVVIDNGSEITEYANIEDCLNQIVNASKRGLNVQRYKGLGEMNPDQLWETTLDPTTRSLLQVKADDDAGLTFETLMGDEVPPRREFIEENALNAGNVDI

SEQ ID NO: 157762 - protein, 224 aa, Unknown
  Bacterial polypetide isolated from the Sargasso Sea
SEIPYMVNKASMIEKTAQLINEKKIEGISDIRDESDRNGLRIIYDLKRDAIPNVVLNNLYKYTQLQSSFGVNNVALVKGRPKTLNLKELIENYVIHRHEVVTRRTEYELKEAEKRSHILQGYIIALDNIDDVIELIKKSKSPEEARNGLISKYKLSEIQSKAILEMRLQKITGLEREKVIKENEELNKLIESLKAILADKTKRMDIIKDELIEVKERYGDERRS

SEQ ID NO: 157763 - protein, 61 aa, Unknown
  Bacterial polypetide isolated from the Sargasso Sea
VSGAGGIAVGMATSIPPRNLGEVIDATNAFIENQNITISQLMKYIPGPDFPTGGLIIGKDF

SEQ ID NO: 157764 - protein, 275 aa, Unknown
  Bacterial polypetide isolated from the Sargasso Sea
VYILHSPRLYKIKKGKTEKYISNDEELNRFLSYSFFDGKSIDINGVILKPKACSEILMNYSKINSIIKKTNKSKDNNILTCMSFIEPLPNNANCSTKELNNYLTKLSEMLKATSPINISYALSHKELDHESFQISVVKKVNGVIDPTIAPINKKFFSSQTYQSLISLNLHQYYGAQITLKHDSGDITYKFIHNLCEHGFAAARKSISLQRYKGLGEMNPSQLAETTMNPETRSLLKVSQISDDEYNIFDTLMGEDVEKRREFIISSANTIDHVDI

SEQ ID NO: 157765 - protein, 57 aa, Unknown
  Bacterial polypetide isolated from the Sargasso Sea
MSDSENTNEIVNPIISISDEMKKSYLDYAMSVIVSRALPKVRDGLKPVHRRILYAMM

SEQ ID NO: 157766 - protein, 204 aa, Unknown
  Bacterial polypetide isolated from the Sargasso Sea
MSKKAYDSKAIEVLSGLDPVKKRPGMYTDTSCPNHLIQEVLDNSVDEALSGYCKRIKVNLYKDNSVEVSDNGRGMPVDVHPEHKLTGVELIMCKLHAGAKFSGEDYGFSGGLHGVGVSVVNALSTKLNVKIKRDSKEYEINFSAGDKDNDLKSIGDVGATNSGTTIRFYPDKQYFETLEINKKSLKHLLKAKAVLCPRSSNRLL

SEQ ID NO: 157767 - protein, 170 aa, Unknown
  Bacterial polypetide isolated from the Sargasso Sea
MNTQQIDQKQDITTALETRYLLYAVSTIMDRALPDARDGLKPVHRRILYAMNQLRLYPQSNFRKCSKIVGEVMGNYHPHGDKAIYDALTRFAQHFSVRYPLIEGQGNFGNIDGDNPAAQRYTEARLSKYSIELLDGLNENSVDFKETYDSSGDEPSVLPANFPHLLANGA

SEQ ID NO: 157768 - protein, 107 aa, Unknown
  Bacterial polypetide isolated from the Sargasso Sea
CYKGGLKDFVRHLNKPQKPTHQSIAYINKKSKKDGDIEVEVAIQWNESYRENTFCFANTIRQRDGGTHLAGFRGALTRTINTYIDKEIPKNDTSVTGDDCREGMTAI

SEQ ID NO: 157769 - protein, 282 aa, Unknown
  Bacterial polypetide isolated from the Sargasso Sea
SEKEPEFLPAFFPQLLANGAYGIAVGMATSIPPHNIQEILNASIKLIQNSKIDQEDLLEIIKGPDFPTGGVLVDSKKTILENYISGKGSFRIRAKYEIEFLSRGRWQIVIKEIPYGIQKSKLVEKLAELINEKKINLLSDLRDESAEDIRLVLEPKSKNIPPEMLMEHLFKKTDLEYRFSLNMNVLQDGKMPKVLSLKDLLQNYVNHGRNILIRRSNYRLKNIDTRLHLIEGFLVTYLNIDRVISIIRFNEKPKSDLQQEFDLSEIQAEAILNMRLRSLRKL

SEQ ID NO: 157770 - protein, 67 aa, Unknown
  Bacterial polypetide isolated from the Sargasso Sea
MSKIIKNKIDRILSDKYLSYAISTIVSRSLPDVRDGLKPVHRRIIFSMYQLKLFHDTPFKKSARIVE

SEQ ID NO: 157771 - protein, 270 aa, Unknown
  Bacterial polypetide isolated from the Sargasso Sea
INNKDITVAQLMKHIPGPDFPTGGIIIGKDIIKQGYNKGRGSFKIRGEIEFEDKKGGRDILIIKSIPYQVNKSILIEKIAQLVRDKKIEGIRDIRDESNREGIRVVIELRKGVEPETIRRQLYKLTNIESSFGFNTLAIVNNKPKILNLKEFISEFLKFREDTVIKRVKFDLKKAEERAHILIGLATAVENIDGIIKIIKNSKDTETAKKNLLSRKWKIKKSTKLISLIEKKKNITSYSLSNEQVNAILELRLQKLTAYGIGEIENEISK

SEQ ID NO: 157772 - protein, 314 aa, Unknown
  Bacterial polypetide isolated from the Sargasso Sea
PPHNLNEVLNGCINLINNPKISIDELIKDISGPDFPTGGTIDGKAGIYEAYKTGRGIIHVRSNTSIEEDKSGKQSLIINEIPFMVNKARMLEKIAELVKEKKIEGITEIRDESDKDGLRVVIEVRKGDSVEVLENNLFAQTQLEQSFGINFTVLSNGQPKEVNLKEMLQAFIKHRKEIITKRTKFDLKKAKDRGHVVEGLMVAIANIDQIIAIIKKSKDPKIAASELCKKVWKSGPVEAILKKVGSDACKPKGLSKDLGLKGKKYKLSQDQAKAILELRLGRLTGLEQDNLSKEFSEIVEKILSLQKILDEKQT

SEQ ID NO: 157773 - protein, 164 aa, Unknown
  Bacterial polypetide isolated from the Sargasso Sea
IIIMTDADVDGSHIRALLLTFFNNSPFNKLIENGNIYLAQPPLFKINKGSKTIYLKDEKDLENYILKNSKLENKDKKKQTSMIKFLEEEKSKLSIQRFKGLGEMNPDELWNTTLNPETRNLLQVNYSKNIKKDNELIQTLMGNDVGSRKDFIIDNAIYASDLDI

SEQ ID NO: 157774 - protein, 232 aa, Unknown
  Bacterial polypetide isolated from the Sargasso Sea
IEVLNGLEPVRRRPGMYTDTTRPNHLGQEVIDNSVDEALAGHARTLEVTLYEDQSLEVIDDGRGMPVDIHPEEGVCGVELILCKLHAGGKFSNKNYQFSGGLHGVGISVVNALSERVEVTVRRDGQVYDIAFEKGEKVQELTITGTCGRRNTGTRVRFWPEAHYFDSPRFSVSKLEHLLKAKAVLCPGLTIKFLDKNTGIKLEWCYEDGLKDYLVDAVKQFTCLPEQPFVGA

SEQ ID NO: 157775 - protein, 67 aa, Unknown
  Bacterial polypetide isolated from the Sargasso Sea
MVDKNDEINLSETNDIAPVTIEDEMQKSYLDYAMSVIVSRALPDVRDGLKPVHRRILYAMHESGYEY

SEQ ID NO: 157776 - protein, 84 aa, Unknown
  Bacterial polypetide isolated from the Sargasso Sea
MNGNLSIKRVEIEDEMKKSYLDYAMSVIVSRALPDIRDGLKPVHRRILYSMYDGNYDWNKPYRKSARIVGEVMGKFHPHGDSAI

SEQ ID NO: 157777 - protein, 189 aa, Unknown
  Bacterial polypetide isolated from the Sargasso Sea
LTLINALGLDPKNEEIDLQDLRYGKIIIMTDADVDGSHIRALLLTFFNNKPFNKLIEKGHVYLAQPPLFKINKGSKGIYIKDEKELENYIIKNSKNLKKLKKGSKDYDNFIQLEKSKLSIQRFKGLGEMNPEELWSTTLNPETRNLLQVEYSKNLKKDQDLIQTLMGSDVASRKDFIVDNAINVLNLDI

SEQ ID NO: 157778 - protein, 273 aa, Unknown
  Bacterial polypetide isolated from the Sargasso Sea
WVEVHRDGKIYKQDYKIGITQNKLKEIGKTKKSGTRVCFMPDSEVFNTTSFEYDIIAERLRELAYLNKGLEINLRDQREEDGQSDSFNFKGGLSDFVKYLDEHNNPLHNKVITVTKEGGEIPVDVALRYGNTYNDNILTFVNNINTIEGGTHLSGFRSALTRAMNNHASKNNLIKTKKTEKLSLTGEDFREGLTAIISVKVPEPQFEGQTKTKLGNGEVKGLVDKVVYEGILDFLEENPSIGRKVIEKALLAARSRSAARKARELIRRKSALA

SEQ ID NO: 157779 - protein, 284 aa, Unknown
  Bacterial polypetide isolated from the Sargasso Sea
DNSLWRQEFSKGLPKTKIKKIKESKKKGTYIEFIPDKEIFGNDTFFDAKVLKQMAESKAYLFRGITINWELDSEDSKNNEKITYNFPDGIKDFLINKLDSGPLLINEIFSGKTYLDSEEELIEWSICWPIQLESNLLSFCNTIPTHEGGSHENGFKVALTKAMRSFGEINNIKKASKISSEDLLGRAFGILSIFIKDPQFQGQTKEKLSSPKTQKSIESSLKDHFEVWLNNNMEIAHYLLNETINRTDERIRRKKEKDLNKNNLIKKIYLPGKLADCSQKEAKG

SEQ ID NO: 157780 - protein, 212 aa, Unknown
  Bacterial polypetide isolated from the Sargasso Sea
MATSIPPHNLGEVIDGTLALIKNKDIKINELIKHIPGPDFPTSGVIIGKNIIKEGYKTGRGSFKIRGEIKIEQQKNGRERLVITSIPYQVNKSSLNEKIAELVREKKIEGIKDIRDESNREGVRVAIDLRSNVEPETIKRQLYKYTAIESSFGFNTLAIVDNKPKTCNLKEFLENFLNFREDVIIKRTKFDLKKAEERAHILIGLSVSVENL

SEQ ID NO: 157781 - protein, 263 aa, Unknown
  Bacterial polypetide isolated from the Sargasso Sea
LGCGIKDEFDPDKLRYHRIIIMTDADVDGSHIRTLYLTFFFREMRELIDRGHVYIAQPPLYKLARGKQSRYLKDEAALAEYLTQSALEGAAIFTNSEAPPLAGEPLSELVSSYQAVASDIERLARVYPRDVFWPMMAVPSLATEDLADEAKVQTFATALSKHLLTLQDKSVQYEIFVRQDPERGFYYPVVRRTAHSVATDTVLSRGFFASPEYLGLRAVGKRLDGLIEVDGFFQRGEKRHETQDFAAGLDWLLAEARKGCTIQ

SEQ ID NO: 157782 - protein, 216 aa, Unknown
  Bacterial polypetide isolated from the Sargasso Sea
NTVKVIERLKRKYPNTVMERLIYQSELTKEDLADEAKVIAWTKELVDDLVDRDEDATIFNAATQYDAERNLYYPVVNIRQHGVDKSHVLSYDFITSRDYQRIAVTGVNIANIITEGAYIQRGEKTKPVDNFVDALEWLITESKRGIYIQRYKGLGEMNPDQLWETTMDPDARRMLQVTIEDAVGADQLFATLMGDQVEPRRDFIETNALRVVNLDV

SEQ ID NO: 157783 - protein, 65 aa, Unknown
  Bacterial polypetide isolated from the Sargasso Sea
MIKKVMSKKSNYSAKNIEVLEGLEPVRKRPGMYIGSTDEQGLHHLVNEVLDNSIDEVVAGHASEI

SEQ ID NO: 157784 - protein, 103 aa, Unknown
  Bacterial polypetide isolated from the Sargasso Sea
RVSQGKKEQYSYDDNERDLMIERMQKENKNTKVSIQRYKGLGEMNPGQLWETTMDPERRTLMQVTVESAAEAAETFQNLMGSDVEARRTFIEKNAKFVVNLDV

SEQ ID NO: 157785 - protein, 52 aa, Unknown
  Bacterial polypetide isolated from the Sargasso Sea
MAKNNTTYQADSIKVLKGLEAVRKRPGMYIGDTDDGTGLHHMVYEVLDNSID

SEQ ID NO: 157786 - protein, 300 aa, Unknown
  Bacterial polypetide isolated from the Sargasso Sea
LAQDDYLEQFIIQTGFKGPDFPTGAEIKDNGGISDAIKTGRGSFKIRAVHSIEEKKDKSSIVINELPYQVNKAKLIESIALLVRDKKITGISHLRDESDRDGLRVVIELKKGEQPDVILSSLYKQTNLQTSFSVNMVCLVDGEPCTISVPRALQEFIKHRREIITRRTLYLLNKTYSKAHVLEGLSIALDNIDEMIDLIKKSKSTEEAKKKIINKTWATAKNKWVLSKLINDCSDFMTVDTKGGSKDDKYKISEEQAQAVLDMKLNKLTNLEQDTILSDYHSAISSIEEHLNILSKPGRA

SEQ ID NO: 157787 - protein, 93 aa, Unknown
  Bacterial polypetide isolated from the Sargasso Sea
SWEVDESNLLSSQEISNISQALGVEPGADELGNLRYHKICILADADSDGLHIATLMCALFLKHFRKLVEDGHVYVSMPPLVSNRCWKRGALCA

SEQ ID NO: 157788 - protein, 169 aa, Unknown
  Bacterial polypetide isolated from the Sargasso Sea
PLKIIGKSKNTGTKINFLPSKDVFSSTKFSFAIIQKRMRELAFLNKGIKIILNDLTQKKIKSLEFKFEGGINEFVEYLDEKREKLKNKNENDLFRRPIYIEGVKGNINIQCSLKWNAGYNEDVYPYTNNIYQKDGGTHLLGFRSALTRVVNKYASEQNLLKKNKVMLSG

SEQ ID NO: 157789 - protein, 252 aa, Unknown
  Bacterial polypetide isolated from the Sargasso Sea
DELNSLILSNAVKGTEVRAKNKKKGIEGDGLLNTILDYSNSLSVIVKIEKQAGTIAAKAISLHKPITKTEANNKKKLEAWIKGLSRTASKIAKEKGYKASVNIDYDDDGIGYINTEEEISGVTHHGKIANSFLRSNDYKIFGRVQKAKKLFSGPVVIDNGSEITEFAHIEDCLNHIVNTSKRGLNVQRYKGLGEMNPDQLWETTLDPTTRSLLQVKADDDAGLTFETLMGDEVPPRREFIEENAKSAGNVDI

SEQ ID NO: 157790 - protein, 206 aa, Unknown
  Bacterial polypetide isolated from the Sargasso Sea
QDERTKTLSKMISSNEIITLINALGLDPKSEEIDLDDLRYGKIIIMTDADVDGSHIRALLLTFFNNKPFNKLIENGNIFLAQPPLFKLNKSGKSIYLKDENTLEKYILSLSKTLKKHKKNSKEYEKVLSEEKSKLNIQRFKGLGEMNPEELWSTTLDPKQRNLLQVKYSKDKDKDQDIIHTLMGNDVSIRKEFIISNAIDINKLDV

SEQ ID NO: 157791 - protein, 305 aa, Unknown
  Bacterial polypetide isolated from the Sargasso Sea
PKQFFDLKLNRLTGLEQESIFNEYSELLEDIKRFTLILSNPDELKSVIRKELIETQETYGDERRTEIVEFYSDLTDEDLIPEEDLIVTLSKEGYAKTQPLDAYQAQNRGGTGKRAATLKDEDFVSKLFVANTHDTLLCFSSYGKVYWIKVYRLPRGGRNAKGRPIVNLLPLEKDERIQAVLPVKEFNDDQFIFMATESGSVKKTKLSAYSRPMKSGIKAIKLREGDRVVNAEITDGSKEIMLFSNSGKSIRFKETDARPMGRVSQGVRGMRIEKDQRIISLVVLEEGNILVATENGFGKQTFKDE

SEQ ID NO: 157792 - protein, 196 aa, Unknown
  Bacterial polypetide isolated from the Sargasso Sea
MISSNEIVTLINAMGLDPKSEDIETKDVRYGKIIIMTDADVDGSHIRALLLTFFNNVPFNKLIKEGYIYLAQPPLFKINKGSKGIYIKDEKELEKYIQKNSKILSNLKKGTKEYERSFDEEKSKFNIQRFKGLGEMNPEELWSTTLNPETRNLLKVEYSKNIKKDQDIIHTLMGNDVASRKDFIVSNAINVSNLDV

SEQ ID NO: 157793 - protein, 259 aa, Unknown
  Bacterial polypetide isolated from the Sargasso Sea
ERIPVEPHPKYPNKSALEVIMTTLHSGGKFTDKNYKTSGGLHGVGVSVVNALSSELIVEVSRDRKLYSQTYSKGIPQNTLSSDGKICKKKGTSIQFTPDYSIFPKDSSFKPRIVIEMAKTKAYLTKGIEIRWKCNNELSEQLGTEEALTFKFPNGILDYLNDLTNNKSILTSEPFLGSVKFENNSIDWIINWLAPGEDSIFKSHCNTISTPLGGTHENGFKNAILKGFKNWGELSGNKKARDLIIEDIFSETASIISIF

SEQ ID NO: 157794 - protein, 100 aa, Unknown
  Bacterial polypetide isolated from the Sargasso Sea
LLNNLYKQTVLESTFSINMVALSNGQPQLKNLKSMLEAFLGHRRDVVTKRTIYQLNRSINRAHILEGQTIALTNIDEMIAIIKKSKTPAEAQKALVAKLW

SEQ ID NO: 157795 - protein, 282 aa, Unknown
  Bacterial polypetide isolated from the Sargasso Sea
MVREYNAESIEVLSGLDPVRKRPGMYTETSRPNHLALEVIDNSVDEALAGYAKSIDVILHKDGSLSVSDDGRGMPVDVHPEEGIPGVELIFTRLHAGAKFSNQDYKFSGGLHGVGVSVVNALSSSLRAEIKREGKKYSIEFKDSEKKKDLKVIDEVGKRNTGTKVTFSPDPEFFDTPKISSTQLMAALKAKAVLSPGLSISYKDEQKGIKEKWCFLEGLAAYLKDSNKGGDLIPVDPFEGEHITDEGGITWAIQWVRGIDDPLSESYVNLIPTTQGGTHVNG

SEQ ID NO: 157796 - protein, 126 aa, Unknown
  Bacterial polypetide isolated from the Sargasso Sea
TIEGGTHLSGFRSALTRAMNNHASKNNLIKAKKNEKISLTGEDFKEGLTAILSIKVAEPQFEGQTKTKLGNGDVKGIVDKVVYEGILDFLEQNPSIGRKVIEKALLAARSRNAAKKARELIRIKSA

SEQ ID NO: 157797 - protein, 123 aa, Unknown
  Bacterial polypetide isolated from the Sargasso Sea
MGEALSERYLNYALSTIMHRALPDARDGLKPVHRRILFAMRELKLDSSGTFRKCAKIVGEVMGNFHPHGDKAIYDALARLAQDFSVRYPLVDGQGNFGNIDGDNPAAQRYTEARLTKVSELML

SEQ ID NO: 157798 - protein, 280 aa, Unknown
  Bacterial polypetide isolated from the Sargasso Sea
MKHIPGPDFPTGGIIIGKDIIKQGYKSGRGSFKIRGDINVENLKNGKDRLVITSIPYQVNKSNLNERIAELVRDKKIEGISDIRDESNREGIRVAIDLRRNIEPETVKRQLFKYTSIESSFGFNTLAIVDKKPKTCNLKEFLESFLKFREDVVIKKTKYDLKKSEERAHILLGLSISVENLDKVIKIIRSSKNPDDAKKILLNTKWKFTKSSKLIKLIENKKSQKLYSLSEAQVNSILELRLQKLTALGINDIESEIKKLSEMIIQFKKIINSKKELLNV

SEQ ID NO: 157799 - protein, 121 aa, Unknown
  Bacterial polypetide isolated from the Sargasso Sea
MPGLIKEGKVWISEPPLYRAKSSGSINYLKDDQALENFKKENKNKKFDISRFKGLGEMNAGELWDTAMNPESRTLIKVSIADGKAAEARAANMFEILMGNDVAKRKTFIEENAKDVRFLDV

SEQ ID NO: 157800 - protein, 202 aa, Unknown
  Bacterial polypetide isolated from the Sargasso Sea
TKALAKLISSNEIVTLINALGLDPKNEDIDLKDLRYGKIIIMTDADVDGSHIRALLLTFFNNKPFNKLIENGNIYLAQPPLFKINKGSKGTYIKDEKELENYIIKNSKEFQKIKKGSKDFEKKLQEEKSKISLQRFKGLGEMNPEELWNTTLNPETRNLLQVKYSKDLKKDYGLIHTLMGNDVALRKDFIVENAINVSNLDV

SEQ ID NO: 157801 - protein, 59 aa, Unknown
  Bacterial polypetide isolated from the Sargasso Sea
MEKNTVEIKKSYKPIFVQDEMSSSYLSYAMSVIVSRALPDVRDGLKPVHRRIIYAMYKG

SEQ ID NO: 157802 - protein, 49 aa, Unknown
  Bacterial polypetide isolated from the Sargasso Sea
MGEIAAKEIVPVDIGKELKQSYLDYAMSVIVGRALPDARDGLKPVHRRV

SEQ ID NO: 157803 - protein, 120 aa, Unknown
  Bacterial polypetide isolated from the Sargasso Sea
MRRAIGDRYLTYALSTIMHRALPDARDGLKPVHRRILYAMRELKLASNGGFRKSAKISGDVMGNYHPHGDAAIYDAMARLAQDFNVRYPLVDGQGNFGNIDGDNPAASRYTEARMTVIAE

SEQ ID NO: 157804 - protein, 298 aa, Unknown
  Bacterial polypetide isolated from the Sargasso Sea
GKEERVIKIIHDESVEIREKYGDERRTQIIEGDSSIMIEELINEEDMVVTISREGYIKRSSVSEYRLQRRGGKGRLGMGTKDEDFVEQLFVANTHDYLLFFTNKGQVFRKIVFELPQAGPTGRGKALINLLPLRDGENICACLNVPKEAENKYIFLCTEGGVAKKTPMLDCAKIRVSGLRVITLDEGDSVISVQLTDGEQELFFATRDGMGLRVHEKTLRPMGRQARGVRGVRLRKGDRVVSALALSGSGELLTVTEGGYGKKTPIADYTLAKNRGNFGMRTIRITDTNGPVVNVLEV

SEQ ID NO: 157805 - protein, 169 aa, Unknown
  Bacterial polypetide isolated from the Sargasso Sea
LSRTASKIAKEKGYKASVNIEYDDDGIGYINTEEEIGGVTHHGKIANSFLRSNDYKIFGRVQKAQKVFSGPVVIDNGSEITEYVNVEECLNHIVNTSKRGLNVQRYKGLGEMNPDQLWETTLDPTTRSLLQVKADDDAGLTFETLMGDEVPPRREFIEENALNAGNVDI

SEQ ID NO: 157806 - protein, 79 aa, Unknown
  Bacterial polypetide isolated from the Sargasso Sea
MTSGSKSEFGFIQPTQITEEMRSSYLDYAMSVIVSRALPDIRDGLKPVQRRILYAMHDLGMRPNSSYKKSARLVGEVLG

SEQ ID NO: 157807 - protein, 234 aa, Unknown
  Bacterial polypetide isolated from the Sargasso Sea
NPEAPPIQGEPLEALVVAYQTLLQTLAESQRKYPEELAMALVRLDKLTPERMSDEAAMQQWAQSLVDLLRQSPDANPKVEVALDTETNAYVPKITLLLKGVAREIALPLAFLSGREYKGIAAMIDQVQDLLEPGAYVQRGERRLDVEHFAEAFDWLQKEARRGIDLQRYKGLGEMNPEQLWETTMDKSVRRMLRVSIDDAIGADQMFTTLMGDHVEPRREFIEQNALSVVNLDV

SEQ ID NO: 157808 - protein, 165 aa, Unknown
  Bacterial polypetide isolated from the Sargasso Sea
MFNKILTDDFGCNWTGKINETKNLVLTCTSRNVSKEYIFYNNLRDHAEVKNINKLMDQIATIFDTTSNFITKYDSYIIHTPLQLLKHIDEEGRKGITIQRFKGLGEMNPDQLWETTLDPDSRTLLQVKINHKDDAEDVFSTLMGDVVEPRREFILNNAHNANLDA

SEQ ID NO: 157809 - protein, 68 aa, Unknown
  Bacterial polypetide isolated from the Sargasso Sea
MSKKNNYGAEKISVLKGLEAVRKRPAMYIGDVGKRGFHHLVNEVVDNSIDEALAGFCTKIIVTIKKDG

SEQ ID NO: 157810 - protein, 291 aa, Unknown
  Bacterial polypetide isolated from the Sargasso Sea
FYRHMKPIIDSGRLYIAQPPLYRIKKGNSTVYKKDENDLEEYLIEEGLKNTTLRNIKNIQVGGKELKEIIYLSRKTKNLIIPLMRRIDNSDIIEHSAIVRALDLRNLKDSKIGAEIAKYLQQRLNLISNISEKNWKVSHANDSIYIERTIRGFTEKFIIDENFIITPEAKALNEIRDQLMENFYRLKENGTGVLENKKEVFNIFGPLDLIDKILEIGKFGIQINRYKGLGEMNPDQLWETTLDKNERTLLSVKINEVDAANKAFEDLMGGETDARKKFIAENSLKVANLDI

SEQ ID NO: 157811 - protein, 183 aa, Unknown
  Bacterial polypetide isolated from the Sargasso Sea
LGLDPKSQEIDLKDLRYGKIIIMTDADVDGSHIRALLLTFFNNKPFNKLIENGHVYLAQPPLFKINKGSKGVYIKDEKELEDYIINNNKELKKIKKGSKDFLKVIELEKSKMDIQRFKGLGEMNPDELWNTTLNPETRNLLKVQYSKDLKKDQILIHTLMGNDVALRKDFIVSNAINVQNLDI

SEQ ID NO: 157812 - protein, 186 aa, Unknown
  Bacterial polypetide isolated from the Sargasso Sea
INALGLDPKAQEIDLKDLRYSKIIIMTDADVDGSHIRALLLTFFNNEPFNKLIENGHIYLAQPPLFKINKGSKGIYIKDEKELEDYILNSNKEIKKIKKGTKEFAKALDIEKSKMNIQRFKGLGEMNPEELWNTTLDPKTRNLLQVQYSKDLKKDQNLIHTLMGNDVALRKDFIVSNAINVQNLDI

SEQ ID NO: 157813 - protein, 240 aa, Unknown
  Bacterial polypetide isolated from the Sargasso Sea
KQGRNREYQAVLPLRGKILNTYTEMNGSKKNGNQSDLRTKSLSKMISSNEIVTLINALGLDPKTEEIDLEDLRYGKIIIMTDADVDGSHIRALLLTFFNNIPFNKLIEKGHVYLAQPPLFKINKGSKGIYIKDEKDLENYIIKNSKDIKKVKKNSKEFDKIILLEKSKLNIQRFKGLGEMNPEELWNTTLNPETRNLLQVQYSKNLEKDQNLIQTLMGNDVASRKDFIVDNAINVVNLDI

SEQ ID NO: 157814 - protein, 34 aa, Unknown
  Bacterial polypetide isolated from the Sargasso Sea
MTDQYTASSIKVLKGLEAVRKRPGMYIGDTEMAQ

SEQ ID NO: 157815 - protein, 135 aa, Unknown
  Bacterial polypetide isolated from the Sargasso Sea
MGISDFESLLQKEFKPKSDRSREAVEDAVKTLAEQLLKDTVVVSDDVISTIQAMIAEIDQKLTEQVNLILHHEDFQKLEGSWRGLHHLVSNTESDELLKIRVKNISKKELGKELKKYKGTAWDQSSIFKTIYEEE

SEQ ID NO: 157816 - protein, 268 aa, Unknown
  Bacterial polypetide isolated from the Sargasso Sea
LQKLTGLEVDKIVAEYKEVIKLIAYLKGILESKSQRMDIIKEEMVAVKEEFGDERRTEVIPVDSNFSMEDMIAEEEVVLTITHSGYIKRTALNTYRTQRRGGRGVQGATSNEEDFVEHLFIANTHNYMLFFTNLGKCYWLKVYDIPQGGRATKGRAIVNLIGCEPGEKVEAFVSVKGFDDNHYIVMATRNGLVKKTVLSAYSKPRKGGIYAIEIKDQDTLIEARITNGENDILLGTRGGKSIRFSEKNIRPTGRKTMGVKGITLSSKG

SEQ ID NO: 157817 - protein, 40 aa, Unknown
  Bacterial polypetide isolated from the Sargasso Sea
MIKNNSNNYQADSIKVLKGLEAVRKRPGMYIGDTDDGTGL

SEQ ID NO: 157818 - protein, 58 aa, Unknown
  Bacterial polypetide isolated from the Sargasso Sea
MQKTEIPEDKNIKLISMHDEMSSSYLSYAMSVIVSRALPDIRDGLKPVHRRILYAMYK

SEQ ID NO: 157819 - protein, 67 aa, Unknown
  Bacterial polypetide isolated from the Sargasso Sea
MEKNEVSKDKNIKLISMHDEMSSSYLSYAMSVIVSRALPDVRDGLKPVHRRILYAMYKGGYDWSKQF

SEQ ID NO: 157820 - protein, 280 aa, Unknown
  Bacterial polypetide isolated from the Sargasso Sea
TIEVIKNPTVTIEEIMRIVPAPDFPTGALILGRSGAKKAYTDGRGSVILRAKVNIEEIRKDRWAIIVTEIPYQVNKSAMIEKIAELGKEKRVEGISHVQDETDRLGMRIVIELKRDATPEVVLNQLYKFTPLQTSFGCNMLALNEGKPEQLNLKGFLTAFISFRQEVVTRRTAYELSKARERSQILCGLAVAVSNVDEIVETIRVSADPADARAKLTNKKWSAEKIKEFIILIDDPSHKINPDNSYYLSETHSQAILELRLQRLTALGVKRGTERLCSLS

SEQ ID NO: 157821 - protein, 75 aa, Unknown
  Bacterial polypetide isolated from the Sargasso Sea
MSDIVDSENSGLSEDNDRIIQTDLRNEMSRSYLEYAMSVIVGRALPDARDGLKPVHRRILYAMYELGLTSSRPYR

SEQ ID NO: 157822 - protein, 251 aa, Unknown
  Bacterial polypetide isolated from the Sargasso Sea
PHNLTEVTGAVKHHVNKIIEQGVDNKEMPTISIENYMNYITGPDFPTGASIHGIEGIYDMYSTGKGRFHIRSKCDVFDDNKGKRIIIHEIPYQVKKADMLVYIADLVSKGTVIGIRDIRDESSKEGIRVVIEVKNNADPHAVLNQLYKKSRLQESYSANMMGILDGRPVLLTLPKMLHTYVEHRESVIERRAQYELDKAEARAHILEGLVKAQDRIDDVIAVGRASESREQFESVLKGNENIIKGIDAFDF

SEQ ID NO: 157823 - protein, 192 aa, Unknown
  Bacterial polypetide isolated from the Sargasso Sea
MLINLLLKHQIEIDLGGAEHIIKCIGALKNIYQDYKLSVDPEKKGSNVLIEANGQKIELSLNLLENLSAYDYSQLFDEHLRLKATLGEKGVALTEEKEGESNYFQSWFEVLDFIINFGKKGMYIQRYKGLGEMNPEQLWETTLNPEVRALKKVTIEDIVESDGIFTILMGDQVEPRRNFIEENALRVKNLDV

SEQ ID NO: 157824 - protein, 130 aa, Unknown
  Bacterial polypetide isolated from the Sargasso Sea
MLLTFFFKFMPGLIKEGKVWISEPPLYRAKSSGSINYLKDDQALENFKKENKNKKFDISRFKGLGEMNAGELWDTAMNPESRTLIKVSIADGKAAEARAANMFEILMGNDVAKRKTFIEENAKDVRFLDV

SEQ ID NO: 157825 - protein, 279 aa, Unknown
  Bacterial polypetide isolated from the Sargasso Sea
GYCKRIKVNLYKDNSVEVSDNGRGMPVDIHPEHKLTGVELIMCKLHAGAKFSGEDYGFSGGLHGVGVSVVNALSTKLNVKIKRDSKEYEINFCAGDKDNDLKSIGDVGATNSGTTIRFYPDKQYFETLEINKKSLKHLLKAKAVLCPGLQIDYFDEKKNERIKWIFDEGLSDYLDEFSGCNEKLLDETIILSKTSDDQALDVAVNWTEEASNNLLKETYVNLIPTALGGSHLNGFKSGLLEAIKEFCDYRNLIPKGVKINSDDILANCIFVISSKLKNP

SEQ ID NO: 157826 - protein, 286 aa, Unknown
  Bacterial polypetide isolated from the Sargasso Sea
DESDRDGVRVVIEIKRDAVAEVVLNQLYRYSPLQTSFGVNSLALNNGKPELLNLRSVLDAFIDFREDVIRRRTEYDLSKARDRAHVLVGLAIAVANIDDVIALIRAAKDPVQARNELMERDWDAEDVASLIELIDDPNHQIIEERYRLSEAQARAILELRLQRLTGLEQDKIKEELSGLAAEIENFLDILRSRERLRSIMRDEMMAVKEQFATPRRTSIEDSELDTDIEDLIQREDMVVTVSHNGYIKRVALSSYRAQRRGGKGRAGMSTRDEDFVRSVFVCNTHT

SEQ ID NO: 157827 - protein, 169 aa, Unknown
  Bacterial polypetide isolated from the Sargasso Sea
LRYGKIIIMTDADVDGSHIRALLLTLFNNKPFNQLIENGHIYLAQPPLFKINKGSKGIYIKDEKELENYITNNSKEFKKIKKGSKEFEKKLQEEKTKISIQRFKGLGEMNPEELWNTTLNPETRNLLKVEYSKDLKKDHGLIHTLMGNDVALRKDFIVENAINVSNLDV

SEQ ID NO: 157828 - protein, 240 aa, Unknown
  Bacterial polypetide isolated from the Sargasso Sea
NRANQAVLPLRGKILNTYVEELNMKKNGNGNGNGSDQRTKALSKMISSNEIVTLINALGLDPKAQEIDLKDLRYGKIIIMTDADVDGSHIRALLLTFFNNKPFNKLIENGHVYLAQPPLFKINKGSKGIYIKDEKELEDYIINNNKELKKIKKGSKDYSKKIDEEKSKMNIQRFKGLGEMNPEELWSTTLDPETRNLLQVQYSKDLKKDQSLIHTLMGNDVALRKDFIVSNAINVRNLDI

SEQ ID NO: 157829 - protein, 167 aa, Unknown
  Bacterial polypetide isolated from the Sargasso Sea
YGKIIIMTDADVDGSHIRALLLTFFNNKPFDKLIEFGHVYLAQPPLFKINKGTKSIYIKDENELESYLIKNSKEIKKYKKNSKEFNNILQIEKSKLNIQRFKGLGEMNPDELWNTTLNPETRNLLQVQYSKNSKKDQDLIQTLMGNDVSSRKDFIVENAINVSNLDI

SEQ ID NO: 157830 - protein, 168 aa, Unknown
  Bacterial polypetide isolated from the Sargasso Sea
RYGKIIIMTDADVDGSHIRALLLTFLNNKPFNKLIENGHVYLAQPPLFKINKGSKGIYIKDEKELEEYILDNSKNLKKIKKGSKEFIKAFNDEKSKISIQRFKGLGEMNPDELWNTTLNPETRNLLQVQYSKDQKKDQNIIHTLMGNDVSLRKEFIVANAINVSNLDI

SEQ ID NO: 157831 - protein, 277 aa, Unknown
  Bacterial polypetide isolated from the Sargasso Sea
DGEPKLLNLKSILSVFFNHRKEVVSRRTFFDLRKAKERGHILEGLTIALANIDEMIDLIKKSKEGSEAKKKLLSKKWKPGKITAMLEKAGPDACKIDVTDNSVGLIGKTYQLSEQQAQAILDMRLQRLTGLEQDKLIKEYEEIIDHITYLLAILGDSERLIEVVKEELLEVQEKYKDDRRTEIQDSAADLTEADLITPEDRVVTISHEGYAKTQPLEEYRAQRRGGTGKTAASVKEEDFVEQLLVANTHTTLLCFSNLGQVYWLKVYEIPSAGRAAK

SEQ ID NO: 157832 - protein, 208 aa, Unknown
  Bacterial polypetide isolated from the Sargasso Sea
MPAKKPTAKKPAAKKPPAKKPAAKKAPAKKPAAKKPPAKKTATATKETKPKEAISSNGTIAVEDEISKSFLDYAMSVIVSRALPDVKDGLKPVQRRILYSMYETGIRPTGPFRKCSKVVGDVMGNYHPHGNEAIYGTLVRLGQHFSTRYPLIEPQGNFGTPDDPPAAMRYTESRMSLLSSQLLDGIDEDTVNFEPNYSGETSEPKVSS

SEQ ID NO: 157833 - protein, 49 aa, Unknown
  Bacterial polypetide isolated from the Sargasso Sea
MSGDTYDSGSIKVLEGLEAVKKRPGMYIGDTDDGTGLHHMVFEVLDNSI

SEQ ID NO: 157834 - protein, 165 aa, Unknown
  Bacterial polypetide isolated from the Sargasso Sea
LNQLSGRLKQGWTGEFDEAKQNITFERTVRGVTEAYTIDAQLIRTPEARELDRMVGDLQEAYGKPAVLETKDSQETVDGPTKLSELIQQIGKKGLAVNRYKGLGEMNPDQLWETTLDPNQRTLLQVKINHLEEAAEVFSTLMGDVVEPRRDFIQENALKVANLDI

SEQ ID NO: 157835 - protein, 291 aa, Unknown
  Bacterial polypetide isolated from the Sargasso Sea
LVVELKRGASEFVVLNNLYKLTPLRSSFSINMVALVDGSPRVLNLKQILKYYVDFRVDIVTKRAEFDLKKAQARIHILEGLRVALQNIDEVVETIKSAGPVEEAREALMTRFDLTEIQSQAILDMQLRRIAALETEKIESEYNELKELIKDLNDLLSNKSRIYDVIKTETSELKDKYGDKRLTKLHKEELGQWNREDVEPHEECVVTLSRNGYLKRIKSDTFRRQHRGGKGVKGQKMTKEDDVTPYMQIADTHDTILFFTDKGRVFSSRVFDLPANQSRNSRGTPVHNIVA

SEQ ID NO: 157836 - protein, 273 aa, Unknown
  Bacterial polypetide isolated from the Sargasso Sea
LSKFSEVLLKELGQGTVDWTPNFDGTMDEPLVLPARLPHILLNGVTGIAVGMATDIPPHNVREVASACCLLLDKPKTELDELLELVHAPDYPTDAEIITPKADIHKIYKTGRGSIKMRAVYTEEHGDIVITALPHQCSGAKVLEQIAAQMNAKKLPMVADLRDESDHENPTRIVIVPRSNRIKAEPLMAHLFATTDLEKNYRVNLNMLGLDGRPQVKDLRSILSEWLTFRRETVRRRLQHRLDKVLARLHILEGLLAAFLNIDEVIEIIRTED

SEQ ID NO: 157837 - protein, 86 aa, Unknown
  Bacterial polypetide isolated from the Sargasso Sea
MAVSVGPGGGGPGDSDDRIIQTDLRNEMSRSYLEYAMSVIVGRALPDARDGLKPVHRRILYAMYELGLTSDRPYRKCARVVGEVLG

SEQ ID NO: 157838 - protein, 98 aa, Unknown
  Bacterial polypetide isolated from the Sargasso Sea
KERYAYTDEERDNLLKRLESENKTKIDIQRYKGLGEMNAEQLWETTMNAETRTLIQVTVDHIREEETNVRFRELMGSEVEHRRNFITERAKFATNIDI

SEQ ID NO: 157839 - protein, 214 aa, Unknown
  Bacterial polypetide isolated from the Sargasso Sea
SNSLSVIEKIEKQAGTIAAKAISIHKPITKTEANNKKKLETWIKGLSRTASKIAKERGYRASVSIDYDDDGIGYINTVEEIGGVTHHGKIANSFLRSNDYKIFGRVQKAQKVFSGPVVIDNGSEITEYASIEDCLKHLVNTSKRGLNVQRYKGLGEMNPDQLWETTLDPTTRSLLQVKADDDAGLTFETLMGDEVPPRREFIEENALNAGNVDI

SEQ ID NO: 157840 - protein, 242 aa, Unknown
  Bacterial polypetide isolated from the Sargasso Sea
PDCSCSDLQKYALGPDFPTGGEIIGKKGIDEAFDTGKGSCVVRSKTSIENFKKDREAIILHEIPYQVNKSKLLERIAEIVKNGIIEGISDLRDESDRNGVRVVIELKKDFDANIILNQLYKNTLIQTTFNSNMLALNRGKPEQMNLKEILSAFLDFREEVITKRTLFDLNKARDKAHILVGLVVANTNIDEIIELIKNSKDIKAAKNKLINKKWKLDKNNVNFINLVEDNAMQLKKDLYNFS

SEQ ID NO: 157841 - protein, 32 aa, Unknown
  Bacterial polypetide isolated from the Sargasso Sea
MVRNTTYQADSIKVLKGLEAVRKRPGMYIGDT

SEQ ID NO: 157842 - protein, 90 aa, Unknown
  Bacterial polypetide isolated from the Sargasso Sea
MSDILDSDNSGLSENNDRIIQTDLRNEMSRSYLEYAMSVIVGRALPDARDGLKPVHRRILYAMYELGLTSGRPYRKCARVVGEVLGKYHP

SEQ ID NO: 157843 - protein, 57 aa, Unknown
  Bacterial polypetide isolated from the Sargasso Sea
MEKTNIQKKDLFKPIFVQDEMSSSYLSYAMSVIVSRALPDVRDGLKPVHRRIIYAMV

SEQ ID NO: 157844 - protein, 332 aa, Unknown
  Bacterial polypetide isolated from the Sargasso Sea
ATGRGSIIMRAKAEVQTNAKDREAIIIHEIPYQVNKAQLLERIGEMVREKTLEGISDIRDESDRNGMRVVIEIKRDAQGDVVLNQLYRHTRLQTSFPVNLLAMNGGRPQQMGLKDVITAFCLFRKEVVVRRTTFLLSKARDRAHILAGLMVALASIDTIIELIKKAPDTESARNALCDANWPAAEVADFVSLIDDPGHAVIDGHYRLSETQARAILELRLQRLTGMERDKLSAETRELADKISDYLDILGSETRVSRVVLDELAATRERLANPRRTEITDQLGDQDDEDLIQQEDMVVTVSHRGYIKRVPLSVYRAQRRGGKGRSGMKTRDE

SEQ ID NO: 157845 - protein, 273 aa, Unknown
  Bacterial polypetide isolated from the Sargasso Sea
MSNHLIQEVLDNSVDEALSGYCKRIKVNLYKDNSVEVSDNGRGMPVDVHPEHKLTGVELIMCKLHAGAKFSGEDYGFSGGLHGVGVSVVNALSTKLNVKIKRDSKEYEINFSAGDKDNDLKSIGDVGATNSGTTIRFYPDKQYFETLEINKKSLKHLLKAKAVLCPGLQIDYFDEKKNERIKWIFDEGLSDYLDEFSGCNEKLLDETIILSKISDDQALDVAVNWTEESSNNLLKETYVNLIPTALGGSHLNGFKSGLLEAIKEFCEYRNLIP

SEQ ID NO: 157846 - protein, 213 aa, Unknown
  Bacterial polypetide isolated from the Sargasso Sea
NSLSVIEKIEKQAGAIAAKAISLHKPITKTEANNKKKLETWIKGLSKTASKIAKERGYKASVSIDYDDDGIGYINTEEEIGGVSHHGKIANSFLRSNDYKIFGRVQKAQKVFSGPVVIDNGSEITEYANIEDCLKQIVNTSKRGLNVQRYKGLGEMNPDQLWETTLDPTTRSLLQVKADDDAGLTFETLMGDEVPPRREFIEENALNAGNVDI

SEQ ID NO: 157847 - protein, 281 aa, Unknown
  Bacterial polypetide isolated from the Sargasso Sea
HIELHADHSLTISDNGRGIPTDPHPKFKDKSALEVILTTLHSGGKFSGEVYETSGGLHGVGLSVVNALAERLTVEVARDQNMWCQTYQFGVPDGPLKDLGTVRNRRGTTVNFHPDAKIFGPRNYFKPATLYRMARSKAYLFRGVEIRWTCDEKLLTFGDETPVKETLHFPGGLSDYLVSALGQRKTITPHPFSGQSKINGGSGRVEWAVAWPVDEDSFFNSYCNTVPTPLGGTHELGLRGALTKGLRAYGELVGNKQAAKLNGDDVVGGTLAMLSVFIVDP

SEQ ID NO: 157848 - protein, 157 aa, Unknown
  Bacterial polypetide isolated from the Sargasso Sea
DRRYQAILPLRGKILNTWELDSAIVLGSNEVQDISIALGIEPGEQSMERLPYGKVCILADADSDGLHIAALLCAFFVRHYAPLVRDGRVYVAMPPLYRIDSAKDIFYARDEEEKELVLEKLGDKKAQRANVQRFKGLGEMNPNQLKETTLEPLTRTL

SEQ ID NO: 157849 - protein, 293 aa, Unknown
  Bacterial polypetide isolated from the Sargasso Sea
TSIPPHNLGEIISATIAYIKNNNITISQLMKYVPGPDFPTGGIIIGKEIIKQGYNKGRGSFKIRGDIEFEEKKNGRSNLVIKSIPFQVNKSSIIEKVAQLAKDKKIDGISDIRDESNREGVRVVLELKKGIEPETIRRQLYKLSNIETSFGFNTLALVNNIPKVLNLKSFISEFVSFRELTVINRLKFDLKKAQERAHILLGLAVAVDNIDEVIKVIKKSKDAKSAKQNILSKKWAIKKSKKIVLAFNKKDVRNYNFTEKQVESILELKLQKLTSFGIAEIDNELNELIKKIN

SEQ ID NO: 157850 - protein, 155 aa, Unknown
  Bacterial polypetide isolated from the Sargasso Sea
AVNPEKQGNNVLIEVNGKKIELSFNLLENFSAYDYSQMYDEHLRLIAALGEKGVVLTEEKESASNVFQSWFEVLDFMINFGKKGMYIQRYKGLGEMNPEQLWETTLDPNVRTLKKVTIEDIVESDGIFTILMGDQVEPRRNFIEENALRVKNLDV

SEQ ID NO: 157851 - protein, 208 aa, Unknown
  Bacterial polypetide isolated from the Sargasso Sea
GVGVSVVNALSEKLDLSIKRDGKEHAMSFQNGETVKALKAVKDCKDETGTEITFYPSKSVFTMTEFSRRTLEARLREMAFLNSGISIHLEDKRKDEPWAKTMSYEGGLEEFVKHIDQTRKSLMDLPISFSGKKDEIEVDVSMWWNDSYYETVNCFTNNIPQKDGGTHLAGLRSALTRVVNSYAQDTGLTKKENVQQIGEDIREGFTCV

SEQ ID NO: 157852 - protein, 234 aa, Unknown
  Bacterial polypetide isolated from the Sargasso Sea
VKDGLKPVQRRILYSMYETGIRPTGPFRKCSKVVGDVMGNYHPHGNEAIYGTLVRLGQHFSTRYPLIEPQGNFGTPDDPPAAMRYTESRMSLLASQLLDGIDEETVDFEPNYSGETTEPKVLPGRFPNLLINGAEGIAVAMATNMPPYNLQEITEAVKFTLKTKEPKPRDYLKIIKGPDFPTGGLIVKTPTIKDAILKGRGSIKLRAVADVEELGKGRSAIVVKELPYQASIDR

SEQ ID NO: 157853 - protein, 119 aa, Unknown
  Bacterial polypetide isolated from the Sargasso Sea
MKQFYKNVLLLDDVSDDLPTLEKKKGYSGNVSFIGDGNIQTHIAEKDLEVNFKTGHFINPVEKGHIAYRTDNLDQFKEHLRYHKIRFADWEETAVSGWKQIFFYDPDGNIIEVHEKVKN

SEQ ID NO: 157854 - protein, 391 aa, Unknown
  Bacterial polypetide isolated from the Sargasso Sea
DEVIEIIRGSKDPMMAKEGLMNNFNLSEVQAQAILDMRLQKLTGLEVDKVVEEYKDLIKHIAHLKGILDSKNQRMNIIKTELAEVKESYGDERLTEIVPVDSNFTMEDMIAEEEVVLTITHQGYIKRTALNTYRTQRRGGRGVQGAMSKEEDFVEHLLIANTHNYMLFFTDKGKCYWLKVYDIPQGGRAARGRAVVNLIGCEPGEKVEAFVAVEKFDDNHFIVMATKNGIVKKTVLSAYGKPRKGGIYAIDIRENDKLIEARITNGEHDILLGTSEGKSIRFSENNIRPSGRKTMGVKGIKLGSKEDRVVGMLVVRREGTILVATEKGMGKRTDVIQYRSQTRGGKGVMTMRCTEKTGKMVNIMEVVDSDDLIIITDSGVLMRQPVAAIRT

SEQ ID NO: 157855 - protein, 153 aa, Unknown
  Bacterial polypetide isolated from the Sargasso Sea
MTKDQFNSISLKKYAEESYLNYAMYVILDRALPNIGDGLKPVQRRILYAMSELGLDASSKYKKSARTVGDVIGKFHPHGDSAAYEAMVLMAQNFSFKYPLVDGQGNWGSQDDPKSFAAMRYTESKLTNFANLLISELKSGTVDWQPNFDGSLL

SEQ ID NO: 157856 - protein, 329 aa, Unknown
  Bacterial polypetide isolated from the Sargasso Sea
MTDQQYNADSIEVLTGLEPVQRRPGMYTDTTRPNHLGQEVIDNSVDEALAGHADLVHVILHEDQSLEVIDNGRGMPVDIHPEEGVSGVELILCRLHAGGKFSNKNYQFSGGLHGVGISVVNALSSRVDVAVRRDGNVYEIAFEHGNKVSELAITGTVGKRNTGTRVRFWPAPDYFDSPKFSVSRMLHVLKAKAVLCPGLTIKFDDKVNNQSYQWCYQAGIRDYLMDAVKDMIALPEQPFVGSLSASHEAVEWAVLWLPEGGELVTESYVNLIPTAQGGTHVNGLRQGLLEALRDFCEFRNLLPRGIKLTPEDVWDRCSYILSLKMQEPQ

SEQ ID NO: 157857 - protein, 173 aa, Unknown
  Bacterial polypetide isolated from the Sargasso Sea
GTADNIATRLNLIALEYEQGWSGRITQDQGIRLARVLRGVEELRTLDGSMLRSGEARKTGTFTESLKEVYQSPATLIRKDQSQTIYGPLELLNSILKEGEKGLTLQRYKGLGEMNPDQLWETTLDPNARTLLQVKINDAAEADDLFTKLMGDVVEPRREFIQSNALTVANLDF

SEQ ID NO: 157858 - protein, 116 aa, Unknown
  Bacterial polypetide isolated from the Sargasso Sea
MNLIDQYKDIEIVDALEERYLAYALTTIMDRALPDVKDGLKPVHRRLLYAMRQLNLSPNSSFKKSARIVGEVMGRFHPHGDQAIYDTLVRLAQDFSVRWPLINGQGNFGNIDGDNA

SEQ ID NO: 157859 - protein, 267 aa, Unknown
  Bacterial polypetide isolated from the Sargasso Sea
MSKKAYDSKAIEVLSGLDPVKKRPGMYTDTSCPNHLIQEVLDNSVDEALSGFCKRIKVNLYKDNSVEVSDNGRGMPVDVHPEHKLTGVELIMCKLHAGAKFSGEDYGFSGGLHGVGVSVVNALSTKLNVKIKRDSKEYEINFSAGDKDNDLKSIGDVGATNSGTTIRFYPDKQYFETLEINKKSLKHLLKAKAVLCPGLQIDYFDEKKNERIKWIFDEGLSDYLDEFSGCNEKLLDETIILSKTSDDQALDVAVNWTEEASNNLLKE

SEQ ID NO: 157860 - protein, 482 aa, Unknown
  Bacterial polypetide isolated from the Sargasso Sea
MSRIAVAAALVMLGACASRDGLAPAGTLRGADTLAASRSLAQVPAADWPAADWWRALNDAQLSALIDEALAGNPDLATADARAREAQALVIEAQAARLPHLVGRASAKAERLSGTQFSSGEGGGFFSHTREINLGLSWDLDLWGGRRAAWEAALGEARAAQVDAQAARVLLSVNVARAYVNLAYAFDQQDVARAEYERADEALTLTRQRVTKGIDNVAQQRQAESEVAAATREQARTAQAIDSARIALAILLGAGPDRGLALVRPAPLPAAALAVPADLPAALLGRRADLVAARWRVEAASRNVAAARADFLPNVSLTALIGLATRGGASLFQAASRTYNASPAVSLPIFDGGERRGVLRRRDAQYDLAVAGYNKTLIGAIGEVADDLHRLHSLAVQTDAQQRAFDSATDAWRLADARYRAGVGSYLDALVVRQQLLVASREVAALRAQRADQSLQLVAALGGGFRAEPDDAALAATPSQRP

SEQ ID NO: 157861 - protein, 235 aa, Unknown
  Bacterial polypetide isolated from the Sargasso Sea
MAREYTAKSIEVLSGLDPVKKRPGMYTETSRPNHLALEVIDNSIDEALGGFASKISVCLFKDGSLSVEDDGRGMPVDIHPDEGIPAVELIFTRLHAGAKFSNEDYKFSGGLHGVGVSVVNALSLYLEAEIKRDGKKYSIRFEDSEKKIDLKTIDSVGQKNTGTKVTFLADPQYFDNAKISVTQLTAALKAKAVLSPGLKISFFDENTGNSESWCFVDGLASYLAASNQGGEVVPS

SEQ ID NO: 157862 - protein, 401 aa, Unknown
  Bacterial polypetide isolated from the Sargasso Sea
MSPKGYKLSPTQAQAILDLRLHRLTGLEQEKIIEEYKKVLDLINEYTKILSRTEVLMDVIKNELHETLSEYDDSRLTEINNDYTDLVDEDLIPDEEVVVTLSHSGYIKSQSSDTYQAQKRGGRGKSSTKMKDEDFIDKIWIANTHDTLLCFSSKGKLYWLKVYQVPMASRGARGKPIINLLPLEEGERISTVLPIREFDEDSFVFMATSDGTVKKTPLKLFSKPRSSGIIAINLKDDYLIDAAITNGKKEVLLVASNGKAIKFNENDVRAMGRTAHGVRGMRLKDDHKVIALSIVNEDLLLTATENGYGKRTSIKEFSTQRRGGQGVIAIKTSDRNGLTIGAIQVSDDDEIMLISSNGVLIRTPVDGISIVGRNTQGVTLIKLVDEQKLVGLAKIISIDEE

SEQ ID NO: 157863 - protein, 46 aa, Unknown
  Bacterial polypetide isolated from the Sargasso Sea
MTNKNTYQADSIKVLKGLEAVRKRPGMYIGDTDDGTGLHHMVYEVC

SEQ ID NO: 157864 - protein, 208 aa, Unknown
  Bacterial polypetide isolated from the Sargasso Sea
MASAQQQKQQSVATADQSDFPALLNREFSPKTDQAREAVDLAVRTLAEQALASTFTMSDDAYKSIEAIIGAIDSKLSEQINLILHNEDFQKLESAWRGLHHLVSNTETDEKLRIRVMDVSKDELRRTLRRYKGIGWDQSPFFKRIYEEEYGQLGGEPYGCLVADYYFDHTPPDVELLGSLAKISAAAHAPFIAGASPSVLQMDSWQEL

SEQ ID NO: 157865 - protein, 90 aa, Unknown
  Bacterial polypetide isolated from the Sargasso Sea
LPHNTDYSDNALKKMVTDMQLWKKVRMIGSAAMASCYVASGKGDLYKENGIYLWDIVAGAAIVSSAGGSAKILNIRDNYQVDVVFSNSHI

SEQ ID NO: 157866 - protein, 386 aa, Unknown
  Bacterial polypetide isolated from the Sargasso Sea
ELIKHIAHLKGILESKSQRMDIIKKELIEIRDQYGDERRTEIVPVDSDFSMEDMIAEEEVVLTITHQGYIKRTALNTYRTQRRGGRGVQGAMSKEEDFVEHLFIANTHNYMLFFTDQGKCYWLKVYDIPQGGRAARGRAIVNLIGCDPGEKIEAFVSVKEFDDQHYIVMATRNGIVKKTVLSAYGKPRKGGIYAIEIREGDKLIEARITNGEHDILLGTNEGKSIRFSENNVRPSGRKTMGVKGITLGSKEDHVVGMLVVRREGTILVATEKGMGKRTDVIQYRTQTRGGKGVMTMRCTDKTGKMVNIMEVVDSDDLIIITDSGVLMRQPVADIRTIGRVTQGVKLVKLDDGASISSITRVISEDATPAKEDDAVQENEEASSDES

SEQ ID NO: 157867 - protein, 371 aa, Unknown
  Bacterial polypetide isolated from the Sargasso Sea
MGIYEAYKTGRGIIYVRSKSKVEESKTGKKSLVIYEIPFMVNKARTLEKIAELVKEKKIDGISEIRDESDKDGLRIVIDVKKGESVEVLENNLFAQTQLEQSFGINFTVLVDGQPRVLNLKEILQEFLKHRKDVVLKRTKFELRKAKERGHIVEGLMVAIANIDEIIKIIKKSKDPKIAAQELVKKKWKAGPVEAILKKVGKDACKPKGVAKGFGLSGKSYKLSNDQAKAILELRLGRLTGLEQDNLSSEFNSLIEKITSLQEIIDDKGVLQKVIEDELNEIKETYGDDRRTDINDTRQDISNEDLIPEETRVLTISRTGYAKTQPLEEYREQRRGGQGKAAASVKEEDVIQNLYVLSSHSQMLCFTTKGK

SEQ ID NO: 157868 - protein, 117 aa, Unknown
  Bacterial polypetide isolated from the Sargasso Sea
MDDDNTLDLFTEPPPPEGDILTLGNYAERAYLDYAVSVVKGRALPDVCDGQKPVQRRILFAMNEMGLGDNAKPVKSARVVGDVLGKYHPHGDQSAYDALVRLAQDFSMRYPLIDGQG

SEQ ID NO: 157869 - protein, 153 aa, Unknown
  Bacterial polypetide isolated from the Sargasso Sea
DDLRYDKVIIMTDADVDGAHIASLLMTFFFTQMRPLIDYGHLYLACPPLFRLTQGSHRVYCIDEVERDTWLSNGLGGRGKIDVSRFKGLGEMDAKDLKETTMDPSSRKLIQVSIDDEEPGETSNLVDQLMGKKPELRFQYIQENAKFADELDI

SEQ ID NO: 157870 - protein, 667 aa, Unknown
  Bacterial polypetide isolated from the Sargasso Sea
TNIPPHNATEILDACIHILDNPSCTIEDLLKIVKGPDFPLGGIITGIDGIEQAYRTGQGKVYTRAKTSFEQIKGGKEAIVITEIPFMVNKARMLERIAELVKEKKLEGIGEIRDESDKDGIRAVIELKKGEVPEVVLNNLFKNSQLEQVFGINNVVLVDGRPKLCNLEELLNIFLEHRKTVVTNRSLFELRQAKERGHVVEGLIVAIANIDEVIDIIKKSENVKVASEKLCERDWSADTIKPLLDKVADPDICKPEGLEKGFGLNGKKYKLSVVQAKAILELRLSRLTALETDKLKEEYEELIKEIKRLQEILSTESVLVKVVKKELEEIKSDFGDERRTEIIEKRLTIDDADLIPEEERVFTISNNGFVKTQQLAEYRSQRRGGVGKTASALRDEDFIKQVLVLNTHVQVLCFTTKGKVHWLEIYKLPVMSRTAKGRPISNVLPLEEDERVTSFLPVDEYKDGHYILMATRNGVVKKTVLKAFEKKYAPGLRAINLDDGDKLIGTVITDGSDEICLASESGKAIRFNETDVRPMGRSTRGVKGMNIHKEDKVISIMKVIPEAKLLTISQNGYGKRTNISEFSGQKRGGKGVIALNTSQRNGKMIAAVQVIDGDEVMLIGNRGTLIRTQVDQISVIGRNTQGVKVVSTRDEESLVDAVGFKETLDEE

SEQ ID NO: 157871 - protein, 306 aa, Unknown
  Bacterial polypetide isolated from the Sargasso Sea
MSKKAYDSKAIEVLSGLDPVKKRPGMYTDTSCPNHLIQEVLDNSVDEALSGYCKRIKVNLYKDNSVEVSDNGRGMPVDVHPEHKLTGVELIMCKLHAGAKFSGEDYGFSGGLHGVGVSVVNALSSKLNVKIKRDSKEYEINFSAGDKDNDLKSIGDVGATNSGTTIRFYPDKQYFETLEVNKKSLKHLLKAKAVLCPGLQIDYFDEKKNERIKWIFDEGLSDYLDEFSGCNEKLLDETIILSKTSDDQALDVAVNWTEEASNNLLKETYVNLIPTALGGSHLNGFKSGLLEAIKEFCDYRNLFQKE

SEQ ID NO: 157872 - protein, 53 aa, Unknown
  Bacterial polypetide isolated from the Sargasso Sea
MEKNILENNKQFKPIFVQDEMSSSYLSYAMSVIVSRALPDVRDGLKPVHRRII

SEQ ID NO: 157873 - protein, 171 aa, Unknown
  Bacterial polypetide isolated from the Sargasso Sea
EDLRYGKIIIMTDADVDGSHIRALLLTFFNNIPFNKLIEQGHVYLAQPPLFKINKGSKGIYIKDEKDLENYIIKNSKDIKKVKKNSKEFDRMIQLEKSKLNIQRFKGLGEMNPEELWNTTLNPETRNLLQVQYSKNLQKDQNLIQTLMGNDVASRKDFIVDNAINVVNLDI

SEQ ID NO: 157874 - protein, 648 aa, Unknown
  Bacterial polypetide isolated from the Sargasso Sea
MATSIPPHNLGEVVDGLVALIRQPELGDNKLLALIPGPDFPTGGEVLLSSGLQDTYLAGRGSIPMRGVAHIEEVQPGKGRHKRNAVVVTELPYQLSKAGWIEKLAESVNDGKIGGIADIRDESDRDGMRVVVELRRDADPTKVLADLQRRTALQSNFGAILLALVDGQPRQLSLRQLLQTFLDYRELTLIRRTSYALRKTEDRLEVVDGLINALNNLQAVITMIQEARDAASARASLMVRLDLSERQADAVLAMPLRRLTGLEQESLRQELEELRAERERLRLLLDNRDQLLDAMVDELKTLKKRFSTPRRTRLVEGGDALIAERAASQRPNTELLRQQALAALPADARLLIQADGQVKLVSPQVLGRMHLSEACPVGDHPSPAQLILPIEPSPRLLGVSASGRVALIRWEFAGQQPGSLEKFLPSGLDGDPLIAITQLPTGDGKELSLGLLSSDGRFKRLPLTEVLDLSGRATSMVKLKEGVRLCSAVICREHSDLVLVSSMGRLLRLPVNDSVLPKMGRLAQGPMTMRLLPGEELVGSLAMNVAETDPTLLLVSRHGQMTRIDLTPLRRCQRGDLGMMAVHLSSNEDSVVGLCSGDVLAGIVTDQKRHGRLDAAAVELAAAGKAWGDQLTLDSNEQIVSVVALQTL

SEQ ID NO: 157875 - protein, 103 aa, Unknown
  Bacterial polypetide isolated from the Sargasso Sea
MDKKNFTSISLQEEMQRSYLEYAMSVIVGRALPDARDGLKPVQRRIIFAMHELGLTPDKPFRKCARVVGDVLGKYHPHGDQAVYDALVKLVQNFSTKYSYSDG

SEQ ID NO: 157876 - protein, 468 aa, Unknown
  Bacterial polypetide isolated from the Sargasso Sea
ILEGLAVALANIDPVILLVKKSASPAAAKIELLKGVWESSVVVEMVKDSGSEISRPDNLQHEFGLHKDGYRLSPEQAQAILELRLQKLTGLEKEKILKEYSDLLKTITDLLDILSRPQRLMKVIRDELKDIQDRYGDERRTEIVQTQRDLNMEDLITEEDVVVTLSHAGYAKSQPINTYRSQRRGGRGKAATSVKDQDFIDKLFIASTHDTLLCFSSRGKVYWLKVYELPQASRIARGKPIINLLPLDQGEQINAVLPIRDYSEDMFVFMATANGTVKKTSLIEFSRPRPSGIRAIELVGGNKLIGAELTDGKRDIMLFSDAGKVVRFSESHVRSMGRTAKGVRGIRLSKGQKAISLIIVDNQDITVLTATQNGYGKRTNIKDYPQKSRGGVGVISIQVTKRNGPVVSAVTVENDDEIMLISDQGTLIRTPVKDISVFGRNTQGVRLVNLSELEHLVSIERIVEYNDN

SEQ ID NO: 157877 - protein, 745 aa, Unknown
  Bacterial polypetide isolated from the Sargasso Sea
GPFRKCSKVVGDVMGNYHPHGNDAIYGTLVRLGQNFSTRYPLIEPQGNFGTPDDPPAAMRYTESRMSPLSSQLLDGIDEETVIFEPNYSGETSEPRVLPGRFPNLLINGAEGIAVAMATNMPPYNLREITEAVKFTLNTKDPKPRDYLKIIKGPDFPTGGLIVETPTIKDAILKGRGSIKLRAVADIEELGKGRSAIVVKELPYQASTDRIMEKIASLVQDKKLTGVSDLRNESSDRNGTRLVVELKRDAVPQVVLNDLFKYTQLQDTFSVNSVALVEGVPRVLSVPELIRYYIDHQIDVIQRRSQFMLDKAKSRLHIVDGLLLALNKIDQIIKVIKSSKDVEAARKSLMSKFKLSEIQATHILDMPLRRLTALEKEKLEEEKKELKQTIKDLTAILKSRTKQNEILIEELDAITEKFGDERRSRLVPDVGEVKIEDLIEDEEIIVSISSEGYIKSVPSTSYKKQGRGGKGVKASSSEEDVIEHLLSTSVHSYLLFFTDNGKVYRAKAHEIPKTNRTAKGSLIHNVLSMGQDEKVQAIIDTRDYETEKFLLIMTEKGTVKKSKFKDFDSNYKSLQAIKLKDDDKVVSVKTTSGKEDIILVSQKGQAIRFDENNLKPQGRTAMGVRGIKLREGDKVVGAATSREETLLFITAKGYGKRTKLDEFRRAGRGGIGVKALKVTEAKGDLVGARSVDEDTEVMLMSTGGTAIRCAVKQIKQMSRVAQGVKVMKLSKEEEISAFIPIKTES

SEQ ID NO: 157878 - protein, 379 aa, Unknown
  Bacterial polypetide isolated from the Sargasso Sea
MSKKAYDSKAIEVLSGLDPVKKRPGMYTDTSCPNHLIQEVLDNSVDEALSGFCKRIKVNLYKDNSVEVSDNGRGMPVDVHPEHKLTGVELIMCKLHAGAKFSGEDYGFSGGLHGVGVSVVNALSTKLNVKIKRDSKEYEINFSAGDKDNDLKSIGDVGTTNSGTTIRFYPDKQYFETLEINKKSLKHLLKAKAVLCPGLQIDYFDEKKNERIKWIFDEGLSDYLDEFSGCNEKLLDETIILSKTSDDQALDVAVNWTEEASNNLLKETYVNLIPTALGGSHLNGFKSGLLEAIKEFCDYRNLIPKGIKINSDDILANCIFVISSKLKNPQFAGQTKERLDSKDHMSFVSSSTKDSLSIWLYQHTEEGEKIADLAIAAAQ

SEQ ID NO: 157879 - protein, 112 aa, Unknown
  Bacterial polypetide isolated from the Sargasso Sea
YIYIACPPLYKVERGKNHTYCYNEHDLQKTLEGFGEKANYTIQRFKGLGEMMPQQLWETTMDPTTRTMKRVEIEDAAQADRIFTILMGDKVAPRREFIETHSAELDLADLDI

SEQ ID NO: 157880 - protein, 210 aa, Unknown
  Bacterial polypetide isolated from the Sargasso Sea
NGNVNDLKTKTLSKMISSNEVVTLINALGLDPKVEEIDLKDLRYGKIIIMTDADVDGSHIRALLLTFFNNKPFSKLIENGYVYLAQPPLFKINKGSKGIYIKDEKELYQYILKNSKELKKFKKGSREFEKAYSQEKSLLNIQRFKGLGEMNPEELWKTTLNPETRNLLQVRYSKDLKKDQDIIHTLMGNDVSLRKDFIFSNAINVSNLDI

SEQ ID NO: 157881 - protein, 230 aa, Unknown
  Bacterial polypetide isolated from the Sargasso Sea
VLPLRGKILNTFTELNGSKKNGHTNDLRTKVLSKMMSSNEIVTLINALGLDPKNDEIDLKDLRYGKIIIMTDADVDGSHIRALLLTFFNNKPFNKLIENGHVYLAQPPLFKINKGSKGIYIKDEKELEEFIVKNSKDLKKIKKGSKDYEKSLQEEKSKLNIQRFKGLGEMNPEELWSTTLDPETRNLLQVQYSKNSQKDQDLIQTLMGSDVSSRKDFIVDNAINVSNLDI

SEQ ID NO: 157882 - protein, 302 aa, Unknown
  Bacterial polypetide isolated from the Sargasso Sea
MRGKTSIENVRKDREAIIISEVPYQVNKARMIEQIAEAVKNKNIEGISDLRDESDRVGVRVVVELKRDATPEVVLNQIYKHSPLQTYFGVNMLALNGGRPEQLSTRQILDSFLTFREEVITRRTIFDLEKARDRANILVGLALAVSNIDEVIKLIKSSKDSDEAKKLLLDKDWKASDIADLIDLIGDPNDKADENDMYKLSNNQAKAILELRLQRLTGLERDKIVEELKEIVSKVVELLSILRSRDKLMNIMKDEFTNIKEQFSVPRRTEILDIEINQDVESLIEREDMVVTLTNSGYIKRT

SEQ ID NO: 157883 - protein, 306 aa, Unknown
  Bacterial polypetide isolated from the Sargasso Sea
MTKDYNASDIEVLSGLEPVQKRPGMYTDTDCPNHLAYEVIDNSVDEAIAGYCKTIQVDLYKDGSIQVRDDGRGMPVDDHPEEKIPAVELILTRLHAGAKFDNKSYKFSGGLHGVGVSVVNALSKNLEVWIKRGGQEYNMSFSNGDRTSELEIVDSVGKANTGTAIRFWPNESYFDSADIRLDEIKHNLRAKAVLCPGLKIKFKDEATGEKCEWEYQEGASEYLVEMLENIECIPSIPFSGKANSDEQELEWSMTWPDRDHEGIQESYVNLIPTKHGGTHVSGFRSGLSESVKEFADYRNLLPRGVK

SEQ ID NO: 157884 - protein, 332 aa, Unknown
  Bacterial polypetide isolated from the Sargasso Sea
MTTLKETVYDESKILTLSSLEHIRLRPGMYIGRLGNGAHPSDGIYVLLKEIVDNSIDEFIMGHGKRIDIKIDNGSVNIRDYGRGIPLGKVVECVSIINTGAKYNDEVFQFSVGLNGVGTKAVNALSENFEVISYRENKMLSACFKSGELKTKPLSQDTNESNGTKISFTPDTKIFPNYNYDIGTIRKQLWNYAYLNRKLTITLNGEKFKSENGLLDLLNEEVNDTNLYPIAHCQSEQLEMALTHTEHYGEEYYSYVNGHHTNDGGTHLSSFREGILKAVNQFFNSSFEGPDVRDGIVGAVAIKLQEPVFESQTKNKLGNYDLRSWLMPMVRD

SEQ ID NO: 157885 - protein, 64 aa, Unknown
  Bacterial polypetide isolated from the Sargasso Sea
MQKIENSKNSNIKPIAMYDEMSSSYLSYAMSVIVSRALPDVRDGLKPVHRRIIYAMYKGGFDWS

SEQ ID NO: 157886 - protein, 72 aa, Unknown
  Bacterial polypetide isolated from the Sargasso Sea
MPEIEKIKNNNIKPIAMYDEMSSSYLSYAMSVIVSRALPDVRDGLKPVHRRIIYAMHKGGFDWSKQFRKSAR

SEQ ID NO: 157887 - protein, 131 aa, Unknown
  Bacterial polypetide isolated from the Sargasso Sea
MPKQYDAKSIEVLSGLDPVRKRPGMYTDTSCPNHLIQEVLDNSVDEAIAGHCAAIKVSIFKDGFVEISDDGRGMPTDIHPEHKLSGVELILSKLHAGAKFSGEDYNFSGGLHGVGVSVVNALSSSLISTIK

SEQ ID NO: 157888 - protein, 589 aa, Unknown
  Bacterial polypetide isolated from the Sargasso Sea
RPTGPFRKCSKVVGDVMGNYHPHGNDAIYGTLVRLGQNFSTRYPLIEPQGNFGTPDDPPAAMRYTESRMSSLSSQLLDGIDEETVDFEPNYSGETSEPKVLPGRFPNLLINGAEGIAVAMATNMPPYNLKEITEAVKFTLKTKDPKPRDYLKIIKGPDFPTGGLIVDTPTIKEAILKGRGSIKLRAVADIEELGKGRSAIIVKELPYQASTDRIMEKIASLVQDKKLTGVSDLRNESSDRNGTRLVVELKRDAVPQVVLNELFKFTQLQDTFSVNSVALVEGVPKVLSVPELIRYYIDHQIDVIQRRSKYRLEKAKARLHIVDGLLLALNKIDQIIKVIKSSKDVEAARKSLMSKFKLSEIQATHILDMPLRRLTALEKEKLEDEKKELKETIKDLTAILKSRAKQNQILIEELDAITDKFGDERRSRIVPDVGEVKIEDLIEDEEIIVSISSEGYIKSVPSTSYKKQGRGGKGVKAASSEEDVIEHLLSTSVHSYLLFFTDNGKVYRAKAHEIPKTNRTAKGSLIHNVLSMGQDEKVQAIIDTRDYETEKFLLIMTEKGTVKKSKFKDFDSNYKSLQAIKLKDGDKVV

SEQ ID NO: 157889 - protein, 78 aa, Unknown
  Bacterial polypetide isolated from the Sargasso Sea
MADQYTASSIKVLKGLEAVRKRPGMYIGDTDDGTGLHHMVYEVLDNSIDEALGGYCDNIQIIINKDGSATISDNGRGI

SEQ ID NO: 157890 - protein, 74 aa, Unknown
  Bacterial polypetide isolated from the Sargasso Sea
MAKKSIEPKYDSSNIQVLKGLEAVKKRPGMYIGDTDDGSGLHHMVFEVLDNCIDEAMAGHCSEIQVVINKDGSV

SEQ ID NO: 157891 - protein, 63 aa, Unknown
  Bacterial polypetide isolated from the Sargasso Sea
MSGDTYDSGSIKVLKGLEAVKKRPGMYIGDTDDGTGLHHMVFEVLDNSIDEGMAGFCKQIDVV

SEQ ID NO: 157892 - protein, 227 aa, Unknown
  Bacterial polypetide isolated from the Sargasso Sea
SDCNSEDLNETELFLVEGDSAGGSAKQARERSFQAIMPLRGKILNTWDLESQEIIKSQEIKNLSTAIGVLPGNSDISGLRYGKICILADADSDGLHIATLLCALFLRHYKSLVQDGRIYIAMPPLYRVDCGKEVLYALDEIQKDKVVDDFKKKKGKPKINIQRFKGLGEMNPSQLRETVMDPNSRQLVRLSISATDNANAMMDLLLSKKNAPARKEWLEKKGSLVRL

SEQ ID NO: 157893 - protein, 308 aa, Unknown
  Bacterial polypetide isolated from the Sargasso Sea
IDQTSCGWKFNKDNYQYSGGLHGVGVSVVNALSKNLEVWVRRDGTEQNMSFAGGKKQGDLEEVGKVGKANTGTTIRFWPDPQYFDSSNISASKLQHALKAKAVLCPGLEVKLKIESTGEKIAWMYTGGLEQYLAETIGQTQHIPEIPFSGGFKSDNEAVDWALVWLQEEGSNLSESYVNLIPTAQGGTHVNGLRTGLANAIREFCEFRSLLPRGVTLTPEDVWDNVNYVLSVKLEDPQFSGQTKERLSSRESAAFVTGVIKDEFSLWLNQHPETGDLIAQLAIERAQKRIKSAKKVVRKKVVSGPSLP

SEQ ID NO: 157894 - protein, 171 aa, Unknown
  Bacterial polypetide isolated from the Sargasso Sea
MNNFDDESSQIIGSQIISESLDNALSDRYLTYALSTIMNRALPDARDGLKPVHRRILFAMRGLKLDASGTFRKCAKIVGEVMGNYHPHGDKAIYDALARLAQDFNVRYPLIDGQGNFGNIDGDNPAAQRYTEARLTKVSELLLDGLAEEAVDFRENYDGSEQEPTVLPAGF

SEQ ID NO: 157895 - protein, 138 aa, Unknown
  Bacterial polypetide isolated from the Sargasso Sea
MNKIIESNLDTILSEKYLSYAISTIVSRSLPDVRDGLKPVHRRIIYSMYQLKLFKSSNYKKCARIVGDVMGKFHPHGDQAIYDSLVRMAQDFSTRITLVDGQGNFGNIDGDNPAAMRYTEARLQDYTNYFFDGIEENS

SEQ ID NO: 157896 - protein, 252 aa, Unknown
  Bacterial polypetide isolated from the Sargasso Sea
MTKENLDKQSIKKYAENAYLNYSMYVILDRALPNIGDGLKPVQRRILYAMSELGLNASSKYKKSARTVGDVIGKFHPHGDSAAYEAMVLMAQDFSFRYPFVDGQGNWGSQDDPKSFAAMRYTESKLTKFSDLLIDELKQGTVDWQPNFDGSLLEPVIFPAKVPSILLNGTTGIAVGMATDIPSHNMTEVIDATIHVLENPKTSVDEILKYIKGPDFSNKAPIVASPEELNEMYSTGRGAFKMKCAWKKEGND

SEQ ID NO: 157897 - protein, 262 aa, Unknown
  Bacterial polypetide isolated from the Sargasso Sea
GKSKQSGTKITFLPSTEIFSSVKFSANILIKRMRELAFLNKGIKIIFIDASSKKEKISEFKFDGGVSEFVDFLDEKREKLQNKNGNDLFRKPIYIEGKKNNIEIECSLKWNAGYGEEIFPYTNNIHQKDGGTHLLGFRSALTRVVNKYANEHNLLKKNKLAISGDDIKEGLTCVLSIKIPDPKFSSQTKDKLVSSEVRMIVETVVNEKLSTWFDQNPTVAKTILAKIIQAAMARDVARKARENVRRKGALELSGLPGKLADC

SEQ ID NO: 157898 - protein, 278 aa, Unknown
  Bacterial polypetide isolated from the Sargasso Sea
IDDIEKNTIQFKSNYDETEKEPSVLPAQYPNLLVNGAGGIAVGMATSIPPHNLGEIIDGTLALIENKDITVKQLMKIIPGPDFPTGGVIIGKDMIKQGYIKGRGSFKIRGQISIEQLKNGRERLVITSIPYQVNKSVLNERIAQLVREKKIEGIRDIRDESNREGIRVSIDLRNGVEPETIKRQLYKNTQIESSFGFNTLAIVNGKPHTCTLKDFLSNFLNFREDVVVKKTKFDLNKAEERAHTLIGLSVAVENLDKIIKIIRSSKTPDDAKKSILKT

SEQ ID NO: 157899 - protein, 82 aa, Unknown
  Bacterial polypetide isolated from the Sargasso Sea
MDLGRDNILDKQLVKELEESYLNYSMSVIMSRALPDARDGLKPVHRRILFSMSEMSAMWNRPYKKSARVVGEVLGNITHTEI

SEQ ID NO: 157900 - protein, 353 aa, Unknown
  Bacterial polypetide isolated from the Sargasso Sea
MAQDFNYNFPLVDGQGNWGTQDDPKSFAAMRYTESRLTSFSDLFLDEIDKDTVQWNPNFDGSLLEPRQLPSKIPNIMINGSSGIAVGMSTDIPSHNITEILNATMMLLDKPKTTNEELMNIVKGPDFPTAGEIIAHDSEIESIYKHGTGNIKLRATYSDNKKEIIINSIPYQTHVTKIIDQIHDEVNAKKLPFIQSILDDSDQDNPVRIIIKYRGRSHTSEEIMSHLFLNTDLEKNIRVNLNMIGLDGKPEIKNLRQILAEWIKFRTTVVKNKLTWEITKIKDRIHILEGFTVVYKYLDKIITIIRNEDNPKKKILKLYKFSERQYEAIINMRLRNLAKLHERNIINELKELK

SEQ ID NO: 157901 - protein, 317 aa, Unknown
  Bacterial polypetide isolated from the Sargasso Sea
TVAFQSNYDDTTKEPSVLPSQFPNLLVNGASGIAVGMATNIAPHNLGEVIDASLYLIKNPECNISDLQKYIFGPDFPTGGQIIGKKGITEAFETGKGGCVVRSKTSIENFKKDREAIILHEIPYQVNKSKLLERIAEIVKNGIVEGISDLRDESDRNGVRVVIELKKDVDSNIILNQLYKHTLIQTTFNSNMLALNKGKPEQMNLKEILSSFLDFREEVIIKRTLFDLNKAREKAHILVGLVVTNEHIDEIIELIKSSKDTKEAKEKLIKKKWKVSKQNLNFIKSVEDDTVELKNNTFNFSDAQAKAILELRLQKLT

SEQ ID NO: 157902 - protein, 43 aa, Unknown
  Bacterial polypetide isolated from the Sargasso Sea
MPKTKKSTNTKKYDSSNIKVLKGLDAVRKRPGMYIGDTDDEQG

SEQ ID NO: 157903 - protein, 254 aa, Unknown
  Bacterial polypetide isolated from the Sargasso Sea
VRQALDTAVLVRPDGTEIAGDALAELARQYQLSRGVIERLSRVIDADALRAIAEGVSLDLSNEAAAEASARTLKARLLEMQGNASSANGGATADAFMQYDEKTEKYRIMVVRRQHGNQRLSHIDADFVAGADYTALSSTAATFQGLIGDGAKVRRGTGDKVREQNVADFHAAMTWLLSEAERGVSRQRYKGLGEMNPEQLWETTMDVTQRRLLRVQIEDAIAADQIFTTLMGDDVEPRRNFIESNALVARNIDV

SEQ ID NO: 157904 - protein, 127 aa, Unknown
  Bacterial polypetide isolated from the Sargasso Sea
MTKEKFTSISLQEEMQRSYLEYAMSVIVGRALPDARDGLKPVQRRILFAMHELGLTPDRPFRKCARVVGDVLGKYHPHGDQAVYEALVRLVQDFSTKYPTLDGHGNFGSVDNDPPAAMRYTETRLAP

SEQ ID NO: 157905 - protein, 337 aa, Unknown
  Bacterial polypetide isolated from the Sargasso Sea
VLPSRFPNIFVNGASGIAVGMATNIPPHNLGEIIDATLLLIDEPDTTSKQLHKIVKGPDFPTGGIISGTAGLSSMYETGRGSVTVLSKLHEEKIKNRNAIVISEIPYLQNKSKLLERIADVVNNKTIEGINDIRDESNKEGVRIVVELKSSAVPEIIKNQLFQYTPLKTSFSSNMLALKETKPLTLNLRDGLSYFVNFRKDVITKRTVYKLNKAREKANILIGLSIAVNNIDAVINLIKKSKTPAEAKEKLLSTKWTIKSNIAQYIKLINSFNKTSSSKVSLDEEQAKAILELRLQKLTALERDDILNNLKSLVEDINTYLKILNSDKQLLKVLKGE

SEQ ID NO: 157906 - protein, 88 aa, Unknown
  Bacterial polypetide isolated from the Sargasso Sea
MTDLAREIVPINIEDELKNSYLDYAMSVIVGRALPDVRDGLKPVHRRVLFAMKELGNDWNKAYKKSARVVGDVIGKYHPHGDSAVYDT

SEQ ID NO: 157907 - protein, 320 aa, Unknown
  Bacterial polypetide isolated from the Sargasso Sea
IVGDVMGKFHPHGDQAIYDSLVRMAQDFSTRITLVDGQGNFGNIDGDNPAAMRYTEARLQDYTNYFFDGIEENSVDFKDNYDGQNLEPVVLPSQLPNILINGAMGIAVGMATNIPPHNIVELIDALKLIIKKDKPSLTEILKIINGPDLPTGGEIILDSNEKKQIYKNGKGSFNINAKYLIEELKNGLYQIIITEIPYQVNKVKIIEQLANNINNKKLPLDDVVDESDENIRIVLKPKTRNIDSEKLISLCFKLTDLSIKYSCNFNVLIDGIEPKQIGIIEILSNFLEHRKVTIKRKSKFYIEKIKKRLEILKGYQIVFK

SEQ ID NO: 157908 - protein, 262 aa, Unknown
  Bacterial polypetide isolated from the Sargasso Sea
MNARYNAADIEVLSGLDPVKRRPGMYTDTARPNHLAQEVIDNSVDEALAGHARSIEITLYKDGSVEVSDDGRGMPVDIHPEEKIPGVELILTRLHAGGKFSNNNYTFSGGLHGVGVSVVNALSTLVEVHIKREGAEHRITFRNGDRATPLEVVGSVGKKNTGTRVRFWPDPKYFDTPKFAVRALKHLLRAKAVLCPGLTVKLTDEATGEVDTWYYEDGLRDYLKLELGDREMLPAELFVGNLKKDTEIVDWAVAWLPEGELV

SEQ ID NO: 157909 - protein, 226 aa, Unknown
  Bacterial polypetide isolated from the Sargasso Sea
MANDQFNSISLKKYAEESYLNYAMYVILDRALPNIGDGLKPVQRRILYAMSELGLDATSKYKKSARTVGDVIGKFHPHGDSAAYEAMVLMAQNFSFKYPLVDGQGNWGSQDDPKSFAAMRYTESKLTSFANLLISELKSGTVDWQPNFDGSLLEPVIFPSKIPTILLNGTSGIAVGMATDIPSHNINEVIDATIHVLEKPKTELKDIMKIIKGPDFSNESLIIASK

SEQ ID NO: 157910 - protein, 227 aa, Unknown
  Bacterial polypetide isolated from the Sargasso Sea
GGLHGVGVSVVNALSETLNLRIHKNGHTYEQDYVHGVPQKPLKKGSKTDRSGTTVTFKPSAKTFTNTTYSFDILSKRLRELSFLNSGLSIKLTDTRSGKEEEFYFEGGISAFVSHLNKVQSPVHESVINFSKTIDDITVDIALQWNESYRENMYCFANTIRQKDGGTHLAGFRGALTRTINTYIDKEIAKADISVSGEDCREGMTAIISVKHPDPKFSSQTKDKLVS

SEQ ID NO: 157911 - protein, 303 aa, Unknown
  Bacterial polypetide isolated from the Sargasso Sea
GVGVSVVNALSESLIAEVHRDGFHYKQEYKIGQPTTEVEKIGKSDKTGTIVSFKPDETVFSHKGFEEEVIKGRLKELAYLNKNLSIKLINEPEETETEYCFPGGLSDFVKYLDGNEDLIHDEVIVVSKEDIEVPVDLALRYSTNYNSNIFSFVNNINTIEGGTHLSGFRSALTRALNSYANKNDLIKTKKNEKFSLSGDDFREGLTVVISVKVQEPQFEGQTKTKLGNGEVKGLVDNVVYDGIQAFLEQNPKVGKRIIEKAAEAARARIAAKKARELVRKKSGLGSTTLPGKLADCSNKDPMQ

SEQ ID NO: 157912 - protein, 102 aa, Unknown
  Bacterial polypetide isolated from the Sargasso Sea
MSKEQNQQYSADSIQALEGMEHVRKRPSMYIGDVGVRGLHHLVYEVVDNSIDEAMAGHCSKISVIINEDDSISVEDDGRGIPVGIHQKEGVSALEVVMTKIW

SEQ ID NO: 157913 - protein, 190 aa, Unknown
  Bacterial polypetide isolated from the Sargasso Sea
KKKCSEIIIDDIFNIIIGVLSIFIKEPQFQGQTKEKLVSTDVSKKIESTVKDRFELWLSFNPKRSEEIIHNSIQLMEERKSKRIEKELSKKSNNKIRLPIKLCDCTSHDNKINELFIVEGDSAGGSAKSARDRKFQAVLPLRGKILNVISATQSKILQNQELHDLSLALGTKIGKDFNINDLRYDKIIIM

SEQ ID NO: 157914 - protein, 161 aa, Unknown
  Bacterial polypetide isolated from the Sargasso Sea
DVDGSHIRTLLLTFFYNYPFNQLIENGHIYLAQPPLFKVTKANKSIYIKDEKALEDYILQMAKTDKRIKKNSSEYKNFIQEQKEKLSIQRFKGLGEMNPEELWETTLNPDNRTMLRVQYTKGTKDKSKEDQKMIEILMGDEVSPRKDFITNNALDVTNLDI

SEQ ID NO: 157915 - protein, 199 aa, Unknown
  Bacterial polypetide isolated from the Sargasso Sea
ILPLRGKILNVATATKDLLVNNQELSDLKLALGFKNNKDFELRYGKIIIMTDADVDGAHIAALLMTFFYLEMPSIIENGRLFLAQPPLYRLSLGNVTEYASDENEKELLISNKFKNASNLEVSRFKGLGEMPPKQLKETTMSKINRSLIKVSLPKRNIVEADERRSIDRLVDTLMGKKADLRFEYLKTNAISVLDEIDI

SEQ ID NO: 157916 - protein, 132 aa, Unknown
  Bacterial polypetide isolated from the Sargasso Sea
MNLKNSYEAKDIEVLEGLEPVRKRPGMYIGGTDDKAIHHLALEILDNSMDEAIAGHADLIKISLLDHNTLQIEDNGRGIPIDDHPKFPGKSALEIIVSTLHAGGKFSNGAYETSGGLHGVGISVVNALSENL

SEQ ID NO: 157917 - protein, 295 aa, Unknown
  Bacterial polypetide isolated from the Sargasso Sea
FKVEVFRDGEVHTMEFERGKTTRKLEVIGKSKSTGTLVTFKPDPEIFTITQDFQFNTLASRLRELAFLNPGVEIVLIDDREENKQETFFYRDGIEQFVRQLGKNKQVVHSKPVIIANKTDDVFVDVVIQYNDSYNDQILCYANSIPNGDGGAHLTGFRTALTRAINQYAKNNNLLKEKDPNISGDDVREGLVAVVSVKLPNPRFSSQTKEKLVNNEIEGVVSKATYDGLMHHFDTNPSVAKKIIDKGLTAARAREAARKARETVRKSAMAGGGLPGKLADCSDRDPANTELYIVE

SEQ ID NO: 157918 - protein, 290 aa, Unknown
  Bacterial polypetide isolated from the Sargasso Sea
LRAKAEIETDSKEKSKIIISEIPYQQNKARLVEKIAQLARDKKVEGMSEIRDESDKEGVRIVIEIRSGQNPEVILNNLYSLTPLESAFGVNNVALVNKTPKLLNLKELLEIFISHRRTVVSRRTEFELKKAKDRGHILEGLAVSLANIDQVIDLIKKSKDPQVAKEKLLAKKWKAGVVSKLIKNAGEITTRPESLSDDFGLSGSSYKLSSVQAQAILDLRLQKLTGLEQDNLVKEYEEILGEIKLLQKILDDPSELKRVIKEELIEIRDLYGDERKTPIEERLDLSTEDL

SEQ ID NO: 157919 - protein, 229 aa, Unknown
  Bacterial polypetide isolated from the Sargasso Sea
MTKDYNASDIEVLSGLEPVQKRPGMYTDTDCPNHLVYEVIDNSVDEAIAGHCKIIQVNLYKDGSIEVRDDGRGMPVDDHPEEKIPAVELILTRLHAGAKFDNKSYKFSGGLHGVGVSVVNALSKNLEVWIKRGGQEYNMSFSNGDRTSELEIVDSVGKANTGTTIRFWPNESYFDSPDIRLDDIKHNLRAKAVLCPGLKIKFKDESSGDKAEWEYQEGASEYLVEMLKT

SEQ ID NO: 157920 - protein, 251 aa, Unknown
  Bacterial polypetide isolated from the Sargasso Sea
MTKIGAGGKFDKDSYKVSGGLHGVGVSVVNALSIDLKASVHKNGKIYVQEYKQGKEQYSVKEVGVTDKKGTQVIFFPDPDIFESLDYQYDILASRMRELSFLNKGLIITLNDERESSKDEDGEVSHNKFYSERGLSEFVEFLDGNREKLIQNVISIEGEKNGIPVEVALIYNNSYAENIHSYVNNINTHEGGTHLSGFRRGLTNTLKKYADKSGMLDKLKFEISGDDFREGLTAIVSVKVQEPQFEGQTKT

SEQ ID NO: 157921 - protein, 220 aa, Unknown
  Bacterial polypetide isolated from the Sargasso Sea
MTELARPVFHGFEQLPLREYAERAYLDYSMYVVLDRALPFIGDGLKPVQRRIIYSMSELGLNAASKPKKSARTVGDVIGKYHPHGDSACYEALVLMAQPFSYRYPLIEGQGNFGSSDDPKSFAAMRYTESKLTPIAEVLLGELGQGTTDWAPNFDGTLQEPTWMPARLPHLLLNGTTGIAVGMATDVPPHNLNEIVSALLHLLDNPDATVRDLCEHVQGP

SEQ ID NO: 157922 - protein, 293 aa, Unknown
  Bacterial polypetide isolated from the Sargasso Sea
VGMATNIPPHNPAEVIAACEAYVQDPEITTEELIEIVPGPDFPTGGLIMGRQGICEAYNTGRGSIIMRAKAEVQTNAKDRESIIIHEIPYQVNKAQLLERIGEMVRDKTIEGISDIRDESDRNGMRVVIEVKRDAAGDVVLNQLYRHTRLQTSFPVNLLAMNAGRPMQMGLKDVISAFCEFRKEVVLRRTTFLLGKARERAHILAGLMVALASIDVIIEMIKKAPDTETARKSLCDTPWPADEVADFIGLINDPGHEVIDGHYTLSETQAKAILELRLQRLTGMERSKLADET

SEQ ID NO: 157923 - protein, 228 aa, Unknown
  Bacterial polypetide isolated from the Sargasso Sea
LSLKKTKNVDFKYEGGILEFVEFLDKDRVKLKNKNENDLFKKPIFVEGKKDNLEVECSLKWNSGYSEDVYSYTNNIYQKDGGTHLLGFRSALTRVINKYANEQNLLKKNKVSISGDDIKEGLTCVLSIKIPDPKFSSQTKDKLVSSEVRNIVETLVNEKLSVWFDQNPAIAKVILAKIVQAALARDVARKARESVRRKGALELTGLPGKLADCQNSKQEGTELFIVEG

SEQ ID NO: 157924 - protein, 141 aa, Unknown
  Bacterial polypetide isolated from the Sargasso Sea
IIMCDADVDGSHISTLILTFFFRYMRELVEGGNVYIATPPLYLVKKGNKKTYAWNDKERDNLAKEFGSGVSIQRYKGLGEMNADQLWDTTMNPETRTLRQISLNFDNSQEAERWFSTLMGDDVPPRRKFIEENAVYAKIDA

SEQ ID NO: 157925 - protein, 153 aa, Unknown
  Bacterial polypetide isolated from the Sargasso Sea
MVKENFTSISLQEEMRRSYLEYAMSVIVGRALPDARDGLKPVQRRIIFAMYELGLTPDKPFRKCARVVGDVLGKYHPHGDQAVYDALVKLVQNFSTKYPTLDGHGNFGSIDNDPPAAMRYTETRLAPIAHKGFLEEIGSETVNFSNNFDGSQK

SEQ ID NO: 157926 - protein, 319 aa, Unknown
  Bacterial polypetide isolated from the Sargasso Sea
EDMSAAEVVFTKLHAGEKFGGDGYKVSGGLHGVGISVVNALSAKVEVEIDRDEKRHYMDFSSGGNLVTKLYETGEAPQSRTGTTVRFWPDSEIFEEINFRAQTLLERFQMMAFLNKSLQITFSDLREDAINKEEVVYKYDGGIKDFVEHVNASKESLFPKVGFFDAEEEEQEVEIAFQWNTGFNTDGLHSFANGINTIEGGMHEEGFRTALTGVMNRYAKKRGLIKDKDDNLQGEDIREGLTAIISVRLSEPQFEGQTKSKLGNVDIRSLVQKTTNEKLSEWLEEHPVEAKIILQKAINAQRARLAAQDARRSARRKSA

SEQ ID NO: 157927 - protein, 315 aa, Unknown
  Bacterial polypetide isolated from the Sargasso Sea
IPPHNLNELTNAIDYLISDPNATVDELMKHLDGPDFPTAGIIYDRNQIRQAYATGRGRIVMHARIALEETTSGRSQIIVTELPYQVNKAALLERIAEQVRAKVIEGITDLRDESDREGMRIVIELGRNASYYSVRNQLLKHSALETAYHVNLVALVTQEEDGPEEIEFVDDEAIFDTEWAPDRLDEFDQAEVTGRPETLSIREAMQAFIDHRREVIRRRSIFDRHKARQRRHILAGLLKAIDNLDEIIDTIRQAESAELAKASLMSDPHQLTDRQAQAVLDLQLRRLAQLESSRISEEYNELQGFINSLNELLAS

SEQ ID NO: 157928 - protein, 238 aa, Unknown
  Bacterial polypetide isolated from the Sargasso Sea
SFNVLQKKMRELAFLNKGIKIILNDLSNKKNKSLEFKYDGGITEFVEFLDESREKLKNKNDNDLFRKPIYLEGNKNSINIECALKWNASYSEDVFPYTNNIYQKDGGTHLLGFRSALTRVINKYATEQNLLKKNKVNLSGDDVKEGLTCVLSIKVPDPKFSSQTKDKLVSSEVRNIVETIVNEKLSIWFDQNPSISKIILTKIIQAAVARDVARKARENVRRKGALELTGLPGKLADC

SEQ ID NO: 157929 - protein, 291 aa, Unknown
  Bacterial polypetide isolated from the Sargasso Sea
YLVDDINKDTVAFKSNYDETEKEPEILPAQYPNLLVNGAGGIAVGMATSIPPHNLGEIIDGTLALIENREIKIPELMKLIPGPDFPTGGLIIGKDIIKQGYKTGRGSFKIRGEISTEQLKNGKERLVVTSVPYQVNKSVLNERIAELVREKKIEGISDIRDESNREGIRVVIDLRRNVEPETIKRQLYKYTSIESSFGFNTLAIVDKKPKTCNLKDFLESFLIFREKIIIKRTKYDLKKAEDRAHILIGLSVSIDNLDKIIKIIRGSKTPEEAKEKLLKNTWQVNKSSKLI

SEQ ID NO: 157930 - protein, 288 aa, Unknown
  Bacterial polypetide isolated from the Sargasso Sea
RTEIVEFYSDLTDEDLIPEEDLIVTLSKEGYAKTQPLDTYQAQNRGGTGKRAASLKDEDFVSKLFVANTHDTLLCFSSYGKVYWIKVYRLPRGGRNAKGRPIVNLLPLEKDERIQAVLPVKEFNDDQFIFMATETGSVKKTKLSAYSRPMKSGIKAIKLRDGDRVVNAEITNGTKEIMLFSNSGKSIRFKESDARPMGRVSQGVRGMRIDKDQKIISLVVLEEGNILVATENGYGKQTLKDEFSIQKRGGKGVIAIQTSNRNGSLIGAKQVSTGDEVMFISTSGNLIR

SEQ ID NO: 157931 - protein, 251 aa, Unknown
  Bacterial polypetide isolated from the Sargasso Sea
DGDNPAAQRYTEARLSNYSLQMLVGLEEDSVDYKETYDNSDREPIVLPASFPQLLANGSSGIAVGMATSVPPHNLSELLDAAKLVIDNPKCSIEELTRIILGPDFPTGGLILDNQDKINEIYQSGRGSLRLRCRSEVENLSHGNWQVIINEIPFQVQKGKLIEKIADLISSKRLPDVQNIRDESSDKVRIVIEPRTRNVDKDRMMRTLFKNTDLETKIPINLNVLVDGISPKTCDLKELLQVFLEHQRQIL

SEQ ID NO: 157932 - protein, 320 aa, Unknown
  Bacterial polypetide isolated from the Sargasso Sea
LPAHFPNLLVNGASGIAVGMATNIAPHNLGEVIDATLHMIENPKAELEDLNKFIFGPDFPTGGQIIGKKGILEAFQTGKGGVVLRSKTSIENFKKDREAIIIHEIPYQVNKSKLIEKIAECVKNNIIEGISDIRDESDRNGVRVVVELKKDVDANIILNKLYKNTLLQTTFNSNTLALNKGKPEQMNLKEMLAAFIEFREEVITKRTIFDLNKARDKAHVLIGLVVANVNIDEIIEIIKSSKDSKDARFKLINKKWQLSEQNINFIKLVDEENIQLNKNIFTFTETQAKAILELRLHRLTSIERDNIQKDLEQIILQIKG

SEQ ID NO: 157933 - protein, 286 aa, Unknown
  Bacterial polypetide isolated from the Sargasso Sea
KFNSISLKKYAEESYLNYAMYVILDRALPNIGDGLKPVQRRILYAMSELGLDASSKYKKSARTVGDVIGKFHPHGDSAAYEAMVLMAQNFSFKYPLVDGQGNWGSQDDPKSFAAMRYTESKLTSFANLLISELKSGTVDWQPNFDGSLLEPVIFPSKIPMILLNGTSGIAVGMATDIPSHNINEVIDATISILEKPKSQLKDILKIIKGPDFSNESSIIASKEELEEMYLSGRGGFKIQANWEQEKNQIIINALPYQASGSKILEQIAEQMLNKKLPMVVDLADEG

SEQ ID NO: 157934 - protein, 45 aa, Unknown
  Bacterial polypetide isolated from the Sargasso Sea
MSKNSQQNHEQSYGAESIKVLKGLDAVRKRPGMYIGDTDDGSGLH

SEQ ID NO: 157935 - protein, 263 aa, Unknown
  Bacterial polypetide isolated from the Sargasso Sea
GNKYFIEFKNGDAVKPLKVIGKSKNNGTEINFLPSKEIFSSIKFSFSIIEKRMRELAFLNKGIKISINDQTQKKNKISEFKFDGGILQFVDFLDNKRDSLKNKNSNNLFKKPIYIDGKKDNIQTECSLQWNAGYSEDVYSYTNNIYQKDGGTHLLGFRSALTRVINKYANNYNLIKKNKFSISGDDIKEGLTCVLSIKIPDPKFSSQTKDKLVSSEVRNIVENIISDKLSLWFDQNPSISKIILTKIAQAALARDVARKARES

SEQ ID NO: 157936 - protein, 272 aa, Unknown
  Bacterial polypetide isolated from the Sargasso Sea
IDEAMAGYCSAILIEINKDSSLTVEDNGRGIPVGIHKKEGVSALEVVMTKIGAGGKFDKDSYKVSGGLHGVGVSCVNALSQLLVAKVFRDGKEYEQSYSKGKPSEPVKEVGKSDKTGTRVTFTPDKEIFKEVTEFDYEILSNRMRELSFLNKGLTISIKDNRAIDKDDNPISETFHSKEGLSEFIKYLDKGRVPIISSIIKMEGEKNGIPVEVAMVYNSSFSENLHSYVNNIDTHEGGTHLTGFRRGLTNTLKKYADSSGLTDKLKFDISSD

SEQ ID NO: 157937 - protein, 231 aa, Unknown
  Bacterial polypetide isolated from the Sargasso Sea
MGKILNENINDILSQKYLAYAISTIVSRSLPDVRDGLKPVHRRIIYSMYQLKLFKNSSYKKCARIVGDVMGKFHPHGDQAIYDSLVRMAQDFSTRITLVDGQGNFGNIDGDNPAAMRYTEARLQDYTNYFFDGIEENSVDFKDNYDGQNLEPVVLPSQLPNILINGATGIAVGMATNIPPHNIVELIDVIKLIIKKDKTSLTEILKIINGPDLPTGGEIILDNNEKKQIYK

SEQ ID NO: 157938 - protein, 146 aa, Unknown
  Bacterial polypetide isolated from the Sargasso Sea
MENEELQNENISLTPFSKAISERYLAYALSTITSRSLPDVRDGLKPVHRRVLFAMMQLKLNHNVSFKKSARVVGDVMGKFHPHGDAAIYDSMVRMAQDFALRYPLVDGQGNFGNIDGDNAAAMRYTEARMSKAAELLLSDIDKDTV

SEQ ID NO: 157939 - protein, 264 aa, Unknown
  Bacterial polypetide isolated from the Sargasso Sea
LMAKKSTYKAKDIEVLEGLEPVRKRPGMYIGSTNQDGLHHLVNEILDNSIDEVLAGHASTISFKYKKNGNITIKDDGRGIPIDFHPKYKNKRALEVVLTTLHAGGKFNSNAYKTSGGLHGVGISVVNALSSFLKVDVFNNGKVYRQEYSKGKVKSKVKIEKCSKNMKGTEITFLPDETIFDVTTYDPKKLYNFIKMKSVLVSGTKITLEIDKELINDKTPNKKDFYYKNGIEDFFKIEYSNKNKLFEKNFSLKNSLNQNENFEV

SEQ ID NO: 157940 - protein, 278 aa, Unknown
  Bacterial polypetide isolated from the Sargasso Sea
MTDLFTQNKTRKLKKDSYNSNDIIVLEGLEPVRKRPGMYIGGTDEKAYHHLIIEVLDNCIDEAIEGHANLIEIELLSLNTIKISDNGRGIPIDNHPKYPNKSALEVILTTLHSGGKFNDKNYTTSGGLHGVGISVVNALSSELIVEISRNNRVYQQKYIRGLPTDKLLEISKVSKTSGTSIQFTPDNNIFDNCSFNPNTIINMAKIKAYLTKGIEIIWKCNKSFVKDYNIKEKLIFKFPDGIIDFLHNSTSGNSFISSENFFGSIPFKSNRIDWVMNW

SEQ ID NO: 157941 - protein, 329 aa, Unknown
  Bacterial polypetide isolated from the Sargasso Sea
FLSGDTEGVDWAVVWLPEGGELLQESYVNLIPTAQGGTHVNGFRSGLLDALREFCEFRNLLPRGIKLTPDDLWERCSYVLSAKLADPQFAGQTKERLSSREASAFISGVVKDAFALWLNENTADAERLAELAISSAQSRLRKSKKVARKKITQGPALPGKLADCTGQDGERTELFLVEGDSAGGSAKQARDREFQAIMPLRGKILNTWEVESGEILASQEVHDIAVALGIDPAADNLDGLRYGKICILADADSDGLHIATLLCALFVRHFRKLVADGHVYVAMPPLYRIDVGKDVYYALDEGEKQGVLERIKAENKRGKVNVQRFKGFG

SEQ ID NO: 157942 - protein, 242 aa, Unknown
  Bacterial polypetide isolated from the Sargasso Sea
MPDLFEGSISDQNYNAQQIEVLEGLDPVRHRPGMYIGGTDDRAMHHLVAEILDNSMDEAVAGHANWIEINLIDGNTVKISDNGRGIPVDPHPKFPNKSALEVILTTLHAGGKFSDKVYETSGGLHGVGASVVNALSIKLDVEIARNRKLYKQSFSKGKPVTPMTSDGSAHNRRGTSIKFSPDPDIFGTECHFKPSILYKMAKSKAYLFAGVEIRWKCSPNLNLRTTVLIPENETICYPDGLA

SEQ ID NO: 157943 - protein, 256 aa, Unknown
  Bacterial polypetide isolated from the Sargasso Sea
IAVANIDKIIELIRGAPDPVTAREGLMKNPWPAGEVVSLIELIDEPGRGVVEGSYQLSEVQARAILDLRLQRLTGLEREKIAGELEDLASQIIEYLEILASPEKVRAILRGELLEVKEKFANDRRTTIDDSEFEADIEDLIQREDMVVTVTHGGYIKRVPVSTYRSQRRGGKGRSGMSTRDEDFVSNVYVVNTHTPVLFFSSRGMVYKLKVYKVPLGTPQARGKALVNLLPLKEGETITTLMPLPDDEAACEELDV

SEQ ID NO: 157944 - protein, 281 aa, Unknown
  Bacterial polypetide isolated from the Sargasso Sea
MTDLFEDSNQSTDKAYSAKDIEVLEGLEPVRRRPGMYIGGTDDAALHHLVAEILDNSMDEAVAGHADWIELELKPDNTVLVRDNGRGIPTDPHPKFPDKSALEVILTTLHSGGKFSGKAYETSGGLHGVGMSVVNALTEKFRVEVCRDRKMVFQEYSRGVPQMPLQDGGAINNRRGTTVIFKPDPEIFGARAKLKPGTIFRMARSKAYLYKGVEIRWSVDPSLLTSDDPTPQQEVLKFPNGILDYLEMTLEGRELVTERPFAGEAKFSDSPGRVEWAIGWP

SEQ ID NO: 157945 - protein, 257 aa, Unknown
  Bacterial polypetide isolated from the Sargasso Sea
MPKKKQSDTKKYDSSNIQVLKGLEAVKKRPGMYIGDTDDGSGLHHMIFEVVDNCIDEAMAGHCSKINIIINKDESITVKDDGRGIPVDTHRGEGVPAAELIMTTLHSGGKFDDNSYKVSGGLHGVGVSVVNALSKELTLTICRDGGMYQQKYSEGLAKTKLKKIKSSKDTGTEITFSASDKIFTSINFEADRVNKRVQELSFLNAGVSIEVTDARSGKSKKFKNEGGVSSYVDYLRGRKPALCQTIQCEGGQDGVTV

SEQ ID NO: 157946 - protein, 216 aa, Unknown
  Bacterial polypetide isolated from the Sargasso Sea
PTKIPNMLVNGSAGIAVGMATNMAPHNLNESLSACLAYIDNPEISVQELMEFIPGPDFPTGAIINGKAGIVSAYETGRGRVKIRAKTEFEDEEKDKAKIIITEMPYQVVKARLIEKIAELSRDKKLEGIRDIRDESDKDGIRVVIELKSGQIPDVVLNNLYSQTQMQTVFGINNVALIDGEPKLLNLKSILSVFFNHRKEVVSRRTFFDLRKAKER

SEQ ID NO: 157947 - protein, 294 aa, Unknown
  Bacterial polypetide isolated from the Sargasso Sea
LIPTAQGGSHLNGFKSGLLEAMKEFCEIRSLLPKGLKINAEDVIANATFVISSKLQNPQFAGQTKERLDSKDHMAFVSSATKDILSIWLNTHTEEGEKIAELAISAAQSRAKASSTVQRKKTFKGPALPGKLSDCNSEDLNETELFLVEGDSAGGSAKQARERSFQAIMPLRGKILNTWDLESQEIIKSQEIKNLSTAIGVLPGNSDISGLRYGKICILADADSDGLHIATLLCALFLRHYKSLVQDGRIYIAMPPLYRVDCGKEVLYALDEIQKDKVVDDFKKKKGKPKINIQ

SEQ ID NO: 157948 - protein, 305 aa, Unknown
  Bacterial polypetide isolated from the Sargasso Sea
GSITMRGVANIEQIKSIGRAEKDAVIITELPFQTNKAALIERIADLVNEKKLEGISDIRDESDRDGMRIVIELKRDAYPQVVLNNLFKLTPLQNNFSANILALVKGEPTTLSLRKMLDVFLDFRVETIRRRTTFLLKKAEERDHIVKGLLLALDAMDQIINLIRSAKDSISAREKLQNDHKLSSIQADAILQMQLRRLTALEADKIKGEHNELTRKINLYQQILNSKERIFEIILEELHKIDERFSSARKTEILDLGGGLDDIDLIANDRSVVLLTEAGYLKRMPVNDFESTSRGSRGKAGTKTK

SEQ ID NO: 157949 - protein, 269 aa, Unknown
  Bacterial polypetide isolated from the Sargasso Sea
RREVVTARTVYELRKARERGHILEGQAVALSNIDPVIAVIKASPTPAEAKDALISTAWESSAVEAMVERAGADACRPEGLDPQFGLRDGKYFLSPEQAQAILDLRLHRLTGLEHEKLLSEYQEILTQIGELIRILTNPVRLMEVIREELEGVKRDFGDARRTEILESRLDLTLADLITEEERVVTISHGGYAKSQPLAAYQAQRRGGRGKAATGVKEEDYVEHLLVANSHTTLLLFSSKGKVYWLKTYEIPEASRTSRGRPLVNLLPLD

SEQ ID NO: 157950 - protein, 65 aa, Unknown
  Bacterial polypetide isolated from the Sargasso Sea
RDGGTHLAGFRGALTRSIVNYINSKSKTNINVSGDDAREGLTCVISVKLPDPKFSSQTKDKLVSS

SEQ ID NO: 157951 - protein, 113 aa, Unknown
  Bacterial polypetide isolated from the Sargasso Sea
MPKPVKKSPKKPPKKSKNDASYDSSNITVLKGLEAVKKRPGMYIGDTDDGTGLHHMIYEVLDNSIDEALAGYCENVTLTVHDDSKVTISDDGRGIPVDIHKDEGISAAEVIMT

SEQ ID NO: 157952 - protein, 245 aa, Unknown
  Bacterial polypetide isolated from the Sargasso Sea
MRKKSKKNKSIKKKSSSKKTIKKSNSSYTAKDIEVLEGLEPVRKRPGMYIGGTDVMAMHHLVSEVLDNSMDEVVAGFANKVEITLVSLDTIEISDNGRGIPVDKHPKFKIPAAEVIMTTLHSGGKFSKNNYKTSGGLHGVGISVVNALSKKLTLEIARDKKYFVQTYSQGSPKNKLKASAKGPLKKGTKIVFSPDPEIFGNEVEFDASIIYNMAKAKAYLIPDVEIHWSCSKASSKKNIPLSDKL

SEQ ID NO: 157953 - protein, 295 aa, Unknown
  Bacterial polypetide isolated from the Sargasso Sea
GKIHRQDYKIGDPQNKLKVTGKAKKTGTRVCFFPDRSIFKVTNFEYDIIAERLRELAYLNSGLEIVLQDKRVDGGETGSFKFKGGLSDFVKYLDEQNNPLHNKVITVSNDSGEVPVDVALRYSNSYNDNILTFVNNINTIEGGTHLSGFRSALTRAMNNHASKNNLIKAKKNEKISLTGEDFKEGLTAILSIKVAEPQFEGQTKTKLGNGDVKGVVDKVVYEGILDFLEQNPSIGRKVIEKALLAARSRNAAKKARELIRRKSALGGSSLPGKLADCSNRDPSFCELYLVEGDSA

SEQ ID NO: 157954 - protein, 268 aa, Unknown
  Bacterial polypetide isolated from the Sargasso Sea
TIVSRSLPDVRDGLKPVHRRIIYSMYQLKLFKSSSYKKCARIVGDVMGKFHPHGDQAIYDSLVRMAQDFSTRITLVDGQGNFGNIDGDNPAAMRYTEARLQDYTNYFFDGIEENSVDFKDNYDGQNLEPVVLPSQLPNILINGAMGIAVGMATNIPPHNIVELIDALKLIIKKDKASLTEILKIINGPDLPTGGEIILDSNEKKQIYKNGKGSFNINAKYQIEELKNGLYQIIITEIPYQVNKVKIIEQLANNINNKKLPLDDVVDES

SEQ ID NO: 157955 - protein, 288 aa, Unknown
  Bacterial polypetide isolated from the Sargasso Sea
VGMATNVPPHNLGEVVDAAVALIDQPDLDIAALMEFIPGPDFPTAGIINGRAGIVSAYKTGRGRISVRAKTDIEVNEKTKRASIIVHELPYQVNKARLLEKMGELVRDKKVEGITGLRDESDKSGMRMVIEVRRGDQPEVVLNNLYRHTQLQTVFGINMVALDQTQPKLMNLKQLLELFLDHRRDVVTRRSIFELRKARDRAHVLEGLGLALANIDEVIALIKAAASPQEAKAGLLARGWPCDEVAELIAKAADATRPLDLAPEYGLRDGQYFLSPVQAQAILDLRLH

SEQ ID NO: 157956 - protein, 81 aa, Unknown
  Bacterial polypetide isolated from the Sargasso Sea
MSNPEEPNNLENPIISITDEMKKSYLDYAMSVIVSRALPDVRDGLKPVHRRILYAMIEGNYDWSKPHRKSARIVGDVMGNY

SEQ ID NO: 157957 - protein, 84 aa, Unknown
  Bacterial polypetide isolated from the Sargasso Sea
MNSSSYSSSSIKVLKGLEAVKKRPGMYIGDTDDGSGLHHMIYEVLDNSIDEALAGFCDDISVFLNLRRNYFCGRQWKRYTYRYT

SEQ ID NO: 157958 - protein, 309 aa, Unknown
  Bacterial polypetide isolated from the Sargasso Sea
VGVSVVNALSEKLTLKIFRDKKEYFVEFKDGKALSPLKAKGKTNKTGTLINFLPSREVFSDTKFSSTILQKRMRELAFLNRGLCIILVDKTGKKEKEYKNKYEGGIQEFVEFLDKNKTSLVNKNDLSLFKKPIYISGTKDNVEVECSLKWNAGYSEEMLPFANNIHQKDGGTHLLGFRSALTRVINKYAVDGNLLKKNKITLTGDDTREGLTGVLSIKIPDPKFSSQTKDKLVSSEVRFIVESIVNDKLSTWFDQNPGIKKVVLLKIVQAAVARDVARKAREGVRRKGSLELSGLPGKLADCQIGKAEG

SEQ ID NO: 157959 - protein, 323 aa, Unknown
  Bacterial polypetide isolated from the Sargasso Sea
SDIRDESDRDGMRIVIELKRDAYPQVVLNNLFKLTPLQNNFSANILALVNGEPTTLSLRKMLDVFLDFRVETIKRRTGYLLKKAEERDHIIKGLLLALDDMDEIINLIRSAKDTNSARENLQKNHDLSAIQADAILQMQLRRLTALEADKIKAEHDELTKKITEFKNILKDKEKINEIILGELTIIDERFSSPRKTEILNLGGGLDDIDLIANERSVVLLTSNGYLKRMPVSEFESTSRGSRGKAGTKTQEDDEVKLFISCNDHDTLLLFSDRGVAYALPAYRVPMSSRTAKGTPSVQLLPIPREEQITSLVSVESFDNEYYL

SEQ ID NO: 157960 - protein, 48 aa, Unknown
  Bacterial polypetide isolated from the Sargasso Sea
MPKTKKSTNTKKYDSSNIKVLKGLDAVRKRPGMYIGDTDDGTGLHHMV

SEQ ID NO: 157961 - protein, 226 aa, Unknown
  Bacterial polypetide isolated from the Sargasso Sea
MRELAFLNKGLKISVNDLTLKKEKSIIYKFDGGILEFVNFLDEKREKLKNKNGNELFKKPIFIEQSKNNMEVECALQWNSMYSEDVYPYTNNIFQKDGGTHLLGFRSALTRVVNKYANESNLLKKSKLSISGDDVKEGLTCVLSIKIPDPKFSSQTKDKLVSSEVRNIVETIISEKLSLWFDQNPSVVKVILTKIVQAAQARDVARKARENVRRKGALELTGLPGK

SEQ ID NO: 157962 - protein, 65 aa, Unknown
  Bacterial polypetide isolated from the Sargasso Sea
MTDDYSAYDSSSIKVLKGLDAVRKRPGMYIGDTDDGTGLHHMVQELVDNAIDEALEGYCNVIRVV

SEQ ID NO: 157963 - protein, 234 aa, Unknown
  Bacterial polypetide isolated from the Sargasso Sea
MAREYNAESIEVLSGLDPVKKRPGMYTETSRPNHLALEVIDNSIDEALAGYATTIDVQLNKDGSLSVEDDGRGMPVGVHPDEGIPAVELIFTRLHAGAKFSDEDYKFSGGLHGVGVSVVNALSLNLSAEIKRGGHKYLLEFKNSEKKKELAKLDKVGKKNTGTKVTFLPDPQYFDNAKFSVSQLMAALKAKAVLSPGLKISFKDKESGKSESWCFVDGLAAYLVTSNKGGDLIP

SEQ ID NO: 157964 - protein, 261 aa, Unknown
  Bacterial polypetide isolated from the Sargasso Sea
NGETKTPLKVTGKSKNTGTKINFLPSKDIFSSTKFSFSIIQKRMRELAFLNKGIKIILNDLTQKKIKTQEFKFEGGINEFVEFLDEKREKLKNKNDNDLFRKPIYIEGIKSNIDVQCSLKWNAGYNEDVYPYTNNIYQKDGGTHLLGFRSALTRVVNKYASEQNLLKKSKVLLSGDDVKEGLTCVLSVKIPDPKFSSQTKDKLVSSEVRNIVEGIVNEKLSIWFDQNPSVSKIILTKIIQAALARDVAKRARENVRRKGAL

SEQ ID NO: 157965 - protein, 291 aa, Unknown
  Bacterial polypetide isolated from the Sargasso Sea
AKKPAAKKPAAKKPAAKKPAAKKPAAKKPAAKKPAAKKPAAKKSKTATATKKKPTIKSDTLNGSIAVEDEISKSFLDYAMSVIVSRALPDVKDGLKPVQRRILYSMYETGIRPTGPFRKCSKVVGDVMGNYHPHGNDAIYGTLVRLGQNFSTRYPLIEPQGNFGTPDDPPAAMRYTESRMSSLSSQLLDGIDEETVDFEPNYSGETSEPKVLPGRFPNLLINGAEGIAVAMATNMPPYNLKEITEAVKFTLKTKDPKPRDYLKIIKGPDFPTGGLIVDTPTIKEAILKGRG

SEQ ID NO: 157966 - protein, 70 aa, Unknown
  Bacterial polypetide isolated from the Sargasso Sea
MSSSYLSYAMSVIVSRALPDVRDGLKPVHRRILYAMYKGGYDWSKQFRKSARIVGDVIGKYHPHGDQSVY

SEQ ID NO: 157967 - protein, 320 aa, Unknown
  Bacterial polypetide isolated from the Sargasso Sea
SVVNALSEKLKLEIDRDGKKHFIEFRDGEAVAPLKVNGKSKYTGTQITFLPSKKIFSSIKFSSNILIKRMRELAFLNKGIKIIFSDASQKKVKSLEFNYEGGVLEFVNFLDEKREKLQNKNGNDLFKKPIYIEGKKNNIELECSLKWNASYSEDIFPYTNNIYQKDGGTHLLGFRSALTRVINKYANENNLLKKNKLAISGDDIKEGLTCVLSTKIPDPKFSSQTKDKLVSSEVRMIVETLINEKLSIWFDQNPAIAKIILAKIIQAALARDVARKARENVRRKGALEISGLPGKLADCQIGKQEGTELFICEGDSAGGS

SEQ ID NO: 157968 - protein, 302 aa, Unknown
  Bacterial polypetide isolated from the Sargasso Sea
DEAVAGYANKINVEILENNIISISDNGRGIPVDKHPKFPSKSALEVILTTLHAGGKFNNKIYQTSGGLHGVGISVVNALSEFLNVEVYRDKNIYSQDFKKGKPQGKLLKLDQKTNKRGTKVTFKPDESIFDKNIIFNIKRLYEFCKSKAYLFAGTEIKWVCDNKLALDNNIPNSEVFNFSNGLEDYLNNEIEPSSFIGKECFSGKKEKDDNNNSVEWAVNWTINSDGFLKSFCNTVPTPEGGTHEIGLKNGLLKALKSHSERIGNKRGSSINSEDLSKSMVCVISLFIPDPKFQGQTKDKLS

SEQ ID NO: 157969 - protein, 42 aa, Unknown
  Bacterial polypetide isolated from the Sargasso Sea
MPKNLEKTKNSSYKADSIKVLKGLDAVRKRPGMYIGDTDDGT

SEQ ID NO: 157970 - protein, 137 aa, Unknown
  Bacterial polypetide isolated from the Sargasso Sea
MCDADIDGSHISTLILTFFFRYMKELVENGHVYIATPPLYLVKKGAKKEYAWNNDQRDSIMMKFGDGCKVQRYKGLGEMNAAQLWETTMNPEFRTLRRVDIENGVEADRIFSMLMGDDVPPRREFIENNAIYANIDA

SEQ ID NO: 157971 - protein, 258 aa, Unknown
  Bacterial polypetide isolated from the Sargasso Sea
GVIDDPKSFAAMRYTECRLSPYAKSLLEELGQGTVDWVSNFDGTLLEPSVLPSRLPNLLLNGATGIAVGMATDIPPHNLNEVVKACIKILDEPKVSVEELYAIVPGPDFPTKAEIISSEEDLKEIYRSGRGSIKMRSTYEIESGEIIITALPHQTSSSKILEQIAIQMDSKKLPMIVDLRDESDEENPTRLVLVPKSNRVDKDAVMNHLFATTDLQKNYRVNMNLIGLNGKPQTRDIKSVLKEWLTFRTQTVTRRLQH

SEQ ID NO: 157972 - protein, 243 aa, Unknown
  Bacterial polypetide isolated from the Sargasso Sea
GSAKQGRNRENQAVLPLRGKILNTFTDLNGSKKNGNSNDLRTKSLSKMISSNEIVTLINALGLDPKNEDIDLKDLRYGKIIIMTDADVDGSHIRALLLTFFNNKPFDKLIEFGHVYLAQPPLFKINKGTKSIYIKDENELESYLIKNSKDIKKYKKNSKEFNNILQIEKSKLNIQRFKGLGEMNPDELWNTTLNPETRNLLQVQYSKNSKKDQDLIQTLMGNDVSSRKDFIVENAINVSNLDI

SEQ ID NO: 157973 - protein, 159 aa, Unknown
  Bacterial polypetide isolated from the Sargasso Sea
EFDTEKLRYHRIIFMMDADVDGSHIRTLLLTFFNRHMRDLISKGHVYMALPPLYKIKKGGKTYYAKDEEEKDEILKNIRKDDNENSRSPEIQRYKGLGEMNPEQLWETTFDPTNRRLVQITIDDVGETDDIFETLMGDEVKPRREFIDENALRAENVDV

SEQ ID NO: 157974 - protein, 265 aa, Unknown
  Bacterial polypetide isolated from the Sargasso Sea
MNSIKFLKKTKKSGTKINFLPSKDIFSKIKFSATILEKKMRELAFLNKGLKISLLDETHSKTKTYEHKYDGGVEEFVKFLDQKKSLLINKNEKAVFKKPLYIKGEKNQVMVECSFQWNAGFSEEVMAFTNNIHQRDGGTHLLGFRSGLTRIINKYASEKNLNKKNKVNIGGEDIKEGLTAILSVKMPDPKFSSQTKDKLVSSEIRNIVESIVSDKVTVWFDQNPSVVRVILEKVLQAAIARDLARKARDSVRRKGSLELSGLPGN

SEQ ID NO: 157975 - protein, 268 aa, Unknown
  Bacterial polypetide isolated from the Sargasso Sea
FNNGEAKAPLKLIGKSKQTGTQITFLPSKEVFSSIKFNGNILIKRMRELAFLNKGIKIIFTDLSLKKEKTSEFKFDGGVLEFVDFLDREREKLQNKNGNDLFKKPIYIEGKKNNIEIECSLKWNAGYGEDIFPYTNNIYQKDGGTHLLGFRSALTRVINKYASEHNLLKKNKLAISGDDIKEGLTCVLSTKIPDPKFSSQTKDKLVSSEVRMIVETVINEKLSIWFDQNPSIAKVILAKVIQAAMARDVARKARENVRRKGALELSGL

SEQ ID NO: 157976 - protein, 253 aa, Unknown
  Bacterial polypetide isolated from the Sargasso Sea
MGKYHPHGDGAIYEAMVRMGQQFSMSVPFVDPKGNFGSLDDPPAAYRYTEARLTEAAMAMVADLDEDTVDFSANFDGEREEPTCLPAGLPNLLINGASGIAVGMATNMPPHNLVEVGKAIEHVLTKRRPKPTVEDLMKFVKGPDFPTGGIVVDDGSLLEAYESGRGTIRVRARAEIENITARRQGIVVTELPFAVGPERVQAKIRELINNGKLEGIAVVTDLSDRNHGLRLVIECKAGVGPHSLLEKLYRLTP

SEQ ID NO: 157977 - protein, 287 aa, Unknown
  Bacterial polypetide isolated from the Sargasso Sea
GKKHFVEFINGETKTPLKITGKSKNTGTRINFLPSKDIFSSIKFSFSIIQKRMRELAFLNKGIKIKINDLTQKKIKSYEFKFEGGINEFVEFLDEKREKLKNKNDKDLFRKPIYIEGIKSDIDVQCSLKWNAGYNEDVYPYTNNIYQKDGGTHLLGFRSALTRVVNKYASEQNLLKKSKVLLSGDDVKEGLTCVLSVKIPDPKFSSQTKDKLVSSEVRNIVEGIVSEKLSIWFDQNPSVSKIILTKIIQAAVARDVAKKARENVRRKGALELTGLPGKLADCQNSKT

SEQ ID NO: 157978 - protein, 304 aa, Unknown
  Bacterial polypetide isolated from the Sargasso Sea
QAIYDSLVRMAQDFSTRIQLIDGQGNFGNIDGDNPAAMRYTEARLQDYTNYFFDGIEENSVDFKENYDGQNLEPVVLPSQVPNILINGAMGIAVGMATNIPPHNIVELIDALKLIIKKDKASLTEILKIINGPDLPTGGEIILDSNEKKQIYKNGKGSFNINAKYHIEELKNGLYQIIISEIPYQVNKVKIIEQLANNINNKKLPLDDVVDESDENIRIVLKPKTRNIDAEKLISLCFKLTDLSIKYSCNFNVLIDGIEPKQIGIIEILSNFLEHRKITIKRKSKFNIEKIKKRLEILKGYQIF

SEQ ID NO: 157979 - protein, 271 aa, Unknown
  Bacterial polypetide isolated from the Sargasso Sea
HRPGMYIGGVDNNALHHLAIEIIDNSMDEVVAKHATIINVQLSDDNTISISDNGRGIPIDSHPKFKNKSALEIIMTTLHAGGKFSNKNYITSGGLHGVGASVVNALSSFLKVQVTRKGIIYEQQFSKGFPTTKLNKIGSTKKSNGTSISFKPDISIFGENNLFNPDKLFQILEYKAYLFGGVQINWECESFLIKENSKTPNFKNICYKNGIIDYIQYKTLTIPMFSSSTFNGNVKIEDENVEWVIAWLTKSETSFIETYCNTVPTPLGGSH

SEQ ID NO: 157980 - protein, 266 aa, Unknown
  Bacterial polypetide isolated from the Sargasso Sea
FVEFIDGEAKAPLKVTGKSKQNGTQITFLPSTKIFSSVKFSANILIKRMRELAFLNKGIKIIFTDASLKKEKTIEFKFDGGVLEFVEFLNEKKEKLQNKNGNDLFKKPISIEGKKNNIEIECSLKWNASYSEDIFPYTNNIYQKDGGTHLLGFRSALTRVINKYANEHNLLKKNKLAISGDDIKEGLTCVLSTKIPDPKFSSQTKDKLVSSEVRMIVETVINEKLSIWFDQNPSIAKVILAKVIQAAMARDVARKARENVRRKGAL

SEQ ID NO: 157981 - protein, 305 aa, Unknown
  Bacterial polypetide isolated from the Sargasso Sea
QTNKAALIERIADLVNEKKLEGISDIRDESDRDGMRIVIELKRDAYPQVVLNNLFKLTPLQNNFSANILALVKGEPTTLSLRKMLDVFLDFRVETIRRRTTFLLKKAEERDHIVKGLLLALDAMDEIINLIRSAKDSISAREKLQNDHKLSSIQADAILQMQLRRLTALEADKIKGEHNELTRKINLYQQILNSKERILEIILEELHKIDERFSSARKTEILNLGGGLDDIDLIANDRSVVLLTEAGYLKRMPVNDFESTSRGSRGKAGTKTKEDDDVKLFISCNDHDNLVLFSDRGVAYALPSI

SEQ ID NO: 157982 - protein, 252 aa, Unknown
  Bacterial polypetide isolated from the Sargasso Sea
NELGNTDLSGTKITFRPSKKYFSLTSFNSDILKKRFKELAFLNSGIEINFVDENKSISQTFKYEGGIIEYVKELTKKKTPIQEKIINISSSKKNISVDLALMWSNNYQEEVLCFTNNIPQKDGGTHLSGFKTSLTRTLNSIILKNNPKDKIDITGEDTREGITAIISVKMPDPKFSSQTKDKLVSSEVKGIVETLVSSKLKEYLDENPKDLKSITAKIYQAAKAREEARKAKELIRRKDPLSIGNLPGKLAD

SEQ ID NO: 157983 - protein, 171 aa, Unknown
  Bacterial polypetide isolated from the Sargasso Sea
MENIKIINRNFSDEISERYLAYALSTITSRSLPDVRDGLKPVHRRLLYAMRQLKLNSNSNFKKSARVVGDVMGKFHPHGDGAIYDSMVRMAQEFSLKYPLVDGQGNFGNIDGDNAAAMRYTEAKLTEFAEFLLNDIDFDTVDFKETYDGEDKEPTVLPSAIPNMLANGSQG

SEQ ID NO: 157984 - protein, 233 aa, Unknown
  Bacterial polypetide isolated from the Sargasso Sea
MSKKKSDSKKYDSSNIQVLKGLEAVKKRPGMYIGDTDDGSGLHHMIFEVVDNCIDEAMAGHCSKINIIINKDESITVKDDGRGIPVDTHKGEGVPAAELIMTTLHSGGKFDDNSYKVSGGLHGVGVSVVNALSKELTLTICRDGGMYQQKYSEGVAKTKLKKIKASKETGTEITFSASDKIFTSINFEADRINKRVQELSFLNAGVSIEVKDARTGKSKKFKNVGGVSSYVDY

SEQ ID NO: 157985 - protein, 313 aa, Unknown
  Bacterial polypetide isolated from the Sargasso Sea
KKNERIKWILDEGLSDYLDEFSGCNEKLLDETIILSKTSDDQALDVAVNWTEETSNNLLKETYVNLIPTALGGSHLNGFKSGLLEAIKEFCDYRNLIPKGIKINSDDILANCIFVISSKLKNPQFAGQTKERLDSKDHMSFVSSSTKDSLSIWLNQHTEEGEKIADLAIAAAQKRIKSSTKVDRKKTFKGPALPGKLSDCNCDNIEESELFLVEGDSAGGSAKQARDRRFQAIMPLRGKILNTWDLESADIIKSQEIKDLATAIGSLPGDTDISNLRYGKICILADADSDGLHIATLLCALFLRHYKNLVPQE

SEQ ID NO: 157986 - protein, 307 aa, Unknown
  Bacterial polypetide isolated from the Sargasso Sea
TKKPAAKKTTTKKPAAKKTTTKKPAAKKTTTKKPETQNGAIAVEDEISKSFLDYAMSVIVSRALPDVKDGLKPVQRRILYSMYETGIRPTGPFRKCSKVVGDVMGNYHPHGNEAIYGTLVRLGQHFSTRYPLIEPQGNFGTPDDPPAAMRYTESRMSLLASQLLDGIDEETVDFEPNYSGETTEPKVLPGRFPNLLINGAEGIAVAMATNMPPYNLQEITEAVKFTLKTKEPKPRDYLKIIKGPDFPTGGLIVKTPTIKDAILKGRGSIKLRAVADVEELGKGRSAIVVKELPYQASIDRIMEKLLP

SEQ ID NO: 157987 - protein, 229 aa, Unknown
  Bacterial polypetide isolated from the Sargasso Sea
LPLRGKILNTYVDSNGYKKNGKGNDFKVKALSKMISSNEIVTLINALGLDPKVEDIDLKDLRYGKIIIMTDADVDGSHIRALLLTFFNNKPFNKLIENGHVYLAQPPLYKINKGSKSIYIKDEKELEQYILNNSKELKKFKKGNKDFSKFYAEEKSKMNIQRFKGLGEMNPEELWSTTLNPQTRNLLQVQYSKNVKKDQDIIHTLMGNDVALRKDFIVSNAINVSNLDI

SEQ ID NO: 157988 - protein, 182 aa, Unknown
  Bacterial polypetide isolated from the Sargasso Sea
MTDFRDPFDNIKDHPFDAALSQRYLVYALSTITARSLPDLRDGLKPVHRRLLWAMRLLRMEPSGASADVLVANPARNGTSYKKCARVVGDVIGKYHPHGDSSVYDAMVRLAQDFVLRTPLVDGQGNFGNIDGDNAAAMRYTEARLTQPAADLMAGLDEGTVDFRPTYNGEDEEPEVFPGLFP

SEQ ID NO: 157989 - protein, 300 aa, Unknown
  Bacterial polypetide isolated from the Sargasso Sea
IIKNPSIEDKELFELIKGPDFPTGGQILGRDGIRETFKSGRGSITMRGVADIEQIKSPGRAEKDAVIITELPFQTNKAALIERIADLVNEKRLEGISDIRDESDRDGMRIVIELKRDAYPQVVLNNLFKITPLQNNFSANILALVNGEPTTLSLRKMLDVFLEFRIETIKRRTSFLLKKAEERDHIIKGLLLALDAMENIINLIRSAKDTNSAREQLQSNHELSVIQADAILQMQLRRLTALEADKIKEEHDELTRKITDYKNILNDKERVNEIILEELRKINDRFTSPRKTEILNLGGG

SEQ ID NO: 157990 - protein, 29 aa, Unknown
  Bacterial polypetide isolated from the Sargasso Sea
MTKNNYQADSIKVLKGLDAVRKRPGMYIG

SEQ ID NO: 157991 - protein, 273 aa, Unknown
  Bacterial polypetide isolated from the Sargasso Sea
IAQPPLYKLKKGKKEEYVLTDDELNNLILSNAVKGTEVRAKNKKKGIEGDGLLNTILDYSNSLSVIEKIEKQAGTIAAKAISLHKPITKTEANSKKKLEAWIKGLSRTASKIAKENGYKASVNIDYDDDGIGYINTEEEIGGVTHHGKIANSFLRSNDYKIFGRVQKAKKVFSGPVVIDNGSEITEFLNIEDCLNQIVNNSKRGLNVQRYKGLGEMNPDQLWETTLDPTSRSLLQVKADDDAGLTFETLMGDEVPPRREFIEENALNVGNVDI

SEQ ID NO: 157992 - protein, 106 aa, Unknown
  Bacterial polypetide isolated from the Sargasso Sea
MKDIVKDNINNILKSRYLSYAVSTIISRSLPDLRDGFKPVHRRIIYSMYLLKLLNKSPFKKSARIVGDVMGKFHPHGDQAIYQSLVRMAQDFSSRVTLIEGQGNFG

SEQ ID NO: 157993 - protein, 227 aa, Unknown
  Bacterial polypetide isolated from the Sargasso Sea
MSTDYPQGLVDSIPLREFAERAYLEYSMYVVLDRALPNIGDGLKPVQRRIIYAMSQLGLEYESKHKKSARTVGDVIGKYHPHGDSACYEAMVLMAQPFSYRYPLVDGQGNWGSTDDPKSFAAMRYTEAKLTLFSRSILEEVNQGTVDFAPNFDGTLEEPLVLPARLPNVLLNGTTGIAVGMATDIPPHNIEEIGDACIKILSSPKLKTAELLDVIKGPDFPTGGELI

SEQ ID NO: 157994 - protein, 104 aa, Unknown
  Bacterial polypetide isolated from the Sargasso Sea
MVVNEAFGPVNPTISISDEMRKSYLDYAMSVIVSRALPDVRDGLKPVHRRILYAMMEGNYDWSKPPRKSARIVGDVMGNYHPHGDSSIYEAMVRMAQDFSMRLP

SEQ ID NO: 157995 - protein, 274 aa, Unknown
  Bacterial polypetide isolated from the Sargasso Sea
KKIEGIAELRDESDKDGMRVVVETKRDAVPEVVLNQLYKQTQLQDTFGIILLALVDGTPKVMSLKELLEVFISFRLDVVVKRTEFDLKKAEARAHILEGLKIALKNIDKIVETIKKSKDPITARQSLMEGFGLSEIQSQAILDMRLQRLTGLETDKIISEYKDIIQHIAELKGILESESKRMSIIKEELLEIKEKYGEERRTEIIEDFTNLSIEDMIAEEEMVLTITHNGYIKRTSLSTYRSQRRGGRGVQGASSREEDFVEHLFVANTHSYIL

SEQ ID NO: 157996 - protein, 76 aa, Unknown
  Bacterial polypetide isolated from the Sargasso Sea
MSSSYLSYAMSVIISRALPDVRDGLKPVHRRILYAMYKGGYDWSKQFRKSARIVGDVIGKYHPHGDQSVYDALVRN

SEQ ID NO: 157997 - protein, 275 aa, Unknown
  Bacterial polypetide isolated from the Sargasso Sea
LLINGSSGIAVGMACSFPSHNLHEVFSALISLIDQPKQTITSLMKHIKGPDFPTEGIILNSKAELRKAYETGSGAVKIRGEWKIEDLPRGKKQIIITSIPYAINKSRMIERIAEIIISKKLTSLTDVRDESDEKVRVVLEIKSTADPDKVMSYLFKHTDLDSNFQINFTCLKPNGEPARLSLIEICQEFLDFRKQVVTRRLQYELTILEKRLHILVGFAAIFADLDKALKLIRSSKSKKEAHEKIRKYFTLDDEQTIAILEFPLYRLVSLEMDKI

SEQ ID NO: 157998 - protein, 57 aa, Unknown
  Bacterial polypetide isolated from the Sargasso Sea
MNTEYSSDSIKVLKGLEAVRKRPGMYIGDTDDGSGLHQMIYEVLDNSIDEALAGFCD

SEQ ID NO: 157999 - protein, 101 aa, Unknown
  Bacterial polypetide isolated from the Sargasso Sea
MTDLASSISPINIEDELKNSYLDYAMSVIMGRALPDVRDGLKPVHRRVLFAMSELKNDWNKPYKKSARVVGDVIGKYHPHGDSAVYDTIVRMAQPFSLRYT

SEQ ID NO: 158000 - protein, 294 aa, Unknown
  Bacterial polypetide isolated from the Sargasso Sea
MAAKKPAAKKPATKKPAAKKPAAKKPAAKKPAAKKPAAKKPAAKKPAAKKSKTATATKKKPTIKPDTLNGSIAVEDEISKSFLDYAMSVIVSRALPDVKDGLKPVQRRILYSMYETGIRPTGPFRKCSKVVGDVMGNYHPHGNDAIYGTLVRLGQNFSTRYPLIEPQGNFGTPDDPPAAMRYTESRMSSLSSQLLDGIDEETVDFEPNYSGETSEPKVLPGRFPNLLINGAEGIAVAMATNMPPYNLKEITEAVKFTLKTKDPKPRDYLKIIKGPDFPTGGLIVDTPTIKEAIL

SEQ ID NO: 158001 - protein, 53 aa, Unknown
  Bacterial polypetide isolated from the Sargasso Sea
MSEDGVYDSESIKVLKGLDAVKKRPGMYIGDTEDGTGLHHMVQELVDNSIDEA

SEQ ID NO: 158002 - protein, 228 aa, Unknown
  Bacterial polypetide isolated from the Sargasso Sea
MPAKKPPSKKPAAKKPAAKKPPSKKPAAKKPPSKKPAAKQSVKEEKNTDNTSNGTIAVEDEISKSFLDYAMSVIVSRALPDVKDGLKPVQRRILYSMYETGIRPTGPFRKCSKVVGDVMGNYHPHGNDAIYGTLVRLGQNFSTRYPLIEPQGNFGTPDDPPAAMRYTESRMSSLSSQLLDGIDEDTVNFEPNYSGETSEPKVLPARFPNLLVNGAEGIAVAMATNMPP

SEQ ID NO: 158003 - protein, 295 aa, Unknown
  Bacterial polypetide isolated from the Sargasso Sea
VWRDDKEHAMRFFNGEPEADLKVIGDAVGKSGTEITFKPSASTFTNTKFDLPRLEHRLRELAFLNSGVHIQLKDDREVEPKIIDLEYEGGLTAFVSYLDKSHQALHSPFVLVSEREGINVELAMEWTDSYHETMLCFTNNIPQRDGGAHLAGFRAALTRTVNAYAVESGISKKEKAQLSGEDAREGLTCVLSVKVPDPKFSSQTKDKLVSSEVRPVVEAAVSDKLQQWFEEHPADARKIVSKAYEAAAAREAARKARDLTRRKGVLDISSLPGKLADCQERDPALAELFLVEGDS

SEQ ID NO: 158004 - protein, 304 aa, Unknown
  Bacterial polypetide isolated from the Sargasso Sea
GLKQAYETGRGKIKMRARAHIETNKKGRNSIVVTEVPYQTNKAALVEKIADLVRDKKVVGISDLRDESDKDGIRVVVETKRDAVPEVILNQLYKHTQLQDTFGIILLALVDGIPKIMPLKTVLNHFIDFRHEVVVRRTEFELKEAEGRAHILEGLKIALDNIDEVIKVIRGSKDPAQAKEGLMNSFNLSEAQSQAILDMRLQKLTGLEVDKVVAEYKELIQIISNLKSVLENKTKRMNIIKTELLEIKDQYGDERRTEIIPVDTDFSMEDMIAEEEVVLTITHQGYIKRTALNTYRTQRRGGRG

SEQ ID NO: 158005 - protein, 274 aa, Unknown
  Bacterial polypetide isolated from the Sargasso Sea
VNFIPTIQGGTHVNALRQGLFEGVREYADIHNLLPRNLKLSPDDVWKNTNFVISLKMKEPNFAGQTKERLSSRECAPVINTAVKDAMSLYLSEHKDAAEMLLTLVLANANSRLKANKKIERKQLGKVIAMPGKLTDCETSNREEGELFVVEGDSAGGSAKQARNKQTQAIMPLRGKILNCWEKDESEIMRSEEIKNIATAIGVNPNSDDLSGLRYGKICILADADSDGLHIATLFAALFVRHFPSVVRNGSVYVAMPPLYRIEVGKKVFYALDD

SEQ ID NO: 158006 - protein, 257 aa, Unknown
  Bacterial polypetide isolated from the Sargasso Sea
NTGTEINFIPSKKIFSSVKFSYTIIQKRLRELAFLNKGITITLTDKTNKKVKIDEFKYDGGISEFVEYLDKKREKIKNKNNNEIFKKPINIDGKKNNLEIECSLQWNATYTEDVLPYTNNIHQKDGGTHLLGFRSALTRVINKYASEQNLIKKNKISISGDDIKEGLTCVISIKLQDPKFSSQTKDKLVSSEVRNVVESIVNEKLSIWFDQNPSIAKIILYKIIQAAQARDVARKARENVRRKGALELTGLPGKLAD

SEQ ID NO: 158007 - protein, 310 aa, Unknown
  Bacterial polypetide isolated from the Sargasso Sea
MQNTMDFDFEQSEKYPLEIYSEKAYLDYSMYVILDRALPHIGDGLKPVQRRIIYAMSELGLKATSKFKKSARTVGDVIGKFHPHGDSACYEAMVLMAQSFSYRYPLINGQGNWGSMDDPKSFAAMRYTESKLTSYAETLLAEVEKGTVDWLPNFDGTLNEPKLLPARLPNILLNGTTGIAVGMATDIPPHNLREVSAACIKLLDKPKSTISELCQHIKAPDFPTNAEIISSKSSIREIYKTGQGSIKMRAVWQKEEGYIVITDIPYQSSGSKILEQIATQMQSKKLPMIDDLRDESDHENPTRLILVPPF

SEQ ID NO: 158008 - protein, 58 aa, Unknown
  Bacterial polypetide isolated from the Sargasso Sea
MNKKSNYQADSIKVLKGLEAVRKRPGMYIGDTDDGTGLHHMVYEVVDNAIDEALAGYC

SEQ ID NO: 158009 - protein, 264 aa, Unknown
  Bacterial polypetide isolated from the Sargasso Sea
KKNSKKKPLRKGKLKNKIVSKPSKSYTAKDIEVLEGLEPVRKRPGMYIGGTDILAMHHLVSEVLDNSMDEVVAGHANKVEINLKNNSTIEISDNGRGIPVDKHPKFKIPAAEVIMTTLHSGGKFSNNSYKTSGGLHGVGISVVNALSKKLTLEIARDKKYFSQVYQQGNPKTKLKSSSKGSLKKGTRIVFSPDTEIFGEDAYFDSSIIYNMAKAKAYLIPDVEIHWTCDKSVSKKNVPIKDKLHYSDGIKDYLHSLCSPQDPIF

SEQ ID NO: 158010 - protein, 304 aa, Unknown
  Bacterial polypetide isolated from the Sargasso Sea
FKSNYDETEKEPEVLPAQYPNLLVNGAGGIAVGMATSIPPHNLGEIIDGTIALINNKEIKLSELMKHIPGPDFPTGGIIIGKNIIKEGYKSGRGSFKIRGEIKIEQLKNGRERLVITSIPYQVNKSVLNERIAELVREKKIEGIRDIRDESNLEGVRVAIDLRSNVEPETVKRQLFKYTTLESSFSFNTLAIVDKKPKTCNLKEFLENFLSFREDVVIKRTKFDLKKAEDRAHILIGLSVSVENLDKVIKIIRSSKNPEEAKKSLINLKWKVNKTLKLIKLIQDKKSKNLYSLSEKQIESILDL

SEQ ID NO: 158011 - protein, 172 aa, Unknown
  Bacterial polypetide isolated from the Sargasso Sea
RALGAGVGNNGEEEGAFDTSKLRYSKIIIMCDADIDGAHIRTLMLTFLWRFMRPAIEKGHVFIAQPPLYQLTKGRLSRYVFSDEERDSVTLELQDGNPDAKIGIQRYKGLGEMNPEQLWETTMNPMTRTMLKVTVRDAEESDELFEILMGEDVPDRRTFIEKHAKEVTNLDI

SEQ ID NO: 158012 - protein, 267 aa, Unknown
  Bacterial polypetide isolated from the Sargasso Sea
TVDFQLNFDDTIMEPTVLPTRVPALIINGASGIAVGMATNMPPHNLSEVIDGIMQYIDNNDITIDELIQYVKAPDFPTGGTIYGYDGVKEAFHTGKGRVVMRGKAIIENVNDRECIIVSEIPYQVNKADMIKKTADLVNDGKIEGISTIRDESDRKGMRIVYVLKRDAIPNIVLNKLYKYTPLQSSFSVNNVALVNGRPELLNLKDLIHHFVDHRHDVVVKRTNFELKKAEQRAHILEGLIIASDNIDDVIDLIKKSSNAEEARQKL

SEQ ID NO: 158013 - protein, 299 aa, Unknown
  Bacterial polypetide isolated from the Sargasso Sea
VSKKTGTKVNFLADPEIFDETQTYEYNIVSERLRQTAFLNKGLKITLVDNRVKPATKEQFHFKGGLIDFVEYLNEGFEPLHDKIISFSDQTKDSEIEVALQWKNEDDVTVKSFANNIHTLEGGTHEEGLRTAVTKAINDFAKKRNLHSDISLTGDDIREGMTGVVSVRVKEPQFEGQTKTKLGNTEMKSKVQVLINEEFPKWLSKNTKEGRAIVERCAVAAKARMSAKKARELTKRKSILETSGLPGKLADCSSTDPTESELFIVEGDSAAGPAKQARDSRVQAILPIRGKIINVQKSY

SEQ ID NO: 158014 - protein, 134 aa, Unknown
  Bacterial polypetide isolated from the Sargasso Sea
MKKTININFSAFASRDYKNYYEYFLASKELLKEDAYLVKQDKTIKISNFLDTFAWIISEAKKGYSIQRYKGLGEMNPEQLWETTMDPENRTLIQIEEKDKAMAIKTFDDLMGDNVAPRKTFIEENAHFAVNIDI

SEQ ID NO: 158015 - protein, 155 aa, Unknown
  Bacterial polypetide isolated from the Sargasso Sea
MTVLHAGGKFDDDSYKVSGGLHGVGVSVVNALSQTLSLRIHKNGNIYEQDYAHGTPKKPLKKGAKTERTGTTISFQPSKKTFSNTSFSYETLSKRLREMSFLNPGLTINLNDERTNKADSYCYEGGLKDFVRHLNKPQKPTHQSIAYINKKSKKD

SEQ ID NO: 158016 - protein, 249 aa, Unknown
  Bacterial polypetide isolated from the Sargasso Sea
SHIRTLLLTFFFKEMPQLIENGNLYIARPPLFKIKRGKDEIYLSDEQSLQNSLIDYGLKDLRFKTALNTEFSGEQLSEILLKISEIVDIFNKIPVRYDKKVLEQIAISGCLDTNKFSENQNNIKEAVNYISQRINISRPDYDRGWKGSFIEGGFKFTRELRGVDDNIVIDKDLLNSQLIENLNKNYVDIFQMFEMPGMAIKKDDIQIEIFSPSQLLEIVNENGKKGLSLQRYKGLGEMNPEQLWETTLD

SEQ ID NO: 158017 - protein, 219 aa, Unknown
  Bacterial polypetide isolated from the Sargasso Sea
MAREYNAESIEVLSGLDPVKKRPGMYTETSRPNHLALEVIDNSIDEALAGYATTIDVQLNKDGSLSVEDDGRGMPVGVHPDEGIPAVELIFTRLHAGAKFSDEDYKFSGGLHGVGVSVVNALSLNLSAEIKRGGHKYLLEFKNSEKKKELAKLDKVGKKNTGTKVTFLPDPQYFDNAKFSVSQLMAVLKAKAVLSPGLKISFKDKESGKSESWCFVDGL

SEQ ID NO: 158018 - protein, 303 aa, Unknown
  Bacterial polypetide isolated from the Sargasso Sea
MYLEINRDGKKYFIEFENGDAKSPLKVIGKSKESGTKITFLPSTEIFSSIKFSPNILIKRMRELAFLNKGIKIIFINASLKKDAISEFKFDGGVIEFVDFLDEKREKLQNKNGNDLFRRPIYIEGKKNNIEIECSLKWNAGYAEEIFPYTNNIYQKDGGTHLLGFRSALTRVVNKYANEHNLLKKNKLAISGDDIKEGLTCILSTKIPDPKFSSQTKDKLVSSEVRMIVETVISEKLSTWFDQNPTVAKIILGKIIQAAMARDVARKARENVRRKGALEIKWSSQEASGLSNRKARGYRIVYL

SEQ ID NO: 158019 - protein, 271 aa, Unknown
  Bacterial polypetide isolated from the Sargasso Sea
PKKDSKSYDSKDIKVLEGLEAVRKRPAMYIGSTGPNGLHHLIWEVVDNSVDEAMAGRCNQIDVVLEKNGSVTVKDNGSGIPVKPHPKTKKSALTTVLTTLHAGGKFESGAYTVSGGLHGVGISVVNALSTVVKVEVQRDGHFWNQDFDLGKPKTKIKKGKVSKKTGTKINFLPDPNIFDETQLFEYNIVSERLRQTAFLNKGLKINLTDNRVKPATKENFHYKGGLVDFVDYLNEGFEVLHEKTISFSDQSKDSEIEVAMQWKTEDDINIK

SEQ ID NO: 158020 - protein, 320 aa, Unknown
  Bacterial polypetide isolated from the Sargasso Sea
MNYSMYVIMDRALPFIGDGLKPVQRRIVYAMSELGLNASAKFKKSARTVGDVLGKYHPHGDSACYEAMVLMAQPFSYRYPLVDGQGNWGAPDDPKSFAAMRYTESRLSKYAEVLLGELGQGTSDWVPNFDGTMQEPKMLPARLPNILLNGTTGIAVGMATDIPPHNLREVAKAAITLIEQPKTTLDQLLDIVQGPDYPTEAEIITSRAEIRKIYENGRGSVRMRAVWTKEDGAVVISALPHQVSGAKVLEQIAAQMRNKKLPMVDDLRDESDHENPTRLVIVPRSHRVDMEQVMNHLFCTTDLEKSYRINLNMIGLDGRP

SEQ ID NO: 158021 - protein, 281 aa, Unknown
  Bacterial polypetide isolated from the Sargasso Sea
PNSISLKKYAEEAYLNYAMYVILDRALPNVGDGLKPVQRRILYAMSELGLDASSKYKKSARTVGDVIGKFHPHGDSAAYEAMVLMAQNFSFKYPLVDGQGNWGSQDDPKSFAAMRYTESKLTNFANLLISELKSGTVDWQPNFDGSLLEPVIFPSKLPMILLNGTSGIAVGMATDIPSHNINEVIDAAIYLLDKPKSELREILKIIKGPDFSNNANIVINDDELKEMYLTGRGGFKIQAHWEQEKNQIIINALPYQASGSKILEQIAEQMVNKKLPMVIDL

SEQ ID NO: 158022 - protein, 307 aa, Unknown
  Bacterial polypetide isolated from the Sargasso Sea
CSYILSAKLKDPQFTGQTKEKLSSKDFQNIATSITKDSFSIWLNQETQAAEEIAFLCIENAQARARASQKVERKKITKGITLPGKLSDCVSSDFEETELFLVEGESAGGSAKQARNRNFQAVMSLKGKILNTWEVNTDSVTQSQEVKDIAMAVGLDPGCKELTGLRYGKICILADADTDGAHIATLICALFLKHFRPLVEKGHLFVAQPPLFRIDQGKDVFYALDEDEKDQIVKQLTKQNKVKKIEIQRFKGLGEMNPSQLRETTMQVDGRRLLKLTLEKGNTATSMMDKLLSKKRAADRKDWLETK

SEQ ID NO: 158023 - protein, 85 aa, Unknown
  Bacterial polypetide isolated from the Sargasso Sea
MPTKKKSSASNSSKATKKPQKKATKKAEVESYDSSSITVLKGLEAVKKRPGMYIGDTDDGTGLHHMVYEIVDNSIDEALAGHCDE

SEQ ID NO: 158024 - protein, 213 aa, Unknown
  Bacterial polypetide isolated from the Sargasso Sea
MSESDYKADSIQVLEGLEAVRKRPGMYLGDPHDGSALHHCIWEVVDNAVDEHLAGHCNSIEIVLQTDGSVTIVDHGRGIPVGTHSEYGISAAEVIMTKLHAGGKFDNSSYKVSGGLHGVGVSAVNAVSEWLKMTIQRDGKMYEQNYARGEPQDSLTEIGTSDSTGTAITFKPDLDIFTTVTEFDYDVLNTRLRETAFLNAGLKITIVDQRGDA

SEQ ID NO: 158025 - protein, 305 aa, Unknown
  Bacterial polypetide isolated from the Sargasso Sea
MATNIPPHNLGEIIDACCALIDNPINKDINLSDYIMGPDFPTGGIILGKSGIKEAFSSGRGSIIIRSKVSIEDLPRDKKAIIVTEIPFQVNKSHLVEQIADVAKNKKVEGISDLRDESDRDGVRVVIELSRSVNPEIVLNQLYKFTRLQTSFGVNMLALNSGKPELMSIKQMLQAFIDFRQEVITRRTKFDLKKVRHRAQVLVGLAIAVSNIDEVIKLIRESKDPNTAKKLLLSKSWSADDVTDMVKLIDDPSNKIVDGIYKLTDDQAKAILELRLQRLTALGRDEIDSEIKEISKKISNFLDIL

SEQ ID NO: 158026 - protein, 297 aa, Unknown
  Bacterial polypetide isolated from the Sargasso Sea
TALGGSHLNGFKSGLLEAIKEFCDYRNLIPKGIKINSDDILANCIFVISSKLKNPQFAGQTKERLDSKAHMSFVSSSTKDSLSIWLNQHTEEGEKIADLAIAAAQKRIKSSTKVDRKKTFKGPALPGKLSDCNCDNIEESELFLVEGDSAGGSAKQARDRRFQAIMPLRGKILNTWDLESADIIKSQEIKDLATAIGSLPGDTDISNLRYGKICILADADSDGLHIATLLCALFLRHYKNLVTSGKIFVSMPPLYRIDAAKEVFYALDENEKESIVKKIKKQNSKIKIDIQRLKGWR

SEQ ID NO: 158027 - protein, 301 aa, Unknown
  Bacterial polypetide isolated from the Sargasso Sea
AGGIAVGMATSIPPHNLGEIIDGTLALIDNKDIKIKELMKHIPGPDFPTGGIIIGKDIIKQGYNNGRGSFKIRGEISIEQQKNGRERLVITSIPYQVNKSVLNERIAQLVREKKIEGIRDIRDESNREGIRVAIDLRNGVEPETIKRLLYKNTQIESSFGFNTLAIVEGKPQTCTLKDFLSNFLTFREDVVIKKTKFDLQKAEERAHILIGLSVSVENLDKIIKIIRSSKTPDDAKVSILKTKWKINKSQKLISLVEGKRGKNLYTLSEPQVLAILELRLQKLTALGINEIEVEIKKLAEL

SEQ ID NO: 158028 - protein, 83 aa, Unknown
  Bacterial polypetide isolated from the Sargasso Sea
MNQTYSSESIKVLKGLEAVRKRPGMYIGDTDDGSGLHQMIYEVVDNSIDESLAGYCDKIEVILNSDGTVTISDNGRGVPVDNH

SEQ ID NO: 158029 - protein, 115 aa, Unknown
  Bacterial polypetide isolated from the Sargasso Sea
MAEERVQPIALHQEMQRSYLEYAMSVIVGRALPDARDGLKPVQRRILYAMQELGLTPDRPYRKCARVVGDVLGKYHPHGDQAVYDALVRLVQTFSSRHPLLDGHGNFGSVDDDPP

SEQ ID NO: 158030 - protein, 274 aa, Unknown
  Bacterial polypetide isolated from the Sargasso Sea
DELTSVIREELIETQETYGDERRTEIVEFYSDLTDEDLIPEEDLIVTLSKAGYAKTQPLDTYQAQNRGGTGKRAASLKDEDFVSKLFVANTHDTLLCFSSYGKVYWIKVYRLPRGGRNAKGRPIVNLLPLEKDERIQAVLPVKEFNDDQFIFMATETGSVKKTKLSAYSRPMKSGIKAIKLRDGDRVVNAEITDGTKEIMLFSNSGKSIRFKESDARPMGRVSQGVRGMRIDKDQKIISLVVLEEGNILVATENGYGKQTLQDEFSIKKRGGKA

SEQ ID NO: 158031 - protein, 294 aa, Unknown
  Bacterial polypetide isolated from the Sargasso Sea
EEASNNLLKETYVNLIPTALGGSHLNGFKSGLLEAIKEFCDYRNLIPKGIKINSDDILANCIFVISSKLKNPQFAGQTKERLDSKDHMSFVSSSTKDSLSIWLNQHTEEGEKIADLAIAAAQKRIKSSTKVDRKKTFKGPALPGKLSDCNCDNIEESELFLVEGDSAGGSAKQARDRRFQAIMPLRGKILNTWDLESADIIKSQEIKDLATAIGSLPGDTDISNLRYGKICILADADSDGLHIATLLCALFLRHYKNLVTSGKIFVSMPPLYRIDAAKEVFYALDENEKESIVK

SEQ ID NO: 158032 - protein, 295 aa, Unknown
  Bacterial polypetide isolated from the Sargasso Sea
DETEQEPDVLPAQYPNLLVNGAGGIAVGMATSIPPHNLGEVVDATLALIKNKDIKLSELMKHVPGPDFPTGGIIIGKDIIKQGYKSGRGSFKIRGDIKIEQVKGGRERLVITSIPYQVNKSVLNERIAELVREKKIEGIRDIRDESNREGIRVAIDLRSSVEPETIKRQLYKYTSIESSFGFNTLAIVDNKPKTCNLKDFLENFLKFREDVVIKKTKYDLKKAEDRVHILIGLSVSVENIDKVIKIIRQSKNPEEAKNSLLKTKWKINKSAKLIKLVDNKNYKGTYSLSNEQVVS

SEQ ID NO: 158033 - protein, 132 aa, Unknown
  Bacterial polypetide isolated from the Sargasso Sea
MPKKKSEDKKYDSSNIQVLKGLEAVKKRPGMYIGDTDDGSGLHHMIFEVVDNCIDEAMAGHCSKIDIIINKDESITVKDNGRGIPVDTHKGEGVPAAELIMTTLHSGGKFDDNSYKVSGGLHGVGVSVVNAL

SEQ ID NO: 158034 - protein, 198 aa, Unknown
  Bacterial polypetide isolated from the Sargasso Sea
MRKKSKKNKSIKNKNSSKKTIKNSNSSYTAKDIEVLEGLEPVRKRPGMYIGGTDVMAMHHLVSEVLDNSMDEVVAGFANKVEIKLVSEDTIEISDNGRGIPIDKHPKFKISAAEVIMTTLHSGGKFSKNNYKTSGGLHGVGISVVNALSKKLTLEIARDKKYFVQTYCQGSPKNKLKASAKGPLKKGTKIVFSPDPEI

SEQ ID NO: 158035 - protein, 211 aa, Unknown
  Bacterial polypetide isolated from the Sargasso Sea
MSKFLKKDINEILSDKYLSYAVSTIMSRSLPDIRDGLKPVHRRIIYSMYQLKLFDNSSYKKCARIVGDVMGKFHPHGDQAIYDSLVRLAQDFSTRAPLIDGQGNFGNVDGDNAAAMRYTEARLDSIANYFFDGIDENAIDFKENYDGQNLEPEVLPTKLPNILLNGATGIAVGMATNIPPHNIFELNKCIIKIIQNPETSLSTLLKILPGP

SEQ ID NO: 158036 - protein, 233 aa, Unknown
  Bacterial polypetide isolated from the Sargasso Sea
DGLKPVQRRILYAMSELGLDASSKYKKSARTVGDVIGKFHPHGDSAAYEAMVLMAQNFSFKYPLVDGQGNWGSQDDPKSFAAMRYTESKLTNFANLLISELKSGTVDWQPNFDGSLLEPVIFPSKIPMILLNGTSGIAVGMATDIPSHNINEIIDATIKILDKPKSDLKDILKIIRGPDFSNMSSIIASYEELEEMYFTGRGGFKIQANWKQEKNQIVIDALPYQASGSKILE

SEQ ID NO: 158037 - protein, 57 aa, Unknown
  Bacterial polypetide isolated from the Sargasso Sea
MPKSKKNTNTKNYDSSNIKVLKGLDAVRKRPGMYIGDTDDGTGLHHMVLRSLTTLLM

SEQ ID NO: 158038 - protein, 29 aa, Unknown
  Bacterial polypetide isolated from the Sargasso Sea
MNADNYSSDSIKVLKGLDAVRKRPGMYIG

SEQ ID NO: 158039 - protein, 306 aa, Unknown
  Bacterial polypetide isolated from the Sargasso Sea
MFGDVMGKFHPHGDQAIYQSLVRMAQDFSSRVTLIEGQGNFGNIDGDNAAAMRYTEARLEEITELFFDGIEEDSTTFSDNYDGQNLEPDVLPSKLPNILLNGSTGIAVGMATNIPPHNLLELNDCIIKLIKKPNTSDSELLKILKGPDLPTGGEIIISNSEKKKIYKKGFGSFLINSNWHDEKIKNGMYEIVITEIPFQVNKVKIIEQLASCINSKKLPLDDVRDESDENIRIVLKPKNRNIDKKKLVDLCFKLTDLSIKYSCNFNVLENGRVPRQLGLKSILTQFINFRKFTVKRKSKFNIDKNS

SEQ ID NO: 158040 - protein, 93 aa, Unknown
  Bacterial polypetide isolated from the Sargasso Sea
MTQQYDAEHIKVLEGLEAVRKRPGMYIGTTGVNGLNHLIYEVVDNSIDEAMAGYCSDVTVEIGADSIVTVTDNGRGIPIDTHKSKNLPAVEVV

SEQ ID NO: 158041 - protein, 277 aa, Unknown
  Bacterial polypetide isolated from the Sargasso Sea
KETVSFKSNYDETELEPSVLPAQYPNLLVNGAGGIAVGMATSIPPHNLGEVIDGTLALIKNKDIKIKELMKFIPGPDFPTGGIIIGKDIIKQGYKIGRGSFKIRGEINVENLKNGKDRLVITSIPYQINKSNLNERIAELVREKKIEGISDIRDESNREGIRVAIDLRRNVEPETVKRQLYKYTSIESSFGFNSLAIVDNKPKTCGLKDFLENFLKFREDVVIKKTKYDLQKAEDRAHILVGLSVSVENIDKVIKIIRSSKNPEDAKNSLLKTKWKI

SEQ ID NO: 158042 - protein, 225 aa, Unknown
  Bacterial polypetide isolated from the Sargasso Sea
PAQFPNLLVNGASGIAVGMATNIAPHNLGEVIDATLYLIENPDSDINDLIKFIHGPDFPTGGQIIGRKGIVDTFETGKGGVILRSKTSIENFKKDREAIVIHEIPYQVNKSKLIEKIAATVKNNIIEGISDLRDESDRNGVRVVVELKKDVDANIILNQLYKHTLLQTTFNSNMLALNKGKPEQMNLKDMLSAFIDFREEVITKRTIFDLNKARDKAHILIGLVV

SEQ ID NO: 158043 - protein, 104 aa, Unknown
  Bacterial polypetide isolated from the Sargasso Sea
MSDIIDSGNSGLSEDNDRIIQTDLRNEMSRSYLEYAMSVIVGRALPDARDGLKPVHRRILYAMYELGLTSSRPYRKCARVVGEVLGKYHPHGDTAVYDALVRMA

SEQ ID NO: 158044 - protein, 305 aa, Unknown
  Bacterial polypetide isolated from the Sargasso Sea
SIDGDPPAAMRYTVTKLGKIAQFLTEDLEKNTVSYRNNYDETEKEPEVLPSQYPNILVNGAGGIAVGMATSIPPHNLGEIINATIAYIENKEITISQLMKHVPGPDFPTGGIIIGKDILKQGYNKGRGSFKIRGEIDLEEKKGSRESLIIKSIPYQVNKSILIEKIAQLVRDKKIEGIRDIRDESNREGIRVVLELRKSVEPETIRRQLYKLTNIENSFGFNTLAIVNNKPKILNLKEFITEFLKFREDTVVKRIKFDLAKAEEKAHILIGLATAVENIDQIIKIIKNSKDTEIAKKNLLNKKWK

SEQ ID NO: 158045 - protein, 71 aa, Unknown
  Bacterial polypetide isolated from the Sargasso Sea
MSGDTYDSGSIKVLKGLEAVKKRPGMYIGDTDDGTGLHHMVFEVLDNSIDEGMAGFCKQIDVVIGKDGSVS

SEQ ID NO: 158046 - protein, 308 aa, Unknown
  Bacterial polypetide isolated from the Sargasso Sea
MEKIWEQDYEKGKALSPVKEIGTTDKRGTLVTFKPDTDIFTQTIEYSYETLSQRLRELSFLNKGINLSIVDARIKNEKGEHPSEVFYSKEGLKEFIRFLDESREPIIQQVISVEGEKHDIPVEVAMIYNTSYSENLHSYVNNINTHEGGTHLSGFRRGLTSTLKKYADSSGLLDKLKFEISGDDFREGLTAIVSVKVAEPQFEGQTKTKLGNREVSSAVSQAVSEMLENYLEEHPNDAKIIVQKVILAAQARHAARKAREMVQRKSVMSGGGLPGKLSDCSEQDPALCEVFLVEGDSAGGTAKQGRDR

SEQ ID NO: 158047 - protein, 283 aa, Unknown
  Bacterial polypetide isolated from the Sargasso Sea
VGVSVVNALSEWLWVEVQRDGKKYKQDYKIGVTQNKLKEVGKTKKSGTKVCFMPDGGVFNTTRFEYDIIAERLRELAYLNKGLEINLRDQREEEGQSDSFKFKGGLSDFVKYLDEHNNPLHNKVITVTKEDGEIPVDVALRYGNTYNDNILTFVNNINTIEGGTHLSGFRSALTRAMNNHASKNNLIKTKKTEKLSLTGEDFREGLTAIISVKVPEPQFEGQTKTKLGNGDVKGLVDKVVYEGILDFLEENPSIGRKVIEKALLAARSRSAARKARELIEGKA

SEQ ID NO: 158048 - protein, 311 aa, Unknown
  Bacterial polypetide isolated from the Sargasso Sea
EKLELEINRDGKKYFIEFQNGDAKSPLKVIGKSKETGTKITFFPSEDIFSSTKFSNTIIQRRMQELAFLNKGLKISVNDFTLKKEKSVIYKFDGGILEFVNFLDEKREKLKNKNGNDLFKKPIFIEQAKNNMEVECALQWNSMYSEDVYPYTNNIFQKDGGTHLLGFRSALTRVINKYANESNLLKKNKLSISGDDVKEGLTCVLSIKIPDPKFSSQTKDKLVSSEVRNIVETIISEKLSLWFDQNPSVVKVILTKIVQAAQARDVARKARENVRRKGALELTGLPGKLADCQNSKQEGTELFIVEGDSAG

SEQ ID NO: 158049 - protein, 60 aa, Unknown
  Bacterial polypetide isolated from the Sargasso Sea
MIKKTEDKIPKYGADSIKVLKGLEAVRKRPGMYIGDTDDGTGLHHMVYEVVDNAIDEALA

SEQ ID NO: 158050 - protein, 45 aa, Unknown
  Bacterial polypetide isolated from the Sargasso Sea
MPKNTELKNNQNYGADAIKVLKGLDAVRKRPGMYIGDTDDGSGLH

SEQ ID NO: 158051 - protein, 120 aa, Unknown
  Bacterial polypetide isolated from the Sargasso Sea
MGKKSTYNAKDIEVLEGLEPVRKRPGMYIGSTNQDGLHHLVNEVLDNSIDEVLAGHATEISFHYKKDGTIIIKDNGRGIPVDFHPKYKNKRALEVVLTTLHAGGKFNSSAYKTSGGLHGV

SEQ ID NO: 158052 - protein, 307 aa, Unknown
  Bacterial polypetide isolated from the Sargasso Sea
CIRNTGTRFQFKPNAKYFESIDVNNKQLKHLLKAKAVLCPGLTIDFFDEKKKEKIKWFFEDGLKSYLEEASSESNLLLDESILTAKKSKEHEVEFVINWSDKPSKNKLDETYVNLIPTAQGGSHLNGFKSGLLDSMKEFCEIRKLLPKGLKLNADDVINNAIFVISSKMQNPQFAGQTKERLDSKEHMSFVSSSTKDVLSIWFNKHTEEGEKIAELAIISAQARAKATNTVERKKTFKGPALPGKLSDCNSEDLNKTELFLVEGDSAGGSAKQARERSFQAIMPLRGKILNTWDLESDEIIKSQEIK

SEQ ID NO: 158053 - protein, 63 aa, Unknown
  Bacterial polypetide isolated from the Sargasso Sea
MNQNYSSDSIKVLKGLEAVRKRPGMYIGDTDDGSGLHQMIYEVVDNSIDESLAGYCDKIEVIL

SEQ ID NO: 158054 - protein, 130 aa, Unknown
  Bacterial polypetide isolated from the Sargasso Sea
YPNLLVNGAGGIAVGMATSIPPHNLGEIIDGTLALIDNKEIKIKELMKHIPGPDFPTGGIIIGKNIIKEGYKSGRGSFKIRGEITVENLKNNRDRLVITSIPYQINKSVLNEKIADLVREKKIEGIRDIR

SEQ ID NO: 158055 - protein, 73 aa, Unknown
  Bacterial polypetide isolated from the Sargasso Sea
MSKQSQVNQKNDYSASSIKVLKGLDAVRKRPGMYIGDTDDGTGLHHMVFEVLDNSIDEALGGYVKIFPYLLFK

SEQ ID NO: 158056 - protein, 255 aa, Unknown
  Bacterial polypetide isolated from the Sargasso Sea
KTKKKGTKINFLPSKEVFSSIKFSATILEKRIRELAFLNKGVCISLIDQTSKKEKEFVHKYDGGIVEFVKHINNKKPILVNKNEKQVFKKPVYITATKNNVVVECSFEWNSGYSEDVLPFTNNIPQKDGGTHLLGFRSALTRVINKYTNERNTKKNKITLSGEDIKEGLTAVLSIKMPDPKFSSQTKDKLVSSEVRLIVESIISDKISTWFDQNPSIARTVIEKITQAAMARDVARKARDSVRRKGSFELSGLPG

SEQ ID NO: 158057 - protein, 213 aa, Unknown
  Bacterial polypetide isolated from the Sargasso Sea
GDSACYEAMVLMAQPFSYRYPLVDGQGNWGAPDDPKSFAAMRYTEAKLSRFSEVLLNELGQGTVDWVPNFDGTMDEPRTLPARLPHILLNGVTGIAVGMATDIPPHNAREVANATAFLLDNPKATVPDLMQYIQGPDYPTDAEIISPAHELQAIYETGRGSIKMRGLYQLEDGDIIITALPHQTSGSKVLEQIAAQMNAKKLPMVSDLRDESD

SEQ ID NO: 158058 - protein, 284 aa, Unknown
  Bacterial polypetide isolated from the Sargasso Sea
ASHTGTRVHFWPDVNYFDSPNFSVSKLIYLLRAKAVLCPGLRIKFTNKHTNEVHEWFYESGLTDYLQEAVKGSLMLPEEPFVGSFKGELEAADWAITWLPEGGESLNESYVNLIPTPLGGTHVNGFRQGLLESMREFCEFRNLIPRGIKLSPDDIWDRAAFILSIKMQDPQFAGQTKEKLSSRQSSAFVAGIVRDAFSLWLNSNTELAEQLAELCISNAQRRLKAAKKIARKKVVSGPALPGKLTDCSGQDPMRGELFLVEGDSAGGSAKQARDREFQAIMPLR

SEQ ID NO: 158059 - protein, 178 aa, Unknown
  Bacterial polypetide isolated from the Sargasso Sea
DAWCETLGKRVDAITDATQTFTITAQRDEERGLYLPRVQVLAHGVPREYKVTLDFLLSPDYQKIKALGETLEGLLAEDAYIQRGESQRPIRHFAEALDWLMAQARRGTSFQRYKGLGEMNADQLWETTMDPESRRMLQVTIEDAIAADQIFTCLMGDDVDPRRRFIESNALQVSNLDV

SEQ ID NO: 158060 - protein, 109 aa, Unknown
  Bacterial polypetide isolated from the Sargasso Sea
MANAKYTSEEITVLKGLEAVRKRPGMYIGTTGLEGVQHLIHEIVDNSVDESMAGFCDTVEIVLNSDGSVTVSDNGRGIPVDVKKGTGKSALEIVMTTLHAGGKFESKSY

SEQ ID NO: 158061 - protein, 317 aa, Unknown
  Bacterial polypetide isolated from the Sargasso Sea
ELKSGQIPDVVLNNLYSQTQMQTVFGINNVALIDGEPKLLNLKSILSVFFNHRKEVVSRRTFFDLRKAKERGHILEGLTIALANIDEMIDLIKKSKEGSEAKKKLLSKKWKPGKITAMLEKAGPDACKIDVTDNSVGLIGKTYQLSEQQAQAILDMRLQRLTGLEQDKLIKEYEEIIDHITYLLEILGDSERLIEVVKEELLEVQEKYKDDRRTEIQDSAADLTEADLITPEDRVVTISHEGYAKTQPLEEYRAQRRGGTGKTAASVKDEDFVEQLLVANTHTTLLCFSNLGQVYWLKVYEISSAGRAAKGRPLVNL

SEQ ID NO: 158062 - protein, 280 aa, Unknown
  Bacterial polypetide isolated from the Sargasso Sea
MKSLVEDIDKNTVMFESNYDDTTKEPSVLPSQFPNLLVNGASGIAVGMATNIAPHNLGEVIDASLYLIKNPECNISDLQKYIFGPDFPTGGQIIGKKGIAEAFETGRGGCVVRSKTSIENFKKDREAIILHEIPYQVNKSKLLERIAEIVKNGIVEGISDLRDESDRNGVRVVIELKKDVDSNIILNQLYKHTLIQTTFNSNMLALNKGKPEQMNLKEILSSFLDFREEVIIKRTLFDLNKAREKAHILVGLVVTNEHIDEIIELIKSSKDTKEAKEKLI

SEQ ID NO: 158063 - protein, 217 aa, Unknown
  Bacterial polypetide isolated from the Sargasso Sea
AGGKFDQNSYKISGGLHGVGVSVVNALSEKLSLTIRRGGKIHTMQFNDGVTSKKLTEVGVMKKTERTGTTVQFWPSKKIFSNTTLVLKTLENRVRQLAFLNSNVRVTLADMRTPNAEPIEFYYKGGLTAYVQFLNLRKSTLNRIIPFNGESNGIKVEGALQWNDGYNENMLCFTNNIPQGDGGTHLQGFRSALTRSLVGYSNTVAVSKKGNIYYIRR

SEQ ID NO: 158064 - protein, 209 aa, Unknown
  Bacterial polypetide isolated from the Sargasso Sea
TEIRFLPSKETFSQTEFDYNRLEHRFRELAFLNSGVRIFLTDARLPEPKVTELYYEGGLIAFVDYLDRAKNPLHKPAVSVLKENEGITVEAAMQWTDSYHENVLCFTNNIPQRDGGTHLAGLRGAVTRVVNSYAESSGLLKKEKVSLTGDDIREGTTCILSVKVPDPKFSSQTKDKLVSSEVRPVVESAIGEALTNWFEEHPQEAKKIV

SEQ ID NO: 158065 - protein, 303 aa, Unknown
  Bacterial polypetide isolated from the Sargasso Sea
AGIIMGSSGIKDAYETGRGRIEVRAKSKIEESDSGDKIIISELPYQVNKARLLEKIAELVKEKKVSGIRELRDESDRDGMRVVVELRRGEVAKVILNNLYKMTQMQSAFSVNTVALVDSKPQANLNLKQLLEHFIKHRREIVTKRTIFELRKARTRAHILEGLAVALANIDPVIKLIKKSINPAEAKAELLKVVWKSDIVVEMTEDAGSEISRPDNLRDEFGIHKDGYHLSPEQAQAILELRLQKLTGLEKDKILKEYKELLERIINLLDILSRPERLMKVIHDELKDVQERYGDERRTKMKV

SEQ ID NO: 158066 - protein, 297 aa, Unknown
  Bacterial polypetide isolated from the Sargasso Sea
TELPFQTNKAALIERIADLVNEKKLEGISDIRDESDRDGMRIVIELKRDAYPQVVLNNLFKLTPLQNNFSANILALVKGEPTTLSLRKMLDVFLDFRVETIRRRTGFLLKKAEDRDHIVKGLLLALGSMDEIINLIRSAKDTISAREQLQTDHELSSTQAEAILQMQLRRLTALEADKIKAEHDELTQKINSYQQILNSKERILQIILEEINKIDERFSSPRKTEILDLGGGLDDIDLIANDRSVVLLTEAGYLKRMPVNEFESTSRGSRGKAGTKTQGDDEVKLFISCNDHDTLLL

SEQ ID NO: 158067 - protein, 85 aa, Unknown
  Bacterial polypetide isolated from the Sargasso Sea
MKNIEDFKDKNIKLISMHDEMSSSYLSYAMSVIVSRALPDVRDGLKPVHRRILYAMYKGGYDWSKQFRKSARIVGDVIGKYHPPW

SEQ ID NO: 158068 - protein, 289 aa, Unknown
  Bacterial polypetide isolated from the Sargasso Sea
ILGSTGPNGLHHLIWEVLDNSVDEAMAGRCSKIKVSLEKNGSVTVEDDGSGIPVKPHPKTKISALTTVLTTLHAGGKFESGAYTVSGGLHGVGISVVNALSTYVKVEVQRDGHFWNQDFDLGKPKSKIKKGKVSKKTGTKVNFLADPEIFDETQTYDYNTVDERLRQTAFLNKGLKITLVDNRVKPPTKEEYHYKGGLTDFVEYLNDGFDPLHQKIISFSDQTKDSEIEVALQWKNEDDVTIKSFANNIHTLEGGTHEEGLRTAVTKAINDFAKKRNLHSDISFTGDDI

SEQ ID NO: 158069 - protein, 64 aa, Unknown
  Bacterial polypetide isolated from the Sargasso Sea
MNSEYSSDSIKVLKGLEAVRKRPGMYIGDTDDGSGLHQMIYEVLDNSIDEALAGYCDKIEVILN

SEQ ID NO: 158070 - protein, 221 aa, Unknown
  Bacterial polypetide isolated from the Sargasso Sea
MNKIIESNLNTILSEKYLSYAISTIVSRSLPDVRDGLKPVHRRIIYSMYQLKLFKSSSYKKCARIVGDVMGKFHPHGDQAIYDSLVRMAQDFSTRITLVDGQGNFGNIDGDNPAAMRYTEARLQDYTNYFFDGIEENSVDFKDNYDGQNLEPVVLPSQLPNILINGAMGIAVGMATNIPPHNIVELIDALKLKIKKDKASLTEILKIIHGPDLPTGGEIIL

SEQ ID NO: 158071 - protein, 166 aa, Unknown
  Bacterial polypetide isolated from the Sargasso Sea
MGEIAAKEIVPINLEEELKQSYLNYAMHVIVGRALPDARDGLKPVHRRILYAMHVLNNDWNKPPKKSMRIVGDVTGKYHPHGDTAAYETIVRMAQWWSLRYTLVEGQGNFGSMDGDPPAAARYTEVRMERIAHELLEDLDKETVKFIENYDGQETMPDVLPARIPN

SEQ ID NO: 158072 - protein, 242 aa, Unknown
  Bacterial polypetide isolated from the Sargasso Sea
ENAYLNYSMYVILDRALPNIGDGLKPVQRRILYAMSELGLNASSKYKKSARTVGDVIGKFHPHGDSAAYEAMVLMAQDFSFRYPFVDGQGNWGSQDDPKSFAAMRYTESKLTKFSDLLIDELKQGTVDWQPNFDGSLLEPVIFPAKVPSILLNGTTGIAVGMATDIPSHNMTEVIDATIHVLENPKTSVDQILKYIKGPDFSNKAPIVASPEELNEMYSTGRGAFKMKCAWKKEGNDIIVTD

SEQ ID NO: 158073 - protein, 228 aa, Unknown
  Bacterial polypetide isolated from the Sargasso Sea
LSDCNSTDLNETELFFVEGDSAGGSAKQSRERKFQAIMPLRGKILNTWDLESSEIMKSAEIKDISTAIGVNPGNPDIESLRYGKICILADADSDGLHIATLLCALFLRHYKPLIKAGHIFVAMPPLFRIDCAKEVFYALDEDEKDSIVKKLKTKPGKPKIDIQRFKGLGEMNPSQLRETVMDPKTRRLVQLTITSTDNVNSMMDLLLSKKNAGARKEWLEKRGKIVTV

SEQ ID NO: 158074 - protein, 327 aa, Unknown
  Bacterial polypetide isolated from the Sargasso Sea
SPFCRRSREIGVHKDDPKSFAAMRYTESRLTKFSDLFLDEINMGTIKWAPNFDGTLNEPKTLPSKVPNILINGSSGIAVGMSTDIPSHNLQEIINAVIAFLDSNKLSVKDLRKIIKGPDFPTSGEIMLGESELDEIYNHGTGNIKVRATYTVHGKEIIIESIPYQANTTKIIEQIQEQIHLKKNVFLDSVMDASDQDHPVRIIIKIKGRTYGSDEIMSHLFFTTDLEKSMRVNLNMIGLDGKPQVKNLLQILSEWIKYRLTTIKNKLTWELDKINQRIHILDAYIIVYNNLDKIISMIRNEDDPKKKIVRTFKFTDISYEAIINIRI

SEQ ID NO: 158075 - protein, 291 aa, Unknown
  Bacterial polypetide isolated from the Sargasso Sea
QRRILYSMYETGIRPTGPSRKCSKVVGDVMGNYHPHGNDAIYGTLVRLGQNFSTRYPLIEPQGNFGTPDDPPAAMRYTESRMSSLSSQLLDGIDEDTVNFEPNYSGETSEPKVLPARFPNLLVNGAEGIAVAMATNMPPYNLREITDAVKYTVENKDVKPKDYLKIIKGPDFPTGGLVVDTPTIKEAILKGRGSIKIRAVADVEELGRGRSAIVVKELPYQASTDRIMEKIATLVQDKKLLGISDLRNESSDRNGTRLVVELKRDAVPQVVLNQLFKQTQLQDTFSVNSVA

SEQ ID NO: 158076 - protein, 131 aa, Unknown
  Bacterial polypetide isolated from the Sargasso Sea
YTTFNRDFFASNDYKTVTTLGEQLNNLLEEGAYVQRGERKKPVSTFKEALDWLMTESTKRHSIQRYKGLGEMNPDQLWETTMDPEVRRMLKVTIEDAIAADQIFNTLMGDAVEPRRDFIESNALAVSNLDF

SEQ ID NO: 158077 - protein, 238 aa, Unknown
  Bacterial polypetide isolated from the Sargasso Sea
DHDSYKVSGGLHGVGVSVVNALSEKLKLEISRNGNKYYIEFKNGEAKGPLKIIGKSKETGTQITFLPSREIFSSIKFSYGILIKRMRELAFLNKNIKIIFTDASQKKEKTDEFQYSGGILEYVEFLDDKREKLKNKNENDLFKKPIYIEGKKNNIEVECSLKWNASYSEDVFAYTNNIYQKDGGTHLLGFRSALTRVINKYANEHNLLKKNKLTISGDDIKEGLTCVLSTKIPDPKFS

SEQ ID NO: 158078 - protein, 291 aa, Unknown
  Bacterial polypetide isolated from the Sargasso Sea
LTFFYRELQDLINGGYLYIAQPPLYKLKKGKKEEYVLTDDDLNNLILSNAVRGTEVRAKNKKKGIEGDGLLNTILDYSNSLSVVEKIEKQAGTIAAKAISLHKPITKTEANNKKKLEVWIKGLSRTASKIAKEKGYKASVSIDYDDDGIGYINTEEEIGGVTHHGMIANSFLRSNDYKVFGRVQKAQKVFSGPVVIDNGSEITEYANIEDCLNQIVIASKRGLNVQRYKGLGEMNPDQLWETTLDPNTRSLLQVKADDDAGLTFETLMGDEVPPRREFIEENALNAGNVDV

SEQ ID NO: 158079 - protein, 72 aa, Unknown
  Bacterial polypetide isolated from the Sargasso Sea
MVDINRDNTLPRDIVDEMRESYLNYSMSVIVSRALPDVRDGLKPVHRRILYGMSELESSWNRPYKKSARIVG

SEQ ID NO: 158080 - protein, 89 aa, Unknown
  Bacterial polypetide isolated from the Sargasso Sea
MDLGRDNILDKQLVKELEESYLNYSMSVIMSRALPDARDGLKPVHRRILFSMSEMSAMWNRPYKKSARVVGEVLGKYHPHGDSSIYDAL

SEQ ID NO: 158081 - protein, 302 aa, Unknown
  Bacterial polypetide isolated from the Sargasso Sea
NLEVWIKRGGQEYNMSFSNGDRTSELEIVDSVGKANTGTAIRFWPNESYFDSADIRLDEIKHNLRAKAFLCPGLKIKFKDEETGEKCEWEYQEGASEYLVEMLENIECIPSVPFSGKANSDEQELEWSMTWPDRDHEAIQESYVNLIPTKYGGTHVSGFRSGLSESVKEFADYRNLLPRGVKLSPEDVWMGLSYIISVRIEDPQFSGQTKEKLSSRSVSGFVTGLIKDAFTLWLNQHPEAGDQIVARAIENAQKRAKKNVKVKRKKATGGPTLPGKLADCTSDEPDLCELFIVEGDSAGGSA

SEQ ID NO: 158082 - protein, 300 aa, Unknown
  Bacterial polypetide isolated from the Sargasso Sea
DNSVDEALAGFCNEIHVVINSDGSISVEDNGRGIPVGIHEEEGIPAVELILTRLHAGGKFDNSNYKVSGGLNGVGASVVNALSNKMIAEIHREGFLWKQEYKKGNTASTLQQIEDSRKTGTNITFWPDDTIFDHVEFNYEILAHRLRELAFLNRGIAISIRDNRSERFQEFKYDGGISSFIKHINENKNILHEDPVYFSGKSEDVEIEVAFQYNDSYTERIYSFVNTINTIDGGTHLTGFKGALTRTLNNYKTSNNIANDSKENFSGEDVREGMAAVISIRVPEPQFESQKKIKLTNVEI

SEQ ID NO: 158083 - protein, 324 aa, Unknown
  Bacterial polypetide isolated from the Sargasso Sea
INGISDLRDESDKKGCEIYIELKRDAQEAIILNQLFKHTQLQTSFGINIVALVDGHPKTLGLREIFYHYVNHRKDVIRKRTEYDLRIAKNRLHILEGLRIALQHIDEIIALIKKSETANIAKEKLIETYKLSEKQASAILEMRLQRLTGLEQEKIENEYNELIVKIADLEDILVNQPRVLQIIKDEHTELKNRFGDERRTEIGEEIHNVNMEDLIPKQTVALLRTQNGFIKRMAVSNFRSQLRGGRGVSGMSTRDEDIIKQIIITSSHDYILCFTSLGKVHKIKAYQIPESSRTSKGLSISHLFELEENEIITSLIQVESLIQA

SEQ ID NO: 158084 - protein, 73 aa, Unknown
  Bacterial polypetide isolated from the Sargasso Sea
MSEDKRSNKISNDYGAEQIQVLEGLEPVRKRPGMYIGFTGPRGLHHLVYEVVEYSVDEALAGHCDHIEIVSRA

SEQ ID NO: 158085 - protein, 244 aa, Unknown
  Bacterial polypetide isolated from the Sargasso Sea
MSDSIELSLDGVEQMPLRRFTEEAYLNYSMYVIMDRALPHIGDGLKPVQRRIIYAMSELGLSAQSKHKKSARTVGDVLGKYHPHGDSACYEAMVLMAQPFSYRYPLVDGQGNWGAPDDPKSFAAMRYTEARLSKFSEVLLSELGQGTVEWGANFDGTLKEPKTLPARLPHILLNGITGIAVGMATDIPPHNVRELVSACIELLDNPKTELERLMELVPGPDYPTEAEIITPRDDIAKIYESGKG

SEQ ID NO: 158086 - protein, 228 aa, Unknown
  Bacterial polypetide isolated from the Sargasso Sea
MTKENLDKQSIKKYAENAYLNYSMYVILDRALPNIGDGLKPVQRRILYAMSELGLNASSKYKKSARTVGDVIGKFHPHGDSAAYEAMVLMAQDFSFRYPFVDGQGNWGSQDDPKSFAAMRYTESKLTKFSDLLIDELKQGTVDWQPNFDGSLLEPVIFPAKVPSILLNGTTGIAVGMATDIPSHNMTEVIDATIHVLENPKTSVDQILKYIKGPDFSNKAPIVHLQKS

SEQ ID NO: 158087 - protein, 311 aa, Unknown
  Bacterial polypetide isolated from the Sargasso Sea
AEALLEGLDESAVDFRENYDGTLSEPIVLPASFPNLLANGASGIAVGMATNIPPHNIAELCDACLHLIKKPDARNETLLNFVPGPDFPTGGVIVESVESIAETYKTGRGSFRLRANWEVEHLDRGQWQIIVKEIPYQVQKSKLIERLAELIQTKKIPILSDVRDESADDIRLVLEPKSKNIDPEILMGLLFRNSDLEIRFSLNMNVLIDGVTPKVCSLKEVLKAFLNHRREVLIRRANHRLEKIDKRLEVLEGLIIAFLNLDRVIDIIRYDEDPKKALMAEDWSIEHHRATNESDYIAPTNLEGELTEIQV

SEQ ID NO: 158088 - protein, 324 aa, Unknown
  Bacterial polypetide isolated from the Sargasso Sea
SLKSSLQHFIEFRKTVVRRRAEYDLARARERAHILEGLRVALENLDDVIALIRQSPDVENARNGLTVKFGLTDQQAQAILDMQLRRLAALERERIENEYQDLMKKIAELEELLSSASKVLAVIKLENSELRKNFGQDRRTQISDEEARDQSREELTPHADVVFTLSDRGYIKRLPIALYRLQHRKGKGVRGQQPREGDAVQQLIVADTHDWLLFFTDKGKIYRKRVFEVSQDSSRTSRGTPIQNLIDTINPNEEIVTAVVNISDPNADQYIFMATRKGKIKKMHLSKFANIRRSGIAAFDLEKDDSLLTARLVSDGMTAILVSK

SEQ ID NO: 158089 - protein, 67 aa, Unknown
  Bacterial polypetide isolated from the Sargasso Sea
MSDTESYNSDSIKVLKGLEAVKKRPGMYIGDTEDGTGLHHMVHELVDNSIDEALAGYCDEIIVIIHK

SEQ ID NO: 158090 - protein, 86 aa, Unknown
  Bacterial polypetide isolated from the Sargasso Sea
MQKTEIPKDKNIKQISMHDEMSSSYLSYAMSVIVSRALPDIRDGLKPVHRRILYAMYKGGYDWAKQFRKSARIVGDVIGKYHPHGD

SEQ ID NO: 158091 - protein, 294 aa, Unknown
  Bacterial polypetide isolated from the Sargasso Sea
SEKIKWFFEDGLKSYLEEASDGVDLILEESILSSKDSDSQEVEFVINWSSRPPNNKLDETYVNLIPTSQGGSHLNGFKSGLLEALKEFCDYRSLVPKGIKLNADDVLNNAIFVVSSKLQNPQFAGQTKERLDSKDHMSFVSSSTKDILSIWLNTHTEEGEKIAELAIISAQTRAKAANTVERKKNFKGPALPGKLSDCNSEDLNETELFLVEGDSAGGSAKQARERSFQAIMPLRGKILNTWDLESEDIIKSQEIKNLSTAIGVLPGNNDITGLRYGKICILADADSDGLHIAT

SEQ ID NO: 158092 - protein, 247 aa, Unknown
  Bacterial polypetide isolated from the Sargasso Sea
MYQKHNTFAKEILVPKKNTYSAKDIEVLEGLDPVRKRPGMYIGNTNEDGLHHLVNEVLDNSIDEVVAGYAKNIFFHYSKDNSITIKDDGRGIPVDFHPRFKNKRALEIVMTTLHAGGKFSDKVYKTSGGLHGVGISVVNALSKKMDVKVFNKSKLYSQNYSQGKIKSKIKIQKCSAKDKGTEIKFTPDNEIFENINFSPKKLFNFIRMKSVLVKGTKISFQIDKDLIKDKTPNKIDFFYPNGLVDFI

SEQ ID NO: 158093 - protein, 295 aa, Unknown
  Bacterial polypetide isolated from the Sargasso Sea
FYWRLVDGVPKIMSLKTILQHFVDFRHEIVVRRTEFELKEAEARAHILEGLKIALDNIDEVIEIIRGSKDGTMAKEGLMNGFNLSEIQAQAILDMRLQKLTGLEVDKVVEEYKELIKHIAHLKGILESKSQRMEIIKNEMIEIRDQYGDERRTEIVPVDMDFSMEDMIAEEEVVLTITHQGYIKRTALNTYRTQRRGGRGVQGAMSKEEDFVEHLFIANTHNYMLFFTDQGKCYWLKVYDIPQGGRAARGRAIVNLIGCDPGEKIEAFVSVKEFDDKHYIAMATRSGIVKKTVLS

SEQ ID NO: 158094 - protein, 124 aa, Unknown
  Bacterial polypetide isolated from the Sargasso Sea
LYRKMPELIEAGYIYIAQPPLYKISKGRQVEYAFTDLEKDKIISNWSENTNTKIDLQRYKGLGEMNAEQLWETTMDPENRTLLQVTIEQPDEADDRFTTLMGEEVAPRREFIVTRANLVSNLDI

SEQ ID NO: 158095 - protein, 161 aa, Unknown
  Bacterial polypetide isolated from the Sargasso Sea
SKSIENLRYNKIIIMTDADVDGDHIAALLLTFFYNNFPEIIEKGHLYIAQPPLYRITFKGQSFYAQTEDSKNKIMDQEFNGKGLISRFKGLGEMPPNQLKETTMSKKTRKLLKVTVPKRDIEEADRRREVDSLVNILMGKKPELRFKYIQENANSINDFDI

SEQ ID NO: 158096 - protein, 106 aa, Unknown
  Bacterial polypetide isolated from the Sargasso Sea
MSSEAKKYSAESIKVLEGLEAVRKRPAMYIGDVGKRGLHHLIYEVVDNSIDEALAGHCTKITVFFNKDGSVTVEDNGRGILSWDAQRRKKTGCGGCYDCFTCWWKV

SEQ ID NO: 158097 - protein, 175 aa, Unknown
  Bacterial polypetide isolated from the Sargasso Sea
MNKIIESNLDAILSEKYLSYAISTIVSRSLPDVRDGLKPVHRRIIYSMYQLKLFKSSSYKKCARIVGDVMGKFHPHGDQAIYDSLVRMAQDFSTRITLVDGQGNFGNIDGDNPAAMRYTEARLQDYTNYFFDGIEENSVDFKDNYDGQNLEPVVLPSQLPNILNNGAMGIAVGMA

SEQ ID NO: 158098 - protein, 284 aa, Unknown
  Bacterial polypetide isolated from the Sargasso Sea
PHNLNELIDGSLALIANPEITDQELIKLIPGPDFPTGGQILGREGIRETYLGGRGSVTMRGVANIETIEAPGRPDRDAVIITELPYQTNKAALIERIAELVNDKKLEGISDIRDESDRDGMRIVVELRRDAYPQVVLNNLFKLTPLQSNFSAYMLALVNGEPILLTLRKMLEVFLDFRVETIERRTRYLLRKAEERDHILLGLLLALDQLDPIIALIRAAPDTATARQQLQDRHGLSDIQADAILQMQLRRLTALEADKIRLEHEDLVTKIADYKDILGRRERV

SEQ ID NO: 158099 - protein, 213 aa, Unknown
  Bacterial polypetide isolated from the Sargasso Sea
MHLCFSSKLKNPQFAGQTKERLDSKDHMSFVSSSTKDSLSIWLNQHTEEGEKIADLAIAAAQKRIKSSTKVDRKKTFKGPALPGKLSDCNCDNIEESELFLVEGDSAGGSAKQARDRRFQAIMPLRGKILNTWDLESADIIKSQEIKDLATAIGSLPGDTDISNLRYGKICILADADSDGLHIATLLCALFLRHYKNLVTSGKIFVSMPSVYI

SEQ ID NO: 158100 - protein, 98 aa, Unknown
  Bacterial polypetide isolated from the Sargasso Sea
MSTNKNYQAESITVLKGLEAVRKRPAMYIGDVGKKGLHHLVWEVVDNSIDEAMAGHCTEIQVSLLEGGIISVEDNGRGIPVDIHKEEGKSGLELVMTV

SEQ ID NO: 158101 - protein, 245 aa, Unknown
  Bacterial polypetide isolated from the Sargasso Sea
VFSHKGFEEEIIKGRLKELAYLNKKLSIKLINEPEETETEYCFPGGLSDFVKYLDGNEDLIHDEVISVTKEDIEVPVDLALRYSTNYNSNIFSFVNNINTIEGGTHLSGFRSALTRALNSYANKNDLIKTKKNEKFSLSGDDFREGLTVVISVKVQEPQFEGQTKTKLGNGEVKGMVDNVVYDGIQAFLEQNPKVGKRIIEKAAEAARARIAAKKARELVRKKSGLGSTTLPGKLADCSNKDPLQ

SEQ ID NO: 158102 - protein, 291 aa, Unknown
  Bacterial polypetide isolated from the Sargasso Sea
SEKLDLFIERDGNKYFVEFNNGDAKKPLKVIGKSKSTGTKINFLPSKEIFSSTKFSFSILQKRMRELAFLNKGIKISLNDLTQKKIKSVNFKFDGGIIEFVEYLDEKREKLKNKNNNDLFKKPIYIEGLKNNVEIQCSLKWNSGYNEDVYPYTNNIYQKDGGTHLLGFRTALTRVINKYASEQNLLKKNKVTLSGDDIKEGLTCVLSVKIPDPKFSSQTKDKLVSSEVRNIVESIISEKLSIWFDQNPSVSKIILTKIIQAAVARDVARKARENVRRKGALELTGLPGKLA

SEQ ID NO: 158103 - protein, 271 aa, Unknown
  Bacterial polypetide isolated from the Sargasso Sea
KYFIEFRNGDPVKPLKLMGKSKISGTQITFLPSKKIFSSTKFSFNTIQKRMRELAFLNKGIKISINDLTLKKNKNVDFKFDGGISEFVEFIDKDRAKLKNKNDNDLFKKPIFVEGKKESLEVECSLKWNAGYSEDVYSYTNNIYQKDGGTHLLGFRSALTRVINKYAQEQNLLKKNKVSISGDDIKEGLTCVLSIKIPDPKFSSQTKDKLVSSEVRNIVETLVNEKLSVWFDQNPSIAKIILAKVVQAALARDVARKARENVRRKGALELT

SEQ ID NO: 158104 - protein, 188 aa, Unknown
  Bacterial polypetide isolated from the Sargasso Sea
IINVKKVTENRALQNEEISSLIKAIGTGIKAEYNGEESRYDKIIFLTDADVDGAHIRTLLLTFFFKFMPGLIKEGKVWISEPPLYRAKSSGSINYLKDDQALENFKKENKNKKFDISRFKGLGEMNAGELWDTAMNPESRTLIKVSIADGKAAEARAANMFEILMGNDVAKRKTFIEENAKDVRFLDV

SEQ ID NO: 158105 - protein, 143 aa, Unknown
  Bacterial polypetide isolated from the Sargasso Sea
MTDNYGAESIQVLEGLEAVRKRPGMYLGDPHDGTALHHCIWEVVDNSVDEHLAGHTSEIKVYLHEDHSLSVRDFGRGIPVAIHEKYGISAAEVIMTKLHAGGKFDNSSYKVSGGLHGVGVSAVNAVSEWMEVTIHRNQKIYFQ

SEQ ID NO: 158106 - protein, 263 aa, Unknown
  Bacterial polypetide isolated from the Sargasso Sea
MEVVNGIISLIDKADITTEELMDHIKGPDFPTAGLIMGMDGLKDAYETGRGKIKMRARAHIESNKNGKDSIVVTEVPYQTNKANLVEKIADLVRDKKVEGITDLRDESDKDGIRVVIETKRDAVPEVILNQLYKHTQLQDTFGIILLALVGGVPKIMSLKTILQHFVDFRHEIVVRRTEFELREAEARAHILEGLKIALDNIDEVIEIIRGSKDPAMAKEGLMNGFNLSEIQSQAILDMRLQKLTGLEVDKVVGEYKELIKHI

SEQ ID NO: 158107 - protein, 284 aa, Unknown
  Bacterial polypetide isolated from the Sargasso Sea
MEEEFLVEIHKTEGKPALEVVMTVLHAGGKFDKNTYKVSGGLHGVGVSVVNALSESLIAEVHRDGFYYKQEYKIGEPTTEVEKIGKSDKTGTIISFKPDQSVFSHKGFEEEIIKGRLKELAYLNKNLSIKLINEPEETETEYCFPGGLSDFVKYLDGNEDLIHEEVISVTKEDIEVPVDLALRYSTNYNNNIFSFVNNINTIEGGTHLSGFRSALTRALNSYANKNDLIKTKKNEKFSLSGDDFREGLTVVISVKVQEPQFEGQTKTKLGNGEVKGMVDNVVYD

SEQ ID NO: 158108 - protein, 238 aa, Unknown
  Bacterial polypetide isolated from the Sargasso Sea
MNENITINAEGIEQIALKNYTEQAYLNYSMYVINDRALPNIGDGLKPVQRPIIYAMSELGLKQTAKFKKSARTIGDVIGKFHPHGDSACYEAMVLMAQWFTYRYPLVDGQGNWGSQDDPKSFAAMRYTESRLRKYAELLLSELGQGTVDWRPNFDGTLEEPEILPARLPNVLLNGGSGIAVGMATDIPPHNLKEVASACVHLLDKPKSSIDEICKIIKGPDFPTEAELVTPKGDIVEL

SEQ ID NO: 158109 - protein, 312 aa, Unknown
  Bacterial polypetide isolated from the Sargasso Sea
RMQKISEDLLSDIDKETVDFQLNFDDTIMEPTVLPTRVPALLINGASGIAVGMATNMPPHNLSEVIDGIIQYIDNNDITIDELIQYVKAPDFPTGGTIYGYDGVKEAFHTGKGRVVMRGKAVIENVNDRECIIVSEIPYLVNKADMIRKTAELINDGKIEGISTIRDESDRKGMRIVYVLKRDAIPNIVLNKLYKFTPLQSSFSVNNVALVNGRPQLLNLKDLIHHFVDHRHDVVVKRTTFELKKAEQRAHILEGLIIASDNIDDVISLIKKSSNAEEARLKLEKKYKLSETQAKAIIEMRLRQLTGLEQSK

SEQ ID NO: 158110 - protein, 261 aa, Unknown
  Bacterial polypetide isolated from the Sargasso Sea
EGISDLRDESDRQGVRVVVELKRDAEPEVVLAQLFRFTPLQTSFGVNMLALDGGQPRLMNLKEILEAFIVFREEVIRRRTIYQLVKARDRAHILAGLAVAVANIDEVIELIRSAPDSQTARHELMACEWLAADVAPMIALLDEPGRGVSDGKYTLSEEQSKAILELRLQRLTGLERNKIGDDLRELGEQIGEYLSILASREKLFGILRDELLEMKQQFGDERRTTIEESEFEHDLEDLIQREDMVVTVTQSGYVKRVPLST

SEQ ID NO: 158111 - protein, 274 aa, Unknown
  Bacterial polypetide isolated from the Sargasso Sea
KDSIVITEVAYQTNKANLVEKIADLVRDKKVQGITDLRDESDKDGIRVVIETKRDAVPEVILNQLYKHTQLQDTFGIILLALVNGIPKIMGLKTVLQHFIDFRHNVVVRRTEFELREAEARAHILEGLKIALDNIDEVISIIRESKDPVMAKEGLINSFNLTEIQSQAILDMRLQRLTGLEVDKVVKEYKELIQHIAHLRGILESKSQRMEIIKSELLEIRDQYGDERRTEIVPVDSDFSMEDMIAEEEVVLTITHQGYIKRTALNTYRTQRRG

SEQ ID NO: 158112 - protein, 147 aa, Unknown
  Bacterial polypetide isolated from the Sargasso Sea
MAREYNAESIEVLSGLDPVKKRPGMYTETSRPNHLALEVIDNSIDEALAGHASTIDVELNKDGSLSVEDDGRGMPVDIHPEEGIPAAELIFTRLHAGAKFSDEDYKFSGGLHGVGVSVVNALSLNLTAEIKRGGHKYLLEFEDSEKK

SEQ ID NO: 158113 - protein, 326 aa, Unknown
  Bacterial polypetide isolated from the Sargasso Sea
LWNPDDPPAAMRYTESRMSSLSSQLLDGIDEDTVNFEPNYSGETSEPKVLPARFPNLLVNGAEGIAVAMATNMPPYNLREITEAVKYTVENKDVKPKDYLKIIKGPDFPTGGLVVDTPTIKEAILKGRGSIKIRAVADVEELGRGRSAIVVKELPYQASTDRIMEKIATLVQDKKLLGISDLRNESSDRNGTRLVVELKRDAVPQVVLNQLFKQTQLQDTFSVNSVALVEGVPKVLSVPELIKYYIDHQIDVIQRRTKHRLQKAENRLHIVEGLLLALKKIDQIIKVIKASKDVDTARKSLNDKFKLSEIQASHILDMPLRRLTAL

SEQ ID NO: 158114 - protein, 283 aa, Unknown
  Bacterial polypetide isolated from the Sargasso Sea
MPELIEKGYVYIAQPPLYKLKKGKQETYVKDDAELRELLVAEILDDAQIVLNKKGESISGEALGKFISQHEKVQALVKGLTHNYPIELLESVKHVEILKGLEDDKEVKKWCKLIEKYLNENAEQGSAWSVAAEKNEETGTIEPSVKLVKHGTSSSWSLNKAFFRSKAYKDIAAHGADMSDLFTKESYFEINSKKLPVENFANALEEVLTISERSFTKSRYKGLGEMNADQLWDTTMNPDMRILGQVSIEDAQVADDLFHALMGDEVEPRRDFIDENAKLVVNL

SEQ ID NO: 158115 - protein, 308 aa, Unknown
  Bacterial polypetide isolated from the Sargasso Sea
MRKKYIKKKSPKKGKLKNKIVSKPSKSYTAKDIEVLEGLEPVRKRPGMYIGGTDILAMHHLVSEVLDNSMDEVVAGHANKVEINLKNNSTIEISDNGRGIPVDKHPKFKIPAAEVIMTTLHSGGKFSNNSYKTSGGLHGVGISVVNALSKKLTLEIARDKKYFSQVYQQGNPKTKLKSFSKGSLKKGTRIVFSPDTEIFGNDAYFDSSIIYNMAKAKAYLIPDVEIHWSCDKSVSKKNVPIKDKLHYSDGIKDYLHSLCSPQDPIFEDPFYFNTKITEEDGKIEGIINWFDSIEPLNESYCNTIKHPW

SEQ ID NO: 158116 - protein, 327 aa, Unknown
  Bacterial polypetide isolated from the Sargasso Sea
DRAIAELVKDKKIEGISELRDESDKDGLRIVIELRKGEMGEVVLNNLYAQTQMQSVFGINMVALVEGAPRLLNLKEILDSFVRHRREVVSRRTVYLLRKAREKGHILEGLAVALANIDQVIELIKKSPSSNEAKEELLKRSWRSDSVLKMLGEAGSDSCRPDDLAEQYGLKDELYFLSPDQAQAILDLRLHRLTGLEHEKLINDYKELLEQIADYLDILENRSRLVSVVRGELENVRNEYGDERRTEIVGSQQDLTMEDLISEEDRVVTISQNGYAKTQPLADYSAQRRGGTGKAAASVKEEDFVEHLLIANTHDTLLCFSSVGKVY

SEQ ID NO: 158117 - protein, 109 aa, Unknown
  Bacterial polypetide isolated from the Sargasso Sea
MSDIAKEILPIAIEDELKKSYLSYAMSVIHGRALPDVRDGLKPVHRRILYAMHDLRNFYNKPYKKSARVVGDVIGKYHPHGDSAVYDAMVRMAQDFSMRYTLIEGQSNF

SEQ ID NO: 158118 - protein, 269 aa, Unknown
  Bacterial polypetide isolated from the Sargasso Sea
LTTLHAGGKFDSKTYAVSGGLHGVGVTVVNFLSEYLEVEIARDGKLWKQRYEEGKVVSKLTPTGKSKKTGTKITFKPDIKIFQPVINTKGSYDFEPKFDFKYLCNRTRELAFLNAGLKITLNDDRTLETETYHYKGGITSFVEHLNHGKKTINSKPIFVSGSKDKNIVEIAIQYNEGYSETIYSYVNNINTIEGGTHLSGFRSALTRSINKYAKEYNIIKNGNVQIMGDDTREGLTAVVSIKVPEPKFEGQTKTKLGNSETSGIVESLL

SEQ ID NO: 158119 - protein, 129 aa, Unknown
  Bacterial polypetide isolated from the Sargasso Sea
MAKKKTYGAKDIEVLEGLLPVRKRPGMYIGNTNIDGLHHLVNEILDNSIDEVVAGYAKKIDFKYNLDNSITIKDDGRGIPVDFHPKFKNKRAFEIVLTTLHSGGKFTNNAYKTSGGLHGVGISVVNALS

SEQ ID NO: 158120 - protein, 241 aa, Unknown
  Bacterial polypetide isolated from the Sargasso Sea
YKVSGGLHGVGVSVVNALSKWLKLQIKRGGKKYILEFKEGLCVKPLTEIDSCNDTGTEIHFKPSNEIFSAIEFNYSILVKRIRELSFLNDGVNIVLSDEKTAKQENFANSGGLTGYVEFLNQSKHPIHPKIFQIKKDANNITIEIALQWNNSYYENVICFTNNIPQRDGGTHLTGLRSGMTRCINKYLEINDLGKKAKVSITGDDLREGLTCILSVKLAEPKFSSQTKDKLVSSEVRQPVE

SEQ ID NO: 158121 - protein, 269 aa, Unknown
  Bacterial polypetide isolated from the Sargasso Sea
KSFLNKFIEFREEVVARRTIFELEKARERSHLLCGLAVAVSNVDEVIAIIRNSENPSKAKETLMNTKWKVKELSQYLELIDDPLHTINEDGTYLLSEQQAKAILELRLQRLTALGATEIGSELEDLADKIRICLDILKSREQIRKIISEELKEVKENYAIPRRSEIQEFEGDFEDEDLIEKEEMVVTVTREGYIKRTALSEYREQKRGGKGTQGMNTKETDVVTNLFVTNTHTPLLFFSSDGFVYKLKTWRLPQSGRSSKGKAIVNLLP

SEQ ID NO: 158122 - protein, 155 aa, Unknown
  Bacterial polypetide isolated from the Sargasso Sea
HIRTLLLTFFNNKPFNQLIEKGHLYLAQPPLFKVTRGTKSTYIKNEKDLEKYILKSSDKGEKKLKKFDLEKFLSEEKQKLNIQRFKGLGEMNPEELWQTTLNPENRTLLKIEYSKGTKDKSKEDQNIIKILMGDEVAPRKDFITEKALEVENLDI

SEQ ID NO: 158123 - protein, 276 aa, Unknown
  Bacterial polypetide isolated from the Sargasso Sea
GFKSGLLEAIKEFCDYRNLIPKGIKINSDDILANCIFVISSKLKNPQFAGQTKERLDSKDHMSFVSSSTKDSLSIWLNQHTEEGEKIADLAIAAAQKRIKSSTKVDRKKTFKGPALPGKLSDCNCDNIEESELFLVEGDSAGGSAKQARDRRFQAIMPLRGKILNTWDLESADIIKSQEIKDLATAIGSLPGDTDISNLRYGKICILADADSDGLHIATLLCALFLRHYKNLVTSGKIFVSMPPLYRIDAAKEVFYALEENEKESIVKKIKKQNSK

SEQ ID NO: 158124 - protein, 191 aa, Unknown
  Bacterial polypetide isolated from the Sargasso Sea
TEIFIVEGDSVGGSAKQARDRNTQAILPLRGKILNVASASKEKLSNNQEISDLKLALGYKANNIINLRYGKIIIMTDADVDGAHIAALLMTFFYTEMPSIIENGNLFLAQPPLYKLTLGDVSEYASDDAQKELLIKNKFKNSKNIEISRFKGLGEMPPKQLRETTMSKHNRKLIKIELPQRNFEEADKRRA

SEQ ID NO: 158125 - protein, 267 aa, Unknown
  Bacterial polypetide isolated from the Sargasso Sea
KGQTRFVIELKRDAPASVVLNNLYKHTPLQTSFAANMVALIDGVPRTINLADALNAYVQHQIEVVTRRSEYRLQQAGDRAHIVEGLLRALDLIDEIIALIRASEDRASALAELQLEPFEFSERQANHILDMQLGRLTRLGRTRLEEELVELQERIKELEEILNNETQLRSVIKSELSEVREEHDTPRRSQIVFDEGDMEVEDLIDNEPVVITLSKGGYIKSVAADTFRTQGRGGRGVQGARLKEDDILVRVLTTTAHSYLLFFTNKG

SEQ ID NO: 158126 - protein, 284 aa, Unknown
  Bacterial polypetide isolated from the Sargasso Sea
AIYDAMARLAQDFNVRYPLVDGQGNFGNIDGDNPAASRYTEARMTVIAEALLEGLDENAVDFRENYDGTLSEPIVLPASFPNLLANGASGIAVGMATNIPPHNIAELCDACLHLIKKPDARNETLLNFVPGPDFPTGGVIVESLESITETYKTGRGSFRLRANWEVEHLDRGQWQIIVKEIPYQVQKSKLIEKLAELIQTKKIPILSDVRDESADDVRLVLEPKSKNIDPEILMGLLFRNSDLEIRFSLNMNVLIDGVTPKVCSLKEVLKAFLDHRREVLIRRT

SEQ ID NO: 158127 - protein, 221 aa, Unknown
  Bacterial polypetide isolated from the Sargasso Sea
MHKEEKKPAVEVVMTVLHAGGKFDKDTYKVSGGLHGVGVSVVNALSEWLWVEVQRDGKIYKQDYKIGVTQNKLKETGKTKKSGTRVCFMPDSGVFNTTTFEYDIIAERLRELAYLNKGLEINLRDKREEDGQSDSFKFKGGLSDFVKYLDEHNNPLHNKVITVTKEDGDIPVDVALRYGNTYNDNILTFVNNINTIEGGTHLSGFRSALTRAMNNHASKNN

SEQ ID NO: 158128 - protein, 213 aa, Unknown
  Bacterial polypetide isolated from the Sargasso Sea
PAVEVVMTVLHAGGKFDKGSYKVSGGLHGVGVSVVNALSEWMWVEVKRDGGVHRQDYKIGEPQNKLKTVGKAKKTGTKVCFYPDSSIFKTIAFEYDIIAERLRELAYLNSGLEIVLRDQRIEDGQVDSFKFKGGLSDFVKYLDENNNPLHNKVITVQNDSGEVPVDVALRYSHSYNDNILTFVNNINTIEGGTHLSGFRSALTRAMNNHASKN

SEQ ID NO: 158129 - protein, 132 aa, Unknown
  Bacterial polypetide isolated from the Sargasso Sea
MDKKNFTSISLQEEMQRSYLEYAMSVIVGRALPDARDGLKPVQRRIIFAMYELGLTPDKPFRKCARVVGDVLGKYHPHGDQAVYDALVKLVQNFSTKYPTLDGHGNFGSVDNDPPAAMRYTETRLAPIAHKG

SEQ ID NO: 158130 - protein, 286 aa, Unknown
  Bacterial polypetide isolated from the Sargasso Sea
AKSLLEELGQGTVDWDSNFDGTLLEPTVLPARLPNLLLNGATGIAVGMATDIPPHNLNEVVNACIKILDEPKVSVEELYKIIPGPDFPTQAEIISSEEDLKEIYQSGRGSVRMRSTYSIENGEIVITALPHQTSSSKILEQIALQMDAKKLPMIVDLRDESDEENPTRLVLVPKSNRVDKDAVMNHLFATTDLQKNYRVNMNLIGLNGKPQTRDIKLVLKEWLTFRSQTVTRRLQYRLDWVLDRLHILEGLLVIYLNIDEVINIIRNEDDPKKVLQKKFKLSVVQV

SEQ ID NO: 158131 - protein, 33 aa, Unknown
  Bacterial polypetide isolated from the Sargasso Sea
ELVDGQGNFGSIDGDNAAAMRYTEFRMTKLSSE

SEQ ID NO: 158132 - protein, 94 aa, Unknown
  Bacterial polypetide isolated from the Sargasso Sea
MSDILDSGNSGSSEDSDRIIQTDLRNEMSRSYLEYAMSVIVGRALPDARDGLKPVHRRILYAMYELGLTSGRPYRKCARVVGEVLGKYHPHGDT

SEQ ID NO: 158133 - protein, 254 aa, Unknown
  Bacterial polypetide isolated from the Sargasso Sea
DETFIFSKDGEGQGIDVGINWTDEASKDLLKETYVNLIPTALGGSHLNGFKAGLLDSIREFCDYRNLLPKGIKINSEDILVNCVFVISSKLQNPQFAGQTKERLDSKDHTSFVSAAVKDSMSIWLNQHTEEGEKIADLAIRAAQKRAKSTVKVDRKKTFKGPALPGKLSDCNSDDIEQSELFLVEGDSAGGSAKQARERKFQAIMPLRGKILNTWDLESSDILKSQEIKDLTTAIGVTPGDDNISKLRYGKICI

SEQ ID NO: 158134 - protein, 155 aa, Unknown
  Bacterial polypetide isolated from the Sargasso Sea
EIRTDAELSEYYITIIMRMHGIDYEYVIDHEFIESSEYQRLKELNLAINDMMGKDAYIQRGERRQPVESFKEALEWLMNEAKRGQYIQRYKGLGEMNPEQLWETTMDPESRRMLQVTIEDAIGCDQLFTTLMGDQVEPRREFIEANALKVENLDV

SEQ ID NO: 158135 - protein, 247 aa, Unknown
  Bacterial polypetide isolated from the Sargasso Sea
LSEKLKLTINREGKKYFIEFLNGDAKAPLKSVGKSKVSGTEINFLPSKEIFSSTKFSNLILQKRMRELAFLNKGIKISLNDFTQKKPKNLEFKFDGGIIEFVEYLDEKREKLKNKNDNDLFRKPIYIEGSKNHVDVQCSLKWNAGYNEDVYPYTNNIYQKDGGTHLLGFRSSLTRVVNKYANEQNLLKKNKVSLSGDDIKEGLTCVLSVKIPDPKFSSQTKDKLVSSEVRNIVENIINEKLSIWFDQ

SEQ ID NO: 158136 - protein, 292 aa, Unknown
  Bacterial polypetide isolated from the Sargasso Sea
SGIAVGMATNIAPHNLGEVIDATMYLIENPNAEIQDLTKYIFGPDFPTGGQIIGKKGIIDGFETGKGGVVLRSKTSIENFKKDREAIIIHEIPYQVNKSKLIEKIAETVKNNIIEGISDLRDESDRNGVRVVIELKKDVDANIILNQLYKNTLLQTTFNSNMLALNKGKPEQMNLKEMLVAFIDFREEVITNRTIYDLNKARDKAHILVGLVVANENIDEIIELIKSSKDSKEAKQKLIKKKWILDEKNINFIKLVDEENIQLNKNVFLLSDKSAKAILELRLHRFDLSRER

SEQ ID NO: 158137 - protein, 282 aa, Unknown
  Bacterial polypetide isolated from the Sargasso Sea
SNLLVNGAGGIAVGMATSIPPHNLGEVVDGTLALIKNKDIKINELMKHIPGPDFPTGGLIIGKDIIKQGYKTGRGSFKIRGEISVENLKNGKDRLVVSSIPYQINKSNLNERIAELVRDKKIEGISDIRDESNSEGIRVSIDLRRNVEPETVKRQLYKYTSIESSFGFNSLAIVDQKPKTCTLKDFLENFLKFREDVVIKKTKFDLKKAEERVHILLGLSVSVENIDKVIKIIRSSKNPEEAKNSLLKTTWKINQASKLIKLVDSKNYKGKYVLSKDQVISI

SEQ ID NO: 158138 - protein, 282 aa, Unknown
  Bacterial polypetide isolated from the Sargasso Sea
PKKTWVCTFGSTNQDGLHHLVNEILDNSIDEVLAGYASKISFHYKKNGSINIKDDGRGIPVDFHPKYKNKRALEVVLSTLHAGGKFNNNAYKTSGGLHGVGISVVNALSSYLKVNVYKNGKAYRQEYSKGKVKTKVKIEKCSKKLKGTEIAFLPDDTIFEITNYDPKKLYNFINMKSVLVGGTTINFEIDKELINDKTPNKKDFYYKNGIEDFFKLEFSSKNKLFEKDFSLKKKLNDNKIFEVYISFNKNESSSLKSFCNTIETPDGGSHETGIKNGLIKAI

SEQ ID NO: 158139 - protein, 113 aa, Unknown
  Bacterial polypetide isolated from the Sargasso Sea
MQENQNVEITDYDESNITVLQGLEAVRLRPGMYIGGVDNTALHHLVFEVVDNSVDEALAGFCTEIHVVINSDGSISVEDNGRGIPVGIHEEEGIPAVELILTRLHAGGKFDNS

SEQ ID NO: 158140 - protein, 272 aa, Unknown
  Bacterial polypetide isolated from the Sargasso Sea
ITLVDEALAGHCDRIVVVLGEDGSASVSDNGRGIPTDVHPRTGKSALETVLTVLHAGGKFGAGGYKVSGGLHGVGVSVVNALSEWVQVTVRRQGQVHRQRFERGAAIGALASESQPAAESGETGTTVCFKPDLEIFTGGIVFDYATLSARLRELAYLNGGVQIVFRDERESARDEEGNPHEETYFYKGGIKEYVAYMNKEKDALHPEIIYVNSEKDGVQVEAALQWCSDAYSDSILGFANNIRTVDGGTHIEGLKTVLTRTLNAFAKKLGKR

SEQ ID NO: 158141 - protein, 283 aa, Unknown
  Bacterial polypetide isolated from the Sargasso Sea
RDGFWWSQSYQLGVPDAPVAKGKATDGHGTIVRFYPSDEIFETTDFSFETLSTRFREMAFLNKGLTIALKDMRPGHVDEKGEQLEVVYHYEGGIVDFVKYINSTRGELHKSIIALEQEDTKRKMALEIAMQWNSGFSESVFTFANAINTHEGGTHEEGFRTALTSVVNKFGEDWGFIRKKEDRLTGEDIREGLTAIVSIKISEPQFEGQTKTKLGNTEAKTFTQKCVNEALTEWFEKNPTEGKDIVRKSIDAAAARVAARKARDLSRNRKGLLEGRGMPGKLD

SEQ ID NO: 158142 - protein, 261 aa, Unknown
  Bacterial polypetide isolated from the Sargasso Sea
EGTELFIVEGDSSGGSAKQGRNRSNQAVLPLRGKILNTYVEELTIKKNGNGNKNGSDHRTKALAKMISSNEIVTLINALGLDPKVQEIDLKDLRYGKIIIMTDADVDGSHIRALLLTFFNNKPFNKLIENGHVYLAQPPLFKINKGSKGIYIKDEKELENYILNNNKDLKKIKRGSKEFIKALDLEKSKMNIQRFKGLGEMNPEELWSTTLDPETRNLLQVQYSKDTKKDQNLIHTLMGNDVALRKDFIISNAINVQNLDI

SEQ ID NO: 158143 - protein, 289 aa, Unknown
  Bacterial polypetide isolated from the Sargasso Sea
EILDNSMDEAVAGQATRIEVELHPDYSISVKDNGRGIPTDPHPKFPDKSALEVIFCTLHAGGKFSGEAYQTSGGLHGVGASVVNALSDYMIVEVARNKELFRQSFSRGNPTKTIEKLGSAPNRRGTMVHFHPDEEIFGSHRFKPARLFKTIRSKAYLFSGVEIRWKSEIDDNVTPLEASFHFPGGLSDYLGETLENNSTYSELPFAGSVDFQERFQTAGKVEWAINWTPARDGFIQSYCNTVPTPEGGTHENGFWSAILKGIRAYGELINNRKAKEIIREDLIAGGCAL

SEQ ID NO: 158144 - protein, 291 aa, Unknown
  Bacterial polypetide isolated from the Sargasso Sea
ELRLHRLTGLEHEKLLAEYQEILGLIGELIRILTSPERLMEVIREELEKVKAEFGDKRRTEIVASRQDLTIADLITEEERVVTISHGGYAKSQPLAAYEAQRRGGKGKSATGVKDEDYVEHLLVANSHATLLLFSSKGKVYWLRTFEIPEASRAARGRPLVNLLPLDEGERITAMLQIDLEALQQSAGADEDLDDEGVAIEGEATEVVEAEEVEEVEGETPELVAEPTGAYIFMATAFGTVKKTPLVQFSRPRSAGLIALKLEEGDTLIAAAITDGAKEVMLFSDAGKVLR

SEQ ID NO: 158145 - protein, 97 aa, Unknown
  Bacterial polypetide isolated from the Sargasso Sea
MQENQNLEITDYDESNITVLQGLEAVRLRPGMYIGGVDNTALHHLVFEVVDNSVDEALAGFCTEIHVVINSDGSISVEDNGRGIPVGIHEEEGIPAV

SEQ ID NO: 158146 - protein, 288 aa, Unknown
  Bacterial polypetide isolated from the Sargasso Sea
MSNTYNADAIEVLTGLDPVRKRPGMYTDTSRPNHLIQEVIDNSVDEALAGFARNLTLTLNKDGTVEVADDGRGMPVDIHKGEKVSGVELILTRLHAGGKFSDKNYQYSGGLHGVGVSVVNALSEFLEVKVKRNSNIYSMKFKNGNKASELKVIKKVGKRNTGTVVRFLPNSQYFDSTRISIPKLKHVLRAKAVLCPGLTVIFNDNTVAKSKSQSEDWYYEDGLTDYLVQGTRELETLPETPFTGSVQGNDEAVDWAIQWLPMGGEEITESYVNLIPTPLGGTHVSGLR

SEQ ID NO: 158147 - protein, 297 aa, Unknown
  Bacterial polypetide isolated from the Sargasso Sea
EDLIGAYQRPRFSTAGLIMGMDGLKDAYETGRGKIKMRARAHIESNKNGKDSIVVTEVPYQTNKANLVEKIADLVRDKKVEGITDLRDESDKDGIRVVIETKRDAVPEVILNQLYKHTQLQDTFGIILLALVDGVPKIMALKTILQHFVDFRHEIVVRRTEFELKEAEARAHILEGLKIALDNIDEVIEIIRGSKDGTMAKEGLMNGFNLSEIQAQAILDMRLQRLTGLEVDKVVEEYKELIKHIAHLKGILDSKSQRMAIIKNEMIEIRDQYGDERRTEIIPVDMDFSMEDMIAEE

SEQ ID NO: 158148 - protein, 169 aa, Unknown
  Bacterial polypetide isolated from the Sargasso Sea
MHDDTNIPAGGRIEPTAFSDALSERYLAYALSTITSRSLPDVRDGLKPVHRRLLFAMRQLKLDPGQGFKKSARVVGDVMGKFHPHGDAAIYDAMVRLAQEFAMRYCLVQGQGNFGNIDGDNAAAMRYTEARMTEVARLLLDGIDEDAVDFRPTYDGEAEEPALLPAGYS

SEQ ID NO: 158149 - protein, 70 aa, Unknown
  Bacterial polypetide isolated from the Sargasso Sea
MPKQNNYDSSNIKVLKGLEAVQKRPGMYIGDTDDGSGLHQMVYEVMDNSIDEALAGHCSNITVTVHEDNA

SEQ ID NO: 158150 - protein, 259 aa, Unknown
  Bacterial polypetide isolated from the Sargasso Sea
MSEEKYSASSLQVLSGLEPVRRRPGMYTDTSRPNHLVQEVVDNSVDEAISGYAKNIEVTLFKDGSIEVIDDGRGMPVDDHPEYKISGVELILTRLHSGGKFDSENYNYSGGLHGVGVSVVNALSLWLEVQVKRDGSVFQQKYEKGSPTTGLELIDTVGKRNTGTTIRFQPEAEYFDTPNVSVTRLKHLLRAKAVLSPGLRVAFNVEGKKEDSATWIYEGGLEEYLLDSLNGSESIPTDVVIHSAQGEGEAVDYALKWVV

SEQ ID NO: 158151 - protein, 366 aa, Unknown
  Bacterial polypetide isolated from the Sargasso Sea
ACILLIDRPETDINELCEIIPGPDFPTGGLILGKSGAKNAYTTGRGSVVIRAKVEVEEIRKDREALIVTEIPYQLNKVLLIEKIAELVRNKSIEGISDLRDESDRHGMRIVIELKRDSVADVILNQLYKFTQLQSSFGANLVALDRGSPKVMNLKEMLTCFIDFREEVVTRRLKFKLNKARDRAHILVGLAIAVSNIDEIIKLIRSSKSPAEAREDLMDREWPAKDVEPLIKLIDDPRHGITAKGNCSFTEDQARAILELRLQRLTAMGIGEIQSELDDLKKTIEDLLLTLGDKDKIYNIIKDELIFVKDNFAVERRTEILGELDDVQDEDLIKKEDMAVTVTRSGYIKRVPLSTYRSQNRGGKGR

SEQ ID NO: 158152 - protein, 477 aa, Unknown
  Bacterial polypetide isolated from the Sargasso Sea
VKDFSEKAYLNYSMYVILDRALPHISDGLKPVQRRILYAMSELSLNYTSKFKKSARTIGDVLGKFHPHGDTACYEAMVMLAQDFSYNHPFIEGQGNWGTQDDPKSFAAMRYTESRLTKFSDLFLNEIDMGTVDWSPNFDGTLEEPKTLPSKIPNILVNGSSGIAVGMSTDIPSHNLGEVIDAINKILTTDKISHSNLTDIIQGPDFPTRGQIVLDTSDLKSIYENGSGNVTLRSTYSSNGKEIIIDSIPYQSTTTKIIDQIQDQIYQKKSVFIDSVLDASDQENPVRIIIKTKGRSYSHDEIMLHLFFTTDLEKSIRVNLNMIGLDGKPQIKNLFEILSEWISYRLATIKNKLKWELNKITKRIHILESYIIVYKNLDAIINIIRSHDNPKQKLVAKYKFTDIQYEAIINIKLRNLAKLQEKNIREELDELRTSEKKISSIVKSKIKLKNYLIEELNEIKKEFSRDRQTKMSDLHIS

SEQ ID NO: 158153 - protein, 403 aa, Unknown
  Bacterial polypetide isolated from the Sargasso Sea
ELPIREFTEKAYLDYSMYVILDRALPSLLDGLKPVQRRIIYAMSELGLKSTAKYKKSARTVGDVLGKFHPHGDSACYEAMVLMAQTFSYRYPFIDGQGNWGSADDPKSFAAMRYTESRMTPYAQSLLAELQQGTVDWVPNFDGTMREPSLLPARLPNVLLNGGSGIAVGMATDIPPHNLNEVVKATLHVLENPKATLSEVMKFIKAPDYPTSAEIITPRADIKQMYKTGTGSIRMRAVWRKEDDDIIVTALPHQVSGAKVLEQIAQQMLAKKLPTVSDLRDESDHENPVRLVITPRSNRVDIDILMSHLFATTDLERTYRVNMNMIGLNGRPAVKDLVTVLQEWIEFRKMTVKRRLQFRLDKVLDRLHILDGLLVAFLNIDEVIRIIRSEDKPKPVLIKKFKL

SEQ ID NO: 158154 - protein, 383 aa, Unknown
  Bacterial polypetide isolated from the Sargasso Sea
NYDDSTLEPSVLPAQYPNLLVNGASGIAVGMATNIAPHNLGEVIEATLHLIENPNAELEDLTKYILGPDFPTGGQIIGKKGIIDAFQTGKGGVILRSKTSIENFKKDREAIIIHEIPYQVNKSKLIERIAETVKNNIIEGISDLRDESDRNGVRVVVELKKDVDANIILNQLYKNTLLQTTFNSNMLALNKGKPEQMNLKEILVAFIDFREEVITKRTIFDLNKARDKAHVLLGLVVANANIDEIIELIKSSKDSKEARKKLINKKWKLSEQNINFIKLVDEGTTQLNKNIFTLTETQARAILELRLHRLTSLERDDIQKDLEQLILEIKGYLEVLQSRSKLLDEIKQELIEIKKEFVTPRKSEIIDMEYEEVDDLKYIQKED

SEQ ID NO: 158155 - protein, 211 aa, Unknown
  Bacterial polypetide isolated from the Sargasso Sea
MAKDKFNSISLKKYAEESYLNYAMYVILDRALPNVGDGLKPVQRRILYAMSELGLDATSKYKKSARTVGDVIGKFHPHGDSAAYEAMVLMAQNFSFKYPLVDGQGNWGSQDDPKSFAAMRYTESKLTSFANLLISELKSGTVDWQPNFDGSLLEPIIFPSKIPMILLNGTSGIAVGMATDIPSHNINEVIDATVTLLEKPKSDLKDLLEII

SEQ ID NO: 158156 - protein, 270 aa, Unknown
  Bacterial polypetide isolated from the Sargasso Sea
LTVEDNGRGIPVGLHKKEGVSALEVVMTKIGAGGKFDKDSYKVSGGLHGVGVSCVNALSESLTAKVFREGKEYEQNYSKGKPDGPVKEIGKSDKRGTLVTFTPDKEIFKEITDFDYDILSKRMRELSFLNKGITISILDNRKKDKDGNPISESFHSKEGLSEFIKYLDESREPIINNIIKMEGEKNGIPVEVAMIYNSSFTENLHSYVNNINTHEGGTHLSGFRRGLTNTLKKYAESSGLTDKLKFDISGDDFREGLNCCYICKGSRASI

SEQ ID NO: 158157 - protein, 265 aa, Unknown
  Bacterial polypetide isolated from the Sargasso Sea
LFVANTHDTLLCFSSYGKVYWIKVYRLPRGGRNAKGRPIVNLLPLEKDERIQAVLPVKEFNDDQFIFMATESGSVKKTKLSAYSRPMKSGIKAIKLREGDRVVNAEITDGSKEIMLFSNSGKSIRFKETDARPMGRVSQGVRGMRIEKDQRIISLVVLKEGNILVATENGFGKQTLKEQFSIQKRGGKGVIAIQTSKRNGNLIGANQVSTGDEVMFISTTGNLIRTRTDDISVIGRNTQGVRLIRLSEDDNLLGMEKVISEDDEE

SEQ ID NO: 158158 - protein, 303 aa, Unknown
  Bacterial polypetide isolated from the Sargasso Sea
MPAKKTTTKKPAAKKTTTKKPAAKKTTTKKPETQNGAIAVEDEISKSFLDYAMSVIVSRALPDVKDGLKPVQRRILYSMYETGIRPTGPFRKCSKVVGDVMGNYHPHGNEAIYGTLVRLGQHFSTRYPLIEPQGNFGTPDDPPAAMRYTESRMSLLASQLLDGIDEETVDFEPNYSGETTEPKVLPGRFPNLLINGAEGIAVAMATNMPPYNLQEITEAVKFTLKTKEPKPRDYLKIIKGPDFPTGGLIVKTPTIKDAILKGRGSIKLRAVADVEELGKGRSAIVVKELPYQASIDRIMGKNC

SEQ ID NO: 158159 - protein, 330 aa, Unknown
  Bacterial polypetide isolated from the Sargasso Sea
MKIDLDKIIKQSKTNIEDIALKEFSESAYLNYSMYVILDRALPHISDGLKPVQRRIIYSMHQLGLDNASKYKKSARTIGDVLGKFHPHGDSACYEAMVMMAQDFNYNFPLVDGQGNWGTQDDPKSFAAMRYTESRLTAFSDLFLDEIDKGTVQWNPNFDGSLLEPRQLPSKIPNIMINGSSGIAVGMSTDIPSHNITEILNATMMLLDKPKTTNDELMNIVKGPDFPTAGEIIAHDSEIDSIYKHGTGNIKLRATYSDNKKEIIINSIPYQTHVTKIIDQIHYEVNAKKLPFIQSILDDSDQDNPVRIIIKYRGRSHTSEEIMSHLFLNH

SEQ ID NO: 158160 - protein, 688 aa, Unknown
  Bacterial polypetide isolated from the Sargasso Sea
MAKNKDLFSSNIDKISIGAFSEDAYLNYSMYVILDRALPSLLDGLKPVQRRIIYAMSELGLKHNTKHKKSARTVGDVLGKFHPHGDTACYEAMVMMAQSFSYNSPLIDGQGNWGTQDDPKSFAAMRYTESKLTKYSDLLLRNLKNGTVDWIPNFDGSLDEPKFLPSLIPNILVNGSSGIAVGMSTDIPPHNLGEIILAVQHLIKNPKCSVKDLIDFIPAPDYPTGGSLLRNESDIDEIYNEGTGNIKLRAEYASKSKEITIHSLPYQASTTKIIEQIQSQIIEKKISFIGSVEDQSDEKNPVKIIIRIKGSSISAEDVMNHLYFTTDLERSYRANLNIITSEGKPKVMNLRDILSQWLAFRIDTFKKQLNHENNQILERLHILEGFLIVYKHLDKIISILRNEDNPKQKIMKIGKFTEIQYESIVNMRLRNIAKLEEQKINDEFAKLKERNREISSILKSKSKLNKLISEELDELSEEYSSDRKTNIVEGVSSSKQIKKEIKISNEAMFVILSTNGWIKSNRGSLDKTDDLAFKSGDSLLDYLNIDNDKEVAFFDQKGFLYTMTVNDMPSGRGYGESLKKYFNIDDGIHVIGMVDSQNTNHTLLSTESGYGFICDNHDLSSSNRKGKAILKNKASMLSKPVAFKMEDYKYYILITDKQYMLVGDLSDIPIMSKGKGVKLINIPKSDEE

SEQ ID NO: 158161 - protein, 128 aa, Unknown
  Bacterial polypetide isolated from the Sargasso Sea
MAKKSTEAKYDSSNIQVLKGLEAVKKRPGMYIGDTDDGSGLHHMVFEVLDNCIDEAMAGHCSDIQVIINKNGSVTVQDNGRGIPVDVHKKEGVSAAELILTTLHSGGKFDDNSYKVSGGLHGVGVSVV

SEQ ID NO: 158162 - protein, 312 aa, Unknown
  Bacterial polypetide isolated from the Sargasso Sea
MTKENLDKQSIKKYAENAYLNYSMYVILDRALPNIGDGLKPVQRRILYAMSELGLNASSKYKKSARTVGDVIGKFHPHGDSAAYEAMVLMAQDFSFRYPFVDGQGNWGSQDDPKSFAAMRYTESKLTKFSDLLIDELKQGTVDWQPNFDGSLLEPVIFPAKVPSILLNGTTGIAVGMATDIPSHNMTEVIDATIHVLENPKTSVDQILKYIKGPDFSNNAPIVASPEELNEMYSTGRGAFKMKSAWKKEGNDIIVTDLPHQTSGSKVLEQISNQMMNKKLPMIVDLRDEGDHEEPTRLVISLKSNRVNAEDL

SEQ ID NO: 158163 - protein, 842 aa, Unknown
  Bacterial polypetide isolated from the Sargasso Sea
MPAKKTTTKKPAAKKPTTKKPTTKKPAAKKPTTKKPAAKKLETQNGAIAVEDEISKSFLDYAMSVIVSRALPDVKDGLKPVQRRILYSMYETGIRPTGPFRKCSKVVGDVMGNYHPHGNEAIYGTLVRLGQHFSTRYPLIEPQGNFGTPDDPPAAMRYTESRMSLLASQLLDGIDEETVDFEPNYSGETTEPKVLPGRFPNLLINGAEGIAVAMATNMPPYNLQEITEAVKFTLKTKEPKPRDYLKIIKGPDFPTGGLIVKTPTIKDAILKGRGSIKLRAVADVEELGKGRSAIVVKELPYQASIDRIMEKIASLVQDKKLAGVSDLRNESSDRNGTRLVIELKRDAVPQVVLNQLFKQTQLQDSFSVNSVALVDGVPKVLSVPELIGYYIKHQIDVIQRRTKHRLDKAKDRLHIVEGLLLALNKIDQIIKTIKASKDVDIARKSLMKKFKLSKIQASHILDMPLRRLTALEREKLDEEKKDLKETIKELTAILKSRAKQNKILVEELEAITEKFGDERRSRLVDDVGEVKIEDLIEDEEIIVSVSSGGYVKSVPSDSYKKQGRGGKGVKASSSDEDVIEHLLSTSVHSYLLFFTDKGKVYRAKAHELPKTTRTAKGSLIHNVLSMGQDEKVQAIIDTRDYETEKFLLIMTEKGTVKKSAFKDFDSNYKSLQAIKLKEEDRVVSVKTTSGKEDVILVSKKGQAIRFDEKNLKPQGRTAMGVRGIKLREGDKVVGASTSREETLLFITAKGYGKRTKLEEFRRAGRGGMGVKALKVTETKGDLVGARSVDEDTEVMLMSTGGTAIRCAVKQIKQMSRAAQGVKVMKLSKEEEISAFIPIKTED

SEQ ID NO: 158164 - protein, 348 aa, Unknown
  Bacterial polypetide isolated from the Sargasso Sea
MAKSKTYGAKDIEVLEGLLPVRKRPGMYIGNTNIDGLHHLVNEILDNSIDEVVAGYAKKIDFKYNLDNSITIKDDGRGIPVDFHPKYKNKRAFEIVLTTLHSGGKFTNNAYKTSGGLHGVGISVVNALSEKLEIKIYNKSKLYSQTYSKGKAKTKVKIEKCNKNLKGTEIKFIPDKEIFESILFSPKKLYSFIKMKAVLVKDTKINFNINKELIKDKTPDKEEFLYVKGIADFMQSNFQQRKKITNKDFYASLVFNANEKCEVYISFNELEKSSLMSFCNTIETPDGGSHENALKNSFMKAIKIFSHKNQLTKYQNININDIFDYTDTLISIFINSPSFEGQTKKRIT

SEQ ID NO: 158165 - protein, 411 aa, Unknown
  Bacterial polypetide isolated from the Sargasso Sea
MSDAIELSLDGVERQPMRTFTEQAYLNYSMYVIMDRALPHIGDGLKPVQRRIIYAMSELGLSALSKHKKSARTVGDVLGKYHPHGDSACYEAMVLMAQPFSYRYPLVDGQGNWGAPDDPKSFAAMRYTEARLSRFSELLLSELGQGTVEWTPNFDGTMKEPVVLPARLPHILLNGVTGIAVGMATDIPPHNAREVAHACVELLDNPNAGLDALMAHVQGPDYPTNAEIITPRDDIRKIYETGKGSIKQRAVWSEEDGDIVITALPHQASGAKIMEQIAAQMVAKKLPMVTDLRDESDHENPTRLVIVPRSNRVDVEGLMAHLFATTDLEKNYRVNLNILGLDNRPQVKDLKTILTEWLSFRRETVRRRLQYRLDKVLARLHILEGLLIAYLNIDEVIEIIRTEEEPGRVMM

SEQ ID NO: 158166 - protein, 254 aa, Unknown
  Bacterial polypetide isolated from the Sargasso Sea
RMRAAKTVVRKKITQGPALPGKLTDCGCADPMQGELFLVEGDSAGGSAKQARDREFQAIMPLRGKILNTWEVEAGQVLASQEVHDISVAIGLDPDSDDLSGLRYGKVCILADADSDGLHIATLLCALFVKHFRALVNQGHVYVAMPPLYRIDIGKEVYYALDEDEKNGVLQRVEAEKKKGKVMVTRFKGLGEMNPKQLRETTMDPNTRRLVQLTMGAEGDEGDETLQLMDMLLAKKRASDRREWLEEKGNLAII

SEQ ID NO: 158167 - protein, 640 aa, Unknown
  Bacterial polypetide isolated from the Sargasso Sea
MDFNKTGGGSKSDSQPLSEFVEKAYLDYSMYVILDRALPFIGDGLKPVQRRIIFAMSELGLSAQSKPKKSARTVGDVLGKYHPHGDTACYEAMVNMAQDFSYRYPLIIGQGNWGSYDDPKSFAAMRYTEAKLSAYTKLMLSELGQGTTDWKPNFDGTLKEPEFLPSRLPNLILNGVTGIAVGMSTDIPPHNIKEIAYLLDKLIKNPDISLGQLTRITKNFQGPDFPSGGEMISSPEELKQIYTTGNGSVKIRAKYKKEKNQIVITQLPYQVSGNKIIEQIATQMKDKKLPLITDINDESDHETPIRIVLTPKSNRVNTDELMGHLFATTDLEKNVRVNMNLIGLDGRPRVFDLKALLSEWIEFRTQTVTRRLQFRLDEVESRLHILEGLMVAYLNLDEVIRIIREEDDPKSKLIKKFKLSEIQAEAILNLRLRNLAKLEEEKILTEKNDLEKEQSELKKILKSKKKINELIQNEIKQDTKDFGDDRRTTLNESAITSQALDQTQLASSDPVTIVLSKAGWVRAAKGTLDDPRSLNYKSGDDYLSSVPGRSNQFAVFIDSTGRVYSIVADTLPSARSNGEPLSSRLNPPDGAYFAGVISGNPGQHWLLSSSAGYGFFVKLEDLYTKKRKGKTCLSVKGSEV

SEQ ID NO: 158168 - protein, 217 aa, Unknown
  Bacterial polypetide isolated from the Sargasso Sea
MYVILDRALPNVGDGLKPVQRRILYAMSELGLDAGSKYKKSARTVGDVIGKFHPHGDSAAYEAMVLMAQNFSFKYPLVDGQGNWGSQDDPKSFAAMRYTESKLTNFANLLISELKSGTVDWQPNFDGSLLEPVIFPAKIPMILLNGTSGIAVGMATDIPSHNINEVIDATVKILEKPKSDLKDLLKIIKGPDFSNNASIVASPEELEEMYSSGRGGL

SEQ ID NO: 158169 - protein, 105 aa, Unknown
  Bacterial polypetide isolated from the Sargasso Sea
MAKKSQEAKYDSSNIQVLKGLEAVKKRPGMYIGDTDDGSGLHHMVFEVLDNCIDEAMAGYCSDIKVIINKNGSVTIEDNGRGIPVDVHKKEGVSAAQLIMTTLHS

SEQ ID NO: 158170 - protein, 88 aa, Unknown
  Bacterial polypetide isolated from the Sargasso Sea
MTNTQKNVSSSDYKADSIKVLKGLEAVRKRPGMYIGDTDDGSGLHHMVFEVVDNSIDEAIVGFCKNITVTIHKNNSVTVEDDGRGIPV

SEQ ID NO: 158171 - protein, 132 aa, Unknown
  Bacterial polypetide isolated from the Sargasso Sea
MPKKQNKKGSYDSSNIQVLKGLEAVKKRPGMYIGDTDDGSGLHHMVFEVVDNCIDEAMAGHCSEIVVSINKNGSITVKDNGRGIPVDTHKKEKVPAAELIMTTLHSGGKFDDNSYKVSGGLHGVGVSVVNAL

SEQ ID NO: 158172 - protein, 133 aa, Unknown
  Bacterial polypetide isolated from the Sargasso Sea
DYEYIIDHEFIESSEYHRLKELNLAINDMMGKDAYIQRGERRQPVESFKEALEWLMNEAKRGQYIQRYKGLGEMNPEQLWETTMDPESRRMLQVTIEDAIGCDQLFTTLMGDQVEPRREFIEANALKVENLDV

SEQ ID NO: 158173 - protein, 135 aa, Unknown
  Bacterial polypetide isolated from the Sargasso Sea
GLEKSYVFNFDFFGSAEYNSIANLGKTLHGLIEKGAYVQRGERTSEVSKFSEAIEWLKKEAMRGVYLQRYKGLGEMNPSQLWETTMDPDSRRMLQVTIDDAIGADHLFNTLMGDQVDPRREFIEENALSADNLDI

SEQ ID NO: 158174 - protein, 747 aa, Unknown
  Bacterial polypetide isolated from the Sargasso Sea
MTKDKFDSISLKKYAEDSYLNYAMYVILDRALPNIGDGLKPVQRRILYAMSELGLDASSKYKKSARTVGDVIGKFHPHGDSAAYEAMVLMAQNFSFKYPLVDGQGNWGSQDDPKSFAAMRYTESKLTSFANLLISELKSGTVDWQPNFDGSLLEPVIFPSKLPVILLNGTSGIAVGMATDIPSHNINEVIDATVKILEKPKSELNDLLKIIKGPDFSNAAPIIVNNEELQEMYSSGRGGFKIQAQWKQEKNSIIINSLPYQASGSKILEQIAEQMLNKKLPMVVDLADEGDHEDPVRLVITLKSNRVNAEDLMNHLFASTDLQKSYRMNMNLISLKGGPKVFPLVDLLKEWLAFRKDTVKRKLEHRLDQVNDRLHILEGLLSIFIDIDEVIKIIRKSDEPKKDLIKAFKLSETQANAILEIKLRQLAKLEQIKLEDEKNNLDNEQNEIEKVLKSKARLKTLIKKELVEIKEMFGEERKSPIIESSNAKVFSEEDTLVTEPITVVLSKAGWIRSAKGHDIDPHSLSYRGDDNLQDFARGKSNQLAVFLDSNGKAYSIPSHSLPSARGMGEPITGRLNADSGVQFISSIIGEDNGKYLIMNTAGYGYISEFKNMTSNKKTGKAFMKLPEHAKMLKAIPIREDHSYIAAVSNIGKLLIFKLEELPILGKGKGNKIINIPKDKLSAGEEFMAHAQVLADESSLMVEVGKRSVTLKPKDWNEYILSRAKRGKKVGKLINIERLTEIVSSKEE

SEQ ID NO: 158175 - protein, 233 aa, Unknown
  Bacterial polypetide isolated from the Sargasso Sea
NAKGRPIVNLLPLEKDERIQAVLPVKEFNDDQFIFMATETGSVKKTKLSAYSRPMKSGIKAIKLRDGDRVVNAEITDGSKEIMLFSNSGKSIRFKESDARPMGRVSQGVRGMRIDKDQKIISLVVLEEGNILVATENGYGKQTLKDEFSIQKRGGKGVIAIQTSNRNGNLIGAKQVSTGDEVMFISTSGNLIRTRTDDISVIGRNTQGVRLIRLSEDDNLLGMEKVISENDEE

SEQ ID NO: 158176 - protein, 577 aa, Unknown
  Bacterial polypetide isolated from the Sargasso Sea
IEQFISQTGFKGPDFPTGAEIKDNGGINDAIETGRGSFKIRAVHSIEEKKDKSSIVINELPYQVNKAKLIESIALLVRDKKINGISHLRDESDRDGLRVVIELKKGEQPDVILSSLYKQTNLQTSFSVNMVCLVDGEPCTISVPRALQEFIKHRREIITRRTLYLLNKTYIKAHVLEGLSIALDNIDEMIDLIKKSKSTDEAKKKIINKTWKAAKNKWVLSKLINDCSDFMTVDTKVESKDEKYKISEEQAQAVLDMKLNKLTNLEQDSILNDYNTAISSIKEHLNILSKPEELNNLMINELLEIKDIYGQERKSQISQDEGLLNREDMIKKEDVIVVLTDANYVKRMPITEFRSQKRGGRGVNAANFKEGDKAKLLVCAHTHDTILCFSTKGKAFSIRVFDIPDTSRQARGKSINNIIPLESDESISAILAIKSFDEDSYLFLTTRNGMVNRVSLSSFKKVRNSGLKAILLKRDDYLFNALHTNGNDKIILSSTSGKSIMFSESQIRERSRGTQGVTGIKLSGDSKIISSLNIQCSQVIFVTENGFGNKISVDSYNEQNRGGQGVISIKTSERNGQ

SEQ ID NO: 158177 - protein, 128 aa, Unknown
  Bacterial polypetide isolated from the Sargasso Sea
MHYDFITSVDYGRMFELGTAIRDLIEEGGYVRRGEKIKPIESFVEGLEWLMAESKRGLYIQRYKGLGEMNPEQLWETTMDPNTRRMLRVTIEDAIGADQLFSTLMGDDVEPRRNFIEENALRVANLDV

SEQ ID NO: 158178 - protein, 138 aa, Unknown
  Bacterial polypetide isolated from the Sargasso Sea
MAKNYDSESIEVLSGLDPVRKRPGMYTDTSCPNHLIQEVLDNSIDEALAGHCSKIKVTLHKEGTVSVIDDGRGMPVDIHPEHKVSGVELIMCKLHAGAKFSGEDYNFSGGLHGVGVSVVNALSQNLSVEIKETVISLK

SEQ ID NO: 158179 - protein, 115 aa, Unknown
  Bacterial polypetide isolated from the Sargasso Sea
MPKKQNKKESYDSTNIQVLKGLEAVKKRPGMYIGDTDDGSGLHHMVFEVVDNCIDEAMAGYCSEIIVSINKNGSITVKDNGRGIPVDTHKKEKVPAAELIMTTLHSGGKFDDNSY

SEQ ID NO: 158180 - protein, 682 aa, Unknown
  Bacterial polypetide isolated from the Sargasso Sea
NQIIKGPDFPTGGTIIGIKGIKDSQSSGRGSIIVQAKSNIEEFKTDREAIVFTEVPYQVNKSALLEKIAELVRDKKIDGISDLRDESDRQGVRVVVELKKGVISQVVLNKLYKFTALQSSYGVNSLALVNGKPKLMNIKEFIHHFIEFRKEIIRNRTRHDLGKARDRAHVLIGLAVAVANVDQIIEIIKSSKDPNEARTSLLKTKWLSKDIDDLLKLVDDPRQIKNEKEIYLTDEQAKAILELRLQRLTALGKDEIKSELSDLSNQINKFLSILRDTEVLNDVINVELNEIKKQFAIPRRTEINEGEATDIDQEDLVQKSDMVVSVTNSGYIKRVPLNMYRAQKRGGKGRAGMKTNEEDFVTQVFTSSTHDNMLFFSSGGIAYKLKTWKIPESSPQAKGKAIINLLNLKDTESLSSILVLPENKQSNGNEYLIFATSDGSIRKNSLEDFKRIQANGKIAMKLDNNNAIVGVKLCSDEDDILLSTKHGKCIRTPVSKLRTTKSRSSVGVRGIRLTKDDKIISISVISHTDVSSAEAKAYLKMISKEKGMQEETESDDNDTDNSVSDIEISKDRYDELKAREQFILTVTENGFGKRSSSYQFRVSNRGGSGIMCIATSDRNGDVLASFPVNNDDDIMLITKTGQLIRCPVKDVRVAGRNTQGVSIFKTTKEEKVVSASRVELDS

SEQ ID NO: 158181 - protein, 607 aa, Unknown
  Bacterial polypetide isolated from the Sargasso Sea
IAELMKLKKVEGISEVRDESDRKGTRLVVELKRGSSEFVVLNNLYKLTPLRSSFSINMVALVDGSPRVLNLKQILKYYVEFRVDIVTKRAEFELKKAQARIHILEGLRIALQNIDEVVETIKSAGPVEEAREALKNRFDLSEIQAQAILDMQLRRIAALETEKIESEYNELKEIIKDLNDLLANKSRVYEVIKKETNDLKDKYGDKRLTKLHKEELGQWNREDVEPHEESVVTLSRNGYLKRVKSDTFRRQHRGGKGVKGFKATKDDDVTPYMQIADTHDTILFFTDKGRVFSSRVFDLPANQSKNSRGTPVHNIISLEQREKVNAILTVPEINQTLESYIVMATKSGKIKTMEISKFKNIRKSGLHSFKLKNDDEIISVALALPLEGVEKKNIIKLNDIKKNPDRAVSYVLDSLVEIDINTIDKDLINPESEKKDSNILKKDGGRKYYSIVDSKGKETAVKVYPDVVMVSDAGKQIRFSIEKVRPQGRIAGGVRGMKLESKQKVVAMVLTSKDPDSYILVASQKGFGKLSKMEHFKVQRHGSKGLITMKVTAKNGKVADAQSVKMDKGAGTSDSVYLLTEKAQVQEIPLDEISIYGRSTQGSTLMK

SEQ ID NO: 158182 - protein, 758 aa, Unknown
  Bacterial polypetide isolated from the Sargasso Sea
MSDAIKLSLDGVEQMPLRRFTEEAYLNYSMYVIMDRALPHIGDGLKPVQRRIIYAMSELGLSAQSKHKKSARTVGDVLGKYHPHGDSACYEAMVLMAQPFSYRYPLVDGQGNWGAPDDPKSFAAMRYTEARLSKFSELLLSELGQGTVDWGANFDGTLKEPKVLPARLPHILLNGITGIAVGMATDIPPHNARELVNACVALLDDPKLDLAQLMAYVPGPDYPTEAEIITPSADIAKIYETGRGSLKARAVYTVEAGEIVITALPHQAGSGKILEQIAAQMQAKKLPMVADLRDESDHENPVRLVIVPRSNRVDCDQLMAHLFATTDLEKSFRVNLNVLGLDGRPRVKGLKDLLTEWLEFRVDTVRRRLEYRLDKVLARLHILEALMIAFLNIDEVIEIIRFHDEPKAELMARFNLTDKQAEAILELKLRHLAKLEEFKIKAEQDELEAEREKLEQLLGSERRLKTLIKKELIQDGETYGDDRRSPIVERHESRALTEQELTPSEPVTVVLSEKGWVRCAKGHDIDAESLSYKAGDQYLCSAIGRSNQVAVFIDSSGRAFATDSHSLPSARTQGEPITTRFNMASGETMQHVILGEDEQCFLLATDAGYGFICTFNDMVSRNKAGKALLSLPTNAKSLPPKPIDRNREMSILAITNEGRMLLFSLEALPQLSKGKGNKIIGIPSERAKNREELMTHLQLVPADTPVTLWAGKRKLTLKPSDLEHYRGERGRRGAKLPRGLQRVDSVELGEGAEVLPSI

SEQ ID NO: 158183 - protein, 465 aa, Unknown
  Bacterial polypetide isolated from the Sargasso Sea
PKSFAAMRYTESKLTQYSELLLHDLKNGTSDWIPNFDGTLNEPKFLPSQIPNILINGSSGIAVGMSTDIPPHNLGEIILAVQYLINNPKCSIKELMEFIPAPDYPTGADLLQDESDIDAIYNEGTGNIKLRAEYSHHGKTIEITSLPYQASTTKIIEQIQSQIIDKKINFINSIEDQSDEKNPVKIIIKIKGNSHDSNDVMNHLYFTTDLERSYRVNLNMISMDGKPKVLNLKEILTEWVSFRINTYKRKLNHENNNILDRLHILEGFLIVYKHLDKIIEILRNEDNPKLKIMKIGKFSEKQYESIINMRLRNIAKLEEDKIKDEYKKLQKRNKEINSILKSKAKLNKLIIHELDVLSEEYAHDRRTNILYNTDSSKQIIQEIKISSEPVSLILSSNGWIKTSKGSSVSLDNLTFKSGDSYLAHLDIDNNKQVTFLDQKGFIYSMMVNDIPSGRGYGESLKKYFN

SEQ ID NO: 158184 - protein, 95 aa, Unknown
  Bacterial polypetide isolated from the Sargasso Sea
MYDEMSSSYLSYAMSVIISRALPDIRDGLKPVHRRIIFAMHKGGFDWSKQFRKSARIVGDVIGKYHPHGDQAVYDALVRMVQDFSMSLPLIEGQR

SEQ ID NO: 158185 - protein, 372 aa, Unknown
  Bacterial polypetide isolated from the Sargasso Sea
MNGAIAVEDEISKSFLDYAMSVIVSRALPDVKDGLKPVQRRILYSMYETGIRPTGPFRKCSKVVGDVMGNYHPHGNDAIYGTLVRLGQNFSTRYPLIEPQGNFGTPDDPPAAMRYTESRMSSLSSQLLDGIDEDTVIFEPNYSGETSEPRVLPGRFPNLLINGAEGIAVAMATNMPPYNLREITEAVKFTLNTKDPKPRDYLKIIKGPDFPTGGLIVETPTIKDAILKGRGSIKLRAVADIEELGKGRSAIVVKELPYQASTDRIMEKIASLVQDKKLTGVSDLRNESSDRNGTRLVVELKRDAVPQVVLNDLFKYTQLQDTFSVNSVALVEGVPRVLSVPELIRYYIDHQIDVIQRRSQFRLDKAKSRLHM

SEQ ID NO: 158186 - protein, 65 aa, Unknown
  Bacterial polypetide isolated from the Sargasso Sea
MSLENQKQYSAESIKVLEGLEAVRKRPAMYIGDVGKRGLHHLIYEVVDNSIDEALAGYCTRVVVT

SEQ ID NO: 158187 - protein, 663 aa, Unknown
  Bacterial polypetide isolated from the Sargasso Sea
HKKELKTLKNSEEGSIIVQAKSTFEEFKSDREAIIFTELPYQVNKSTLIEKIAELVRDKKIEGISDLRDESDRQGVRVVVELKKGVIAQVILNKLYKFTPLQSSYGVNALALNDQKPELMNIKDFLRHFINHREEIISLRTRYDLNKARDRAHVLTGLAIAISNVDQVIEIIKNSKDPSSAKIELLKTKWKSSDVKDILELIDDPRQIKNDKDIYLTEDQAKSILELRLQRLTALGKGELEEELKTLSDNINEYLSILRDKNKLQSVIKYELENVKQEFSSPRKTEITDHEASDIDQEDLVQRSDMVISITNSGYIKRVPLEMYRAQKRGGKGRSGMKTNDEDFVTQVFTSSTHDNMLFFSSSGIVYKLKTWKIPESSPTAKGKAIINLLNLKQDDQLSSILVMPENKASKDDNFLIFATADGSIRKNSIDDFKNIQANGKIAMKLSNSNKIVGVKICTENDDVLLSTKEGKCIRTPVSKLRTTKSRSSIGVRGIKLAENDSIISLSILSHLDVTSAEAKAYLKMNKATKEDNDDNEEDSKEEIEDIKLSEDRFQEMKACEQFVLTVTENGFGKRTSSYQFRVTNRGGSGIMCITTSSRNGNVLASFPVGHDDDIMLITKSGQLIRCPVIDIRVAGRNTQGVSIFKTSDSEKVVSASRVEIEN

SEQ ID NO: 158188 - protein, 502 aa, Unknown
  Bacterial polypetide isolated from the Sargasso Sea
MSKESDLPFFNYAEKAYLEYSMYVILDRALPFIGDGLKPVQRRIIYAMSELGLKSSSKFKKSARTVGDVIGKFHPHGDSAAYEAMVLLAQNFSTRYPLLEGQGNWGSLDDPKSFAAMRYTECRLSAYAQSLLDEAAQGTVDWIPNFDGTLIEPKFLPDRLPNVLLNGASGIAVGMATDIPPHNLKEIVNGVISLIDSPKLSNKELMKDISAPDYPTSAQIMNSDDEVLEIYETGRGAITLRSTFDVEDGNIVINSLPYQVSSMKAIEQIAAQIDSKKLSMIEDIRDEGDEHNPVRIVIVPRSNRVDKDALMSHLFATTELQKNTRVNINGIGLDGKPKVFDLKGILKEWIKFRTETVKRRIKHRLDWVDDRLHILKGLLIAYLNLDEIINIIRNEDDPKKTLMKKFKLSDLQANAILDIRLRQLAKLEEISIKTEQEDLASEKKELEAYLKSSPRLKTLIKKELKADSEEYGDERKSFYGEGVSAKAFDELDLISNDPMTVV

SEQ ID NO: 158189 - protein, 208 aa, Unknown
  Bacterial polypetide isolated from the Sargasso Sea
MTKDQFNSISLKKYAEESYLNYAMYVILDRALPNVGDGLKPVQRRILYAMSELGLDATSKYKKSARTVGDVIGKFHPHGDSAAYEAMVLMAQNFSFKYPLVDGQGNWGSQDDPKSFAAMRYTESKLTNFANLLISELKSGTVDWQPNFDGSLLEPVIFPSKVPMILLNGTSGIAVGMATDIPSHNINEIIDAAVRLLDKPKSTLKELA

SEQ ID NO: 158190 - protein, 299 aa, Unknown
  Bacterial polypetide isolated from the Sargasso Sea
MIKKNIKKKLPKKDKLKNKIVSKSTKSYTAKDIEVLEGLEPVRKRPGMYIGGTDILAMHHLVSEVLDNSMDEVVAGHANKVEINLKNNSTIEISDNGRGIPVDKHPKFKIPAAEVIMTTLHSGGKFSNNSYKTSGGLHGVGISVVNALSKKLTLEIARDKKYFTQVYQQGNPKTKLKSSSKGSLKKGTRIVFSPDTEIFGDEAYFDASIIYNMAKAKAYLIPDVEIHWSCDKSVSKKNVPLKDKLHYSDGIKDYLHSLCSPQDPIFEDPFYFNTKISDEDGKIEGIVNWFDAIEPINES

SEQ ID NO: 158191 - protein, 119 aa, Unknown
  Bacterial polypetide isolated from the Sargasso Sea
MAKKSKEAKYDSSNIQVLKGLEAVKKRPGMYIGDTDDGSGLHHMVFEVLDNCIDEAMAGYCSDINVIINKNGSVTIEDNGRGIPVDVHKKEGVSAAQLIMTTLHSGGKFDDNSYKVSGG

SEQ ID NO: 158192 - protein, 408 aa, Unknown
  Bacterial polypetide isolated from the Sargasso Sea
SGIAVGMATNIPPHNLTEVLNACVNLINDPKLSIDDLIKDISGPDFPTGGTIDGKVGIYEAYKTGRGIIHIRSNTSIEEDEKSGKQSLIINEIPFMVNKAKMLEKIAELVKEKKIEGITEIRDESDKDGLRVVIEVRKGDSVEVLENNLFAQTQLEQSFGINFTVLVDGQPKEVNLKEMLEAFIKHRKDIITKRTKYDLKKAKDRGHIVEGLMVAIANIDEVITIIKKSKDPKLAADALCKKVWKAGPVEAILKKVGKDACKPKGLSKDLGINGKKYKLSPDQAKAILELRLGRLTGLEQDNLSNEFSDIVAKIIDLQKILDDKETLKNLMIEELEEVKTNFGDERRTLINDTRRGITNEDLIPEEMRVLTVSRSGYAKTQPLDEYREQRRGGQGKAAAAVKEEDLIQ

SEQ ID NO: 158193 - protein, 104 aa, Unknown
  Bacterial polypetide isolated from the Sargasso Sea
MKNIIKDNINSILKSRYLSYAVSTIISRSLPDLRDGLKPVHRRIIYSMYLLKLFNNSPFKKSARIVGDVMGKFHPHGDQAIYQSLVRMAQDFSSRMTLFKGKVI

SEQ ID NO: 158194 - protein, 421 aa, Unknown
  Bacterial polypetide isolated from the Sargasso Sea
MTKENLDKQSIKKYAENAYLNYSMYVILDRALPNIGDGLKPVQRRILYAMSELGLNASSKYKKSARTVGDVIGKFHPHGDSAAYEAMVLMAQDFSFRYPFVDGQGNWGSQDDPKSFAAMRYTESKLTKFSDLLIDELKQGTVDWQPNFDGSLLEPVIFPAKVPSILLNGTTGIAVGMATDIPSHNMTEVIDATIHVLENPKTSVDQILKYIKGPDFSNNAPIVASPEELNEMYSTGRGAFKMKCAWKKEGNDIIVTDLPHQTSGSKVLEQISNQMINKKLPMIVDLRDEGDHEEPTRLVISLKSNRVNAEDLMNHLYASTDLQKNYRGNFNLISLKGSPKVYSIKDLLSDWIAFRKITVTRKLEHRLDQVDDRLHILEGLLIVYLDLDKVIKIIRQSDDPKKELTKKFKISDIQANAILEI

SEQ ID NO: 158195 - protein, 361 aa, Unknown
  Bacterial polypetide isolated from the Sargasso Sea
SGGLHGVGVSVVNALSLNLSAEIKRGGHKYLLEFKNSEKKKELAKIDKVGKKNTGTKVTFLPDPQYFDNNKFSVSQLMAALKAKAVLSPGLKISFKDKESGKSESWCFVDGLAAYLVTSNKGGDLIPSEPFEGEHFNDDGGLTWALQWVQGISDPISESYVNLIPTTQGGTHVNGLRSGLNEALKEFCEFRNLIPRGVKLTADDVWLNCSSILSAKLKDPQFTGQTKERLSSKEFSTVASAIVKDAFSLWLNQHTEEGEAIAQICIENAQARQKSNKKVDRKKVSSGLALPGKLTDCTSGDPEIGELFLVEGQSAGGSAIKARDRNFQAILPLKGKIMNTWEVEVSDVLASQEVNNIAVAL

SEQ ID NO: 158196 - protein, 552 aa, Unknown
  Bacterial polypetide isolated from the Sargasso Sea
MADTLSFDFEQNEKQPLEEYTEKAYLDYSMYVILDRALPHISDGLKPVQRRIIYAMSELGLKASSKFKKSARTVGDVIGKFHPHGDSACYEAMVLMAQDFSYRYPLIDGQGNWGSMDDPKSFAAMRYTESKLTAYADVLLSEVEQGTVEWLPNFDGTLEEPKLLPARLPNILLNGTTGIAVGMATDIPPHNLKEVASACIRLLDTPKSSVLELCKHIKGPDFPTNAEIISSKTSIREIYKTGYGSIKARAVWCEEDGNIVITAIPYQSSGNKILEQIASQMQSKKLPMIDDLRDESDHENPTRLVLVPRSNRVVLEELMLHLFATTDLERSYRVNLNIIGLDGRPQVKDLKVILKEWIQYRTETVRKRLQFRLDNVTSSIHILAGLMIAYLNIDKIIKIIRKEEKPKDTLMKNFKLSDTQADAILNLRLRRLAKLEELKIKTDLGNLKKEKKELEAILKSKQRLKTVIKKEIEADTKLFADDRQSEIKEAKEAKVIDEKSLITSESVTIVLSEKGWVRAAKGHDIDPTSLNYKSGDNFKQMSQGKTNQLAVF

SEQ ID NO: 158197 - protein, 752 aa, Unknown
  Bacterial polypetide isolated from the Sargasso Sea
MSEKLEKQSISQFSEKAYLDYSMYVILDRALPHIGDGLKPVQRRIIYAMSELGLSAAAKYKKSARTVGDVIGKFHPHGDSAAYEAMVLLSQSFTTRYPLIDGQGNWGSLDDPKSFAAMRYTECRLSPYAKSLLEELGQGTVDWTSNFDGTLLEPSVLPARLPNLLLNGATGIAVGMATDIPSHNLNEVVKACIKILEEPKVSLEDLYKIIPGPDYPTEAEIISPEEELREIYSTGRGSVKMRATYEVEDGEIVILALPHQTSSSKILEQIASQMEAKKLPMIIDLRDESDEESPTRLVLVPKSNRVDKEAVMNHLFATTDLQKNYRVNMNLIGLNGKPQTRDIKLVLKEWLSFRTQTVTRRLQYRLDWVLDRLHILEGLLVVFINIDEVISIIRNEDEPKKVLQKKFKLSVIQVDAILEIRLRQLAKLEEIKIKEEQGSLDSERKDLEKLLGSKTRLKTLIKKELKADAEVYGDERNSPIVYREEATAFDETELISSDPVTVILSERGWVRAAKGHDIEPESLNYREGDTFFASAKGRNNQNAVFLDSKGKAYTLPCHSLPSARSQGEPLSGRLNAESGETFAGVISGPVESQVVLASSSGYGFVANLGDLQTKNKSGKAALRVQEGAQVLIPRAVENEQDVLAAITNQGRMLVFPLTELPKLARGKGNKIIGIPKASFESGEDFLQEVAVLGEGRELRLLSGKRHFTIKSKDLENFVGNRGRRGNFLPKGFRKVDGIEVIGSDQSNNKQEN

SEQ ID NO: 158198 - protein, 747 aa, Unknown
  Bacterial polypetide isolated from the Sargasso Sea
MTKDKFDSISLKKYAEDSYLNYAMYVILDRALPNIGDGLKPVQRRILYAMSELGLDASSKYKKSARTVGDVIGKFHPHGDSAAYEAMVLMAQNFSFKYPLIDGQGNWGSQDDPKSFAAMRYTESKLTSFANLLISELKSGTVDWQPNFDGSLLEPVIFPSKLPVILLNGTSGIAVGMATDIPSHNINEVIDATVKILEKPKSELKDLLKIIKGPDFSNAAPIIVNSEELEEMYSTGRGGFKIQAEWKQEKNTIIINSLPYQASGSKILEQIAEQMLNKKLPMVVDLADEGDHEDPVRLVITLKSNRVNAEDLMNHLFASTDLQKSYRMNMNLISLKGGPRVFSLVDLLKEWLVFRKDTVKRKLEHRLDQVNDRLHILEGLLSIFIDIDEVIKIIRKSDEPKKDLIKAFKLSEIQANAILEIKLRQLAKLEQIKLEDEKNNLDNEQNDIEKVLKSKARLKTLIKKELIEIKEMFGEARKSPIIESSNAKVFSEEDTLVTEPITVVLSKAGWIRSAKGHDIDPHSLSYRGDDNLQDFARGKSNQLAVFLDSNGKAYSIPSHSLPSARGMGEPITGRLNADSGVQFISSIIGEENGKYLIMNTAGYGYISEFKNMTSNKKTGRAFMKLPEHAKMLKAIPIREDHTHIAAVSNIGKLLIFKLEELPILGKGKGNKIINIPKDKLSAGEEFMAHAQVLADESSLMIEVGKRSVTLKPKDWNEYILSRAKRGKKVGKLINIERLTEIISSKEE

SEQ ID NO: 158199 - protein, 86 aa, Unknown
  Bacterial polypetide isolated from the Sargasso Sea
MSENYDSDSIKVLKGLEAVKKRPGMYIGDTDDGTGLHHMVFEVLDNSIDEGLAGFCDQIDVVIGKDGSVSVADNGRGIPVDKHEEG

SEQ ID NO: 158200 - protein, 387 aa, Unknown
  Bacterial polypetide isolated from the Sargasso Sea
KRDAVPEVILNQLYKHTQLQDTFGIILLALVEGVPQVMSLKTVLQHFVDFRHRVVVRRTEFDLREAEARAHILEGLKIALDNIDEVISIIRGSKDPVMAKEGLMNGFNLSEIQSQAILDMRLQRLTGLEVDKVVKEYKELIKHIAHLKGILESKSQRMDIIKTELIEIRDQYGDERRTEIVPVDSDFSMEDMIAEEEVVLTITHQGYIKRTALNTYRTQRRGGRGVQGAMSKEEDFVEHLFIANTHNYMLFFTDQGKCYWLKVYDIPQGGRAARGRAIVNLIGCDPGEKIEAFVSVKEFDDQHYIVMATRNGIVKKTVLSAYGKPRKGGIYAIEIREGDELIEARITNGEHDILLGTNEGKSIRFSENNVRPSGRKTMGVKGITLGS

SEQ ID NO: 158201 - protein, 98 aa, Unknown
  Bacterial polypetide isolated from the Sargasso Sea
MSDSKDQNEDLKTPKEQSIIPILIDTEMQNSYLDYAMSVIVSRALPDVRDGLKPVHRRILYAMHESGYEWNKQHRKSARVVGDVIGKYHPHGDQAVYD

SEQ ID NO: 158202 - protein, 148 aa, Unknown
  Bacterial polypetide isolated from the Sargasso Sea
MPKKSKKDPKYDSSNIQVLKGLEAVKKRPGMYIGDTDDGTGLHHMIFEVLDNSIDEAMASYCSKILLQINKNGSVTVKDDGRGIPVDKHEKEGVPAAELIMTTLHSGGKFDDNSYKVSGGLHGVGVSVVNALSSELVLTVCRDGGMYQ

SEQ ID NO: 158203 - protein, 262 aa, Unknown
  Bacterial polypetide isolated from the Sargasso Sea
MPKDQSNSISLKKYAEESYLNYAMYVILDRALPNVGDGLKPVQRRILYAMSELGLDAGSKYKKSARTVGDVIGKFHPHGDSAAYEAMVLMAQNFSFKYPLVDGQGNWGSQDDPKSFAAMRYTESKLTNFANLLISELKSGTVDWQPNFDGSLLEPVIFPAKIPMILLNGTSGIAVGMATDIPSHNINEVIDATVKILEKPKSDLKDLLKIIKGPDFSNNASIVASPEELEEMYASGRGGFKIQAQWRQDKNQIIINALPYQA

SEQ ID NO: 158204 - protein, 268 aa, Unknown
  Bacterial polypetide isolated from the Sargasso Sea
VSKLFVANTHDTLLCFSSYGKVYWIKVYRLPRGGRNAKGRPIVNLLPLEKDERIQAVLPVKVFNDDQFIFMVTESGSVKKTKLSAYSRPMKSGIKAIKLREGDRVVNAEITDGSKEIMLFSNSGKSIRFKETDARPMGRVSQGVRGMRIEKDQRIISLVVLEEGNILVATENGFGKQTLKDEFSIQKRGGKGVIAIQTSKRNGNLIGANQVRTGDEVMFISTTGNLIRTRTDDISVIGRNTQGVRLIRLSEDDNLLGMEKVISEDNEE

SEQ ID NO: 158205 - protein, 344 aa, Unknown
  Bacterial polypetide isolated from the Sargasso Sea
MSEKLEKLSLSQFSEKAYLDYSMYVILDRALPHIGDGLKPVQRRIIYAMSELGLSAAAKYKKSARTVGDVIGKFHPHGDSAAYEAMVLLSQSFTTRYPLIDGQGNWGSIDDPKSFAAMRYTECRLSPYAKSLLEELGQGTVDWTSNFDGTLLEPSVLPARLPNLLLNGATGIAVGMATDIPPHNLNEVVKACIKILEEPKVSLEELYKIIPGPDYPTEAEIISSEEELKEIYKTGRGAVKMRATYEVEDGEIVILALPHQTSSSKILEQIASQMESKKLPMIVDLRDESDEQNPTRLVLVPKSNRVDKEAVMNHLFATTDLQKNYRVNMNLIGLNGKPQTRDIK

SEQ ID NO: 158206 - protein, 152 aa, Unknown
  Bacterial polypetide isolated from the Sargasso Sea
GSRYGKIIFLTDADVDGAHIRTLLLTFFFKFMPGLIKEGKVWIAEPPLYRAKSSGSINYLKDDKSLEEFKKENKNKKFDISRFKGLGEMNAGELWDTAMNPDTRSLIKVSIADGKAAEAKAANMFEVLMGNDVAKRKTFIEQNAKDVRFLDV

SEQ ID NO: 158207 - protein, 861 aa, Unknown
  Bacterial polypetide isolated from the Sargasso Sea
MAAKKPAAKKPAAKKPAAKKPAAKKPAAKKPAAKKPAAKKPAAKKSKTATATKKKPTIKSDTLNGSIAVEDEISKSFLDYAMSVIVSRALPDVKDGLKPVQRRILYSMYETGIRPTGPFRKCSKVVGDVMGNYHPHGNDAIYGTLVRLGQNFSTRYPLIEPQGNFGTPDDPPAAMRYTESRMSSLSSQLLDGIDEETVDFEPNYSGETSEPKVLPGRFPNLLINGAEGIAVAMATNMPPYNLKEITEAVKFTLKTKDPKPRDYLKIIKGPDFPTGGLIVDTPTIKEAILKGRGSIKLRAVADIEELGKGRSAIIVKELPYQASIDRIMEKIASLVQDKKLTGVSDLRNESSDRNGTRLVVELKRDAVPQVVLNDLFKFTQLQDTFSVNSVALVEGVPKVLSVPELIRYYIDHQIDVIQRRSKYRLEKAKARLHIVDGLLLALNKIDQIIKVIKSSKDVEVARKSLMSKFKLSEIQATHILDMPLRRLTALEKEKLEDEKKELKETIKDLTAILKSRAKQNQILIEELDAITDKFGDERRSRIVPDVGEVKIEDLIEDEEIIVSISSEGYIKSVPSTSYKKQGRGGKGVKAASSEEDVIEHLLSTSVHSYLLFFTDNGKVYRAKAHEIPKTNRTAKGSLIHNVLSMGQDEKVQAIIDTRDYETEKFLLIMTEKGTVKKSKFKDFDSNYKSLQAIKLKDGDKVVSVKTTSGKEDIILVSQKGQAIRFDENNLKAQGRSAMGVRGIKLREGDKVVGAATSREETLLFITAKGYGKRTKLDEFRRAGRGGLGVKALKVTEAKGDLIGAGPVDEDTEVMLMSTGGTAIRCAVKQIKQMSRVAQGVKVMKLSKEEEISAFIPIKNES

SEQ ID NO: 158208 - protein, 103 aa, Unknown
  Bacterial polypetide isolated from the Sargasso Sea
MSDFAKEILPVNIEDELKQSYLSYAMSVIHGRALPDVRDGLKPVHRRILYAMHDLKNNYNKPYKKSARVVGDVIGKYHPHGDSAAYDAIVRMAQDFSMRYTLI

SEQ ID NO: 158209 - protein, 756 aa, Unknown
  Bacterial polypetide isolated from the Sargasso Sea
MDFKKTKSGSKSDSQPLSEFVEKAYLDYSMYVILDRALPFIGDGLKPVQRRIVFAMSELGLSAQSKPKKSARTVGDVLGKYHPHGDTACYEAMVNMAQDFSYRYPLIIGQGNWGSYDDPKSFAAMRYTEAKLSAYTKLMLSELGQGTTDWKPNFDGTLKEPEFLPSRLPNLILNGVTGIAVGMSTDIPPHNIKEISYLLDKLIKNPDISLGQLTRITKNFQGPDFPSGGEMISTPEELKQIYTTGNGTVKIRAKYKKEKNLIVISQLPYQVSGNKIIEQIASQMKDKKLPLITDINDESDHETPIRIVLTPKSNRVNTDELMGHLFATTDLEKNVRVNMNLIGLDGRPRVFDLKALLSEWIEFRKQTVTRRLQFRLDEVEARLHILEGLMVAYLNLDEVIRIIREEDDPKSKLIKKFKLSEIQAEAILNLRLRNLAKLEEEKILTEKNDLEKEQSELTKILKSKKKINELIQNEIKQDTKDFGDDRRTTLNESGIASQALDQTQLASSDPVTIVLSKAGWVRAAKGALEDPQSLNYKTGDDYLSSVPGRSNQFAVFIDSTGRVYSIVADTLPSARSNGEPLSSRLNPPDGSYFAGVMSGDPGQHWLLSSSAGYGFFVKLEDLYTKNRKGKTCLSVKGAEVLIPSNATSFGYPDETYVAAANSAGKLLIFKSNELMEMSKGKGLKIIGINSKKFKEGKEKMVSAIVIGAKDSIRVYSGKKPKIIRPDEFENYMSDRGKRGRSVPPFKKIDSLQVEPK

SEQ ID NO: 158210 - protein, 748 aa, Unknown
  Bacterial polypetide isolated from the Sargasso Sea
MPKDLSNSISLKKYAEESYLNYAMYVILDRALPNVGDGLKPVQRRILYAMSELGLDAGSKYKKSARTVGDVIGKFHPHGDSAAYEAMVLMAQNFSFKYPLVDGQGNWGSQDDPKSFAAMRYTESKLTNFANLLISELKSGTVDWQPNFDGSLLEPVIFPAKIPMILLNGTSGIAVGMATDIPSHNINEVIDATVKILEKPKSDLKDLLKIIKGPDFSNNASIVASPEELEEMYSSGRGGFKIQAQWRQDKNQIIINALPYQASGSKILEQIAEQMINKKLPMVVDLADEGDHEDPIRLVITLKSNRVNAEDVMNHLYASTDLQKNYRVNMNLISLKGGPKVFSLVDLLKEWVIFRKDTVKRKLEHRLDQVNDRLHILEGLLTIFVDIDKVIKIIRNSDEPKKELIKAFKLSEIQANAILEIRLRQLAKLEQLKIENERNELVDERDDIEKILKSKSRLKTLIKNELNEIKELFGEERKSPIINSTNAKIFSEEETIVTEPITVVLSKAGWVRSAKGHEIDPNTLSYRGDDSLQDFARGRSNQLAVFLDSNGKAYSIQSHSLPSARGMGEPITGRLNADSGVQFISSVIGVEGNKFLIMNTAGYGYISEYQNMISNKKTGRAFMKLPDNAKMLKAIPVKDNHTHIAAVSNIGKLLIFNIEELPILGKGKGNKIINIPKDKLAAGEEFMAHAQLLADDSSLKIEVGKRSVTLKPKDWSEYVLSRAKRGKKVGKLINIERLIEEPKSLEEQ

SEQ ID NO: 158211 - protein, 761 aa, Unknown
  Bacterial polypetide isolated from the Sargasso Sea
MSDEIIINRDGVEQLPLRRFTEDAYLNYSMYVIMDRALPHISDGLKPVQRRIIYAMSDLGLNANAKYKKSARTVGDVLGKFHPHGDSACYEAMVLMAQPFSYRYPLVDGQGNWGAPDDPKSFAAMRYTEAKLSRFSEVLLNELGQGTVDWVPNFDGTLNEPSVLPARLPHILLNGVTGIAVGMATDIPPHNVRELANACAMLLDNSKAELSDVLEHVNGPDYPTEAEIITPKADIQKLYETGRGSIKMRAVYTEENGDVVITALPHQASGAKILEQIAAQMQAKKLPMVSDLRDESDHENPTRLVITPRSNRIDVTQLMQHLFATTDLEKNYRVNLNMIGLDGRPQVKDLRTILSEWLQYRKDTVTRRLQYRLDKVLARLHILEGLLIAFLNIDEVIEIIRTYDKPKPELMARFGLSDTQAEAILELKLRHLAKLEEMKIKGEQDELAEERDKLQQLLGSDRRLKTLIKKEILADAEKYGDDRRSPIVERGEAKALSEKELVPAESVTVVLSEKGWARCAKGHDIDAEGLSYKAGDAYLSSAEGKSNQPAVFMDSSGRTFSCDAHGLPSARSQGEPLTGRFSIVGGESFQHVIMAQDESKFLVGSDAGYGFVGTFKDMVSKNKAGKAYLSLPTAAKVMKPTPVTNPDSDWCLSISNEGRMLMFPLRDLPSLGKGKGNKLINIPSAKSQSREEYVKVLAVVPDGAAIKVGAGKRNMTLTADDLTHYQGERGRRGNKLPRGLQRVDTVEVVLPSKDETSEDLS

SEQ ID NO: 158212 - protein, 786 aa, Unknown
  Bacterial polypetide isolated from the Sargasso Sea
MPAKKTTTKKPAAKKTTTKKPAAKKTTTKKPAAKKTTTKKPAAKKTTTKKPEIQNGAIAVEDEISKSFLDYAMSVIVSRALPDVKDGLKPVQRRILYSMYETGIRPTGPFRKCSKVVGDVMGNYHPHGNEAIYGTLVRLGQHFSTRYPLIEPQGNFGTPDDPPAAMRYTESRMSLLASQLLDGIDEETVDFEPNYSGETTEPKVLPGRFPNLLINGAEGIAVAMATNMPPYNLQEITEAVKFTLKTKDPKPRDYLKIIKGPDFPTGGLIVKTPTIKDAILKGRGSIKLRAVADVEELGKGRSAIVVKELPYQASIDRIMEKIASLVQDKKLAGVSDLRNESSDRNGTRLVVELKRDAVPQVVLNQLFKQTQLQDSFSVNSVALVDGVPKVLSVPELISFYIKHQIDVIQRRTKHRLDKAKDRLHIVEGLLLALNKIDQIIKTIKASKDVDVARKSLMKKFKLSKIQASHILDMPLRRLTALEREKLDEEKKDLKETIKELTAILKSRAKQNKILIEELEAITEKFGDERRSRLVDDVGEVKIEDLIEDEEIIVSVSSGGYVKSVPSDSYKKQGRGGKGVKASSSDEDVIEHLLSTSVHSYLLFFTDKGKVYRAKAHELPKTTRTAKGSLIHNVLSMGQDEKVQAIIDTRDYETEKFLLIMTEKGTVKKSAFKDFDSNYKSLQAIKLKEEDRVVSVKTTSGKEDVILVSKKGQAIRFDENNLKPQGRTAMGVRGIKLREGDKVVGASTSREETLLFITAKGYGKRTKLEEFRRAGRGGMGVKALKVT

SEQ ID NO: 158213 - protein, 209 aa, Unknown
  Bacterial polypetide isolated from the Sargasso Sea
AGPAKQARESKTQAILPIRGKIINVQKVTENRALQNEEISSLIKAIGTGIKDEYKGEESRYGKIIFLTDADVDGAHIRTLLLTFFFKFMPGLIKEGKVWIAEPPLYRAKSSGSINYLKDDKSLEEFKKENKNKKFDISRFKGLGEMNAGELWDTAMNPDTRSLIKVSIADGKAAEAKAANMFEVLMGNDVAKRKTFIEQNAKDVRFLDV

SEQ ID NO: 158214 - protein, 370 aa, Unknown
  Bacterial polypetide isolated from the Sargasso Sea
KNTVSFRSNYDETEKEPEVLPSQYPNILVNGAGGIAVGMATSIPPHNLGEIINATVAYINNKDITISQLMKYVPGPDFPTGGIIIGKDIIKQGYNKGRGSFKIRGEIDLEEKKGGRETLIIKSIPYQVNKSILIEKIAQLVRDKKIEGIRDIRDESNREGIRVVIELRKAVEPETVRRQLYKLTSIESSFGFNTLAIVNNKPKILNLKEFISEFLSFREKTVIARVKFDLKKAEERAHILIGIAAAVENIDEVIKIIKNSKDTESAKKNLLTKKWKIKKSVNLVSLIEKKKNTSGYQLSKNQVEAILELKLQKLTAYGIGEIEEEIKKLSKLIIEFNKIINSKKILYKLIIDELEKIKDKFSSPRKTKII

SEQ ID NO: 158215 - protein, 72 aa, Unknown
  Bacterial polypetide isolated from the Sargasso Sea
MALKKTKNQYSADSIQALEGMEHVRKRPSMYIGDVGSRGLHHLVYEVVDNSIDEAMAGHCSEISIQINKDKT

SEQ ID NO: 158216 - protein, 266 aa, Unknown
  Bacterial polypetide isolated from the Sargasso Sea
MTTRTFQQKILWVFIKGPDFPTAGLILGMDGLKQAYETGRGKIKMRARAHIESNKKGRDSIVITEVAYQTNKATLVEKIADLVRDKKVAGIRDLRDESDKDGIRVVIDTKKDAVPEVILNQLYKHTQLQDTFGIILLALVDGVPKIMPLKTILTHFVDFRHEVVVKRTEFDLKEAEARAHILEGLKTALDNIDKVIEIIKGSKDPTQAKEGLMDGFKLSEVQSQAILDMRLQRLTGLEVEKVVEEYKELIKHISHLKGILESKPQR

SEQ ID NO: 158217 - protein, 447 aa, Unknown
  Bacterial polypetide isolated from the Sargasso Sea
LENPKLSIDQIIDSISGPDFPTGGTIDGKMGIYEAYKTGRGIIYVRSKSKVEESKTGKKSLVIYEIPFMVNKARTLEKIAELVKEKKIDGISEIRDESDKDGLRIVIDVKKGESVEVLENNLFAQTQLEQSFGINFTVLVDGQPRVLNLKEILQEFLKHRKDVVLKRTKFELRKAKERGHIVEGLMVAIANIDEIIKIIKKSKDPKIAAQELVKKKWKAGPVEAILKKVGKDACKPKGVAKGIGLSGKSYKLSNDQAKAILELRLGRLTGLEQDNLSSEFNSLIEKITSLQEIIDDKGVLQKVIEDELNEIKETYGDDRRTDINDTRQDISNEDLIPEETRVLTISRTGYAKTQPLEEYREQRRGGQGKAAASVKEEDVIQNLYVLSSHSQMLCFTTKGKVYWLKVYEVPVASRTSKGRPLVNMLNLDDDEKVSDILPVDEFSEDRY

SEQ ID NO: 158218 - protein, 217 aa, Unknown
  Bacterial polypetide isolated from the Sargasso Sea
GELFLVEGESAGGSAKRARDRNFQAILPLKGKIMNTWEVDVSEVLASQEVNNIAIALGVEPGSNNLDGLRYGKVCILADADSDGLHIATLLCALFLKHFRPLVEAGRVYVSMPPLYRIDQGKDVYYALDDPEKDKLVDELQKKNKRTKIEVQRFKGLGEMNASQLRETTMLPGARRLVQLTVKNGDKSSQLVDMLLSKKRSQDRKEWLEDKGNLANV

SEQ ID NO: 158219 - protein, 378 aa, Unknown
  Bacterial polypetide isolated from the Sargasso Sea
ALPNIGDGLKPVQRRILYAMSELGLDASSKYKKSARTVGDVIGKFHPHGDSAAYEAMVLMAQNFSFKYPLVDGQGNWGSQDDPKSFAAMRYTESKLTSFANLLISELKSGTVDWQPNFDGSLLEPVIFPSKLPVILLNGTSGIAVGMATDIPSHNINEVIDATIKILEQPKSDLKDLLKIIKGPDFSNAAPIIVNNDELQEMYSSGRGGFKIQAQWKQEKNSIIINSLPYQASGSKILEQIAEQMLNKKLPMVVDLADEGDHEDPVRLVITLKSNRVNAEDLMNHLFASTDLQKSYRMNMNLISLKGGPRVFPLVDLLKEWLAFRKDTVKRKLEHRLDQVNDRLHILEGLLSIFIDIDEVIKIIRKSDEPKKDLIKAF

SEQ ID NO: 158220 - protein, 573 aa, Unknown
  Bacterial polypetide isolated from the Sargasso Sea
EVPYQTNKAALVEKIADLVRDKKVVGISDLRDESDKDGIRVVVETKRDAVPEVILNQLYKHTQLQDTFGIILLALVDGIPKIMPLKTVLNHFIDFRHEVVVRRTEFELKEAEGRAHILEGLKIALDNIDEVIKVIRGSKDPAQAKEGLMNSFNLSEAQSQAILDMRLQKLTGLEVDKVVAEYKELIQIISNLKSVLENKTKRMNIIKTELLEIKDQYGDERRTEIIPVDTDFSMEDMIAEEEVVLTITHQGYIKRTALNTYRTQRRGGRGVQGAMSKDEDFVEHLFIANTHNYMLFFTDTGKCYWLKVYDIPQAGRASRGRAIVNLIGCNPEERVEAFVSVKEFDDDHYIVMATRNGVIKKTVLSAYGKPRKGGIYAIEIRDGDKLIQARVSNGENDILLGTHEGKSIRFSENDVRASGRKTMGVKGIKLSSKDDYVVGMLIVKREGTILVATEKGYGKRTEVLQYRTQTRAGKGVLTMRCTDKTGKMVNIMEVVDSDDLIVITDSGVLMRQPVEAIRSIGRVTQGVRLVKLDKGTNISSITRVISEETATQKQDNNQISIETGEDESTPDPN

SEQ ID NO: 158221 - protein, 230 aa, Unknown
  Bacterial polypetide isolated from the Sargasso Sea
GKLSDCNCDNIEESELFLVEGDSAGGSAKQARDRRFQAIMPLRGKILNTWDLESADIIKSQEIKDLATAIGSLPGDTDISNLRYGKICILADADSDGLHIATLLCALFLRHYKNLVTSGKIFVSMPPLYRIDAAKEVFYALDENEKESIVKKIKKQNSKIKIDIQRFKGLGEMNPSQLRETVMKPESRRLVQLTLSSSDNANSVFDLLLSKKRAPDRKEWLEKKGNLAEI

SEQ ID NO: 158222 - protein, 199 aa, Unknown
  Bacterial polypetide isolated from the Sargasso Sea
MTKGNLDKQSIKKYAENAYLNYSMYVILDRALPNIGDGLKPVQRRILYAMSELGLNASSKYKKSARTVGDVIGKFHPHGDSAAYEAMVLMAQDFSFRYPFVDGQGNWGSQDDPKSFAAMRYTESKLTKFSDLLIDELKQGTVDWQPNFDGSLLEPVIFPAKVPSILLNGTTGIAVGMATDIPSHNMTEVIDATIHVLEN

SEQ ID NO: 158223 - protein, 378 aa, Unknown
  Bacterial polypetide isolated from the Sargasso Sea
EPINLIGLIDSKKGTIRANHYHPQQEQKCLFTKGQIIEIFQDILNPNAPKITQVVNEGQLSIIKPNVAHTMVFTKDTTFLNLVRGERDHENYGISHTIRHWFVDEKERDMLMSCYKFDCRSCGETKLKRVVSLGYQPLANNLLKKKNEKTELYPLEMNYCPSCHNCQLSISVDPKKMFSNYLYTSSTSKVFRDHFDKAAKKYIKEFNLNSKKSYIIDVGSNDGVALKPFKDLGFKHLLGIEPAKNLAKLANKNDIKTFNGFLDKKNLKKIKKGADLVLASNVFAHSDSLKEMAECMKKLLNKNGTIIIEVQYLLNTLKDLTFDNIYHEHYNYWSLTSLVNFFNQLNLNIYKAERVKTHGGSIRIYLKNKNVKVEKSVK

SEQ ID NO: 158224 - protein, 35 aa, Unknown
  Bacterial polypetide isolated from the Sargasso Sea
GYAFGMGVERLAMLKYGIKDIRSFYENDFNFLNQF

SEQ ID NO: 158225 - protein, 271 aa, Unknown
  Bacterial polypetide isolated from the Sargasso Sea
MNPSSSNKKKVQQLTSILKRSGGNVASKSPTKAVIPKVSDIPVISPVKYANDIYNIAEAFELSSRNLAKATNFLGEKEKKKIERISLKRTPTTSDLEQAARSEPNDFRKQIDLSRNYESNGRFEEAKEIYLKLAAQHSNNADAHFHLGSFYARFGQMTKARHSFDEALDVQPNHRATIEAMSTLFGENKLSSMSDDILTKSAEKDPNGPAKQMQRVRKNLVDLNFENAAKLAQGGQDMFPAHGGFIYLKGKAFEGLNNLDKAKASYQESIK

SEQ ID NO: 158226 - protein, 327 aa, Unknown
  Bacterial polypetide isolated from the Sargasso Sea
KAEAISSYDALLAKPGATGTEVFDQAKVDNPDLSDDLRVHKPYIDAITYDSPFATHARMRRVPEVIDCWFDSGAMPFAQWGWPHTGAEEFESQWPADFISEAIDQTRGWFYSQLAISTLLFGPESTTDAASTHAAAAMPPKDYPHPFRNCIVLGHMLGEDGGKMSKSKRNYKEPSEILDRYGADALRWYFFAGQPPWNSIRYSEQAIRESVPEFLLRLWNVYSFFIIYANIDGFNPATDVEDPGQLDHANLASGNGFRPAHERSELDRWMLAELHATEQKMVDALDTYDHYVAAGALSNLVDAVSNWFVRRSRDRFWAAGKADTSAH

SEQ ID NO: 158227 - protein, 200 aa, Unknown
  Bacterial polypetide isolated from the Sargasso Sea
MNDEEIKSEIRKFALQNAVEHEGQTRDKTILAKIMGNVPELRQKAKEIGPIITEVVSEINQIPLQEQQKEIKEKYPELLEVKKEKPQKESLLPALKNTEGKEIITRFPPAPNGYPHIGHAKAAVISEEYAKMHGGKLILRFEDTNPGTERLEYYAAIKVGMDWLGIKYDSVEHVSDNLDILYKKADQIIKSNDAYVCTCS

SEQ ID NO: 158228 - protein, 333 aa, Unknown
  Bacterial polypetide isolated from the Sargasso Sea
HNSGAAPIASLDEATYKEKIPAPFFTEGIDQTRGWAYTLLIENVIYNNASVSPYKSFLFQGHVLDENGNKMSKSKGNVLEAKELLEKYPVDLVRFYFMWKASPIEPLNFSTKELMSRPYQVISTLYHLHTFYKQNSEYDKFNVEESTIEWAKKNDLLTPPDVWLLSKLQRMIERTTETNDSCRFHESAKSIEDFLINSLSQIYIPIIKSELWDEDDSKKDRRFTIYAILAKTLKTINILIHPFAPFTSQYLYKSIFSEKENILLESWPKVDSSLIDEKVETSFDLLKETVSVTSAARMKGKLKRRWPLNQAMICLNKRRKTSFRIIIRTCKVT

SEQ ID NO: 158229 - protein, 337 aa, Unknown
  Bacterial polypetide isolated from the Sargasso Sea
CKRAVAPDGTFTDEFPMMTGRFVKECDRDLTRDIRSRGLLVHQEQYLHDYPFCWRADNDPLIQYPRASWFIRTSEFRDEMLANNSQINWMPEHIKEGRFGNFLKNNVDWALSRERYWGTPLPIWVCEETGKAEAISSYNALLAQPGATGTEVFDQAKVDNPDLSEDLRVHKPYIDAITYDSPFAADARMRRVPEVIDCWFDSGAMPFAQWGWPHTGAEEFQSQWPADFISEAIDQTRGWFYSQLAISTLLFGPESTTDAASTNATTAMPPNDYPHPFRNCIVLGHMLGEDGGKMSKSKRNYKEPSEILDRYGADALRWYFFAGQPPWNSIRYSEQAI

SEQ ID NO: 158230 - protein, 315 aa, Unknown
  Bacterial polypetide isolated from the Sargasso Sea
MKDALKLIKRGADEILTEADLKKKFESGKQLVIKAGFDPTAPDLHFGHTVLLNKLRHFQDLGHKVIFLIGDFTGRIGDPSGINKTRPILDAKDLVENAKTYEKQVYKILKKDLTEIKFNSEWCDKLGADGLIGLASKYNVARMLERDDFNKRFTSNKSIAIHEFLYPLVQGYDSVALEVDVECGGTDQKFNLLVGRELQRDYGQEPQVVITVPILEGLDGVKKMSKSLDNYIAIDEDPDDMFGKIMSISDELMWRWFELLSFIPEEEIAKLKTEMDSGKNPRDIKFVLAEELVDRFHNEGDGKKCKDTFLKRFQK

SEQ ID NO: 158231 - protein, 314 aa, Unknown
  Bacterial polypetide isolated from the Sargasso Sea
FVVDGKGLKMSKSLGNIISPEDILKKYGADILRVWVAASDYAEDLRIDYSILEQHAESYRKVRNTFRYILGNLNDKFEKIDFDKINIKDFPELEQYMLHKIYNLSIIFEKNFEKYNFHTIYKELLNFCNSDLSAFYFDIRKDTLYCDSLDSNKRISTIKFLNIVIEILLKWFAPVLSFTTEEIFSLLKINEEGSVHLEKFPIIPSSWNNEDLNNKWTELVKIRDKCNSSIELKRVSKEIGSSLEATLKIHLNEKLIKLSSGTDFSELCITSGAKVDKINNDSSDEIIVMTDKAEGKKCNVCWKIYKDKCDRHGA

SEQ ID NO: 158232 - protein, 55 aa, Unknown
  Bacterial polypetide isolated from the Sargasso Sea
TKFQGYAFGMGIDRLAMLKYGINDLRAFFDCDYRWLNHFGFDPLDVPSNYRGLSR

SEQ ID NO: 158233 - protein, 268 aa, Unknown
  Bacterial polypetide isolated from the Sargasso Sea
MGKDILVTHCVYWTTMLLALEIPLPKHFIVTGWWLKNKEKMSKSIGNVVDPLDLTERYGVDVIRYFLMREMSLGQDSSYSEELVLERNNKELANDLGNSLSRVSSLLEKNYEGRLPKLMSMTPGDERVWSDVEAMVMAAQGLLSEFRTKDLVEAVLAQVRQLNKYITDEAPYKIMKVDRERAGHILHVALEGLRVCCCLLSPLMPEKMSVAMKSLGIDKIEKAHLGIGFLKEGNPVTKISGLFPRYELSEETKVESEAASDKRRSRNP

SEQ ID NO: 158234 - protein, 142 aa, Unknown
  Bacterial polypetide isolated from the Sargasso Sea
VVPGLDGRKMSKSYGNVIPLLENEKSLKKSIMKIVTNSLEPGVPKETENCTIYNLYKNFADKPDISAFETSYKEGISWGEAKEKLFQVINAELMPIRSKYLELEKDTDYINDLLSDGAKKARSLAKIKILEIKEVTGITKIT

SEQ ID NO: 158235 - protein, 301 aa, Unknown
  Bacterial polypetide isolated from the Sargasso Sea
ICFCNPTGPLHVGHCRGAILGDVISNILKFNNNIVKKEYYVNDYGNQISHFNYSVYLRIREKLYNENFPLDNPDLYPGDYLIDIASNIIKNNKNVNFENFNDIEDHLKKLSINESLKLIKKNLSDLGINHDNFVSETNIVNDKEVEKVVEKLKKSKHVYTGKINAPEGEDKKNWTERDQLLFRSTDFGDDKDRALQKSDLTWTYFASDVAYHNTKINRNFDKLINILGADHAGYIKRISSVVEAISGEKNKLSCKVSQLVKLIKDGKPFKMSKRKGDYITVEDLVKEVGKDATRFIMLSRS

SEQ ID NO: 158236 - protein, 113 aa, Unknown
  Bacterial polypetide isolated from the Sargasso Sea
NKKIKKNENLNLSLEKNIDILNNISKHNSLRPKLTIGFAAETNDIVNNSLKKLEEKNCDWIIANDVSDNSIGFNSDENQISIFYKDKKNENLKKMSKSLVASEIVNRVIEKLN

SEQ ID NO: 158237 - protein, 248 aa, Unknown
  Bacterial polypetide isolated from the Sargasso Sea
FWVSRMIMAGYEFRDEKPFKNVYFTGIVRDNKRRKMSKSLGNSPDALKLIDDYGADGVRVGLMLSSAAGNDLLFDVNLCDQGKSFSNKIWNSFRLVNGWEIGDHDQPEYCSNAISWYNHKFNHVLNQINDHFSKFRISDALMSTYKLIWDDFCSVLLEIIKPEYGKPIDSKTHREIIKIFENNLLILHPFMPFISEEIWHLIAKRNSDEAIVISKWPKSKNDINNEIINDFETLQNIISGIRNLRKKH

SEQ ID NO: 158238 - protein, 59 aa, Unknown
  Bacterial polypetide isolated from the Sargasso Sea
MKIFNSLKSEKEDFIPLKEEEISIYVCGMTVYDDCHIGHARTFLSFDSIVRYLRFRGFK

SEQ ID NO: 158239 - protein, 285 aa, Unknown
  Bacterial polypetide isolated from the Sargasso Sea
GHEVIFLIGDFTGMIGDPTGKSATRPPLSREDVLRNADTYKEQVFKILDESKTRVEFNSSWMNTIGAAGMIKLAGQYTVARMLERDDFDKRYKGNQPIAIHEFLYPLVQGYDSVALEADVELGGTDQKFNLLMGRTLQKTYGQSPQICLTMPILEGLDGVQKMSKSLGNYVGVNDAPGEMYRKLLSLPDSLTWRYYELLSACSNERIEALKAEAVALGSPQEAKKAFALEMVERFHGVEAAQAAPKSAGNQIALGHIPDNVPEVEVDIGEQESIHILPLLREAGL

SEQ ID NO: 158240 - protein, 228 aa, Unknown
  Bacterial polypetide isolated from the Sargasso Sea
MKTENEYFDVVIVGSGLSGIGAACHLSIHCPNHRYIILEARESIGGTWDLFRYPGVRSDSDMHTLGYGFRPWDGSKTIADGSSIREYLLETASEFGVEQYVRYNRKLKCADWSRENSCWYLEIENTVNKKSLRVSTNFLHMCAGYYDSEAAHQPDFPSMKQFKGVFINPQFWPEKLDYAGKKVVVIGSGATAVTIVPAMAETAQHVTMLQRSPGYFLSWPSQDQFTSI

SEQ ID NO: 158241 - protein, 156 aa, Unknown
  Bacterial polypetide isolated from the Sargasso Sea
MNDEEIRSEIRKFALQNAAEHEGQTRDKTILAKIMGNVPELRQKAKEIGPIITEIVSEINQIPLEEQQKEIQEKYPELLEVKKDKPEKQSLLPPLKNTEGKEIITRFPPAPNGYPHIGHAKAAVISEEYAKMHGGKLILRFEDTNPGTERLEYYAA

SEQ ID NO: 158242 - protein, 141 aa, Unknown
  Bacterial polypetide isolated from the Sargasso Sea
TKYITGTDGEKMSKSKNNIIDIFVDDKTLRKQIMKIETRSLSVEDPKNPQECNVFKLYEVIASRNEVESLKKQYLKGGIGYGTVKELLFDKILNRFSKNRKKYFELLEDRPELENLLSDGSKRARVQAQKVLKRVRSRIGF

SEQ ID NO: 158243 - protein, 184 aa, Unknown
  Bacterial polypetide isolated from the Sargasso Sea
MLRLFLVGKDQLQHLEITRNVASRFHNVYGETFVLPQEHLQEEAKLIPGTDGEKMSKSKNNVIDIFASEKELKKQIQSIKTDSTAIEEPKDWKNCNLFKIYSLIGNVDQIKTMRENYENGGYGYGHGKKDLLELILNNYSEERQKYNHYISNPSEVNEILMHGATKAKLSADEVLTRVRKKLGY

SEQ ID NO: 158244 - protein, 321 aa, Unknown
  Bacterial polypetide isolated from the Sargasso Sea
PKANLAYLNGCPTNAALGFANSLDIDVGELEIKNTEKGDFVFGKKIEKGLSTKISLSSIIPKLVKSLQGPRFMKWGGGNIKFSRPIRWIASIYNDEILNFEFDECDPKIKISNKTKSHRLINEVLEVQNPDDFFELLKRNRVIAIRKERKEKIESLINQASKSLNLKPDLSEGLLNELTDLVEWPDLIIGKFSNEFLDLPVEVLSTVMKIHQRYVPLLFKNESFSKLDLSSEKNISTTFCVISNGLEESNNNIAKGNEKVLRARFSDAKFFVESDKKVASIERNEKLKSVSYLKGLGNIFQRVERIEEVTKKILKFLNDKS

SEQ ID NO: 158245 - protein, 254 aa, Unknown
  Bacterial polypetide isolated from the Sargasso Sea
WVARMVMMTTHFTGKVPFHTVYVHGLVRDAEGQKMSKSKGNTLDPIDIVDGIDLDTLVAKRTTGLMNPKQAATIEKKTRKEFPDGIAAFGTDALRFTMASMATLGRNVNFDLARCEGYRNFCNKLWNATRFVLMNCEGHDCGSDKPEVCGAGDCGPGGYLDFSAADRWIVSLLQRTEADIAKGFADYRFDNIASSIYKFVWDEYCDWYLELAKVQIQNGTPEQQRATRRTLLRVLETVLRLAHPIIPFITEALW

SEQ ID NO: 158246 - protein, 303 aa, Unknown
  Bacterial polypetide isolated from the Sargasso Sea
NSKKGTIRANHYHPQQEQKCLFTKGQIIEVYQDVLNPKSPKITKVVNEGQLSIIKPNVAHSMVFTKDTTFLNLVRGEREHENYGITHTIKHVFVDEKEKNLLLSCYKFECRVCGNTKLKRVVSLGYQPLANNLLKTKEEKCDLYPLEVNYCENCKNCQLSVAVDPKKMFNNYLYTSSTSKTFRDHFIKAANDYTKLLKLKPKKTYIIDVGSNDGIALKPFKDLGFKKILGIEPAKNLAKLANKNKIKTYNGFLTKKNIKKIKKNADLILASNVFAHSDDLREMAQCMIDLLSKNGTIIIEVQY

SEQ ID NO: 158247 - protein, 233 aa, Unknown
  Bacterial polypetide isolated from the Sargasso Sea
MKTNIIILGAHGMLGWQIVNEFKDKNYKIICQVRNKKSELSLKKKLNLKKKIKFIYFDVERDPINLLLKYISVKDIIINCIGKIKPYIGDNNKDQIYSAIKVNSLFPIELSKYIKLKKIKLYQIATDCVYDGKAGNYDENSRHNAIDVYGKTKSLGEVKVNNFYNIRVSIIGKELNTKNSLVEWFISNKKSKKILGFNDHLWNGVSTNVFAHILYTIINKNIKIPCHFHLIPK

SEQ ID NO: 158248 - protein, 283 aa, Unknown
  Bacterial polypetide isolated from the Sargasso Sea
MKNNKKIINSANRTLARELSSIKNLNSTFNLNFCRAVNLIYNTKGKVVITGVGKSAHIGNKISATLTSTGTPSYFVHATEASHGDLGSIKRDDCVIAISNSGETSELNNIIQFTKRFNIKLISITSNSKSILHKNATIGILYKKPIEACPLNLAPTSSTSMSMIIGDCIAISLLELRGFKSKQFKNLHPGGNLGKDLKNLSDVMHTGKKLPLAIVNEKMSKSLITMTKKSFGCIGVINNKKQIVGIITDGDLRRKLNSKFFNKSASEIMTKNPTLANKNMLGR

SEQ ID NO: 158249 - protein, 211 aa, Unknown
  Bacterial polypetide isolated from the Sargasso Sea
EIMAKYWVHNGYVNIDDKKMSKSLKNFITISDLLKKFNGEIIRLFLLQTHYRAPLNYKYEHLNESKTSLSRLYRAVEGLEVNGNPDEEILKCLKNDLNTPKAIARSHYLAENANKGSKEAGQLLKNSSKVLGLLENDTEGWFKGSLDENSLKLVSQQLSVKQIEGFIKKRIIAKQNKNYELADKIRDDLLNKGIVLEDKLNETNGEDHKKF

SEQ ID NO: 158250 - protein, 309 aa, Unknown
  Bacterial polypetide isolated from the Sargasso Sea
IVLTFDEIVDAETGNITIKKTSDNSTVETIDVTGGQLSGSGSAEITLNPSVTLDSSTEHYVLIDATAFDDVSGNSYAGISSTTALSFTTGDTTTPTLTSSVPADNATGVAVDSTIVLNFSESVDAESGNITIKKTSGNSTVETIDVTGGQVTGSGTSQITVTPSSDFDNDTEYYVLIDATAFDDASGNSYAGISSTTALSFTTALEDPTNDKDVIGLMEVQTEAPKKIVQHVSTPIYNRLNWIRGYKSGNKQDAQKIKFKFLNPKISKIANIVPETINFNKIPKRSIDDWLFWSEGSVSVGKVGDTSNS

SEQ ID NO: 158251 - protein, 296 aa, Unknown
  Bacterial polypetide isolated from the Sargasso Sea
IANNMDPMNGADANIDTDGDGMTDGEEVLNGTNAKSADSDGDGIEDKEEILAGTDPTNADSDGDGQSDGAEAIAGTDANDAEDSFVDSDGDGLSDEVEDQLGLDKTDATDANADTDGDGISNKDEAEAGMDPNSKDSDNDGIDDAVEIANNMDPTDGADASQDTDGDGMTDGEEILRGTNAKSADSDGDGIADKDEVLAGTDPTNADSDGDGQSDGAEKAAGTDANDAEDNFIDTDNDGLSDLYEDLVGLNKNDASDADADTDGDGISNKDEAESGTDPTNADSDNDGINDAVEIA

SEQ ID NO: 158252 - protein, 275 aa, Unknown
  Bacterial polypetide isolated from the Sargasso Sea
KDECPADKCEKCGKTEFIGEERTFDTWMDSSVSPLFITKFNVDNEFFKKTYPTGIRPQAKDIVRTWLYYTLLRCEELTGKKPWSEAWIMGYGLDEKGMKMSKSKGNALDPLPIIQKSGADTFRFWSASEINHGYDFRCSEQKIESTKKFLSKLWNVSRFLSSFPVINSANLTNTDKWILSELDKLILECKEGYSQYNFFIPAIALREFTWNIFAAHYIEMVKARAYGIGFEDDERDAAIYTLHKVLSTVLKLLAPITPFITEHLWQTLYSENSVH

SEQ ID NO: 158253 - protein, 199 aa, Unknown
  Bacterial polypetide isolated from the Sargasso Sea
MNDEEIRSEIRKFALQNAVEHDGQTRDKTILAKIMGNVAELRQKAKEIGPIITEIVSEINQIPIDEQQKEIQEKYPELLEIKKEKPEKQSLLPPLKNTEGREIITRFPPAPNGYPHIGHAKAAVISEEYSKMHNGKLILRFEDTNPGTERLEYYAAIKVGMDWLGIKYDSVEYVSDSLDVLYQKADQIIKSNDAYVCTC

SEQ ID NO: 158254 - protein, 271 aa, Unknown
  Bacterial polypetide isolated from the Sargasso Sea
LKTRNYEVDSKVHILFDYGGPNIGKALHVGHLRTLNIGRSLYKINKFAGNKVTSDVHFGDWGMPVSQIIAYLIYKEIDVNAVNYDDLETIYPSAVKLSKEDEEFGKLCQHISKELNLQNNEYFEKWKIIYKISIDQIKSLFVKLQHSFDLFYGESDVINETNKVVEKAKKDGLVKIDDGALISTEKSDPPIIITKADGSYLYMTTDLGTVYFRESQNTYDKYVYVVDSRQSEHFSQLFKTVKHFNLSEKEFNHIGYGTNNGKDGKPLKTRE

SEQ ID NO: 158255 - protein, 266 aa, Unknown
  Bacterial polypetide isolated from the Sargasso Sea
PLKNIEGREIITRFPPAPNGYPHIGHAKAAVISEEYSKMHNGKLILRFEDTNPGTERLEYYAAIKVGMDWLGIKYDSVEYVSDSLDVLYQKADQIIKSNDAYVCTCSQDNISKNRREMIECNCTKQSVEENEKLWHKMFDEKGFKEGQALLRFRGNMQSGNTTMRDPALFRINTKRHARQEQKYKVWPTYDFAGIIFDSISKVSHAMRSKEFELRKELHHTILDKLGMEKSEFIFFGRLDLEGMPVSKSALKPLIENGKVPWYDDP

SEQ ID NO: 158256 - protein, 266 aa, Unknown
  Bacterial polypetide isolated from the Sargasso Sea
MEKKLTNSIQNDFLKITGVKISKIYIKNKILPVFRYLDESKKNMFLLSGSQGIGKTTFIKILYKNFNKYYKKKILTLSLDDFYYSKNYRKKLSKLIHPLMATRGVPGTHNIKLLLKIINNFEKNRYPIEIPIFDKLNDNRIKKKRIINYKHDILILEGWCCGSTPIKDYYLYKNINKLEKEYDKKFVWRNYYNKLLKNDYSKIFKKFDILIYFKTHSFSYVKNWRLKQENQMKKKMSKSKLSMNKKQIIFFISHYEKLTKWMMKKL

SEQ ID NO: 158257 - protein, 180 aa, Unknown
  Bacterial polypetide isolated from the Sargasso Sea
MILDKLNKKLVEVVKNKAAEKSVEISEEILNQIHFEINDEESHGDYSTSCALKLAKTFSMNPREIAESLVEHLTLPSIKSLAVEGAGFINVFLTSNEKSLLLKEIVRLDSEWGKNEKNKGQILVEFVSSNPTGPLHVGHGRGAVLGMALSNLLENSGYQVTKEYYVNDAGRQNIYTYKQR

SEQ ID NO: 158258 - protein, 200 aa, Unknown
  Bacterial polypetide isolated from the Sargasso Sea
MINILFAAVTERWDQYQGPLKKELDLLGLEHKLSEKLAPAEVDYIIYAPNSTIKDFSVFTNLKAVLNLWAGVEDVVKNETLTVPLARMVDEGLTRGMKEWVLGHVMRHHLGLDLHIFGQDGQWRDWSAPPLASDRNVTVLGLGALGAECANELAKVGFKVRGWSLNKKSLCNVTCHHGSEGLEKSLFGSEIVVLLLPSPA

SEQ ID NO: 158259 - protein, 166 aa, Unknown
  Bacterial polypetide isolated from the Sargasso Sea
DFKTSNFFKIPEPLIKKNFSRIMSLKDGTKKMSKSDPSELSRINLNDDKDSIINKIKKAKTDPLPIPDTIEELQKRPEAENLLGIYSSLNNQILNKTLDEFSGKNFSDFKKKLSDLLIEKISPVSQKMKEIQKDNNFIDDILKQGAEKANKIASKKVDEIKKIIGF

SEQ ID NO: 158260 - protein, 306 aa, Unknown
  Bacterial polypetide isolated from the Sargasso Sea
LVAIDIQHTPGLKLHFLHSKSDKHNAIPLVMTHGWPGSVQEFLKIIPVLQKNSEVPIDIICPALPGFGFSDKPKEVGMDSKQIAILQHELIMALGYKKYIVQGGDWGATVSKWMAELYPDHCIGIHLNMIIAWPPADKDPLENTSQEEQKLMANYEKYKEQGVGYYEIQKTKPQTLGYGLNDSPVGLAAWIVEKFYGWFDGEENKLVVSNDEVLGIVSLYWFSESITSSTRLYKENGDLGFSFENIKQPMAGAVFERDFIAPPRAWAEEIYNVVQWNSHKGGHFAALEQPESLSKDIIEFIKKLKI

SEQ ID NO: 158261 - protein, 200 aa, Unknown
  Bacterial polypetide isolated from the Sargasso Sea
LVGRDLQREYNQVPQVIITLPLLEGTDGIEKMSKSYGNDISFIDLPQDMYGKSMSIPDKMIEKYFILAADSNEDELTEIRQKLDNPKINPRDVKRSLAYSIVSLYYGEDKATKAEEHFDQVVVGKNNPDSMDEFILKDDMLLIDILLNKGLTKSKGEARRLITQGAVRLDGNKVEDINMILCSGNQVIIKVGKRKFLSIK

SEQ ID NO: 158262 - protein, 190 aa, Unknown
  Bacterial polypetide isolated from the Sargasso Sea
QKPQCILTMPILEGTDGIEKMSKSYGNDIGISDSANDMYGKTLSIPDNIMLSWFILAADVDKNYLDEVSQKLEDGSYNPMELKRELARKIVALYHDENIAIEAENHFNKVTVSKGVPDDIDNYHLKEEDLLVNIIADSGLLNSKSEARRMIKQSAVRIDGETVTDIHHKITTPDSFILKVGKRKFLKVSG

SEQ ID NO: 158263 - protein, 176 aa, Unknown
  Bacterial polypetide isolated from the Sargasso Sea
VQKMSKSLGNSIGVFDSPNEMLGKIMSISDELMWRYYELLSQISTDDLNAMQEQAKSGALNPKNSKINLAKEIVTLYHSPELAEAASDEFENVFKKKNLPENIPVVKGWGKETRSICNILKENKLTDSTSAARRLIQQGSVTVNGGKVIDVNQAFSGDKAYMIKVGKKRFLKIEPD

SEQ ID NO: 158264 - protein, 214 aa, Unknown
  Bacterial polypetide isolated from the Sargasso Sea
IRDENGQKMSKSKGNIIDPIDLIYGIDLEDLVTKRTANLMQEGLAEKIERKTRKQFPDGIESYGTDALRMTFFSLATHTRDISFELGRLKGYRNFCNKIWNAARFINNYPHEAKEFVAKNDDDKWIEEEFNKVSEQIKKNIEEYRLDFAVNEIYEFFWGKFCDKYIEDCKKSGETSNLHPMLKKILLLMHPFAPFITEEVNELVFKDGSLMNSK

SEQ ID NO: 158265 - protein, 259 aa, Unknown
  Bacterial polypetide isolated from the Sargasso Sea
NQGRKMSKSLGNSIDPLDIIDTYSSDALRFSLLMITATGQDVYINNEKFEIGRNFMTKLWNAARFMEMHSESLDVKNISCDAFQLSPDDQFIIAKLNKTITAVETHLKRYRFNDATLALYDFFWHCYCDRYVEYSKPLLYRGTEMEKQRTLAVMHTVFNTSLRLLHPFMPFLTEELWLGMNYNHTEKMIIKAEWPKPIFVNKIDLDIVNYVEGKHDLIRVGRILRSDYNLTVKQEACFVIRANNEKVLSDIKSDKESIL

SEQ ID NO: 158266 - protein, 293 aa, Unknown
  Bacterial polypetide isolated from the Sargasso Sea
KMSKSKGNVLDPLELTDEYGADSLRFTLAAMAAQGRDIKMSTSRIEGFRNFTTKIWNACRFLQMNDCANADSIDLSSVKAPVNKWIVSEYNTAIAKTSDAIDSYRFNEAADALYHFIWHCYCDWYVELIKPSLVSDDSAVATEIKATAGTILEGTLRMLHPFMPYLTEELNQKIFQNDDMLIVANWPQATTDTDFDAVNDIQFLISLITEIRYIRSEMNVPLSAKPMLQVRGMNAAQVTVLKSQNAALMRLARVSGVTVVDQFSKGTARGSVDGSDIGLTLSEILDLEAEAAR

SEQ ID NO: 158267 - protein, 137 aa, Unknown
  Bacterial polypetide isolated from the Sargasso Sea
MKQLSNLIKKLENELYDRNMSEEISLRISNNSDFDFQINDLVKFQSHNDIDQIKNSFYKIIQNDSSVRNFEISENYFINIEIDIPNFLHNFEEIKENIKVPNPNTIIFDYGGPNIGKPLHVGHLRSLNIGKKLLSNK

SEQ ID NO: 158268 - protein, 297 aa, Unknown
  Bacterial polypetide isolated from the Sargasso Sea
RLPEILKFIPSIKSVVISNYPGKKFIKNKNKNKFKKINFFKWNKLMQTNAEKINFKRFDFETELAILYSSGTTGKPKCICHRSGGVLIQHMKEHQLHCNIKENDNVFYFTTCGWMMWNWLVSSLASKASIVLFDGSPMFKSPDLLLKIAQREKITLFGISAKYIDALRKFRPKLNYKFKLNKLRTICSTGSPLSEESFKYVYKQIKKNVHLSSISGGTDIVSCFVLGNLYQSVNIGEIQNKGLALDVDVLSDKGKSLKNIKGELVCKNPFPSMPLKFWNDKNDIKFKNAYFNRFKNI

SEQ ID NO: 158269 - protein, 306 aa, Unknown
  Bacterial polypetide isolated from the Sargasso Sea
KKNPAQASKYAKRGSTKAKKKDYRGALSDYKKAYQLNPTSNYKKRVQQLTSLAKKSGGNSSKKPSKKQVQQASSYAKRGNAKAKKKDYAGALKDYQRAYKLNPSSSNKKRVQQLTSLAKKSGNRVASKSPTRAKTPRMSDIPVISPVKYANEIYNITEAFELSSRNLARATTYLDEKEKKKVERIYVKLAPSTSDLEQAARLDPNDFRKQIDLSRNYETNGRFEDAKEIYLKLAAQNPDNADAHFHLGSFYARFGQMTKARHSFDEALDVQPSHRATIKTMATLFKTKESRSMSDDMLSKSAEKDP

SEQ ID NO: 158270 - protein, 294 aa, Unknown
  Bacterial polypetide isolated from the Sargasso Sea
MAAFMRDVNSKFNTQITDYHQLWEWSVENHEDFWNHWWNYVNPIASKQPKRTLINSDLFERSRWFPDAELNFAENLLRFRDNKKAIVFRDEDGNRSSLSYNELYIVAGLVAAEFKNLGIGKGDRVAAILPNIPEAVIAMLATTWLGAVWSSCSPDFGTDGILERFKQIEPKLLISCDGYKFKGTTYSILDKTDSVRNQLKCKTVMVNWLSIGKLSSTIDWKELTNTKALPPKFDQINFNDPVYILYSSGTTGKPKCIAHGAGGTLLQHLKEHRLHTDITRQDILFYFTTCGWMM

SEQ ID NO: 158271 - protein, 282 aa, Unknown
  Bacterial polypetide isolated from the Sargasso Sea
IRAFYQMLKSGEVVSGGGTISMQVVRGYLLSREQKIVRKIKEIYLAFELESVATKEEILSIYLNTIFLGNRSYGVEAAANQYFAKSINELTLAEAALIASSAQLPSRINPIRSPDRALVRRNWILSRMFKLGYIGKAQYLLAKDEPIVLSQLQTRFSLDGRYIAEIARQALIDRYGLSVYKDGLSVYTTIDSKLQQAALKSIDKNLYLYDKRHGWREPVNLSNRIPEIVFTELRNQNTDILYETSNLQDELGMNQLFISIIRDYFENSKNLDKHIGGIVIDV

SEQ ID NO: 158272 - protein, 193 aa, Unknown
  Bacterial polypetide isolated from the Sargasso Sea
HNGQEPQCIITTPLIEGTDGVEKMSKSYGNDIGLHDSPEEMYGKTLSISDEMIVKWLTLAADADSKTIEHAKKQLEDPNVNPMEIKRLLARKVVSLFHDDELADKAERHFNEVVVGKGVPDDIPVYSITKEDLIVNIIFDSGLLKSKGEARRMIKQGAVKLDEKRVDDIQATIQPDGEQILKVGKRRFLKVHG

SEQ ID NO: 158273 - protein, 175 aa, Unknown
  Bacterial polypetide isolated from the Sargasso Sea
TLLLDKPGFQHVWIDGLGMDPWGRKMSKSLGNGIDADSVLECGAGGRTGSWKVKGPEGKQVHLTAKKIGSECFRLWKACDAQVGDDFHINPEEIESRYFGVLSKLFNVARFASQFDVPNDLSNIPDNLNIEDKWILNEFGIMLTNVKDSWENIDIYNATQSIKTFGSGYIGKSLS

SEQ ID NO: 158274 - protein, 293 aa, Unknown
  Bacterial polypetide isolated from the Sargasso Sea
LFVTKFNKDDEFFKKTYPTGIRPQAKDIVRTWLYYTLLRCEKLTEQKPWSEAWIMGYGLDEKGMKMSKSKGNAIDPLPVIQKSGADTFRFWSASEINQGYDFRCSEQKIESTKKFLSKLWNVSRFLSSFPIIESGRLTDSDKWILSELDKLISVCNEGYSKYNFFVPATALREFTWNIFAAQYIEMAKARAYGIGFDDDERDGAIFTLHKVLSTILKLLAPITPFITEHLWQILYSKDSIHKEKLPELEKVEDMTDMTQSIVEFNSKVWNEKKQNNLSLKDSIKIEIPENLNQ

SEQ ID NO: 158275 - protein, 197 aa, Unknown
  Bacterial polypetide isolated from the Sargasso Sea
DPNGFVTFHKKKMSKSLNNIIILNDLIKKFRGESIRFSLLSAHYRQPLDWNDSTMIKSDNSLNNLYSILADNIDIETKETKETNVEKALLNDLNTPEAIACLFKTAKDLQKAKNTNLKSEIKGTLVREAFFLGILQQDPSQWFKDTNIPTLNENEIKILIEKRALARKNKDFDEADRIREQLLNNGILIKDKKEETI

SEQ ID NO: 158276 - protein, 228 aa, Unknown
  Bacterial polypetide isolated from the Sargasso Sea
VRDEKGQKMSKSKGNVMDPLDLLAKYSADSLRFTLCAMAAQGRDIKLSEERIIGYRNFSTKVINACKFLNLNDCYNFNDLDLIDVKLPINIWILNKLIDVYDNVDKAITNYKFNEYSDSIYKFVWGDYCDWYLEFLKPVFKLKAPEDINEVKYVSSFIMKSILKLLHPIKPYLTEELNLKFFNDSEMLISSSWPKKFKLNYVDLSIELLIDIITALRAYRVKNKVSFK

SEQ ID NO: 158277 - protein, 257 aa, Unknown
  Bacterial polypetide isolated from the Sargasso Sea
ISATLTSTGTPSYFIHATEASHGDLGSIKKDDCVIAISNSGETSELNNFIEFTKRFNIKLISITSNPKSILHKNATVGILYKKPIEACPLNLAPTSSTSMSMIIGDCIAISLLELRGFKSTQFKNLHPGGNLGKDLKNLNDIMHTAKELPLAKLDEKMSKSLITMTRKSFGCIGVINNKKQIVGIITDGDLRRNLNSKFFNKSASEIMTKNPTLANKNMLVGEAINLMNRKKITSLFVCHKKIPLGIVHIHDLLRLT

SEQ ID NO: 158278 - protein, 290 aa, Unknown
  Bacterial polypetide isolated from the Sargasso Sea
SRFFMKALRDIYDLEVSEPFKELFTQGMITHKTYKTLKNEWVMPKDVVMKDGKLIKESTKEIIEEGPSEKMSKSKKNVIEPDEILDGYGIDATRIFMISDSPPDRELEWTDEGIQSSKNLTRRIERYFSQESTSHDLEVEKKIEIFVYNIEKNILGFSLNKCVADIYTLFNYLERRNVYLHKNDLSYKILTCLFPILPNLSALISKSLFKKEEFNLWPNLNDDLLKQDEIVLPIQVQGKLVTTIDTKKGYLEEDILKSIYQLDKIKNKIENKKIFKVINVQDKIINIIIG

SEQ ID NO: 158279 - protein, 338 aa, Unknown
  Bacterial polypetide isolated from the Sargasso Sea
VMVCSYGDQNDVACFRELQLEEVMQIGLDGRMTEAAGDYQGLKPKQARTKIIEDLENANLVDKIEEISHRTPLSERSKIPIEIVPMEEYYLKQKESIEKMKKLGSEIEFYPNMHKQILMNWLESISIDWPISRRRFYGTEIPIWYCNECSEPFVPEPGKYYRPWKDSCPAQKCEKCGNTKFTGEDRTFDTWMDSSVSPLFVTKFNRDDEFFKKTYPTGIRPQAKDIVRTWLYYTLLRCEKLTEQKPWSEAWIMGYGLDEKGMKMSKSKGNAIDPLPVIQKSGADTFRFWSASEINQGYDFRCSEQKIESTKKFLSKLWNVSRFLSSFPIMNQEMTDQT

SEQ ID NO: 158280 - protein, 259 aa, Unknown
  Bacterial polypetide isolated from the Sargasso Sea
LSSSYTVARMLERDDFTKRFKAEIPISIHEFLYPLAQAQDSVELKADVELGGTDQKFNLLVGRDLQKDNGQDPQCIITTPLLEGTDGIEKMSKSYGNDIGLQDSPEDMYGKTLSISDDMILKWFTLAADRDPSEVEAASKRLNDPSVNPMEVKRELARNVVQLFFDEETAQKAEAHFNTVVVGKGIPDEIPVYELDSEDLIVNVIFSSGLLKSKGEARRMIKQGAVRLDDKKIDDMQASISPGDEQILKVGKRRFLKVT

SEQ ID NO: 158281 - protein, 187 aa, Unknown
  Bacterial polypetide isolated from the Sargasso Sea
MNTLKPLVQKLELILNEFNIEEDIDIKITNIDDFDYQINNLVKYQKHKKVKEIEKKVSSVLSESKIIESWEISDRYFINIKISLSDLINSINPIDNYLKSNKKEKIIIDYGGPNIGKPLHVGHLRSLNIGRSLYKINKFVGNDVVSDIHLGDWGMQIAQILTFCHNQKIDIDTLDARKLLKIYPEAA

SEQ ID NO: 158282 - protein, 300 aa, Unknown
  Bacterial polypetide isolated from the Sargasso Sea
TWHNSGAAPIASLDEATYKEKIPAPFFTEGIDQTRGWAYTLLIENVIYNNASVSPYKSFLFQGHVLDENGNKMSKSKGNVLEAKELLEKYPVDLVRFYFMWKASPIEPLNFSTKELMSRPYQVISTLYHLHTFYKQNSEYDKFNVEESTIEWAKKNDLLTPPDVWLLSKLQRMIERTTETNDSCRFHESAKSIEDFLINSLSQIYIPIIKSELWDEDDSKQNRRFTIYAILAKTLKTINILIHPFAPFTSQYLYKSIFSEKENILLESWPKVDSSLIDEKKETSFDLLKETVSVTSAARR

SEQ ID NO: 158283 - protein, 162 aa, Unknown
  Bacterial polypetide isolated from the Sargasso Sea
STSMSMIIGDCIAISLLELRGFKSMQFKSLHPAGNLGKDLKNLNEVMHLGKKLPLAKLDEKMSKSLITMTRKSFGCIGVVNNKKQIVGIITDGDLRRNLNSKFFNKSASEIMTKNPTLANKTMLVGEAINLMNTKKITSLFICDKKIPLGIVHIHDLLRLTS

SEQ ID NO: 158284 - protein, 270 aa, Unknown
  Bacterial polypetide isolated from the Sargasso Sea
MIDSKKGTIRANHYHPQQEQKCLFTKGQIIEVFQDIINPNSPKMTQVVNEGQLSIIKPNVAHTMVFTKDTTFLNLVRGERDHDNYGITHTIKHVFVDEKEKNLLLKYYKFDCRSCGNTNLKRVVSLGYQPLANNLLKKINEKCDLYPLEVNYCEKCHNCQLSVAVDPKKMFSNYLYTSSTSKLFRDHFVNAAQKYTKDLKLNKKKSYIIDIGSNDGVALKPFKDLGFKHLLGVEPAKNLAKLANKNKIKTFNGFLDKNTLKKIRKNADLI

SEQ ID NO: 158285 - protein, 231 aa, Unknown
  Bacterial polypetide isolated from the Sargasso Sea
MAADLPLPKRIYGHGWILSGDEKMSKSKDNILDPLEIIEKYGLDALRYYLLKEVSFGNDGNISQEKLENCINSDLANNYGNLCQRVLAFCEKNCGLKVPSHEFNKDDLDVLMPFENLNKLRNLIDNQKINEYMNFLIESLFASNKYFNDQEPWKKKDNKIRLNTIVYTALELIRKISILLNPVIPETSLKVLKIFSINEKSLNFDSLANHENLKEGISLIKMNILFKKIEK

SEQ ID NO: 158286 - protein, 264 aa, Unknown
  Bacterial polypetide isolated from the Sargasso Sea
KNQIFKILDKDKTRIELNSSWMNKVTSAELIDIASKYTVARMLERDDFKKRFKSENPISIHEFIYPLVQGYDSVALECDVEMGGTDQKFNLLVGRHLQQLYGQEPQTIITLPLLEGLDGIKKMSKSANNYVALNDSGDDMFGKIMSVSDDLMWRYFELVSSKNLTEIKDLKNSVNDGANPRDIKFLLAEEIVERFHNQSIAKKAKESFMQRFQKGGIPEEIDLTEVSIKDIQNDEGEINLPRLLAHTNLVNSISEGHRAIKAGS

SEQ ID NO: 158287 - protein, 197 aa, Unknown
  Bacterial polypetide isolated from the Sargasso Sea
MSGAAYRVAQAAYAAYERGDYTGAVERAREAIRQRPDVVSLRVLLANSLAALRRYSEASRSLGDAIAQIGRDPALVSRRKQIDALNVSTRAVARAGRQQPADPDVLTGAALTAAQQAYKAYAAKDFAGTVKYANEAISLRPDLLRLRLLLIDAASAAGQDTEAWNADLDASKRFGDTDELRLRRSFIGNRLAPKSSA

SEQ ID NO: 158288 - protein, 270 aa, Unknown
  Bacterial polypetide isolated from the Sargasso Sea
MDELVLVNPISSELTHMRPSVIPTLLVAAQRNLNVGIDTLSFFEVGPIFKGDKPEDQISTISGLRLGSKVKKDWKNSSEDFDFYDVKLDVLKTLEAIGVKTNNLQTNDNTPSYFHPGRSAVLKIGQKLIANVGEIHPSISDFYDFEKPILAFEIFYENIPMPKKVKVSRPMLKMSPLQSVTREFAFVIDETTPAEKLADIAKSTNKDLIREVLIIDVYKGENIPKGKKSIAIKIIIQPNLETLTDDDLEKISSDLINVINTKLSGSLRSQ

SEQ ID NO: 158289 - protein, 157 aa, Unknown
  Bacterial polypetide isolated from the Sargasso Sea
EGAATRVMSLRDGSKKMSKSDPSDASRINLTDDADTIAKKIRKAKTDPEALPSEAKGLEERPEARNLVNIYAALSGQTVDQVLADVGGKQFSEFKPMLADLAVDKMSPITTEMARLMENQDEIDKILARGSERAREITAPILRKTYDIVGMVAPVEI

SEQ ID NO: 158290 - protein, 185 aa, Unknown
  Bacterial polypetide isolated from the Sargasso Sea
TQFGLLLPILVGLDGVQKMSKSLGNVVGLEEDPLSMYSKLEKVGDGAINDYVTLLTDLNLATLPENPREKQKAMALAVTASRHGMEAAQKAQGDAATLVGGAGDAAAEVPEASLAEVNFPAKAFYLLSAVGICASSSEARRQIKGGAVRLEGEKIGDPNQEFASAAELEGKVLQLGKKTFRRLTA

SEQ ID NO: 158291 - protein, 324 aa, Unknown
  Bacterial polypetide isolated from the Sargasso Sea
LFSRKEIIESAIELPDGENFELHRPWIDKIKVKCKECSGVMQREEFVLDTWHNSGAAPIASLDEATYKEKIPAPFFTEGIDQTRGWAYTLLIENVIYNNASISPYKSFLFQGHVLDENGNKMSKSKGNVLEAKELLEKYPVDLVRFYFMWKASPIEPLNFSTKELMSRPYQVISTLYHLHTFYKQNSEYDKFNVEESTIEWAKKNDLLTPPDVWLLSKLQRMIERTTETNDSCRFHESAKSIEDFLINSLSQIYIPIIKSELWDEDDSKKDRRFTIYAILAKTLKTINILIHPFAPFTSQYLYKSMFSEKEIFYFDHGPRWIHH

SEQ ID NO: 158292 - protein, 217 aa, Unknown
  Bacterial polypetide isolated from the Sargasso Sea
SDVIKIASSTTVARMLEMDDFTKRYNTEIPISLHEFLYPLAQAQDSVELISDIELGGTDQKFNLLMGRNLQRDIGQEPQCILTMPILEGTDGIEKMSKSYGNDIGISDSANDMYGKTLSIPDEVILSWYTLAVDVDQSQLKEVEEKLKDPSTNPMDIKRQLARQIVISYYSKEKAIEAENNFNNITVLKGIPEDIQEYKLEEEMLLVNIIHDSGLLS

SEQ ID NO: 158293 - protein, 221 aa, Unknown
  Bacterial polypetide isolated from the Sargasso Sea
MISNFNNHFAKLIKGPKINNRFILGLSGGIDSMALLHLLKNFIDNNKNLKIDLIPIIVDHNLRFESEKEAKEVKKMSKSLGFNAQIKKITNPKPNGNIQNWARKHRRNLLFHACVEASANLILAHHFDDQAETLFMRLIKKSGLDGLSGMTAVSTWNGIFILRPLLNNNKDEIKNYVQSRHIKYFEDISNFNFKFERVETRFLLENIKNQLWPNITYDLNY

SEQ ID NO: 158294 - protein, 44 aa, Unknown
  Bacterial polypetide isolated from the Sargasso Sea
MKTPSNFIKTLIENDIREGKNDGLVYTRFPPEPSGYLHIGHAKA

SEQ ID NO: 158295 - protein, 228 aa, Unknown
  Bacterial polypetide isolated from the Sargasso Sea
LKEECDKYKIEYFTSPYCLDFIDELEKYVSAWKVGSGDITFHDSIEKMSKSKKPIIIATGASTEREVKDAVEIVKKNNDDLILMQCNTNYTGSNDNFKYINLNVLKTYEKLFPDVILGLSDHTPGHATVLGSVAIGARVIEKHFTDNNDLEGPDHKFSLSPKDWKIMVEKTRELESSLGGFSKIVEENERETVVIQRRGIRSKKLIKKGEIVKEEHLNYLRPCDDDCL

SEQ ID NO: 158296 - protein, 44 aa, Unknown
  Bacterial polypetide isolated from the Sargasso Sea
IHPNWKKTIHKKTGKPATRETDTLDTFVDSSWYFLRFCSPKNKK

SEQ ID NO: 158297 - protein, 298 aa, Unknown
  Bacterial polypetide isolated from the Sargasso Sea
MYSIHSSGLISGQIIDGLNQLPLSQANIILIDSEIGTTSSDNGEFNLHISEEGYYSILISYIGYESKILHDIWVRPNAHDFQKVILYPSVIKLENVVVTKNYFQKKSLNNYSSIGFKNDQIRRAPGAGSEISRILNSLPSVASVGENRQDIMVRGGGPGENGFLIDNIFIPNISHFNQPDGRTNGPVGLINTELVENLEFFSNGFSAEYGNKLSSFGDITYREGNNKSFGGNIGAGLGGAGGVIEGPLNNNTTIISSFRMSYLDMISDAINAGGLPSYNDYQGKINYKPNQYHNFTFF

SEQ ID NO: 158298 - protein, 324 aa, Unknown
  Bacterial polypetide isolated from the Sargasso Sea
ARDWSISRNRFWGTPIPVWKSTDPKYPRVDVYGSWDEIEKDFGVRPKNLHRPFIDDLIRPNPDDPTGKSKMVRVEEVFDCWFESGSMPFAQVHYPFENKEWFESHFPADFIVEYIAQTRGWFYTLMVLSTALFERPPFLNAIGHGVVVDENGSKLSKRLNNYPAPDEVWSRYGADALRWFLVSSPILRGQNLVMERDGSGIDSSLRQVIVPLWNSVYFFTLYCNLENYNPSIINDADLPIDKYILSKTHRASEDVKKSLSNYDITGACNLISEFIETLNNWYIRRSRNRFWDKTTNKNARDAYDTLYTVLNILLRFSAPIDTFN

SEQ ID NO: 158299 - protein, 157 aa, Unknown
  Bacterial polypetide isolated from the Sargasso Sea
MYQFRSLIANLEKELKKLDIDESIELRISNIPNFDFQINNLVKFQNLDDKGVIKKAFSKIIEADPYIKNFEFTESYFVNLECKVEKFIDSFENIKDNIKDLNPKTIIFDYGGPNIGKPLHVGHLRSLNIGRSLYEINKLAGHSVFNDIHLGDWGMPI

SEQ ID NO: 158300 - protein, 322 aa, Unknown
  Bacterial polypetide isolated from the Sargasso Sea
DGQGQKMSKSKGNVLDPLDIVDGIDLESLVAKRTSGMMQPKLAEKIAKQTRAEFPDGIAAYGTDALRFTNLALASTGRDIKFDMGRVEGYRNFCNKLWNAANFVIENTDDKDTGINGEPVELSPVDRWIISALQRTEADVTRHLDAFRFDLAAQTLYEFIWDEYCAWYLELVKPVLWDENAPIERQRGTRRTLVRVLEVILRLAHPFMPFITEEIWQRIKAQAGVQGETLMLQPWPVANESRIDAAAEGDIEWVKQLMLGVRQIRGEMKISMAKRIDIIVANASAEDLRRLADFEPLLSKLAKLESVRVLAAGEEAPSPLPP

SEQ ID NO: 158301 - protein, 209 aa, Unknown
  Bacterial polypetide isolated from the Sargasso Sea
SGKIPFKDVYVTGLIRDENGQKMSKSKGNIIDPIDLIYGISLEDLLEKRTSNLMQEGLAEKIARKTKKQFPNGIESYGTDALRMTFYSIATNAKDISFEIGRLKGFRNFCTKMWNAARFINGYENKGNNFEAESESDKWILKEFEQLKADVEDNINHYRLDLAINHVYEFFWNKFCDVYIEECKKTEKTDNLHPLLKEILIFIHPFAPF

SEQ ID NO: 158302 - protein, 249 aa, Unknown
  Bacterial polypetide isolated from the Sargasso Sea
MKNNKKIINSANRTLSRELSSIKYLKSTFNNNFCKAVSLIYNTKGKVIITGVGKSAHIGNKISATLTSTGTPSYFVHATEASHGDLGSIKKDDCVIAISNSGETSELNNIIQFTKRFNIKLISITSNSKSILHKNATVGILYKKPIEACPLNLAPTSSTSMSMIIGDCIAISLLELRGFKSTQFKSLHPGGNLGKDLKNLNDVMHLGKKLPLAKLDEKMSKSLITMTRKSFGCIGVINNKKQIVGIITD

SEQ ID NO: 158303 - protein, 102 aa, Unknown
  Bacterial polypetide isolated from the Sargasso Sea
MLKSQILEKLAENHKNLTIEDIETLFDIFIKKMSKSLNNGQNIEIRGFGTFRRKINKAKEVRNPKTNEKIYKNQTYKLHFKIGKILHKKINGYDNPNIKDEV

SEQ ID NO: 158304 - protein, 206 aa, Unknown
  Bacterial polypetide isolated from the Sargasso Sea
IQKLVQDSVLAVNDSLNISYEDKPLNLKEDFKIVALKDLVKEKLGLPSLDTKDEIFSAAKDNKLKLHKSWGWGKVLLELFEAFVEKDLWEPTFVKDYPYEVSPLSRRKDDDDDYTDRMELFIAGREFSNFFCELNDPHDQEQRFTDQVEQKKAGDSEAMFFDDDYINALQHGMPPAVGVGIGIDRLIMLATDRRSIRDVVFFPTLK

SEQ ID NO: 158305 - protein, 304 aa, Unknown
  Bacterial polypetide isolated from the Sargasso Sea
KRAYKLNPTSNYKKRVQQLTSLAKKQSGSKNSSKRTSRKPSKKQIAQASAYSKRGNSKAKKKDYAGALKDFQKALQLNSSASNKKKVQQLQSILRKRGTNVASNPTKAKVPKLSDIPRISPVKYANDIYNIAEGFELSSRNLAKATSFIDNKTSKKIERATIRLTPSTSDLEKAAKSEPNDFRKQIDLARHYEANGEFEYAKEIYLKMASQHSLNANAHFHLGSFYSRFGQMTKARNSFDEALDVQPNHRATIEMMATLFGDTENLSLSDDILSKSSKKDPNGPARRMQSIRKSLDERNLNMQL

SEQ ID NO: 158306 - protein, 296 aa, Unknown
  Bacterial polypetide isolated from the Sargasso Sea
SKKGTIRANHYHPQQEQKCLFTKGQIIEIFQDIINPNSPKITQVVNEGQLSIIKPNVAHTMVFTKDTTFLNLVRGEREHKNYGVTHTIKHVFVDEKEKNMLLSCYKFECRSCGGNKLKRVISLGYQPLANNLLKKRDEECELYPLEMNYCENCHNCQLSVAVDPKKMFSNYLYTTSTSIPMVKHFDDAAKKYIKELKLNPKKSYVIDVGSNDGVGLRPFKDLKFKKILGIEPAKNLAKLANKNKIKTFNGFLTENNLKKIKKNADLILASNVFAHSDGLKEMAKCMLALVSKKWFK

SEQ ID NO: 158307 - protein, 278 aa, Unknown
  Bacterial polypetide isolated from the Sargasso Sea
VVYLKKDERLTEYIKIKDKYFNQQNETGLTKEEKINYKKFIREYEGYKNLYNTRNNQNITEIREVIGKYGDNAKIHLGGIPMIANDMMSYIKSDIVVFGIGVFVFIVLTLWFIFRNLKWVLMPLLGCATSVVLMVGLLGIIGWKVTVISSNFIALMLILNMAMNIHVTVRFLQLKKEFPHLSKNEAIFETSKKMMLPILYTVLTTICAFLSLVFSGIKPIIDFGWMMTLGLIISFFVTFLLLPSLINLLSSDNEIGLRDTEKSFITSALGSFTKKSKI

SEQ ID NO: 158308 - protein, 240 aa, Unknown
  Bacterial polypetide isolated from the Sargasso Sea
LTKIVFNSSWMDKMNAADLIRLASHNTVARMLERDDFDKRYKSNQSISIHEFLYPLIQGYDSIALDADVELGGTDQKFNLLVGRQLQEVYGKSPQVVITMPILEGLDGSQKMSKSLGNYIGIDEPAKEMFGKIMSVSDTLMWRYFELLSFKNFDEIVRYKKQTETGVNPRDIKFELAEEIVTRFHDSKSAKDAKNDFIKRFSDNSIPDVIDEIEISVSRDGIVFANLLKEANLVSSTSDA

SEQ ID NO: 158309 - protein, 222 aa, Unknown
  Bacterial polypetide isolated from the Sargasso Sea
LRCLRLLGLIRDENGQKMSKSKGNIIDPIDLIYGISLEDLLEKRTSNLMQEGLAEKIARKTKKQFPNGIESYGTDALRMTFYSIATNAKDISFEIGRLKGFRNFCTKMWNAARFINGYENKGNNFEAESESDKWILKGFEQLKADVEDNVNHYRLDLAINHVYEFFWNKFCDVYIEECKKTGKTDNLHPLLKEILIFIHPFAPFITEEIHSIIFKASLIDRK

SEQ ID NO: 158310 - protein, 200 aa, Unknown
  Bacterial polypetide isolated from the Sargasso Sea
MGRNLQRDIGQEPQCILTMPILEGTDGVEKMSKSYGNDIGLSDSANDMYGKTLSIPDKIILSWYTLAVDVDQSQLNEIEKKLNNSSTNPMDIKRNLARKIVALYYDKEKAMEAENNFNNITVSKGIPEDIQEYKLEEETLLVNIIHDSGLLPSKSEARRMIKQSAVRIDGDVISDINLKLTSGETRILKVGKRRFLKITK

SEQ ID NO: 158311 - protein, 227 aa, Unknown
  Bacterial polypetide isolated from the Sargasso Sea
YDSAILKVDVELGGTDQKFNLLMGREVQKHYGLEQQSIMTLPLLEGLDGVKKMSKSLENYIAIEDKADDMFGKIMSISDELMWRYFDLLSFKDSAEINNLKKDQKNGENPRNIKFILAQEIVERFHGEKKSKSALNEFLNRFQKGNIPTNIEDISLTLRKDELTLSRVLKDSKLTSSTSEALRMIKQGAVKIDGKKVLDSDHKIALNEEQIYQVGKKRFRRIKIAKK

SEQ ID NO: 158312 - protein, 231 aa, Unknown
  Bacterial polypetide isolated from the Sargasso Sea
MNTDNCLISGETIDYGPCAFMDEYNPDKVFSSIDNFGRYSFSNQSKVIIWNLAQLASALLMLHDDDQNTLEIFQEIINETSTYLSKEYYTQFASKLGIVTPDEKDKRLVDDLLTILAGENADFTNFFSKITNDEKPFKFMMKTAYLTWEKKWQNRVKNIPDAKPTMRQANPVIIPRNHIVEKAIQSALSGDFEPFYSLNEALQKPYDYKGQCNFLNAPNEDEKVTATFCGT

SEQ ID NO: 158313 - protein, 123 aa, Unknown
  Bacterial polypetide isolated from the Sargasso Sea
VSDFKVKNYKSTKIKKNEEFNLELEKNIDILNHISNHNSLRPKITIGFAAETNNVSINAKKKLNEKNCDWVIANDVSDKTIGFGSDFNKISIFYKDKPEENFEKMSKSLVAEEIVKRVIQQIN

SEQ ID NO: 158314 - protein, 274 aa, Unknown
  Bacterial polypetide isolated from the Sargasso Sea
PEGGWDKLFHDLRDAVVKNDGEVELARPVGQVLIDDGSVRGVSLPRVGASLQNEIFHDEIVSAPVVISTLPVWNVLDLISERHLPDWYVNQIRTLAQDRWRVSYAHLSIATAEPIPVLDRREIATWLHAPLSRTSGFMFEQTALDPSVAPEGRHLYVMGAMLHKYNRGRDKEFVKQKFDEFEEEVEIMWPGLKDNVFKRRTYVFEPSFGVIQKPGLVGKFRPHWKAPNVDGLYFASETFQSRGIGIDRAARAGLSCVEDILGKRLWPLDKGGRY

SEQ ID NO: 158315 - protein, 98 aa, Unknown
  Bacterial polypetide isolated from the Sargasso Sea
PGDLMNREQHVPDPDTMSGALIRYITQSDPEHFQPMNANFGLLDPPEKKMSKSLRKAWFSERALKTLKDSLPVEPMQSPFNTSQAEQQISEKAGQDAA

SEQ ID NO: 158316 - protein, 89 aa, Unknown
  Bacterial polypetide isolated from the Sargasso Sea
NYLNFNEPFQNLFSQGMINFGGSKMSKSKGNTVDPESYFATHGADALRLYILFMAPPSDGVEWNDGGIEGTKRFLNKLWENIERLSKLE

SEQ ID NO: 158317 - protein, 147 aa, Unknown
  Bacterial polypetide isolated from the Sargasso Sea
SRIMSLKDGKKKMSKSDPSDQSRINLSDDKDQIVNKIKKAKTDSGELPENGDDLIKRPEINNLIGIFSSIQDQDLNSTLNEFKGKKFSEFKEKLAEVLVEKIYPISREINKLLKDEKYIDQILLEGSIKAEKIAKMKVKDIKNQIGF

SEQ ID NO: 158318 - protein, 282 aa, Unknown
  Bacterial polypetide isolated from the Sargasso Sea
MDQLKVVYNSDWLEKMRFSDVIKVASSTTVARMLERDDFTKRYDSEIPISLHEFLYPLAQAQDSVQLISDIELGGTDQKFNLLMGRNLQRDIGQEPQCILTMPILEGTDGIEKMSKSYGNDIGLSDSANDMYGKTLSIPDEIILSWYTLAVDVGQSKLKEIEEKLNEPSTNPMNIKRQLARQIVASYFDKEKAMEAENNFNNITVSKGIPEDIQEYKLKEEMLLVNIIYDSGLLPSKSEARRMIKQSAVRIDGDVIHEINLILMPGDTRILKVGKRRFLKII

SEQ ID NO: 158319 - protein, 88 aa, Unknown
  Bacterial polypetide isolated from the Sargasso Sea
MLVISIPLNFDFSHFPCLVEKSAKGIILTRDIIIAIVCSAVVTALPNGVFITITPFSVAASLSILSVPIPALPIIFSFSAFSKSSFVT

SEQ ID NO: 158320 - protein, 233 aa, Unknown
  Bacterial polypetide isolated from the Sargasso Sea
ESAIELPDGENFELHRPWIDKIKIKCKECSGVMQREEFVLDTWHNSGAAPIASLDEATYKEKIPAPFFTEGIDQTRGWAYTLLIENVIYNNASVSPYKSFLFQGHVLDENGNKMSKSKGNVLEAKELLEKYPVDLVRFYFMWKASPIEPLNFSTKELMSRPYQVISTLYHLHTFYKQNSEYDRFNIEESTIEWAKKNDLLTPPDVWLLSKLQRMIERTTETNDSCRFHESAKS

SEQ ID NO: 158321 - protein, 286 aa, Unknown
  Bacterial polypetide isolated from the Sargasso Sea
IPFKNIYIHPLVKDEKGEKMSKSRGNVIDPIKMAEIYGSDSLRFTLANLSTQGRDIKLSNKLVENSRNFITKIWNVARFYEFNKFVLDEKYNLKKNKIPLNNWIIVRLSETKRKILKNLSEFKFNLLLNELYHFVWNDFCDLYLEFCKIYLKDEKNKKEISNNFSQVFKEILNLLNPIIPFVTEEISSKLKFSNSSLFSETFESNLFAKNQISNKEITDIYKFIKLIKDIRAEFSGKNLNNSRLLIFSKNKVPWIDDNKNLLYSLFNFDKINYKTSYQESKFIISS

SEQ ID NO: 158322 - protein, 263 aa, Unknown
  Bacterial polypetide isolated from the Sargasso Sea
RFNSEWCEKLGADGLIKLASKYNVARMLERDDFNKRFSSNKTIAIHEFLYPLVQGYDSVALEADVECGGTDQKFNLLVGRELQRDYEQEPQVVITVPILEGLDGVKKMSKSLDNYIAIDEEPDEMFGKIMSISDELMWRWFELLSFMPEEDITKLKDEMKKGKNPRDIKFILAEELVDRFHKEGEGKKSKEIFLNRFQKGNIPDEIESVKIDIKNDSILLVNLLKDTNMISSISEGNRLITQGGIKINSEKVQDPKLEVSKGS

SEQ ID NO: 158323 - protein, 229 aa, Unknown
  Bacterial polypetide isolated from the Sargasso Sea
RVKAGFDPTSPDLHLGHTVLLNKMKLFQELGHEVIFLIGDFTGLVGDPSGVNETRPVLTEDQIKNNAETYKSQVFKILDPKKTEVRFNSEWMNKVHPSEFIKLLSSYTVARMLERDDFAKRYKSQQPISIHEFLYPLLQGYDSVELKADIELGGTDQKFNLLLGREVQKHYGIDQQAIFTVPLLEGLDGVKKMSKSLNNYVALEDEPDQMFGKIMSISDKLMWRYFSLL

SEQ ID NO: 158324 - protein, 253 aa, Unknown
  Bacterial polypetide isolated from the Sargasso Sea
RGWFYTLHAIATMCFDSVAYKNVVSNGLVLDKTGQKMSKSKGNAIDPFDTLSKFGPDATRWYMMSNSQPWDNLKFDLDGIKEVQRKFFGTIYNTYQFFALYANLDGFDYSQEEIALSKRPEIDRWILSKLNSLIKSVDQDYEDYEPTKASRAIQDFVSEQLSNWYVRLCRRRFWKGEYTEDKISAYQTLYRCLEVVAQLSAPIAPFFMDKLFKDLDLVSGRHNVESVHLSDFPVANSSEIDIDLEERHGNCSK

SEQ ID NO: 158325 - protein, 232 aa, Unknown
  Bacterial polypetide isolated from the Sargasso Sea
PLLQAKDSVELKADVELGGTDQKFNLLLGRKLQEDHKMKPQICIMMPILEGLDGVKKMSKSLDNYISISDEANDMFGKVMSISDDLMWRYYELLSFQDLDKIHSSHKACNNDEMNPRDLKIDLAYELVERFHGKKKAKEAKDNFIGRFQNKDITKDIPDVEIDSEGTELKIIDLITVKLKAIASTSDVRRLVNQNAIKIDTKPIVDINYDCNKHKKFLLQIGKKKAYKISLK

SEQ ID NO: 158326 - protein, 122 aa, Unknown
  Bacterial polypetide isolated from the Sargasso Sea
SDFKVKNYKSAKIKKNEELNLELEKNIDILNHISNHNSLRPKITIGFAAETNNVSTNAKEKLNEKNCDWIIANDVSDQTIGFESDFNKISIFYKDKPEENFEKMSKSLVVEEIVKRVIQQIN

SEQ ID NO: 158327 - protein, 152 aa, Unknown
  Bacterial polypetide isolated from the Sargasso Sea
IFSAAKDNKLKLHKSWGWGKVLLELFEAFVEKDLWEPTFVKDYPYEVSPLSRRKDDDDDYTDRMELFIAGREFSNFFCELNDPHDQEQRFTDQVEQKKAGDSEAMFFDDDYINALQHGMPPAVGVGIGIDRLIMLATDRRSIRDVVFFPTLK

SEQ ID NO: 158328 - protein, 216 aa, Unknown
  Bacterial polypetide isolated from the Sargasso Sea
MERSILNTFRAMDTSDGAGVKLKRALGYTPLMRLDPFLMLDAFSSDNPDDYIAGFPPHPHRGFETVTYLVEGHMRHRDHLGNEGDLKQGGVQWMTAGSGIIHEEMPQQENGLLRGFQLWINLPAAEKMKPATYRDIADTEMPRLDLASGGQIKAIAGEVTIAEQTLSAPMKGGQTNPLYLDVVLRPRENLTVPLARGHNAFVYLFEGRIEVSGETV

SEQ ID NO: 158329 - protein, 304 aa, Unknown
  Bacterial polypetide isolated from the Sargasso Sea
GSQIEFYPNMHKQILMNWLESISIDWPISRRRFYGTEIPIWYCKECSEPFVPEPGNYYRPWKDSCPAEKCEKCGNTEFIGEDRTFDTWMDSSVSPLFVTKFNKDDEFFKKTYPTGIRPQAKDIVRTWLYYTLLRCEKLTEQKPWSEAWIMGYGLDEKGMKMSKSKGNAIDPLPVIQKSGADTFRFWSASEINQGYDFRCSEQKIEATKKFLSKLWNVSRFLSSFPIIESGKLTDSDKWILSELDKLISTCNEGYSKYNFFIPATALREFTWNIFAAQYIEMAKARAYGIGFDDDERDGAIFTLH

SEQ ID NO: 158330 - protein, 270 aa, Unknown
  Bacterial polypetide isolated from the Sargasso Sea
LRCEKLTEQKPWSEAWIMGYGLDEKGMKMSKSKGNAIDPLPVIQKSGADTFRFWSASEINQGYDFRCSEQKIESTKKFLSKLWNVSRFLSSFPIIESGKLTDSDKWILSELDKLISVCNEGYSKYNFFIPATALREFTWNIFAAQYIEMAKARAYGIGFDNDERDGAIFTLHKVLSTILKLLAPITPFITEHLWLTLYSKNSIHKEQLPKIENVEDMTNMTQAIVEFNSKVWNEKKQNNLSLKDSIRIEIPENLNQFKKDLIAMHNLETS

SEQ ID NO: 158331 - protein, 183 aa, Unknown
  Bacterial polypetide isolated from the Sargasso Sea
EGLDGVKKMSKSLDNYISISDEPNDMFGKVMSISDDLMWRYYDLLSFKNYVDIASVKQMCSQDKFNPRDAKIDLAHELVERFHGQDKADKAKSNFISRFQNKNITEDIPLIELESDGELRIIDLIINNLKVVKSTSEVRRLISQNAIKIDSRPITTIDYDCSVDSEFLLQIGKKKAYKILLRS

SEQ ID NO: 158332 - protein, 204 aa, Unknown
  Bacterial polypetide isolated from the Sargasso Sea
LQEKLNSERQQNLEKTSKIAALENTAKQISSEKLVLQEDLKFEKQKNLEKASKLASLEKIIESQNKQFLRKERETMVYYHKCQKLAKMTINLTSENSKQKESFEKQIQALKIKHENEIRNLTSEKSEQKDILMKQIEDLKNVHKYDIENLKKEILEEKEKLSKIFSISQPNVKINPDDFQFQNESSVLLSNSEGTITIKEDISE

SEQ ID NO: 158333 - protein, 238 aa, Unknown
  Bacterial polypetide isolated from the Sargasso Sea
SIAIHEFLYPLVQGYDSVALEVDVECGGTDQKFNLLVGRELQRDYGQEPQVVITVPILEGLDGVKKMSKSLDNYIAIDEDSDDMFGKIMSISDELMWRWFELLSFIPEEEIAKLKTEMESGRNPRDIKFVLAEELVDRFHNEGDGKKCKDTFLKRFQKGQMPDDIESIQVDIEGDSILLVNLLKDTKMIASVSEGNRLIEQGGIKIDSEKVEDQKLEVNKGSENIYQVGKRKFLKIKV

SEQ ID NO: 158334 - protein, 288 aa, Unknown
  Bacterial polypetide isolated from the Sargasso Sea
KTYLDQAKSILKMDELKVVHNSEWLGTMSFSDVIKLSSSTTVARMLERDDFNKRYSSEVPISLHEFLYPLAQAQDSVELVSDIELGGTDQKFNLLMGRNLQKDVGQKPQCILTMPILEGTDGVEKMSKSYGNDIGISDSANEMYGKTLSIPDNIMPSWFTLAVDAEDSYVDEISKKLDSNSINPMELKRELARKIVAIYYDENKALEAENHFNQVTVSKGIPDEIEEFKLTEDELLVNIIADSGLLKSRSEARRMIKQSAVKIDGKTVSDIQYKVSLSTSFILKVGKR

SEQ ID NO: 158335 - protein, 166 aa, Unknown
  Bacterial polypetide isolated from the Sargasso Sea
FKTDFFPIPEPLILGEATRVMSLRDGSKKMSKSDPSDYSRIMLTDTAENIIQKIKKAKTDPEPLPQDKTGLEKRPEAENLISIFASLQDTSIESVIKDYVGKEFSTFKKDLADLSVSKLEPITSEMNKLMNDVSYIDSILKQGQDNAIAVAEPVLQKTKEIIGFLT

SEQ ID NO: 158336 - protein, 223 aa, Unknown
  Bacterial polypetide isolated from the Sargasso Sea
IPFKDVYVTGLIRDENGQKMSKSKGNIIDPIDLIYGISLEDLLEKRTSNLMQEGLAEKIARKTKKQFPNGIESYGTDALRMTFYSIATNAKDISFEIGRLKGFRNFCTKMWNAARFINGYENKGNNFEAESKSDKWILKEFEQLKTDVEDNVNHYRLDLAINHVYEFFWNKFCDVYIEECKKTEKTDNLHPLLKEILVFIHPFAPFITEEIHSIIFKAPLIKR

SEQ ID NO: 158337 - protein, 170 aa, Unknown
  Bacterial polypetide isolated from the Sargasso Sea
RFNNDFNSPDFLKVPEPLIQKHFSRIMSLKDGTKKMSKSDPSDLSIINLTDEKDEIINKIKKAKTDTMSMPGSGENLSKRPEVENLLGIYASLSSQDLKDTIKQFSGKNFSEFKENLSELVVEKINPISNEIKKLLDDETYLSNILFEGFQKADKIASKKIKLMKEIIGF

SEQ ID NO: 158338 - protein, 315 aa, Unknown
  Bacterial polypetide isolated from the Sargasso Sea
NESNFVPPRNKQFLLDWMENITIDWPVSRRRWYHTEIPVWYSEDRKKIITPPHGTYVQPWKDSPPEDSIVLDRETRKELGNYLDMKSELGNLEGEEKVFDTWMDSSNSNLYVSGYLSDPELFERAFPTGVRPQGKEIVRTWLYYTLLKSALLLDKPGFANIWIDGLGMDPWGRKMSKSLGNGIDAESVLECGFGGRTGSWKIKGPEGKQVTLQAKKIGSECFRFWKAADAQVGDDFQINPEQIELRYFGVLTKIFNVGRFASQFDFDGDLDTVPENLENEDKWILAEFTELLEKAKAGYTGMDIYTAAQGIKTFS

SEQ ID NO: 158339 - protein, 169 aa, Unknown
  Bacterial polypetide isolated from the Sargasso Sea
GDFTGMIGDPTGKNVTRKPLTREDVLANAQTYKEQVFKILDPAKTRVAFNSEWMEKLGAAGMIKLAARQTVARMLERDDFKKRYANNQSIAIHEFLYPLVQGWDSVALEADIEMGGTDQRFNLLMGRELQKDEGQRPQTIIMVPLLEGLDGVQKMSKSLGNYIGITDTP

SEQ ID NO: 158340 - protein, 270 aa, Unknown
  Bacterial polypetide isolated from the Sargasso Sea
NATSVAVDSTIVLNFNESVDAESGNITIKKTSDNSTVETIDVTGGQVTGSGTSQITVTPSSDFDASTEYYVLIDATAFDDSESGSYAGISSTTALSFTTANAVPTLSSSVPADNATSVAVDSTIVLNFSESVDAESGNITIKKTSGNSTVETIDVTGGQVTGSGTSQITVTPSSDFDSETEYYVLIDATAFDDSESGSYAGISSTTALSFTTESTASDPFEDKTVVALVEAQTEAPKRIIRDVTTPIFNRLQWLRNYSEDRDLFSQGIKF

SEQ ID NO: 158341 - protein, 225 aa, Unknown
  Bacterial polypetide isolated from the Sargasso Sea
PLLSKDSVQLVSDIELGGTDQKFNLLMGRNLQRDIGQEPQCILTMPILEGTDGIEKMSKSYGNDIGLSDSANDMYGKTLSIPDEIILSWYTLAADVDQNQLKEVEDKLNKRSTNPMDIKRELAREIVASYYDKEKAMEAETNFNNITVSKGIPEDIQEFKLKEKMLLVNIIYDSGLLSSKSEVRRMIKQSAVKIDGEVINDINLELVPKDTRILKIGKRRFLKIT

SEQ ID NO: 158342 - protein, 278 aa, Unknown
  Bacterial polypetide isolated from the Sargasso Sea
NRDVVFQASRYGKGEADYLNCPLNERQYETFVAEVSRAEKVELHSFEDIRPFEGCLPIEVMVERGKDTLRYGPMKPVGLEHPETGERFHAVVQLRQENTAASLYNLVGFQTKMSWGFQKKVFRMIPGLENAEFVRLGSIHRNTFINSPMVLTPRLHLKKHPRIFMAGQIIGVEGYTESTAMGLCAAKQIASDLMNREQQIPDPDTMCGALIRYITQSDPEHFQPMNANFGLLDPPEKKMSKSLRKAWFSERALKTLKDSLPVEPMRSPFNTSQAEQQT

SEQ ID NO: 158343 - protein, 255 aa, Unknown
  Bacterial polypetide isolated from the Sargasso Sea
MKIIETLLNDLKDALEEFDIKEDIDFKISNIEGFDYQINNLVKHQKNKDIRENIKKFEKILSDNKIVDNFEITKNYFINIRINLVSSDKFFLDVTNNLKNKDPKNILIDYGGPNIGKPLHVGHLRSLNIGRSIKELNKLVGNQVTTDIHLGDWGMPIAQIIAFCEKENIDIKSITAEKLIEIYPKSSKLYSDSEDFKIIAQEKNKKLNDLDKKIIEEWKYIRNISIDSMKKVLDILNHDFDLWLGESSVNELIEP

SEQ ID NO: 158344 - protein, 276 aa, Unknown
  Bacterial polypetide isolated from the Sargasso Sea
SVDSRTEGRDTIHTVPKSILPEAYINEFLLDDSKEFAGLVEEISDDHMEVLDLGYERLMSRHAWGITPKNIGQGMALHALLDPHIDMCILTGPAGSGKTLLALAAALEMVVERNMYDKIIVTRSTPEIAESIGFLPGTEEEKMLPWLAAITDSLEVLHKHDENTKGSMNYIMEKANIQYKSVNFMRGRSIQNAIVILDESQNLTASQLKTIITRCGEGTKLIVGGNLAQIDSNYLSAVTSGLTYLVEKFKDFSGSATINLDGVVRSRLASFAEENL

SEQ ID NO: 158345 - protein, 297 aa, Unknown
  Bacterial polypetide isolated from the Sargasso Sea
LLLEGLVDYAEDKTIVRKGPKANSAFLDGSPTNAALGFANSLGIDVGELEIKNTEKGDFVFGKKIEKGQSTKISLSSIVPKVMKSLQGPRFMKWGAGNTKFSRPIRWITSIYNDDILDFVFDECDPNIQISNKSKSHRLINKVIEVQNPDNFFELMNQNRVLVERQERKEKIESLINKASKLLNLKPDLSKGLLDELTDLVEWPELIIGKFSDEFLNLPVEVLSTVMKSHQRYVPLLLNNSTFSKLDLSSEKNISTNFFVISNGLEESNKNIAKGNEKVLRARFSDAKFFVESDKKV

SEQ ID NO: 158346 - protein, 287 aa, Unknown
  Bacterial polypetide isolated from the Sargasso Sea
GVVRDNAGHLVSLKWSMKNVYNMDPGEVFWAASDIGWVVGHSYIIYAPLFHGCSSVLFEGKPVGTPNAGTFWRIINEYKVKSFFTAPTALRAVKKEDNEGKYINREKLKSLETLFLAGERADPDTVLWLENKLKIPIVDHWWQTETGWPIAANPTGIELLQIKKGSPTVSLPGYEIDILDDDGKKLLPNELGSICIKLPLPPSCLPTLWDANDRFIEAYLSKFPGYYETGDAGYIDDDEYIFVMSRTDDVINTAGHRLSTGAMEEVISNHSDVAECAVVGVKDELKG

SEQ ID NO: 158347 - protein, 138 aa, Unknown
  Bacterial polypetide isolated from the Sargasso Sea
MGRKWIGIDVEKKSSELVMERLSEEGRLFDKFINTQDFPVRTDVEHLNIEDKDVKEKLYSDQKGKCNGCIDELDIRHFEIDHIIPREKNGGDYYENLQLLCGNCNRVKGNRPMAYLMWRISERNKLINKKIGFSKRTD

SEQ ID NO: 158348 - protein, 144 aa, Unknown
  Bacterial polypetide isolated from the Sargasso Sea
MYLLKDLIRNLENDLSNKGVSESIVLRTSNVTNFDFQINNLVKLEKSSDIEDIVKSFSKILNDDPIIKNFEFTKNYFINLEINIQMYLSNHENLIENIKASHQKYIILDYGGPNIGKPLHVGHLRSLNIGRSLYNINKLAGNNV

SEQ ID NO: 158349 - protein, 285 aa, Unknown
  Bacterial polypetide isolated from the Sargasso Sea
MNAPENPYAMGPETNETDPRENALENVQVVRFVRDIPSKDRDRSYIRLPSFETVEKNPVYYAHASRILHVESNPGNARPLVQRHGEMELWVNPPPYPLETKELDGVYELPYARMPHPEYGDQKIPAYEMIRFSVSIQRGCFGGCTFCSITEHEGRIIQNRSEASIIREVEEIRDNVPGFTGVISDLGGPTANMYRLACKSKAIESACRKPSCVYPGICPNLKTDHKPLIDLYQKTRALPGIKKILIASGIRYDLAVESPEYVKELTSHHVGGYLKIAPEALSEGP

SEQ ID NO: 158350 - protein, 272 aa, Unknown
  Bacterial polypetide isolated from the Sargasso Sea
LVRDDKGQKMSKSKGNVLDPLDLSEKYGADSLRFTLTAMAAQGRDIKLSEERVAGYRNFSTKIWNACKFLEFNNCISELDKDIATNDLQINKWIINLYNELNDKVKKSILEYKFNDAADALYQFIWKDYCDWYIEFIKPILNNSSNIETLNETKNVSINIMKKVLLMLHPIMPYLTEEIFEKLFQSSQLAISSSWPQKIKSNKSLKNGIDLLIKLVSTLRSIRVEKNIPSKSRPIIFLKNIDLEKKKIIDENKNLIINLAKLNEIKFSFTNE

SEQ ID NO: 158351 - protein, 248 aa, Unknown
  Bacterial polypetide isolated from the Sargasso Sea
ASNEKVHWVPEHIKNGRMGNWLEGAVDWAISRNRFWGTPIPIWINDETGKMKCIGSRAELMQLTGTMLDDLHREHVDPLTFKLKGETGTYRRIDEVLDCWFESGAMPYAQLHYPFENQSLFELGFPAEFIAEGLDQTRGWFYTLTVLGTALYGVSPFKNVIVNGIVMAEDGKKMSKRLRNYTPPDELMESYGADALRLYLMNSGLVRAEEQRFVDEGVKDMVRRVLLPWLNAFKFFHTYAQIDNWLPG

SEQ ID NO: 158352 - protein, 189 aa, Unknown
  Bacterial polypetide isolated from the Sargasso Sea
MFDSTHVPVGSDQVQHLEMTRDIAARFNHLYKPILTLPDPIIQDKENVVPGLDGRKMSKSYGNVIPLLESEKILRKSVMKIVTNSLEPGEPKDSSDCTIFSLFKNFVDDSEMKLIQKAYNEGIAWGEAKEMLFNSINDELEPIRLKFEELKGDNDYINDLLSDGAKKARDIAKDKIFQIKEAIGITKIS

SEQ ID NO: 158353 - protein, 524 aa, Unknown
  Bacterial polypetide isolated from the Sargasso Sea
MFGGVNAAQAADVPAGTKLADVQQLVKGNGSEPATLDPHKTEGTVESNILRDLFEGLVASGPKGEVLPAMAESWETKDNKHFVFHLRKDAKWSNGDPVTAHDFEFAFKRAVDPKTASPYSWYLEIPTIVNASEIIAGKKAADTLGVKAVDDYTFEVQLEKAVPYFVSMLSHTTTYPVPKKVIEKFGDKWTQPGNMVSNGAYVLKDWVVNERVDVERNPNYWNNAKTVINKVTYLPIQSTNAELNRYLAGEVDLTYNMPIERFKQMKKELPNEVKVSGYVGTYYYQYNFKHKPFDDVRVRTALSYAIDRNVIADKVMGKGETPGYTLVPDFVDGFKPVAPAWSKLTQAERDAKAKELLTEAGFGPGKPLKFELLYNTDDNHKKVAVAVASMWKKLGVQVSLVNQEWKTYLETKKQGQFDVGRAGWIADYNEASSMLDLMQTTHGNNDGKYSNPAFDKLMNESRNQVDADARNKLYVQAEEILAKDMPIAPIYQYVTSRMVKSYVGGYPANPLDNLYSKDMYIIAH

SEQ ID NO: 158354 - protein, 247 aa, Unknown
  Bacterial polypetide isolated from the Sargasso Sea
GGIDLKFPHHECEIAQSESINSKSPVNFWIHTNMMTLNGKKMSKSTGNNILPKDLISGNNSIFQNVFSPSVIKFYFFQAHYRSILDLTESALLSSEKGYNKLMESIELLDSLKVSGESNFNFNKWIKDCYNAMNDDFNSPILISKLFEIVKLINSVKNGTEEISKKQKDLLINHLNIFVFEILGLTKPNNIKNNSVLAENTIKILLKLRDKARINKDFETADLIRNELNDIGIELEDTKNESSFNIK

SEQ ID NO: 158355 - protein, 336 aa, Unknown
  Bacterial polypetide isolated from the Sargasso Sea
MIDKNKKRILTGIRPTGALHLGHYVGALHNWIDLQEEYNCYFLIADYQALGDHFNDIDLIRKSVIEVTIDWLSVGLDPAKSSFVIQSYVPEFAELTMLLSFITPLGMLERNPTLKGELDSLEVEKRTVGFYNYPMSQVADILLPRAQLVPVGDDQSPHVEMTREIARKFNRMFGDVFLEPDTLIGKVPRLSGTDGQGKMSKSKGNVIMLSDDEKTVNKKVRSMYTDPNRIRADIPGKVEGNPVFEYHDAFNKDLEQVKDFKDRYQKGNIGDVEVKTALAKSINEFLEPIREKRVYYENNISLVEESLNNGITNIKPLASQTIELVREKMKISKYIR

SEQ ID NO: 158356 - protein, 525 aa, Unknown
  Bacterial polypetide isolated from the Sargasso Sea
MPGSAATLIILLLSLGPLAALLWQAGALAPRTLLADPYLRHVLGFSLWQALLSTLLSLGLAIPVARALARRRFIGRRLLLKLFGLSLVLPVIIAIFGIVAVHGKQGWLPQLLHGLGLTPGNYLYGLLGILLAHVFFNMPLAARLLLQSIESIPESSWRLASQLGMRSSHIFRLLEWPLIRAQLPGLASLIFMLCFTSFTTVLALGGGPKSTTLEVAVYQALRFDFDLATAGGLALVQLILTAGLLMLQHKLQSSPASRISARRPCLRPDRHQPGTGLVDALALGIGLAVFLPPLLAIVVAGLNPGLLGALTSSKLWLASGQSLLIALAAGSLATLLGSALLLTSRHLRVRDRKRRAAALWEASGSVILMIPAVVLSTGLFILFMPFADVFALGPWLVVLVNALMALPYVLRTLSAPMQLVVRQYDRLADSLGVRGLHRLRLVEWPLLRRPLAQAAALSMILSLGDLGAIAMFGSQELTTLPWLLYQQLGSYRLTEAAATALLLLLLCFSLFWLIERGLGGKHAEH

SEQ ID NO: 158357 - protein, 395 aa, Unknown
  Bacterial polypetide isolated from the Sargasso Sea
MKDALKLIKRGADEILTEADLKKKFESGKQLVIKAGFDPTAPDLHFGHTVLLNKLRHFQDLGHKVIFLIGDFTGRIGDPSGINKTRPILDAKDLVENAKTYEKQVYKILKKDLTEIKFNSEWCDKLGADGLIGLASKYNVARMLERDDFNKRFTSNKSIAIHEFLYPLVQGYDSVALEVDVECGGTDQKFNLLVGRELQRDYGQEPQVVITVPILEGLDGVKKMSKSLDNYIAIDENPDDMFGKIMSISDELMWRWFELLSFIPEEEIAKLKAEMESGKNPRDIKFVLAEELVDRFHNEGDGKKCKDTFLKRFQKGQMPDDIESIQVDIEGDSILLVNLLKDAKMIASVSEGNRLIEQGGIKIDSEKVEDQKFEVNKGSENIYQVGKRKFLKIKV

SEQ ID NO: 158358 - protein, 1066 aa, Unknown
  Bacterial polypetide isolated from the Sargasso Sea
MELVEKFDIKQIEKNVQNDLKDKDISKLIQQDDTKKNEIMFIEGPPTMNGIPHAGHLRGRVFKDLWYRYNVLSGNKVIFNAGWDTQGLPVELQAEKELGMENGKSDISSTEDIEKLVAECKNLVQKYHTKWVEVDKLIGMSFDQDKAYWTYKDEFIEKEWQLMKKAFENGIMTEGFRVVAYCPSCQTSLSHSEVNQGYDMVKDPSLYYKVKLAEEEKFLIVWTTMPFTLVTDAMVGVNPKEEYVEVLVEGETWVVGKTRLEEFMTEVKIEEYEIKRTFLGSEMEGKKYIHPLLDEIPKLAEISKQDNYHVTVAENFVDVNAGSGLVHLSPANGEEDNNIAMKRNVTVFCPIDDEVKFTEDAGKYAGLFVRDADEKLVQSVKDRNALVKIGKIKHKYPLCWRCNHGLVWLARREYFYMLDKLGDKAIKAAEDVEYFFDQPKNRFLEIIKEKHPWCISRERYWGCPIPVWKCNDCENTEQLFSRKEIIESAIELPDGENFELHRPWIDKIKVKCKECSGVMQREEFVLDTWHNSGAAPIASLDEATYKEKIPAPFFTEGIDQTRGWAYTLLIENVIYNNASVSPYKSFLFQGHVLDENGNKMSKSKGNVLEAKELLEKYPVDLVRFYFMWKASPIEPLNFSTKELMSRPYQVISTLYHLHTFYKQNSEYDKFNVEESTIEWAKKNDLLTPPDVWLLSKLQRMIERTTETNDSCRFHESAKSIEDFLINSLSQIYIPIIKSELWDEDDSKKDRRFTIYAILAKTLKTINILIHPFAPFTSQYLYKSIFSEKENILLESWPKVDSSLIDEKVETSFDLLKETVSVTSAARMKGKLKRRWPLNQAMICLNKGEKQVLESLSELVKSQMNIQNYEIFEIDNSEGMEQYLELKEKGLPVVPKIELERSAIGPKAKQDMGKLLKMFSETDPESIINELNANGKYTFQIGENSVVLDKEDFIVDFEVNEKYQFAKRQNLIVVISLERDNEMMSKGLIKDLARRIQTLRKEKGFNPTDILERASILELDEESLNLIKDKTEDIAFLVRVKNVDFTESCKNYKDDDIDGLKIRIAVE

SEQ ID NO: 158359 - protein, 401 aa, Unknown
  Bacterial polypetide isolated from the Sargasso Sea
MKFLPAEKQMELIQRGAEEIIPKEELRKKIDRSIKNNKPLIAKLGCDPSRPDLHIGHSVVLRKLKNFQDLGHQAVLVIGDFTAIIGDPSGRNKTRPQLSLEEARENAKTYLDQAKIILNMDKLKVVYNSDWLEKMRFSDVIKVASSTTVARMLERDDFTKRYDSEIPISLHEFLYPLAQAQDSVELISDIELGGTDQKFNLLMGRNLQRDIGQEPQCILTMPILEGTDGIEKMSKSYGNDIGLSDSANDMYGKTLSIPDEIILSWYTLAVDVDQNKLKEIEEKLNDPSTNPMNIKRDLARQIVASYFDKEKAIEAENNFNNITVSKGIPENIQEYKLKEEMLLVNIIYDSGLLPSKSEARRMIKQSAVRIDGDVIHEINLELMPGDTRILKVGKRRFLKII

SEQ ID NO: 158360 - protein, 337 aa, Unknown
  Bacterial polypetide isolated from the Sargasso Sea
MTHPTRPTILTGDRTTGPLHLGHYIGSLRARVQMQHEAKQFLLLADTQALTDNMGRRQRVTENVIEVALDYLAVGIDPAISTIVVQSQVPELAELSQYLLNLVTVARLERNPTIKEEIRLRGFERDIPAGFLTYPVSQAADITAFKATHVPVGDDQLPMIEQTNELVRRFNATVEQPVLVECEAVLSAVTRLPGIDGKAKMSKSLGNAITLGSTPDEITQAVKDMYTDPNHLRVSDPGQVEGNVVFTFLDAFEPDVQKVDELKAHYRRGGLGDSVVKRVLNERLQALIEPIRARRREFEADKAEVMAILKRGTLHARDVAGATLAEVKGAMGLTYFD

SEQ ID NO: 158361 - protein, 605 aa, Unknown
  Bacterial polypetide isolated from the Sargasso Sea
SRINPVRSPDRALVRRNWILSRMFKLGYIGKAQYLLAKDEPITLSQLKTRFSLDGRYIAEIARQALIDRYGLSVYKDGLSVYTTIDSKLQQAALDSINKNLYLYDKRHGWREPVNLSNRIPEIIFTELRNQNTDILYETSNLQDELGMNQLFISIIRDYFENSKNLDRHIGGIVIDVKPERIIYLSNSFKLETLSWNDKYKWARRKINIDKLGPVPSNFYDILRSGDFIYLTNIDGENYLDQIPEAEAAFISVNPNDGAIKTYIGGLNFSKSNFDRVRQSFPQAGSSFKPFIYTSAFANGLHASDKINDAPIVFEDSNLESSWRPENYTGKFYGPIRLREALVQSVNLVSIKLLREMGISNTQAFLTRFGFEKSRLAPDLSLALGSSSFSPAEMVRAYSILANSENPKDPFFIDKILNRKGDVIYKHSNASQEKNSQDSVDAFPWFQTQIADEVKPFILLPPINNLSDPIDPRVAFITKDILREALSRGSNARQVGVLKREDIAGKTGTTNNAISTWFSGFHNNLATTVWIGTDDFSSLGDNEFGSSIALPAWVDFMKTALLDLPNETWKTPEGLSYVRIDRETGKPAAQTSKNAYFELFLDAEN

SEQ ID NO: 158362 - protein, 466 aa, Unknown
  Bacterial polypetide isolated from the Sargasso Sea
MSKKLWQPSLIVKRSSNLFAFENYISKKLKIKFNRNYKNLLNWSIKNSPEFWSKFWDFSKIKGIKSKKKFRKSKTFYKNIFLPGSKLNFGENLLSKNNKEKAVTFISENGFREERSWRQLNLNTNKVLKFLKKINIKKGDRVAAYMPNTIETVEAFIATTSLGGIWSSCSPDFGSKGVIERFSQINPKVLFITDQYFYNGKKIDVLKRLPEILKLIPSIKNVVISNYPGKKFIKKKFKFKKINFFKWNELMQTNAEKIYFKRFDFETELAILYSSGTTGKPKCICHRSGGVLIQHMKEHQLHCNIKENDNVFYFTTCGWMMWNWLVSSLASKASIVLFDGSPMFKSADLLLKIAQREKITLFGISAKYVDALRKYKPKLKYKFKLNKLRTICSTGSPLSEESFKYVYKHIKKNVHLSSISGGTDIVSCFVLGNLYQPVNIGEIQNNGLALDVDVLSDKGKSLKNIK

SEQ ID NO: 158363 - protein, 198 aa, Unknown
  Bacterial polypetide isolated from the Sargasso Sea
KDEGQRPQTIIMVPLLEGLDGVQKMSKSLGNYIGITDTPGEMFGKVMSISDELMWRYYDLLSFRPIADIAALKQQAAEGRNPRDIKIELAKEIIARFHDEAAADAAEQDFIQRFQKNALPDDIPELTLTLTSDSIQIANLLKEAGLVESTSEALRMIKQGAVKLDGETKVEDSKMEFAKGSHHIFQVGKRKFAKVSLV

SEQ ID NO: 158364 - protein, 390 aa, Unknown
  Bacterial polypetide isolated from the Sargasso Sea
EKIYVKLAPSTSDLEQAARLDPNDFRKQIDLSRNYESNGRFEDAKEIYLKLAAQNPNNADAHFHLGSFYARFGQMTKARHSFDEALDVQPSHRATIETMATLFKTKESRSMSNDMLSKSAEKDPNGPGEQMKKVRQNLNDLNYDNAAKLAQGGQNMFPNQVGFIYLKGRAFEGLGNLDKAKATYQESIKKDPTHHESYVALGNLYFNQGKYVYAALTYGDAIRIDPSDKDSRFNQGLSYFKGSEWGRAASSWEDLLHYEPQNQQVKILLPQAYYILAVEYNRIGESNLGQTAFRKALSVNKNSGVWLPGSMRVLGDYYRDKGMHRESLSAYQEAIELKPNDAKTYLGLGITYWRMKETTLAKAAWARSMEIDPINNDSRGWLLLAGKTSS

SEQ ID NO: 158365 - protein, 76 aa, Unknown
  Bacterial polypetide isolated from the Sargasso Sea
RFGWFIEALSYGTPQHAGFAIGIDRLIAEVYNQNSIRDVIPFPKTQSGLDPLTDAPSYINENILEEYNLKYINKDE

SEQ ID NO: 158366 - protein, 197 aa, Unknown
  Bacterial polypetide isolated from the Sargasso Sea
QEITGKSLRVVITVPILEGLDGVKKMSKSLDNYIAIDEDPDEMFGKIMSISDDLMWRWFDLLSFMPEEDIAKLKQDNKDGRNPRDIKFILAEELVDRFHQEGDGKKCKEEFLNRFQKGNIPDEIESISVNLTEDKILLVNLLKNANMIASVSEGNRLIKQGGIKVNSQKVDDLKFFISSGTENIYQVGKRKFLKIKT

SEQ ID NO: 158367 - protein, 538 aa, Unknown
  Bacterial polypetide isolated from the Sargasso Sea
MTLEQGLIFVILVASMGLFIWGRWRHDVVALGALLACVIVGLVPEREAFAGFGHPAVITVACVLVLSHGLQRTGAVSRLAQRLLPSGAGVLLSIAALTGLGALLSAFMNNVGALALLMPIALQISARLELPPGRVLMPLAFGTILGGMTTLIGTPPNLIVSSFRAQHGSGPFAMFDFSPVGVAVALAGVLFITLLGWRLVPKREVGNAASFDTGHYLTEARVKEGGKAQGKTLREIELLLDEADAQVVAMVRNKLRLTAPNPRRVLQADDVLVIEAYPQELGEVLGQLDLLLEAEREAKEAEQKEDKEGETEKKANNDEDRAMQELLVKPDSSLIGRSASSTRLRSRYSINLLAISRQSHRSIKRLRSTLIQSGDVLLMQGSAEDIGEFASDYDCVPLAARAINIPDPQQANLALGIMLLAIAAAAFGLLSAAIAFASGVLAYMLLRLVPLRAVYESIDWPVIVLLGALIPVAGAMSATGAADLLARLLMENLAQGNAIITLTLLLVVTMTLSDFMNNAATAAVMCPIALSAASQLGV

SEQ ID NO: 158368 - protein, 267 aa, Unknown
  Bacterial polypetide isolated from the Sargasso Sea
RRRRHDQLASRYTVARILEREDFTKRFQGGVPISIHEFLYPLMQGYDSVALNADLELGGTDQKFNLLVGRELQKQYGQEQQCILTMPLLEGLDGVEKMSKSKNNYIGISEKPTDMFGKLMSISDVLMWRYFELLSFRPMDEIAGFRKEIEAGRNPRDFKVMLGQEIVARFHSQADAERALEDFNHRAKGGVPDDIPAVTLAGAPLAIGQLLKQANLVPSTSEALRNIEQGGVKIDGATVSDKGLKVEAGEYVVQVGKRRFARVTLTA

SEQ ID NO: 158369 - protein, 307 aa, Unknown
  Bacterial polypetide isolated from the Sargasso Sea
DSDSLIKNAKTYKEQVFKILKEDLTEVKFNSEWCDQLGADGLIKLASKYNVARMLERDDFNKRFSSNKSIAIHEFLYPLVQGYDSVALQADVECGGTDQKFNLLVGRELQRDYDQDPQVVITVPILEGLDGEKKMSKSLDNYIAIDEEPNEMFGKIMSISDDLMWRWFELLSFLPEEEISKLKDEMKEGRNPRDIKFILAEELVDRFHKKGDGKDCKEDFLDRFQKGKLPEDIETFEIDIKNESILLVNLLKDTEMISSVSEGNRLIKQGGIKINQEKVVDIKLEISKGSMNIYQVGKRKFLKIKVK

SEQ ID NO: 158370 - protein, 713 aa, Unknown
  Bacterial polypetide isolated from the Sargasso Sea
EDTNIAMKRKVTIFCPIDDQVKFTEDAGKYAGLFVRDADEKLVQDVKDRNALVRIGKIKHKYPLCWRCNHGLIWLARREYFYMLDKLGDKAIKAAEDVEYFFDQPKNRFLEIIKEKHPWCISRERFWGCPIPVWKCDECGNMEQLFSRKEIIESAIELPDGENFELHRPWIDKIKVKCEKCSAVMSREEFVLDTWHNSGSAPIASLDEATYKEKIPAPFFTEGIDQTRGWAYTLLIENVIYNNAPVSPYKSFLFQGHVLDENGNKMSKSKGNVLEAKELLEKYPADLVRFYFMWKSSPIEPLNFSTKELMSRPYQVISTLYHLHTFYKQNSEYDNFSLEESTIEWAKKNELLTPPDVWLLSKLQRMIENTTKSNNSCRFHESAKAIEDFLINSLSQIYIPITKSELWDEDDSKKDRRFTIYAILAKTLKTIDVLMHPFAPFTTQYLYEAIFSEKENILLESWPKVDTTLIDEKVETSFDLLKETVSVTSAARMKGKLKRRWPLNQALICVSKGQKQVLESLSELAKSQMNVQNYDIFEIEKSEGIEQYLELKEKGLPVIPKIELERSAIGPKAKQDMGKLLKMFSETEPESIINELKEKNFYTFKIGENSIVLEKEDFIVDFEVNEKYQFAKRQNLIVIISLERDDEMMAKGLIKDLARRIQTLRKERGFNPTDILSKASILDLDQDSLELIKEKTEEIAFLVRVKSVEFTDS

SEQ ID NO: 158371 - protein, 383 aa, Unknown
  Bacterial polypetide isolated from the Sargasso Sea
MNDEEIKSEIRKFALQNAVEHEGQTRDKTILAKIMGNVPELRQKAKEIGPIITEVVSEINQISLEEQQKEIEEKYPELLEVKKEKPQKESLLPALKNTEGKEIITRFPPAPNGYPHIGHAKAAVISEEYAKMHGGKLILRFEDTNPGTERLEYYAAIKVGMDWLGIKYDSVEHVSDNLDILYKKADQIIKSNDAYVCTCSQDSISKDRREMIECSCTKQSVEENEKLWHKMHDEKGFKEGQALLRFRGNMQSGNTTMRDPALFRINTKRHARQEQKYKVWPTYDFAGIIFDSISKVSHAMRSKEFELRKELHHTILDKLGMEKSEFIFFGRLDLEGMPVSKSALKPLIENGKVPWYDDPRLPTLEGLRRRGIRPEAVKKFVLS

SEQ ID NO: 158372 - protein, 168 aa, Unknown
  Bacterial polypetide isolated from the Sargasso Sea
MSYKIETNTLHVGHETKKTEGTRAVPIYQSTSYEFKNSDHAAKLFSLAEPGYIYTRLNNPTNDILEQRLASLEGGIGAVSTASGTSAISTTLLMLLKSGDHIVASNSLYGGTYNMLSNTLPRLGISTTFVDPDDPNNFKSAVKKNTRAFYAESLGNPKLDVVDLESIS

SEQ ID NO: 158373 - protein, 311 aa, Unknown
  Bacterial polypetide isolated from the Sargasso Sea
MSEYKTQNRGGVGQRGSTTRSEDFLEHLFVGTNHQYMLFFTQKGKCFWMRVYEIPEGSKISKGRAIQNLINIESDDKVKAFICTQDLKNEDYINDHFVIMCTKKGQVKKTSLEQYSRPRSNGINAITIKEDDELLEAKLTNGNSQILIAVKSGKCIRFEENKTRPMGRNASGVRGVRLKDQKDEVVGMISVNDMDSDILVVSENGYGKRSKLEDYRITNRGGKGVKTISITEKTGNLVSLKNVSDGDDLMIINKSGIAIRMEVNTLRVMGRATQGVRLINIKDNDSIAAVAKVVLDDQEVTDIEEIDVVED

SEQ ID NO: 158374 - protein, 440 aa, Unknown
  Bacterial polypetide isolated from the Sargasso Sea
DNATSVAVDSTIVLNFNESVDAESGNITIKKTSDNSTVETIDVTGGQVTGSGTSQITVTPSSDFDASTEYYVLIDATAFDDSESGSYAGISSTTALSFTTANAVPTLSSSVPADNATSVAVDSTIVLNFSESVDAESGNITIKKTSGNSTVETIDVTGGQVTGSGTSQITVTPSSDFDSETEYYVLIDATAFDDSESGSYAGISSTTALSFTTTDTTASDPFEDKTVVALVEAQTDVPKRIIQNVSTPIFNRLQWLRNYNEDRELFSQGIKFRFSNPILASISKVVPVALTDDEEIEEEEIDTTWSFWSEGSVSIGKVGDTTSSHSKDINTTGITIGLDNKVSDRYLYGYTIRYTKDDVDVGTPGTSLDTNAYSLSTYASFLTGESKFIEGIFGFSKLDLKNVRKSGSNTLYGDRDGTQLYGSINYSTVLNRNNLNISPN

SEQ ID NO: 158375 - protein, 647 aa, Unknown
  Bacterial polypetide isolated from the Sargasso Sea
MTNKLWEASLKEKKNSNLYAFEKLISKKTKKKFNLNYKTFLNWTVKNSPEFWNYFWEFSEIKGSKSKKKIKKSKIFHKNLFLPGSKLNFGENLLSKNNDDKAITFISENGFREEKSWRELNLNTGKIVKFLKQIKIKKGDRVAAYMPNTIETVEAFIAASTIGSIWSSCSPDFGIKGVVERFSQINPRILFITDQYFYNGKKINVLERLSAILKSIPSIKNVVIVNYPGKKNVTNHSKYKKIKLIKWREIIQNQFEKINFKKYDFESELAILYSSGTTGKPKCICHKTGGVLLQHKKEHQLHCDIKENDNVFYFTTCGWMMWNWLVSSLASKASIVLFDGSPMYKTSDLLLKIAQREKITLFGISAKYIDALRKLEPNLKFKFKLQKLKTICSTGSPLSSEGFKYVYKNIKKKVHLSSISGGTDIVSCFVLGNIYQPVNIGEIQNSGLGLDVDVFNDRGKSLKNSKGELVCKNPFPSMPLKFWNDKNDVKFKKAYFNRYENTWHHGDYAERKNNDGFIIHGRSDTTLNPGGVRLGTAEIYSEVEKFKEIKEALVVGQSWDNDIRIILFLVMSNGYPLNDILLSRIKTQIRTNASPRHVPKKVIVVKDIPRTKSGKIVELAVKSTIEGNIVKNKEALANPEVLQQYKN

SEQ ID NO: 158376 - protein, 109 aa, Unknown
  Bacterial polypetide isolated from the Sargasso Sea
CLWGSGAAKQITSDLMNRDQQVPDSDTMCGALIRYITQSDPEHFQPMNANFGLLDPPEKKMSKSLRKAWFSERALKTLKDSLPVKPMRSPFNTSQAEQQMSEKAGQDAA

SEQ ID NO: 158377 - protein, 401 aa, Unknown
  Bacterial polypetide isolated from the Sargasso Sea
MTFINTDKQIDMIQQGVEEIIPIDELKHKLDRGQKSNKPLTVKLGCDPSRPDLHIGHAVVLRKLRQFQDLGHKAVLVIGDFTAMIGDPSGRNKTRPQLTLEEAKSNAESYIEQAKIILDINSLKICNNAQWLNTMNFSDVVGLASKYTVARMMERDDFEKRYKSEIPITIHEFLYPLAQAMDSVHLNADIEIGGTDQKFNLLVGRDIQREFGQDPQIILTVPLMEGTDGVEKMSKSYDNHIGLTDSYDEMYGKTLSIPDNMIEKYFLLGANADEKKIKEIKNSLNDGKTNPRDIKRELARKIVAIYHSDVLAKKAETNFDKIFIGKEVPDNIPEVKLDKDELLVDIIASNKLVSSKSEARRLIDQGAVKIDDEKCLDRDQIINKGKSIIIKVGKRRFLKIL

SEQ ID NO: 158378 - protein, 534 aa, Unknown
  Bacterial polypetide isolated from the Sargasso Sea
CRNKFTTALSFTSTNAVPTLSSSVPADNATDIARDTTIVLNFSENVDAESGNITIKKTSDNSTVETIDVTSGQISGSGSSQITITASSNFENGIEYYVLIDATAFDDTDSGSYAGISSTTALNFTIVELIDPTTDKNVIGLIEAQNTIAKNTFTEFNGTVSDRLKYLRLNRIKDDLSKNNLKFDFGNAILTSLTNDLLANNDKPIIPRNWSTWSEGSISITKIGDTSTSSEKEIDSQGIAFGFDKKINDNDIYGFAIQYGQSDTDVGSNGSGIDSKNYNISMYRTRPLDDNNFIEGSIGIGKIKSDIERKSNSNTLTASRDGNQIFGSVNFGKTIDKGNFNLVPALRVDLGYTELEGYQEVGTDALSYDDQEVQSGLLSLGFGVNNLVKFDDSTIKPFGLIEFGLDFSDSSVTKLNYVSDTSTTYTYTQDTISEYMLTSEVGFSYNSKDNLSINTSYRRIQGEKHEHTDTLSFGLNFKSKRETEYAMQFGGTEDLSAGINVAKNINGLDFNFKLDQEFNENLDKNAEVSMNKKF

SEQ ID NO: 158379 - protein, 577 aa, Unknown
  Bacterial polypetide isolated from the Sargasso Sea
TDGTKVFVVGTKDFDDEVNEYSLTTAFDISTTQSITRRLGIGTTELGAPMADLHPYGITFNGDGTKLYISGNENNKIFELDLGSAFNISSATQVGELATNVHANGDPTPCGLTFNNDGTKLFLAGFHNHRIVYWSLSTPYEVETAGNPGAFSVTSTANKPRDVDFNSDGTKMYVVSGTGDHIAAFDLDSAFDLSGTVTHRGNYSVNSQDNQPFTVEFSSNGLKMFMQGYNGDDIHEYSLTTAFEIINTVPTLSSSVPADNATSVAVDSTIVLNFSESVDAESGNITIKKTSDNSTVETISVTSGQVSGSGTSQITVTPSSDFDGSTEYYVLIDATAFDDVDSGDYAGISSTTALSFTTANTVPTLSSSVPADNATSVAADSTIVLNFNESVDAESGNITIKKTSDNSTVETIDVTSGQVTGSGTSQITVTPSSDFDASTEYYVLIDATAFDDSESGSYAGISSTTALSFTTANAVPTLSSSVPADNATSVALDSTIVLNFSESVDAESGNITIKKTSGNSTVETIDVTSGQVTGSGTSQITVTPSSDFDSGTEYYVLIDATAFDDADSGSYAGISST

SEQ ID NO: 158380 - protein, 147 aa, Unknown
  Bacterial polypetide isolated from the Sargasso Sea
MSLIDGSKKMSKSDPNEGSRINLLDPPEIITKKIKRAKSDSSIGIEYNNPERPESKNLLMIYSILSGKEISQCENEFSETGWGTFKKLITEQLIESLEPIQKKYKLLINDPYQLNKILDEGKEKAEDLANQTLKRVKSKLGFFAMEK

SEQ ID NO: 158381 - protein, 265 aa, Unknown
  Bacterial polypetide isolated from the Sargasso Sea
MNLLKNLIRNLENDLSNNGVSESIVLRTSNVPNYDFQINNLVKFEKRSDIDDIENSFSKILNDDPIIKNFEFTKNYFINIEINIEMYLSNHENLIKNIKSSHQKNIILDYGGPNIGKPLHVGHLRSLNIGRSLYNINKLAGHNVANDIHLGDWGMPIAQIICFINEKNINFEDIKIEDLEEIYPKASKLYQQNEDFKSLAQNINKELNENKADLINKWKFIKEVSIKAIKETLSLLDHNFDLWMGESDVNSLIPEMIANLKDNEK

SEQ ID NO: 158382 - protein, 66 aa, Unknown
  Bacterial polypetide isolated from the Sargasso Sea
MQREKLNEKNCDWVIANDVSDQTIGFGSDFNKISIFYKDKPEENFEKMSKSLVAEEIVKRVIQQIN

SEQ ID NO: 158383 - protein, 772 aa, Unknown
  Bacterial polypetide isolated from the Sargasso Sea
MKNNKIFTRTAVARAVTLLLSGTAVLPLYAQEAQQAQETKASETAPIEVIAVRGVRSSLQQAAEIKRNSMGVVDAISAEDIGKFPDTNLAESLQRISGVSISRTNGEGSEVTVRGFGGDNNMVTLNGRTMPAANTYAAGSGADGTSRGGSARAFDFSNLASESISGVEVYKTSKANVATGGIGATLNIKTARPLENSQDVASIGVKAAHDTTNRAGDDVTPEVSGIYSHATDDGKFGVSVSASHQQRDSGYTGATVNDWQVAYWDDLADADRLWNNANTVVTNGPSQGQLYTRPNDIRYAFSDSQRERDNAQLTLQFKPTEKFTATGDYTFAENNIVEHRGEITNWMQTGSNTKEIEFDNNIVKTPTYIKEEYASAVDEGYEQQWREQTNTLKSIGLNLEYDYSDDLTFVFDAHDSKMHSRGTGPRNSGELAVGLGAPIVESREWFWGADLPTYLNVYNDAAPGKGANANGMVDAGDVGSSIARIRNAGQESDIQQFKLDAIYVVDNGRFDFGVEMRNMESRTIQTAGNNIALGNWNVGNPGEFGDLIQPFDLPGEFNDFKTLPGGYGFIADPRALYTAALGLYPGIPTASETSLSADNIVKEDTMAAYFQISLGGEIGKMPFDVLTGLRYEETESESSSLVSRNYFRWEDNNDIVAYVDSTVPAQPFNAENKYDYLLPSLDFTLHLNDDLISRFSFSKTIARAGLGSLGVSASNFGGGGGSTLLGAQPTANASNPALLPLESSNYDLSLEWYYDNGSYMSAGLFQKDVVNF

SEQ ID NO: 158384 - protein, 639 aa, Unknown
  Bacterial polypetide isolated from the Sargasso Sea
MELVENFDIKQIEKIVKNDLKDKDISKMIDQDIEKNNEIMFIEGPPTMNGIPHAGHLRGRVFKDLWYRYNVLSGNKVIFNAGWDTQGLPVELQAEKELGIENGKSDITSSEDIEKLVSECKNIVKKYHTKWVEVDDLLGMSFNQENAYWTYKDEFIEKEWELMRKAFENDIMTEGFRVVAYCPSCQTSLSHSEVNQGYDMVKDPSLYYKVKLADEDKFLIVWTTMPFTLVTDAMVGLNPKEEYVEAKVEEETWIVGKTRLEEFMNEVKIEEYKIERTFLGTEMEGKKYIHPLLDEIPKLAEIAKQDNYHVAVAEDFVDVNAGSGLVHLSPANGEEDNNIAMKRKVEVFCPIDDQVRFTEDAGKYAGLFVRDADEKLVHDVKDRNALVRIGKIKHKYPLCWRCNHGLVWLARREYFYMLDKLGDKAIKAAEDVEYFFDQPKNRFLEIIKEKHPWCISRERFWGCPIPVWKCDECGNMERLFSRKEIIESAIELPDGENFELHRPWIDKIKVKCKECNAIMSREEFVLDTWHNSGSAPIASLDEATYKEKIPAPFFTEGIDQTRGWAYTLLIENVIYNNSPVSPYKSFLFQGHVLDENGNKMSKSKGNVLEAKELLEKYPADLVRFYFMWKSSPIEPLNFS

SEQ ID NO: 158385 - protein, 264 aa, Unknown
  Bacterial polypetide isolated from the Sargasso Sea
MILDKLNKQLIETVQKVADQKSVSIDKKLLNQINFEISDEESHGDYSTSCALKLSKAFNMQPREIAKLLTEGLSLPFIESTSVEGAGFINVFLTREEKIQVLKEVVTQDSKWGKNTKKQGNVLIEFVSSNPTGPLHVGHGRGAVLGMALSNLLENSGYEVTKEYYVNDAGRQISILTSSILIKAHINNFDVEGMYEGDYIYEIAQEFIKEHGKIDINLDLKDFSDDREKKLDQISEYFQKNHKQAWDQANNFSVSEILNVIKEE

SEQ ID NO: 158386 - protein, 698 aa, Unknown
  Bacterial polypetide isolated from the Sargasso Sea
MPSTHVIYEGLEKVSKNIEENEPAKPMLSYGNSKFINENQLKQSGKNYIILRLGSVYGYSHDNTRTDIMVNFFAKATSQNSTLRLFAGGRQIKSLVPLIDVARCFKFMEEREDISSQVFNLSKDTKTVKEVALICKTINPKVSIIETNNEIPNLGFSLSNKKLLNTGFKFLYNINQSLSEMIFKWSKQDLIKDLEFVKNGENEYVDTRGKISNHELTEPINLIGLINSKKGTIRANHYHPQQEQKCLFTKGQIIEIYKDILNPNSPKITQVVNEGQLSIIKPNVAHTMVFTKDTTFLNLVRGEREHDNYGITHTIKHLFVDEEEKNLLLECYKFDCRSCGNTNLKRVVSLGYQPLANNLLKKENEKCELYPLEMNYCDRCHNCQLSVAVNPKKMFSNYLYTSSTSKVFRDHFVKASKKYIKDFKLNKKKSYIIDIGSNDGVALKPFLDQGFKKILGIEPAKNLAKLANKNKIKTFNGFLNKKNIKNLKKNADLILASNVFAHSDKLNEMAECMFKLLSKKGTIVIEVQYLMNTLKDLTFDNIYHEHYNYWSLTSLVNFFNRLNGKIFRSEKVNTHGGSIRVYIKKDKKVKVEQSVKQMLKEEDKFGIKNFGTYKEFGEKVYKIRENVRKNIKKLKNNNNIIIGYGAPAKATTALNFFGISKEIDFIVEDNKLKHNKFIPGMKIPVKDKSKIKNKKNTL

SEQ ID NO: 158387 - protein, 331 aa, Unknown
  Bacterial polypetide isolated from the Sargasso Sea
MGFQALESSEGRIWTSRIRDNVPFIAITLVIIMFWIISGERFMSYRNWTFIAQQTPVLLLLAYAQLLIVTTGSIDISVGSNLGFSAYMSALGMIWFGTMGFMVGIFAAIIVGVFNGIIFSFFKISSFVTTLAMLIIVRAVLVIVSDGRSIYVTDQPMASSNITSIEAKWLLDLGQFPHILYFCIAVTILLWIVYEKTVFGKQLKALGGNEKVLHLAGISVNWFKIQVFAAAGFMVGLASFINLARSGAATVQAGQMQELDSIAAVALGGTVLTGGYGSVVKTVVGALTLTIVANGLTIAGVTPSWSRIARGLLLIAAIAITLNRKQIDVVK

SEQ ID NO: 158388 - protein, 250 aa, Unknown
  Bacterial polypetide isolated from the Sargasso Sea
MGPEIGDMACGEFGKGKMSEPNEILKQIEVHFKNTKNNNKLKALVTAGPTREFIDPVRFISNRSSGKQGYEIAKSFRDNGFETTLISGQTDLDPLSGLNFIKVETAQEMFDETLENLPVDVAVFTAAVADYKITNFENTKIKKKEKFNLALEKNIDILDKISKHNSLRPKLTIGFAAETNNLVENSMKKLDEKNCDWIIANDISDNSIGFDSDDNQISIFYKDKKNENLKKMSKSLVASEIVNRVIEKLN

SEQ ID NO: 158389 - protein, 378 aa, Unknown
  Bacterial polypetide isolated from the Sargasso Sea
EDLERKLERSRTNNEPLIAKLGCDPSRPDLHIGHGVVLRKLRHFQDLGHTSVLVIGDFTAMIGDPSGRNKTRPQLTLDEARSNAESYVEQAKVILDINTLIIKYNSDWLSQMNFNDVVKLASSYTVARMLERDDFTKRFKAEIPISIHEFLYPLAQAQDSVELKADVELGGTDQKFNLLVGRDLQKDNDQEPQCIITTPLLEGTDGIEKMSKSYGNDIGLQDSPEDMYGKTLSISDDMILKWFTLAADCDSSAVKTASDKLNNPGVNPMIVKRELARNVVQLFYDKQTAEKAEAHFDTVVVGKGIPDEMPVYELDSEDLIVNVIFSSGLLKSKGEARRMIKQGAVKLDDKKIDDIQASIVPEGEQILKVGKRRFLKVI

SEQ ID NO: 158390 - protein, 422 aa, Unknown
  Bacterial polypetide isolated from the Sargasso Sea
MRLIFFKIIFFFIFFSWINVSYSVEVLGTGTAALIGGDLTDPEDDGVDGANTNWNWTSISASSEEKWTSEGSFNVFDNKVGATNNKWCCNGPTQWISVGFSQPYILSHFTITSGNDVTGRDPDIWKIQGSNDGDNWTDIFVYDNNGVSPWGTTRNRVLKYTGDGDDFSTPNAFSYFRYYVTSTGSSAHQINELEYFGSADSTNPTLTSSVPTDNATGVAEDANIILNFDEIVDAETGNITIKKTSDNSTVETIDVTGGQLSGSGSTQITLDPSVTLDSSTEHYVLIDATAFDDVSGNSYAGISSTTALSFTTGDTTGPTLTSSVPADNATGVAVDSTIVLNFSESVDAESGNITIKKTSGNSTVETIDVTGGQVTGSGTSQITVTPSSDFDNGTEYYVLIDATAFDDASGNSYAGISSTTAL

SEQ ID NO: 158391 - protein, 834 aa, Unknown
  Bacterial polypetide isolated from the Sargasso Sea
MRLIFFKIIFFFIFFSWINVSYSVEVLGTGTAALIGGDLTDPEDDGVDGANTNWNWTSISASSEEKWTSEGSFNVFDNKVGATNNKWCCNGPTQWISVGFSQPYILSHFTITSGNDVAGRDPDIWKIQGSNDGDNWTDIFVYDNNGVSPWGTDRLEVLKYTGNGDDFNTPNAFSYFRYYVTSTVSMNHQINELEYFGSADSTNPTLTSSVPADNATGVAEDANIVLNFDEIVDAETGNITIKKTSDNSTVETIDVTGGQLSGSGSTQITLDPSVTLDSSTEHYVLIDATAFDDVSGNSYAGISSTTALSFTTGDTTGPTLTSSVPADNATGVAVDSTIVLNFSESVDAESGNITIKKTSGNSTVETIDVTGGQVTGSGTSQITVTPSSDFDNGTEYYVLIDATAFDDASGNSYAGISSTTALSFTTDLEDPTNDKDVIGLIEVQTEAPKKIVQHVSTPIYNRLNWIRGYESGENLNTQGIKFNFSNPKLAQLADLVPQSINFNKIPKRSNDDWLFWSEGSVSVGKVGDTTSSSSKDVHTNAVTLGWDRKIDDETIHGYTVTYTQDDVQVGSSGTSVDIDSYSFSTYATFHRSENQYIEGILGASKLDFKNIRKSGSNTLTGNRNGKQVFGSIQYINSVNGDKIDISPNIRLDLSSTSLSQYSEIGTNALYYEKQTVETVGLYSGLTFNNEILKSNYILRPSAGFELGLDLSPNSDVSLNYVSDPNTKYTKSIDQHGEKSIKGKIGFDVLHNNGLSLMTFYERNQGENSHSDTLYFLTGYVSSKEEEYAMALNDKKASIEYKRNVNGFDISFDTGYGLFSEYKDYEVNLKITSIF

SEQ ID NO: 158392 - protein, 539 aa, Unknown
  Bacterial polypetide isolated from the Sargasso Sea
KSWRELNINTGKIVKFLKQIKIKKGDRVVAYMPNTIETVEAFIAASTIGSIWSSCSPDFGIKGVVERFSQINPKVLFITDQYFYNGKKINVLERLSEILKSIPSIKNVVIVNYPGKKYVTNKSKYKKINLIKLREIIKNQSEKINFKKYDFESELTILYSSGTTGKPKCICHRTGGVLLQHKKEHQLHCDIKENDNVFYFTTCGWMMWNWLVSSLASKASIVLFDGSPMYKSSDLLLKIAQKEKITLFGISAKYIDALRKLEPNLKFKYKLQKLKTICSTGSPLSSEGFKYVYKNIKKKVHLSSISGGTDIVSCFVLGNIYQPVNIGEIQNSGLGLDVDVFNDRGKSLKNSKGELVCKNPFPSMPLKFWNDKNDVKFKKAYFNRYKNTWHHGDYAERKNTDGFIIHGRSDTTLNPGGVRLGTAEIYSEVEKFKEIKEALVVGQSWDNDIRIILFVVTSRRYILNNSLLNRIKTQIRINASPRHVPSKVIVVKDIPRTKSGKIVELAVKSTIEGSVVKNKEALANPEVLIQYKNLKELNH

SEQ ID NO: 158393 - protein, 395 aa, Unknown
  Bacterial polypetide isolated from the Sargasso Sea
MDNALKHIKRGSDEILTEDDLQKKLESGKQLVVKAGFDPTAPDLHFGHTVLLNKLRHFQDFGHKVIFLIGDFTGRIGDPSGTNKTRPTLDSKDLLENAKTYEKQVFKILKKDLTEVKFNSEWCDDLGADGLINLASKYNVARMLERDDFNKRFSSNKSIAIHEFLYPLVQGYDSVALKVDVECGGTDQKFNLLVGRELQRDYGQEPQVVITVPILEGLDGVKKMSKSLDNYIAIDEAPDEMFGKIMSISDDLMWRWFDLLSFMPEEDITKLKQEMEDGKNPRDIKFVLAEELVDRFHQEGDGKKCKEEFLNRFQKGNMPEEIESISVNLTEDQILLVNLLKNTNMIASISEGNRLIKQGGIKINSEKVIDPKLSISSGTENIYQIGKRKFLKIKT

SEQ ID NO: 158394 - protein, 338 aa, Unknown
  Bacterial polypetide isolated from the Sargasso Sea
MSHAKQSVILTGDRTTGPLHLGHYIGSLRSRVQLQHEAQQFLLLADAQAMTDNVGRHQKVTENVIEVALDYLAVGIDPAKSTIVVQSQVPELAELTQYLLNLVTVARLERNPTIKAEIVLRGFERDIPAGFLTYPVSQAADITAFKATRVPVGDDQLPMIEQTNELVRRFNNTVDRQVLVECEAVLSQVARLPGIDGRAKMSKSLGNAIALGASPDEITRAVNDMYTDPNHLRVSDPGQVEGNVVFAFLDAFEPDVPMVDELKAHYRRGGLGDSAVKRLLNDRLQAMLAPIRERRREFATDRAEVLNVLRRGTMRAREVAGATVSEVKSALGLNYFQD

SEQ ID NO: 158395 - protein, 128 aa, Unknown
  Bacterial polypetide isolated from the Sargasso Sea
MNDEEVKNEIRKFALQNAVEHDGQTRDKTILAKIMGNVPELRQKAKEIGPIITEIVSEINQIPIEEQQKEIQERYPELLEVKKEKPEKQSLLPPLKNTEGKEIITRFPPAPNGYPHIGHAKAAVISEE

SEQ ID NO: 158396 - protein, 489 aa, Unknown
  Bacterial polypetide isolated from the Sargasso Sea
MSKGITSQSENYAAWYTDVVVKAGLADYGPVKGTMVIKPYGFALWELIKDSFDKMIKDTGHVNAYFPLFIPKSFLAKEADHIEGFAKECAVVTHTRLMSDQNKGIIVDPESRLDEEVIVRPTSETVIWSMYKKWIQSYRDLPLLINQWANVVRWEMRTRLFLRTTEFLWQEGHTAHESYEEAEKETLLILELYRKLAEDYLAMPVLTGLKSESEKFAGADKTYCIEAMMKDKRALQAGTSHNLGQNFAKAFDVTFQSKDNKEEFVYATSWGVSTRLVGGVIMTHGDEKGLRLPPNIAPHQVVLVPIFKNEDEMNAIKDYINPVLNELRESRIRVHEDWRKESPGFKFNEWEVKGAPLRLEIGLRDIQKNSTMVFRRDTGEKNEVDKNDLVKQIPELLDKIQSSLFNQALKFRKNNTHTVSSYDEFKKIIENNDGFVRCGWDGDIETEEAIKNETKATIRVIPFDEKPKNLVCIYSGKPAMHEVIFAKAY

SEQ ID NO: 158397 - protein, 572 aa, Unknown
  Bacterial polypetide isolated from the Sargasso Sea
MNDEEIKSEIRKFALQNAVEHEGQTRDKTILAKIMGNVPELRQKAKEIGPIITEVVSEINQISLEEQQKEIEEKYPELLEVKKEKPQKESLLPALKNTEGKEIITRFPPAPNGYPHIGHAKAAVISEEYAKMHGGKLILRFEDTNPGTERLEYYAAIKVGMDWLGIKYDSVEHVSDNLDILYKKADQIIKSNDAYVCTCSQDSISKDRREMIECSCTKQSVEENEKLWHKMHDEKGFKEGQALLRFRGNMQSGNTTMRDPALFRINTKRHARQEQKYKVWPTYDFAGIIFDSISKVSHAMRSKEFELRKELHHTILDKLGMEKSEFIFFGRLDLEGMPVSKSALKPLIENGKVPWYDDPRLPTLEGLRRRGIRPEAVKKFVLSLGLTKNDTVSPFASLEAFNKKIIDSESIRLHMVRKPKEMKVTNLPSNELELPNHPTIDLGKRTVTVNDSVMIDGDDANELKKGESIRLLGIGIFKIVEDGSNLTAEFISENAENIEKKIQWVAGEPIKLKIIVPDQLFFGETFNEDSLKEIEGYVEQAYLELKDGDEIQFIRFGYCRKESTHQVIFTHK

SEQ ID NO: 158398 - protein, 593 aa, Unknown
  Bacterial polypetide isolated from the Sargasso Sea
MNIFYYDIAVGLPLRQCFTYKSKEVIKKGKRVIVPFGSKSIVGIVVKKIAKPKSLKGLKEIISIADEHSCFNGSIFEAITWASDYYHHPIGEVFFSFMPTLLRKQNDKIIIDLDDNTEYKLNEEDKKLKLTKEQNINLSKLNKVEKFSPSLIYGVTGSGKTEIYLQLAEKFILQNKSILILVPEINLIPQLEKRFKDRFNGDIGVYHSRQTPNQRLKVWLRSKFGGIRIVIGTRSSVLMPLKNLGAIIIDEEHDQSYKQAEGFKFSGRDLAIKRAQIENIPVFLGSATPSLQTLKLVKEKKFKKFDLLRRVDGKKPPKLIPLDISDSPLLGGIAIQTMSIIEAAINKGEQVLIFLNRRGFAPLYECDNCGWVAKCSSCESNLVFHKSKNRLICHKCESVYGVNKTCPDCHSNEINTLGTGTERVEEVLRSTFKKVPIIRMDYDSTRLKGSIEAIYEKANTSKEAILVGTQMLSKGHDFPKVTLCVILNADGGLLSPEINAIEKISQQLIQVSGRAGRNNNLAKVIIQTRYPNDENLKQIKTGDYRLVSEQCLKTNKALNMPPYSTVAILRATSPSPESCYKFLDKANNLLNDK

SEQ ID NO: 158399 - protein, 279 aa, Unknown
  Bacterial polypetide isolated from the Sargasso Sea
WFKKMKPDEFIRLSSIMTVARMLERDDFKKRYENNKPISLHEFLYPLVQGFDSYALKADIELGGTDQKFNLLVGREVQKHFGQDEQVIITVPLLEGLDGVKKMSKSLNNYIALNDEPNEMFGKIMSISDNLMWRYFDLLSFRSNNEIASFRDKVKNGENPMTFKKKLATEIVERFYDKKSSENAEIAFTNVFSNKLEPSEVPIFEINETSSISIVELLTHEDLGNEFIQSKSECRRLIKQSGIKMNNKKVENPDLLINLGEENYFQIGKRKHLKIKLVS

SEQ ID NO: 158400 - protein, 335 aa, Unknown
  Bacterial polypetide isolated from the Sargasso Sea
MNIKNIKSEFPIFKQKINGKPLIYLDSANSSQKPKAVINRMSNFYETEFSNVGRSVHSLAVKATNRFEESRDKVQKYLNAKHREEIIFTKSATESINLIASSFGEKFIKSGDEILTTELEHHSNYVPWHFIRQKKGAKIKFAPVNDRGEVEIDEIKKLINSKTKIIAITHISNVTGAIMPIKKIVDLAKDKNIPVLVDGTQGAPHLKIDIQELDCDFYAISCHKMYGPNGLGILYAKKKWLDELPPYQGGGGMISEVMKDKVSFADSPTKFEAGTLQTAEVVAFSEAINFIEKLGIKNIQNHENEILEYGIEKLKKNNSVNIIGDPKERGSVMSL

SEQ ID NO: 158401 - protein, 204 aa, Unknown
  Bacterial polypetide isolated from the Sargasso Sea
MKNGFQTSAAWAWMDTVKQMQSGAYIAAGTTLGIASVTMMISTQNVIVTLYAIFSILTILVTTIAGVVSMGWTLGFLEGICFVILIGLSVDYVVHIGHAYAHAARHEGVTRRECARAALGVMGFPVLSAAFTTLCAALALLQATIEFFTKFGTIVVLSSIFSSIVAVVLFIALLATIGPTDGWGDVTRLCGRKRLLSDSKSISY

SEQ ID NO: 158402 - protein, 749 aa, Unknown
  Bacterial polypetide isolated from the Sargasso Sea
ICTFLNSLKSDVNLPYDAIVTNCNAPMKSQGLEKILKLLILFQISGILFGNERLYLKKANLLESSLLEGKNVKLISGDVVFTKGNLNLYCQEGRQYEIDGLAILYNEVSAVQEDMNLTCDTIKFYSKDDQLLSVGNSHVWDDDYDLMADTIIVFTNIDSGIASGNVTLVQKGQIINANRIEYKKDKSQDGVSYKAIGNVIIKDSTRVATCGLAKYDRDNERTILELEPEIKENNRLLAGTKITLAYEREKLKKLYIPKNAYAITPIRGYQASLIDSNQVGDSLRFNDEMEGTSLLGFFEDGKLDSLRIEGMAKTLYHIFEDSIYQGKNNASGDTIAISFYDNDLSTINIIGGSEGKYIPDSLSDGNEYPVTYKASRIKYHLQNDESDFDGNVNIKHDGTSLDAGFVNVNWKTNMLNALPRMSGDTLSELIPPLIKEAGRDPMTGDAMTYNLKTKKGRVSKGETKADDGYYTGKRIRNESREAFFIENSTYTTCDHDTAHFHFESSKMKIIQNDVVVAKPIILHIGQIPIFGIPLGIFPHKGGQRHSGWIMPSYGDNKNRGQYIQGLGFYWAPNDYWDSKFTLGFGDKQGTTFRINTQYRLRYKFNGSLNFFNRQYLSGTNNIMDLTESRNTSTTLRWTHKQELRNNQSLNANVTYSTSGDYNKRYGLSEAERMDQKAISNISYSKRWPKTKNSFSANYYSNIDLLVSDKTNPLSNYFISPNRDGTQINTSNKTFPKFSFRHGQSNLFPT

SEQ ID NO: 158403 - protein, 299 aa, Unknown
  Bacterial polypetide isolated from the Sargasso Sea
MSKENLELLTRGTEEIIPEESFLEQIKSKRKLRVKAGFDPTSPDLHLGHTVLLNKMKIFQDLGHEVIFLIGDFTGLVGDPSGVNETRPVLTQDQLDKNAETYKEQVFKILDPKKTEIRFNSEWMKQVDPSEFIKMLSSYTVARMLERDDFSKRYKSQQPISIHEFLYPILQGFDSVKLEADIELGGTDQKFNLLLGREVQKHYGCNQQSIVTVPLLEGLDGVKKMSKSLGNYVALEDSPDNMFGKIMSISDDLMWRYFSLLSFKSSEEISNLKEEIKEGANPRDIKFLLAEEIVERFNN

SEQ ID NO: 158404 - protein, 212 aa, Unknown
  Bacterial polypetide isolated from the Sargasso Sea
MTLSKTYDPHSFESEIYKRWEEKGVFRADNTSKAPAFTISMPPPNATGQLHVGHAVMLALEDILIRWHRMKGDEALWLPGTDHAAIATENVVLNQIRNEEGIQDPRETLGREEVLRRIAAYVENSRGTIRNQVKAMGSSCDWSRERYTMDPQLNRCVNESFVRMYEEGLIYRGPRIVNWDPKLKTNVSDDEVERKKTRSPFYTFQYGSFSDR

SEQ ID NO: 158405 - protein, 206 aa, Unknown
  Bacterial polypetide isolated from the Sargasso Sea
HAVYWPAFLLAAKLPLPKKIYGHGWILSGEEKMSKSKGNILDPIEIINQYGLDPLRYYLIKEVSFGNDGNISQERLEDCINSDLANNFGNLCQRVTAFAIKNCDGKIPEKVHFENDDLEILDKFKDNLNLIRNKIDAQDINFYINFIVNLLFETNKYFNDQEPWNKKENILRLNTIVYTTLEIVRKISFMLYPIIPESSLNALKIF

SEQ ID NO: 158406 - protein, 250 aa, Unknown
  Bacterial polypetide isolated from the Sargasso Sea
KDILRFHAIYWPAFLLAADIEPPKRVFGHGWILSGDEKMSKSKGNILDPLEIIENYGLDPLRYYLIKEVSFGNDGNISQEKLESCINSDLANNYGNLCQRVLAFCDKNANLEVPEVDNLTEDDKIILDQYSKYYDDLVKYSDNQDVNSYINFIVEQLFSANKYFNDQEPWKKKNDKLRMNTIIYVSLELIRKVTILLYPIIPSSSLKVLGIFGIKEEKINFVTIKENNYLKKGLKLSKLDILFKKIEKND

SEQ ID NO: 158407 - protein, 234 aa, Unknown
  Bacterial polypetide isolated from the Sargasso Sea
AADIEPPKRVFGHGWILSGDEKMSKSKGNILDPLEIIDKYGLDPLRYYLIKEVSFGNDGNISQEKLESCINSDLANNYGNLCQRVLAFCDKNANFEVPDTVTFTDDDKLALDQYSKHYDNLIKYSDNQDVNLYINFIVEQLFAANKYFNDQEPWKKKNDKLRMNTIIYVALELIRKVTILLYPIIPSSSLKVLEIFSIKEDKINFETIKDNNYLKKGHKLIKLDILFKKIEKND

SEQ ID NO: 158408 - protein, 295 aa, Unknown
  Bacterial polypetide isolated from the Sargasso Sea
MDLWVIPMLWILGATSSMSPQINSHWATDESRHKSLYPADLRPQAHEIIRTWAFYTIAKSYLHEDQIPWHNIAISGWVVNPDKTKMSKSKGNSVTPEDLIEKYGADALRYWSARARLGVDTIFDESVFKVGLRLVTKLVNVSKFVVMQFEQAGLKLSDVKDINLTDIDKSWLAGFSELLISSKKDFANFKYSEVLHNTEHKFWDFCDNYVELVKTRSYQQHDQDIGKSALFALYTSLSILIRLFAPFMPFVTEQVSGWLDLSSNIANKKYNQIDNQKDKSVHLMPWPDNSDFGLK

SEQ ID NO: 158409 - protein, 224 aa, Unknown
  Bacterial polypetide isolated from the Sargasso Sea
GHGWILSGEEKMSKSKGNILDPIEIIEEYGLDPLRYYLIKEVSFGNDGNISQDRLEDCINSDLANNYGNLCQRVTAFTIKNCDGKIPLEVKFIDEDLLILNKYKDNLDNIRSQIDNQNINFYIDYIVSSLFEANKYFNDQEPWKKKDDIIRLNTIVYTTLEIVRKISFLLYPIIPKSSLKALKIFDIEEKDIKLVTVSNNDYLTKGNNINKIDILFKKIEKNND

SEQ ID NO: 158410 - protein, 250 aa, Unknown
  Bacterial polypetide isolated from the Sargasso Sea
LEREDFTKRFQGGVPISIHEFLYPLMQGYDSVALNADLELGGTDQKFNLLVGRELQKQYGQEQQCILTMPLLEGLDGVEKMSKSKGNYVGISEHPNDMFGKLMSISDTLMWRYFELLSFRPMDEIAGFKREIEGGRNPRDFKVLLAQEIVARFHSQADAERALEDFNHRAKGGVPDDIPSVTLAGAPLAIGQLLKQAGLVPSTSEALRNIEQGGVKIDGATVSDKGLKVEAGEFVVQVGKRRFARVTLTA

SEQ ID NO: 158411 - protein, 236 aa, Unknown
  Bacterial polypetide isolated from the Sargasso Sea
MAANIKLPSKVYGHGWILSGDEKMSKSKGNILDPLEIIEKYGLDPLRYYLVKEVSFGNDGNISQEKLEDCINSDLANNYGNLCQRTIAFALKNCDKKIPEEIIFNKEDRKILDNFSNNLEKIRSEIDKQNINYYINFIVNGLFAANKYFNDQEPWKKKDDPIRLNTIVYTTLEIIRKLSFMLYPIIPESSLKALKIFGINESEIKLSSISDHNFLKPASNIDSIDILFKKIEKKDD

SEQ ID NO: 158412 - protein, 245 aa, Unknown
  Bacterial polypetide isolated from the Sargasso Sea
KDILRFHAIYWPAFLMAANIPLPKRIYGHGWILSDDKKMSKSLGNILDPIEIINNFGVDQLRYYLSKEVSLGNDGNISLKNLTDCINNDLANNYGNLCQRVFAFINKNCDSKIPTLNKVEKEDKKLNDEIINSLSDLRNLIDNQELNQYLKKVINISFNANKYFNDQKPWSLKEKNPERMNTILYTILNQIRSISILLNPIIPIATEKVLSTLSIEMTSINLESLKNIKILKPGIKLKKTDILFK

SEQ ID NO: 158413 - protein, 293 aa, Unknown
  Bacterial polypetide isolated from the Sargasso Sea
NATGIALDSTIVLNFNENVDVESGNITIKKTADNSTVETIDVTSEQVEGSGTSQITVTPASDFDSATEYYVLIDATAFDDSGSASYAGITSTTALSFTSTNPVPTLSSSVPADNATGVAVDSTIVLNFSENVDVESGNITIKKTSDNSTVETIDVTSGQVTGSGTSQITVTPSSDFDTGTEYYVLIDATAFDDSDSGSYAGISSTTALSFTSTNPVPTLSSSVPADNATGVAVDSTIVLNFSENVDVESGNITIKKTSDNSIFETIDVTSGQVTDSGTSQITITPSSDFDSGT

SEQ ID NO: 158414 - protein, 278 aa, Unknown
  Bacterial polypetide isolated from the Sargasso Sea
MEYLFPVWYPLDSEGEILYDNPMYATPNQLPVDPLTQCPDGYKDDQRNQPNGFTGDPDVMDTWATSSLTPQIMSHWGADNNRHESVFPMDIRPQSHEIIRTWAFYTIVKAWIHEAKIPWHHVVISGWVLDPDRKKMSKSKGNVVTPDHLLDEHSADAIRYWACKARLGADTAFDDSIFAIGKKCITKLFNASKFVLMQVEGVGIVSVDDISEPVDRDWMQHVNQCVERSTKAFEQFDYAAALESTESLFWVFCDHYIELVKTRAYKEEDIVKRKSACA

SEQ ID NO: 158415 - protein, 233 aa, Unknown
  Bacterial polypetide isolated from the Sargasso Sea
KLPLPKRVFGHGWILSDEKKMSKSLGNILDPIDIINNYGVDQLRYYLVKEVSLGNDGSISMDNLKNCINNDLANNYGNLCQRVFSFIKKNCENKIPYNSNLNEKDKKLLNNLKDNLPKLINMMNNQELNEYIKTVVNFSFDANKYFNDSEPWAVKNTDLKRMNAILFTISQQIKNISILLSPIIPNASTKVLHAMNIEEKDISIEKIKDDNIFDHKKNLKDLNILFTKIDYDN

SEQ ID NO: 158416 - protein, 292 aa, Unknown
  Bacterial polypetide isolated from the Sargasso Sea
FEQAALVLDRDKTEIRYNSEWSMPLGADGMIKLASRYTVARILEREDFTKRFQGGVPISIHEFLYPLMQGYDSVALNADLELGGTDQKFNLLVGRELQKQYGQEQQCILTMPLLEGLDGVEKMSKSKGNYVGISEHPNDMFGKLMSISDTLMWRYFELLSFRPMDEIAGFKREIEGGRNPRDFKVLLAQEIVARFHSQADAERALEDFNHRAKGGVPDDIPSVTLAGAPLAIGQLLKQAGLVPSTSEALRNIEQGGVKIDGATVSDKGLKVEAGEFVVQVGKRRFARVTLTA

SEQ ID NO: 158417 - protein, 231 aa, Unknown
  Bacterial polypetide isolated from the Sargasso Sea
ELPKKVYGHGWILSNEEKMSKSKGNILDPLKIIEEYGLDPLRYYLIKEVSFGNDGNISQDRLENCINSDLANNYGNLCQRVIAFVIKNCDGKIPSKIKFQPDDLEILNKYKENLDIIRSKINEQNINFYIDFIVNSLFEANKYFNDQEPWKKKSDLTRLNTIVYTTLEIVRKITFLLYPIIPETSLRALKIFNLSEKDIKFKTIPNNEFIIKGNMINKIDILIKKIEKKND

SEQ ID NO: 158418 - protein, 295 aa, Unknown
  Bacterial polypetide isolated from the Sargasso Sea
KDKDIEFEISDDINRAHFSSSSPLKLAKFFKTNPVELAKDISAKINHKAISKYSVEGAGFINIFINKNYIADEVKKVLKYNEEWGKKKLKKERVLVEFVSSNPTGPLHIGHARGAVLGNIISNLLSNQGHEVTKEYYVNDAGRQINILALSIMLETFQNKINKEGLYQGSYIKDLAKKFMEAKLVDEINNPLDKFSDDPDERIDQLISHYKKDSPKTWIQIRYFSVNEMIKLIKNDLLRMGILHDEWFYESSLGSIEKKGSSVTKALDELVKSKNTFEKDGAIWFEGTKYGDDKD

SEQ ID NO: 158419 - protein, 231 aa, Unknown
  Bacterial polypetide isolated from the Sargasso Sea
MCLKKFFGHGWILSDDKKMSKSLGNILDPLEIIDKYGIDQLRYYLVKEVSLGNDGSISLENLKNCINNDLANNYGNLCQRVFSFIKKNCDNKIPINSKLNKSDKKLLDNLKNSVPELISLMNNQELNEYIKKVVSFSFDANKYFNDSEPWAVKKKDPERMNAILFTIVEQIKNISILLNPIIPNATNKVLNMINIPVENIRIDKIKDENILNNKKELGNLEILFTKIEDDN

SEQ ID NO: 158420 - protein, 267 aa, Unknown
  Bacterial polypetide isolated from the Sargasso Sea
MDGAFVEGVHPELDGKYVKDCDDIIINNLTDSNKLYREKMYLHDYPHCWRTGHPLLYYGMESWFVRMTAVKEKLLEFNDQVEWAPDWVGEGRFGEWLRNVKDWAISRERFWGTPLPVWRSEDGDMKCIGSIEELQKEVEKANSSGIENPVCPDDVDLHRPIVDDFVLISESGSVMRREPFVMDCWFDSGCAFFAQWHYPFENEDKITDAFPIDYICEGVDQTRGWFYTLLAVSTTVFDSICYKRCLSLGLILDKDGKKMSKSKGNVV

SEQ ID NO: 158421 - protein, 228 aa, Unknown
  Bacterial polypetide isolated from the Sargasso Sea
PPKRVFGHGWILSGDEKMSKSKGNILNPIEIIDVYGIDEMRYYLMKEVSHGSDGNISIKSLKNCINSDLANNYGNLCQRVFSFIKNNCNNSVTKKGEYSENDKKFIRETNNLTKNLRELINNQNLNNYMKSVINISFLTNKYINDEEPWKLKKNNLDKMNIILHLALEQIAKISILLNPIIPKSTTKVLDALNINSKERNYSFLDGSKIIPDKISISSLNILFKKIDQ

SEQ ID NO: 158422 - protein, 261 aa, Unknown
  Bacterial polypetide isolated from the Sargasso Sea
FWPASIHLIGKDILRLFAVYWPAFLLAAKIDLPKKVYGHGWILSGDEKMSKSKGNILDPIEIINKYGLDSLRYYLIKEVSFGNDGNISQERLEDCINSDLANNFGNLCQRVTAFAIKNCDSKIPKQIEFNEDDHKILNNYKDNIELIREKIDNQDINFYINFIVNSLFEANKYFNDQEPWNKKEDLLRLNTIVFTTLEIVRKVSFLLYPIIPESSIKALKIFGINEGDINLSSIENNVFLSKVDKINKIDILFKKIEKKDD

SEQ ID NO: 158423 - protein, 198 aa, Unknown
  Bacterial polypetide isolated from the Sargasso Sea
MQIIWLHNGYVTFNSEKMSKSLGNIVTIEKMRKKINGQVIRLALLSSHYKQPLDWNENLIEESQSTLDKWYTQFDDTKEDVLNQDLLRPLLEDLNTPGYIANLHSLYDKASKGDSSSKKLFLSGCKLIGLLEEDLNEWIKFKKIRSKIDEKTIENKIKDRGQARKKGDFKLADNIRKELESSGVIIEDKGNKTIWKYK

SEQ ID NO: 158424 - protein, 238 aa, Unknown
  Bacterial polypetide isolated from the Sargasso Sea
FLLAAKIELPNKIYSHGWILSNEEKMSKSKGNILDPIEIINRYGLDPLRYYLIKEVSFGNDGNISEERLENCINSDLANNYGNLCQRVISFAEKNCDGKIPKDIKFSEEDNFLLDKYKKNLNLIREKIDNQDLNYYINFIVNSLFETNKYFNDQEPWNKKDDMNRLNTIVYTTLEIIRKISFMLYPIIPDSALKALKIFDIDESQIKFDSIQNHNYLVGEKKINKIGILFNKIDKKND

SEQ ID NO: 158425 - protein, 217 aa, Unknown
  Bacterial polypetide isolated from the Sargasso Sea
GDEKMSKSKGNILDPLQIIDQYGLDPLRYYLIKEVSFGNDGNISQERLEDCINSDLANNYGNLCQRVTAFAIKNCEGKIPKKIKFEEDDLIILNKFKDNLENIRSKIDQQNLNFYIEYIVNSLFEANKYFNDQEPWKKKDNIIRLNTIVFTSLEIIRKISFLLYPIIPDSSLKALKIFNLNEKDIKLKDITKNEFLIKGNDINKIDILFKKIEKNND

SEQ ID NO: 158426 - protein, 146 aa, Unknown
  Bacterial polypetide isolated from the Sargasso Sea
ILRFHAIYWPAFLMAAKLPLPKRVYGHGWILSDEKKMSKSLGNILDPLEIINEYGIDPLRYYLVKEVSLGNDGSISLKSLHDCINNDLANNYGNLCQRVFSFVEKNCDSKIPNYTNLSKEDEIITKNLIKKIPDLQNLMNKQDLNQ

SEQ ID NO: 158427 - protein, 182 aa, Unknown
  Bacterial polypetide isolated from the Sargasso Sea
MTLSKTYDPHSFESEIYKRWEDKGVFRADNTSEATPFTISMPPPNATGQLHVGHAVMLALEDILIRWHRMKGDEALWLPGTDHAAIATENVVLNQLRNEEGIQDPRETLGREEVLRRIAAYVENSRGTIRNQVKAMGSSCDWSRERYTMDPQLNRCVNESFVRMYEEGLIYRGPRIVNWDPK

SEQ ID NO: 158428 - protein, 250 aa, Unknown
  Bacterial polypetide isolated from the Sargasso Sea
MQFQPQIFDSICYNRCLSLGHILDSEGKKMSKSRGNVVNPWDHFNKEGTDAIRWYMTTQSAPWNPMNFDPNGVRETYAKMFLTLWNVHRFHLDYALLDEFNPNDKSGFIPVKERSPLDRWILSRIATVAQDYHNQFVSWDFHKAGRDLENFVINDLSNWYVRRSRRRLWDEGESKDKRACQHTLHEVLCLVSELMAPVSPFMPDRIYHDLTGTSVHLADWPVGSDLVKRSLPEQDLDLETKMSIVRSLTE

SEQ ID NO: 158429 - protein, 228 aa, Unknown
  Bacterial polypetide isolated from the Sargasso Sea
KRVYGHGWILSDEKKMSKSLGNILDPLEIIKDYGVDQLRYYLIKEVSLGNDGSISLENLKNCINNDLANNFGNLCQRVFSFIDKNCDSKIPSPDKFNTRDKELSDEIIKKISDLKYMIDNQELNSYIKEVINFSFNSNKYFNDLEPWKLKKTNKVRMNTVLYCILNQIKSISILLYPIIPSSIEKIFDTLNLKKEELNIEQIKNLNLIVPGKIIKKSNILFKKIDNDN

SEQ ID NO: 158430 - protein, 282 aa, Unknown
  Bacterial polypetide isolated from the Sargasso Sea
ELLTRGAEEIIPEESFLEQIKSKKTLRVKAGFDPTSPDLHLGHTVLLNKMKIFQDLGHEVIFLIGDFTGLVGDPSGVNETRPVLTKEQLNKNAETYKKQVFKILDPKKTEIRFNSEWMQEIDPSEFIKMLSSYTVARMLERDDFSKRYKSQQPISIHEFLYPILQGFDSVKLEADIELGGTDQKFNLLLGREVQKHYDQKQQSILTVPLLEGLDGVKKMSKSLGNYIALEDSPDDMFGKLMSISDDLMWRYFSLLSFKSDQDINSFKDEIEDGANPRDIKFI

SEQ ID NO: 158431 - protein, 237 aa, Unknown
  Bacterial polypetide isolated from the Sargasso Sea
YWPAFLLAAKIEPPKRVYGHGWILSGDEKMSKSKGNILDPLEIINVYGLDPLRYYLLKEVSFGNDGNISEEKLENCINSDLANNFGNLCQRVLSFAEKNCSSLIPDHKYNDEDLEILKPLNNPDKIRSFIDNQDINQYMSFIVDRLFAANKYFNDQEPWKKKDDKIRLNTIVYTALELIRKITILLYPVIPETSIKVLNVFNEKEYSINLVSLNDNEVLKKDLKINKLKILFKKIEK

SEQ ID NO: 158432 - protein, 215 aa, Unknown
  Bacterial polypetide isolated from the Sargasso Sea
GNNPANYWIHTNMLTLNGKKMSKSLGNSVFPNEIFYGSNKAFSKKFSPMTLKFFMYQAHYRNTLDISNDALLAAEKGFQKIKNLNEEISTIYESKKNDFNASAWVNECYEALNDDFNSPKLIAKLFDLHKTVSEIKNKTKSIDSKNKKILLKFYKIFYAEILGLDDDSSSNEKFDEILELILELREKERLSKNYDKSDYIRDKLNELGLKINDKI

SEQ ID NO: 158433 - protein, 250 aa, Unknown
  Bacterial polypetide isolated from the Sargasso Sea
RDDFSKRYKSQQPISLHEFLYPILQGFDSVKVEADIELGGTDQKFNLLLGREVQKHYGQEQQSILTVPLLEGLDGVKKMSKSLGNYIALEDSPDDMFGKVMSISDDLMWRYFSLLSFKSSEQISEYKRDIEEGSNPRDTKFLLAEEIVDRFHEGLGKKSKENFINRFQKGNISQDLEEVVVTIESESELLTRILKESNLVKSTSEALRLIKQSAIKVNDEKVSDTKFMLKKGTSNLVLVGKKKAAKIIIN

SEQ ID NO: 158434 - protein, 55 aa, Unknown
  Bacterial polypetide isolated from the Sargasso Sea
TKFQGYAFGIGIDRLAMLKYGINDLRAFFDCDYRWLNHFGFDPLDVPTNYRGLSR

SEQ ID NO: 158435 - protein, 173 aa, Unknown
  Bacterial polypetide isolated from the Sargasso Sea
MQGYDSVALNADLELGGTDQKFNLLVGRELQKQYGQEQQCILTMPLLEGLDGVEKMSKSKGNYVGISEHPNDMFGKLMSISDTLMWRYFELLSFRPMDEIAGFKREIEGGRNPRDFKVLLAQEIVARFHSQADAERALEDFNHRAKGGVPDDIPSVTLAGAPLAIGQLLKQAG

SEQ ID NO: 158436 - protein, 131 aa, Unknown
  Bacterial polypetide isolated from the Sargasso Sea
TITKAWMHEIKIPGKNVQISGWFLDPDRKKMSKSKGNVVTPDHLLDDYSSDAVRYWSAKARLGADTAFDESIFIIGKKLVTKVFNASKFVMMQLGDKPDQTHQLQSITVPIDLGYMSKLKEMLEKATQALK

SEQ ID NO: 158437 - protein, 234 aa, Unknown
  Bacterial polypetide isolated from the Sargasso Sea
AANIPPPKRIYGHGWILSGEEKMSKSKGNILDPIEIINVYGLDSLRYYLLKEVSFGNDGNISKDKLISCINSDLANNFGNLCQRVLTFTEKNLELKIPTIDLLDKDDLTILNNFSENYENLIDYINKQNINSYMNFIVDQMFIANKYFNDQEPWKKKDDLKRLKSIIYTSLELIRKISILLYPVIPQSSLKALSIFKIIEEEIKIETIKNNNFLKPGAGINKIDILFNKVISDD

SEQ ID NO: 158438 - protein, 176 aa, Unknown
  Bacterial polypetide isolated from the Sargasso Sea
GVKKMSKSLGNYIALEDSPDDMFGKIMSISDDLMWRYFSLLSFKSSEEISNLKEEIKEGANPRDIKFLLAEEIVERFNNGVGSKSKENFINRFQKGNISQELDEINFEISENSELLTRVLKESELLRSTSDAIRMIKQGAIKVNDERVSDPKFLLKKGSSNLVLVGKKKAARINIK

SEQ ID NO: 158439 - protein, 205 aa, Unknown
  Bacterial polypetide isolated from the Sargasso Sea
MTSIAKTYEPKEFEKQISELWESAGAFKANAFSEKPTFAISMPPPNATGQLHVGHAVMLVLEDIFIRWHRMMGYETLWLPGTDHAAIATENVVLQQIKEQEGIADPRSELGRDEILKRIADYVKNSQGTIRSQVKAMGSSCDWSRERYTMDHQLNRCVNETFMRMYKDNLIYRGPRIVNWDPNLKTNVSDDEVERKSTKSPFYTF

SEQ ID NO: 158440 - protein, 270 aa, Unknown
  Bacterial polypetide isolated from the Sargasso Sea
KKWLLEKSSQIDWHPSFMSKRFENWTENLNMDWCISRQRFFGVPFPVWYKLDENSEPNYNNPIFPDVSELPIDPSEDTPKEFEENQRGEPNGFIGEKDVFDTWFTSSMTPQIGGKWGTSEDFFDKILPYDIRPQSHEIIRTWAFYTVVKSVLHHNEIPWKNVIISGWVLDPDRKKMSKSKGNVVVPNDLIEEYSADAVRYWSANARLGADTANDEQVFKVGKKLVVKIFNASKYVLNNYHEVDILDKSNIKNPLDISIVIIFNSYLQKIS

SEQ ID NO: 158441 - protein, 246 aa, Unknown
  Bacterial polypetide isolated from the Sargasso Sea
FHAIYWPAFLMAANLPLPKKIYGHGWILSGDEKMSKSKGNILDPLEIIDIYGLDPLRYYLIKEVSFGNDGNISKKRLEECINSDLANNFGNLCQRVVAFVEKNLNSQIPNQIDFNKDDLRILDNFKLNVEKIRSFIDNHNINSYIDFIVKSLFEANKYFNDQEPWKKKNNKIRLNTIIYTSLEIIRKISIMLFPIIPSSSLKALKIFDISEKDLSFDTIKNHNYLNNKKKINNIGILFKKIEKKND

SEQ ID NO: 158442 - protein, 150 aa, Unknown
  Bacterial polypetide isolated from the Sargasso Sea
MQKLSKKYNITEAESEIQSNWSNYKLYKWDSSKARQDNYVIDTPPPTVSGILHMGHIFSYTQTDFIARFKRMQGYNVFYPMGFDDNGLPTERLVEKIKKISATKMPRQEFIEHCKEVVSNAEESFRDLFKSMGISYDWDLEYQTISDTTK

SEQ ID NO: 158443 - protein, 246 aa, Unknown
  Bacterial polypetide isolated from the Sargasso Sea
KDILRFHAIYWPAFLLAANIKPPRRVYGHGWILSGEEKMSKSKGNILDPLEIINTYGLDPLRYYLLKEVSFGNDGNISEEKLESCINSDLANNFGNLCQRVLSFGEKNCSSTITDYKFTKEDLIILESLTDIEKIRAFIDIQDINQYMSFIVDRLFASNKYFNDQEPWKKKNDKLRLNTIVYTALELIRKITILLYPVMPQTSIKVLNIFNIKEDQIDFSSLKNNEIIKKGIKINKLDILFKKILK

SEQ ID NO: 158444 - protein, 63 aa, Unknown
  Bacterial polypetide isolated from the Sargasso Sea
LKNVKVDPAKYQGYAFGIGIDRLAMLKYGINDLRAFFDCDYRWLNHFGFDPLDVPTNYRGLSR

SEQ ID NO: 158445 - protein, 258 aa, Unknown
  Bacterial polypetide isolated from the Sargasso Sea
MSKENLELLTRGTEEIIPEENFLEQIKSKRKLRVKAGFDPTSPDLHLGHTVLLNKMKIFQDLGHEVIFLIGDFTGLVGDPSGVNETRPVLTQDQLDKNAETYKEQVFKILDPNKTEIRFNSEWMNQVDPSEFIKMLSSYTVARMLERDDFSKRYKSHQPISIHEFLYPILQGFDSVKLEADVELGGTDQKFNLLLGREVQKYYGCNQQSIMTVPLLEGLDGVKKMSKSLGNYVALEDSPDDMFGKIMSISDDLMWRYF

SEQ ID NO: 158446 - protein, 241 aa, Unknown
  Bacterial polypetide isolated from the Sargasso Sea
EISAVYWPAFLMAANITPPKRVYGHGWILSGEEKMSKSKGNILDPLEIINIYGLDSLRYYLLKEVSFGNDGSISEEKLENCINSDLANNFGNLCQRVLSFAEKNCSSFIPDHKFNNDDLIILNSITDIDKIRSFIDNQDINRYMGFIIDRLFASNKYFNDQEPWKKKDDKQRLNTIVYTAIELIRKITILLYPVMPQTTVKILNSFNIYEDELNLTSLQNNESLKKNDKINKLDILFKKIQ

SEQ ID NO: 158447 - protein, 259 aa, Unknown
  Bacterial polypetide isolated from the Sargasso Sea
MLSSYTVARMLERDDFSKRYKSQQPISIHEFLYPILQGFDSVKLEADIELGGTDQKFNLLLGREVQKHYGQEQQSILTVPLLEGLDGVKKMSKSLGNYIALEDSPDDMFGKVMSISDDLMWRYFSLLSFKSSEQISEYKRDIEEGSNPRDTKFLLAEEIVDRFHEGLGKKSKENFINRFQKGNISQDLEEVVVTIESESELLTRILKESNLLKSTSEALRLIKQSAIKVNDEKVSDTKFMLKKGTSNLVLVGKKKAAKI

SEQ ID NO: 158448 - protein, 177 aa, Unknown
  Bacterial polypetide isolated from the Sargasso Sea
MLERDDFDKRFKIEKKPIAIHEFLYPLLQAKDSVELKADVELGGTDQKFNLLLGRKLQEDHQIDPQVCIMMPILEGLDGVKKMSKSLGNYISISDEPNDMFGKVMSISDDLMWRYFELLSFREQDDISALKDKCLQNKSNPRDAKIELAHELITRFHGQKNADKAKENFINRFQNKN

SEQ ID NO: 158449 - protein, 375 aa, Unknown
  Bacterial polypetide isolated from the Sargasso Sea
MQLAVRNEIPFDTVYLHGLVRDAKGKKMSKSTGNVVDPIDIIDEYGADALRFTNASMASIGGVLKLDTQRIAGYRNFGTKLWNAARFASLNEANFGLSVPAAKETVNRWIVGETVKTLNEVNIAFDQFRFNDAAQALYSFVWGTVCDWYVELSKPLLNSDDPTIKNETRQTMGWVIDHCLILLHPIMPFITEELWETLSKRNEMLVHCDWPEYDSALIDHAADQEMNWVVNLIESIRSARAQLRVPAGLKIPMIFLEMDSEAKQAWENNSEMIQKLARITELTRADKIPKGSIAISAKGAGFALPLEDIIDVEEEKKRLSKSLDKLQKEISALKGRLQNSKFIESAPEEVILETQENLVLREEEEANLSSAASQL

SEQ ID NO: 158450 - protein, 233 aa, Unknown
  Bacterial polypetide isolated from the Sargasso Sea
KIPLPRKVYGHGWILSGEEKMSKSKGNILDPIEIIKEYGLDPLRYYLIKEVSFGNDGNISQERLEDCINSDLANNFGNLCQRVTTFGIKNCNGKVPNNTEFTDEDIKILDNFKINLNVIREKIDKQDINFYINFIVNAMFEANKYFNDQEPWKKKDDLKRLNTIVYTTLEIIRKISFMLYPIIPDSSLKALKIFDLNEEDIKFSTLDNHKYLKPENNINEIKILFKKIEKKDD

SEQ ID NO: 158451 - protein, 413 aa, Unknown
  Bacterial polypetide isolated from the Sargasso Sea
MSTEPSSKPVFPITDEVRHALAVTKRGVDELLVEEEFAQKLARSAATGTPLRIKLGLDPTAPDIHIGHTVVLNKMRQLQDLGHTVIFLIGDFTSLIGDPSGRNATRPPLTREQIESNAKTYFEQAALVLDRDKTEIRYNSEWSMPLGADGMIKLASRYTVARILEREDFTKRFQGGVPISIHEFLYPLMQGYDSVALNADLELGGTDQKFNLLVGRELQKQYGQEQQCILTMPLLEGLDGVEKMSKSKGNYVGISEHPNDMFGKLMSISDTLMWRYFELLSFRPMDEIAGFKREIEGGRNPRDFKVLLAQEIVARFHSQADAERALEDFNHRAKGGVPDDIPSVTLAGAPLAIGQLLKQAGLVPSTSEALRNIEQGGVKIDGATVSDKGLKVEAGEFVVQVGKRRFARVTLTA

SEQ ID NO: 158452 - protein, 769 aa, Unknown
  Bacterial polypetide isolated from the Sargasso Sea
MDPKITEKAWEPELEEAILKKWDDEKLYDFKLQDENYTIDTPPPYPSGRPWHIGAASHYAQIDMIARTARMNGKNVYFPIGIDRNGLPVELYTEKKHGIRMRETERGEFLNLCKNALDDLEAEMIQIMKSLGLSGDFKNYYRTDSEEYRKFTQETFIDLWKKGVIYLATRPNNYDWVSGTTIADAEIVYDDLPTKLVYMKFIVKDEQKEIIIASTRPELLCACKTVIVNPDDERYSNLIGKNLIVPLTNKEVKITPHHSAKIEFGSGAVMVCSYGDQNDVALFRELQLEEVIAIGLDGRMTEAAGDYQGLKPKQARTKIIEDLENANLVDKIEEISHRTPLSERSKIPIEIVPMEEYYLKQKESIEKMKKLGSEIEFYPNMHKQILMNWLESISIDWPISRRRFYGTEIPIWYCNECSEPFVPEPGKYYRPWKDSCPAQKCEKCGNTKFTGEDRTFDTWMDSSVSPLFVTKFNRDDEFFKKTYPTGIRPQAKDIVRTWLYYTLLRCEKLTGEKPWSEAWIMGYGLDEKGMKMSKSKGNAIDPLPVIQKSGADTFRFWSASEINQGYDFRCSEQKIESTKKFLSKLWNVSRFLSSFPIIESGKLTDSDKWILSELDKLISVCNEGYSKYNFFIPATALREFTWNIFAAQYIEMAKARAYGIGFDDDERDGAIFTLHKVLSTILKLLAPITPFITEHLWQTLYSKNSIHKEQLPKIENIEDMTNMTQVIVEFNSKVWNEKKQNNLSLKDSIKIDIPENLNQFKKDLIAMHN

SEQ ID NO: 158453 - protein, 690 aa, Unknown
  Bacterial polypetide isolated from the Sargasso Sea
MEPKITEKAWEPKLEDAILKKWDDDKLYDFKLQDENYTIDTPPPYPSGRPWHIGAASHYSQIDMIARTARMNGKNVYFPIGIDRNGLPVELYTEKKHNIRMRETERGEFLNLCKGALDDLEAEMIQIMKSLGLSGDFKNYYRTDSEEYRKFTQETFIDLWKKGVIYLATRPNNYDWVSGTTIADAEIVYDDLPTKLVYMKFIVKDEQKEIIIASTRPELLCACKTVIVNPDDERYSDLIGKNLVVPLTNKEVKITPHHSAKIEFGSGAVMVCSYGDQNDVALFRELQLDEVIAIGLDGRMTEAAGDYQGLKPKQARTKIIEDLENANLVEKIEDISHRTPLSERSKIPIEIVPMEEYYLKQKDSIEKMKKLGSEIEFYPNMHKQILMNWLESISIDWPISRRRFYGTEIPIWYCDKCSEPFVPEPGKYYRPWKDSCPAEKCEKCGNTEFTGEDRTFDTWMDSSVSPLFVTKFNRDDEFFKKTYPTGIRPQAKDIVRTWLYYTLLRCEKLTEQKPWSEAWIMGYGLDEKGMKMSKSKGNAIDPLPVIQKSGADTFRFWSASEINQGYDFRCSEQKIESTKKFLSKLWNVSRFLSSFPIIESGKLTDSDKWILSELDKLISVCNEGYSKYNFFIPATALREFTWNIFAAQYIEMAKARAYGIGFDDDEREGAIFTLHKVLSTILKLLAPITP

SEQ ID NO: 158454 - protein, 194 aa, Unknown
  Bacterial polypetide isolated from the Sargasso Sea
SDYCNYWFHNGIVLVDKKKMSKSLGNVISVSDILEVENPIIVRIALMSAHYRQPLNWTEDTMNNSRNIYEKITSSLEIESSMTTERDDKFIDLLCDDLNTPNALQYISKQARDAKRDSRVLPKLRHNCGLLGIKSNKITIDKSLVDKIESLISLREAARKNKDYIEADRLRDLLSDMNVALSDGSDGVSWKIKQ

SEQ ID NO: 158455 - protein, 215 aa, Unknown
  Bacterial polypetide isolated from the Sargasso Sea
KIGDLKSFSKYWFHNGFVNIEGEKMSKSLGNIRLVNDLVKEFKGEVLRLTLISAHYRQPLNWTREIIKQNSIMLDRFYRNLKELEDIDAYADNNQIEDRVIEGLFNDLNTPKVIAELNILSNQIASADKKIRSKIKYNLLEVGKIIGILQENPDKWLGYKNSGNLDETTIERLIKERNEARGNKNFDLADKIRNELKEKGIEIEDTKDGTIWKSP

SEQ ID NO: 158456 - protein, 939 aa, Unknown
  Bacterial polypetide isolated from the Sargasso Sea
MKFPSINEQMDLIRRGVEEILPEEDLEKKLERSLKNNEPIIAKLGCDPSRPDLHIGHGVVLRKLRHFQDLGHTSVLVIGDFTAMIGDPSGRNKTRPQLSLDEARKNAESYVDQAKVILDINTLRIKYNSNWLNKMNFNDVVKLSSSYTVARMLERDDFTKRFKAEIPISIHEFLYPLAQAQDSVELKADVELGGTDQKFNLLVGRDLQKDNGQDPQCIITTPLLEGTDGIEKMSKSYGNDIGLQDSPEDMYGKTLSISDDMILKWFTLAADRDPSEVEAASKRLNDPSVNPMEVKRELARNVVQLFFDEETAQKAEAHFNTVVVGKGIPDEIPVYELDSEDLIVNVIFSSGLLKSKGEARRMIKQGAVRLDDKKIDDIQAYISPGDEQILKVGKKTVLEGNLMKKICLGLTCAAALNFITCTISPPGPPKLVVLLVIDQMRPDLLTRFDDLYRGGFRWLMDHGIWFTDTHHEHSYTATGPGHTAIGFGQYPGKVGAIGNSFYDRKLKKNVNCVEDPNAKTVGATFGEARSSARYNSKGLGDWLKASYPSSKVISIGGKDRAACLLTGKDPDQAIYYNHMGAFISSDYYVDQLPQWATDFNKRLKNSSYGDSLWHKSLDDDLYLQYAREDHFYGEEDNYLSEDYSPVFPIGMDDGKDPLTVLMGKPWFEREILELSAEAVKGESLGLDNIPDILSIGFSAMDWMIHSYGPYSQEVMDACIKLDRYLGNFIDFLDVQVGLENILFVLTADHGGLPLPEFLIQKGEKAGRINKKHMQEALTWIDEECEEMFGNKLYHREGGNFYLNIDRIKKANIKLDQIYDIVEKYLPEVEGIDGVAIKERIISSSNNDKLTRRMKNMINEELTPEIFPIVSSGYLYRGPYGTSHGSPYDYDTHVPLIFSRSQFKDKRDNSPRATVDIAPTIATYLNVDVPDYCDGKGIDL

SEQ ID NO: 158457 - protein, 231 aa, Unknown
  Bacterial polypetide isolated from the Sargasso Sea
CRYRPPKKSICHGWILSGDEKMSKSKGNILDPLEIIDNYGLDPLRYYLIKEVSFGNDGNISQEKLESCINSDLANNYGNLCQRVLAFCEKNANLEVPATADLTEEDKIILNQYTKYYDNLIMYSDNQDVNSYINFIVEQLFAANKYFNDQEPWKKKNDKIRMNTIIYVALELIRKVTILLYPIIPNSALKVLGLFGINEEKINFETIKENNYLKKGLKLNKLDILFKKIEK

SEQ ID NO: 158458 - protein, 182 aa, Unknown
  Bacterial polypetide isolated from the Sargasso Sea
PVGQDQVQHIEMTRDIAQRFNHHHGEIFVIPEGVIDQESAVLPGLDGRKMSKSYGNIIPLFCDSKTLRKHVMKIKTNSLEPGEPKSSEDCLLFDIYKSFASDSQISSMKKDLEDGISWGDAKNQLYELLDEQLSNYRLRYDELISDPSYLDKVLQDGAERAREVAHTNLNEIKSVTGLGSLS

SEQ ID NO: 158459 - protein, 236 aa, Unknown
  Bacterial polypetide isolated from the Sargasso Sea
LLAANIQPPKRVYGHGWILSGEEKMSKSKGNILDPIEIINSYGLDPLRYYLIKEVSFGNDGNISKDKLENCINSDLANNYGNLCQRVTAFIEKNLNSSIPKDYEFNKDDNNILDVYKKNYKSLINYVDGQDINNYVNFIQEQLFSANKYFNDQEPWKKKGDIKRLGTILYVSLELIRKISILLYPIIPSTSLKVLKTFNINEKDISIKDIQNHEILKKNTNINKISVLFKKIEKND

SEQ ID NO: 158460 - protein, 217 aa, Unknown
  Bacterial polypetide isolated from the Sargasso Sea
GWILSGDEKMSKSKGNILDPLKIINIYGLDSLRFYLLKEVSFGNDGNISEEKLENCINSNLANNFGNLCQRVLSFAEKNCSSLIPKHKFNNDDLDILNSMTSLDKIRSFIDNQDINQYMNFVVDCLFASNKYFNDQEPWRKKDDKLRLSSIVYTAIELIRKVTILLYPVIPQTSLKVLNSFNIKENEIKFSSLQNNEFLKEENKINKLDILFKKIDK

SEQ ID NO: 158461 - protein, 50 aa, Unknown
  Bacterial polypetide isolated from the Sargasso Sea
YAFGIGIDRLAMLKYGINDLRAFFDCDYRWLNHFGFDPLDVPSNYRGLSR

SEQ ID NO: 158462 - protein, 406 aa, Unknown
  Bacterial polypetide isolated from the Sargasso Sea
MIGCISRQRFFGVPIPIWYKLDSMGNPIFDEIIVPEKEVLPIDPEIDCPKGYNEIDRGAPNGFMGEKDVFDTWFTSSLTPQIVAKWGQENDEMKSMFPMDIRPQSHEIIRTWAFYTIVKSLLHNNSIPWKNVIISGWILDPDRKKMSKSKGNVITPIDTIEQYGSDAVRYWASSARLGTDTTYDENVFVIGNKLVTKLYNAAKFVLSHESYHTHELTELDSSFMGELSKLVDTVTEHYNRYQFAQGLQITEEFFWNTFTDNYLELVKKRVFNSQGDDKASAVSCLRLGLSVILRLLSPVMPTITDEIWSWCFSKEYNTVSIHESKWPTEEEFSKYKKSKFQNSLEIAIKAIRSVRQSKTSEGIGLGKPVQKMRISTNSKNFEILELISNDFSNASNCFDFEKEKNI

SEQ ID NO: 158463 - protein, 228 aa, Unknown
  Bacterial polypetide isolated from the Sargasso Sea
MIIEELNQKLREAVKKFSKEKGLDIIPKDKDIEFEISDDINRAHFSSSSPLKLAKFFKTNPVELAKDISEKINHKAISKSSVEGAGFINIFINKNYISDEVEKVLKYNEEWGKKKLKKERVLVEFVSSNPTGPLHIGHARGAVLGNIISNLLSNQGYEVTKEYYVNDAGRQINILALSIMLETFQNNINKEGLYQGDYIKDLAKKFMAAKLVNEVNNPLEKFSDDPDE

SEQ ID NO: 158464 - protein, 277 aa, Unknown
  Bacterial polypetide isolated from the Sargasso Sea
HSEWMNQVDPSEFIKMLSSYTVARMLERDDFSKRYKSQKPISIHEFLYPILQGFDSVKLEADVELGGTDQKFNLLLGREVQNHYGCNQQSIMTVPLLEGLDGVKKMSKSLGNYVALEDSPDDMFGKIMSISDDLMWRYFSLLSFKSSEEISNLKEEIKEGANPRDIKFLLAEEIVERFNNGQGSKSKENFINRFQKGNISQELDEINFEISENSELLTRVLKELELLKSTSDAIRMIKQGAIKVNDERVSDPKFLLKKGSSNLVLVGKKKVARINIK

SEQ ID NO: 158465 - protein, 178 aa, Unknown
  Bacterial polypetide isolated from the Sargasso Sea
MNKFLKEFKDRGYFYQCTNEKELSDLIDKEKIKGYIGFDCTAESLHVGSLLQIMCLRLMQKHGHRPIVLIGGGTTRIGDPSGKDKTRKILTEEEIEKNIKNIEEILKKFLDNKDQKTKPIFVNNYSWLKELNYISFLRDIGKHFTINKMLTFESVKSRLDREQSLSYMEFNYMIFTSL

SEQ ID NO: 158466 - protein, 94 aa, Unknown
  Bacterial polypetide isolated from the Sargasso Sea
MSFLETFEKRGFFKQTTHSEELKKRVESGRICAYIGFDPTADSLHVGHLIPLMGLAHLQKDGQRVIALMGGGTAMIGDPSGKTEMRMMLTEKPV

SEQ ID NO: 158467 - protein, 333 aa, Unknown
  Bacterial polypetide isolated from the Sargasso Sea
ISGYIGFDITSDSLHVGSLIQLMLLHWLDFYEHKSICLIGGGTTLIGDPSGKDETRKILSKEEINKNINSIKQIFSRFVNFNKDALIINNYDWLSKLNYIDFLREFGSKITLNRMLTFDSVRSRLDREQPLTILEFNYMLLQAYDFVYLNKNYNCILQMGGSDQWGNILSGVDLIRKINNKDAYGITSPLITNSDGSKMGKTASGAIWLNKNKISSLDFFQFWRNINDNDVSKFLYLFTKLPINEIVKLSALRNQEINEAKKILAYEVTKIVRGKDDADEALEIADNTFNSKIIDERLPNISQKELDIKNENFTILDAIEKLNLVKSRSEIKD

SEQ ID NO: 158468 - protein, 287 aa, Unknown
  Bacterial polypetide isolated from the Sargasso Sea
MIGDPSGKNKTRPALDESEIKENAKSYKKQVFKILDPKLTDVRFNSEWSNKLGAEGIIKLASQYNLARMLERDDFNKRYKSNQTIALHEFLYPLIQANDSIALKADIELGGTDQKFNLLVGRELQRAYGQEPQIVITVPILEGLDGKNKMSKSLENYVGIDESPSEMFGKIMSISDELMWRWYELLSFKSIDEINALKSDQANGKNPRDIKIDLAKELISRFHDDQSANLAESNFINQFQKKNIPDDIEELSFTISESSIPLVNLLKDCGMTSSTSEAMRMIKQGAV

SEQ ID NO: 158469 - protein, 138 aa, Unknown
  Bacterial polypetide isolated from the Sargasso Sea
MKEFLELIKRGIDEVLTEDDLVSKLKSKKQLTVKVGFDPTAPDLHLGHTVILNKMRHFQDLGHKVVFLIGDFTGRIGDPSGKNKTRPSLDKEELEKNDKTYSDQVFKILNKDLTDIRFNSEWCEDLGADGIIGLASKY

SEQ ID NO: 158470 - protein, 188 aa, Unknown
  Bacterial polypetide isolated from the Sargasso Sea
MIHTGLVGNTERKEILEDLTTRGLFQDSTDQTALKERLNEGPITLYCGFDPTADSLHLGHLVPLLTLRRFQDAGHRPIALAGGATGMVGDPSGRSEERNLLDQKELSSNVESVAAQLEAFLSFDAESKKKGTAALLVDNREWTVELNVLDFLRDVGKHVTVGTMLSKESVKTRLSSEQGLSFTEFSYM

SEQ ID NO: 158471 - protein, 235 aa, Unknown
  Bacterial polypetide isolated from the Sargasso Sea
MQAYDFLELNKKENCSLQIGGSDQWGNIVNGTELIKRYSSKQAYGLTTPLITLSSGTKMGKTESGAIWLDEKLLSSYDYWQFWRNIDDRDVIKFLKMFTDLNIEEIDKMKDEDINKLKIKLANETTTMLHGLKAAKSSEQAAREAFSGTSLGSNLPSIKVKKTDIENKMSIIDLVILSKLENSKSEIRRLIKGNAIKLNDEIISQENLIISYQLFRKNYLKLSVGKKRHLKIELS

SEQ ID NO: 158472 - protein, 298 aa, Unknown
  Bacterial polypetide isolated from the Sargasso Sea
MSKNKVSGYIGFDITSDSLHVGSLIQLMLLHWLDYYDHQSIALVGGGTTLIGDPSGKDQTRKIISKNEIDNNINNIKSTFSKFINLEKNALIINNYDWLSNLNYIDFLREFGSKITLNKMLTFESVKSRLEREQPLTILEFNYMLLQAYDFCYLNKNHNCILQMGGSDQWGNILSGVDLIKKINKKNAFGITSPLITNSDGTKMGKTADGAVWLNKEKISSLDFYQFWRNTSDSDVSKFLYLFTKIPLSEIKKLSSLKNQEINEAKKILAYEVTKIVRGKNDADEALDIANNTFNSNI

SEQ ID NO: 158473 - protein, 155 aa, Unknown
  Bacterial polypetide isolated from the Sargasso Sea
MNKFLQEFHDRGYYYQCTDNNELSKILDSKKIRAYIGFDCTAESLHVGSLLQIMCLRLLQKHGHQPIVLLGGGTTRIGDPSGKDKTRQLLDEKNIEKNIKNIEKILKIFLTTDNKNTSPIFVNNFEWLKDLNYISFLRDIGKYFTINKMLSFDSV

SEQ ID NO: 158474 - protein, 148 aa, Unknown
  Bacterial polypetide isolated from the Sargasso Sea
MKESLELIKRGIDEVLTEDDLVSKLKSKKQLTVKVGFDPTAPDLHLGHTVILNKMRHFQDLGHKVVFLIGDFTGRIGDPSGKNKTRPSLDKEELEKNAKTYSDQVFKILNKDLTDIRFNSEWCEDLGADGIIGLASKYNLGRMLERDD

SEQ ID NO: 158475 - protein, 272 aa, Unknown
  Bacterial polypetide isolated from the Sargasso Sea
LARESVRQRLARPDQGISFTEFSYALLQSQDFAVLNQRLGCTLQIGGNDQWGNITSGMDLTRRLHQAQVYGMTLPLITKADGTKFGKTEGGAIWLDPALTSPYAFYQFWLGTADEDVYRFLRYYSFMGLTEIEALEAEDAKRQGRKLAQQVLADELTELVHGKGALAAVQRISELLFSGEVARLGESDLAQLAQDGMPGWRIEGETSLVTLLVESGLANSKRIARELLAAGAISLNGEIRRDEPLTTADRLFGRYLLLRRGKKQYRLVTWLG

SEQ ID NO: 158476 - protein, 274 aa, Unknown
  Bacterial polypetide isolated from the Sargasso Sea
MSFKPNSELLTILIERGFVQNLTNQEQLDYILNREKIASYIGYDATAESLHVGHLVNIMMLRWTQKCGHTPITLMGGGTTKVGDPSFRSADRPLLSENKIINNINSLNKIFDKYLDYENVDNKAIMVNNSDWLENLNYLNFLRDIGRHFSVNRMLTFESIKSRIDREQSLSFLEFNYMILQAYDFLELHKRFGCILQMGGSDQWGNIVNGIDLTRRVIDKSVYGLTCPLLTTSSGLKMGKTQNGAVWLNANLTSPYEFWQFWRNTEDGDVVKFL

SEQ ID NO: 158477 - protein, 113 aa, Unknown
  Bacterial polypetide isolated from the Sargasso Sea
MSFLETFEERGFFKQTTHPEELKSRVESGRICAYIGFDPTADSLHVGHLIPLMGLAHLQRDGQRVIALMGGGTAMIGDPSGKTEMRKMLTEKQLEDNVGKIKPQMERFLNFSG

SEQ ID NO: 158478 - protein, 253 aa, Unknown
  Bacterial polypetide isolated from the Sargasso Sea
MIGDPSGKSDERNLLDKKVLDYNEKKLTKQFEKFLDFKSKKPNKAILVNNYNWMKKFSIIDFSRDIGKHITVNYMMAKESVKKRISKDTTQGMSFTEFTYQLIQGYDFLHLYKEMNCMLQMGGSDQWGNITTGTELIRRKENKKVFAMTCPLIKKSDGSKFGKSEEGNIWLDKEKTSVYKFYQYWLNISDEDAVNYIKVFTFLNKQEVEDLIDEHQKDKSRRLLQNKIADSITSMVHSENDLENAVKASKVLF

SEQ ID NO: 158479 - protein, 288 aa, Unknown
  Bacterial polypetide isolated from the Sargasso Sea
GFFTGLDHYDHKSIALVGGGTTLIGDPSGKDQTRKILSKEEIDKNINNIEVTFRRFINLEKKSVIINNYEWLSNLNYIDFLREFGSKITLNRMLTFDSIKNRLDREQPLTILEFNYMLLQAYDFYYLNKYHNCILQMGGSDQWGNILSGVELIRKVNKKDAFGITSPLITNSDGSKMGKTAKGAIWLNRDKISSLDFFQFWRNINDNNVSRFLHLFTKLPLSEIKKLSLLKNQEINEAKKILAYEVTKIVRGKEDADEASEIANNVFNSNIIDKRLPNISQKKMNLVN

SEQ ID NO: 158480 - protein, 246 aa, Unknown
  Bacterial polypetide isolated from the Sargasso Sea
QQTVARMMERDDFKKRYASGQSIAIHEFMYPLLQGYDSVALKADVELGGTDQKFNLLMGRELQKAEGQKPQAVIMMPLLEGLDGVKKMSKSAHNYIGVSEPANEMFGKIMSISDELMWRYFELLSFRPLAEIEQFKQDIANGANPRDTKIALAKEIIARFHDQAAAESAHQAFIDRFQKGAIPDDIPEVELAAGEGLAIANLLKDADLVGSTSDAMRMIKQGAVKMDGEKVDDSRMTLSAGTVAVF

SEQ ID NO: 158481 - protein, 217 aa, Unknown
  Bacterial polypetide isolated from the Sargasso Sea
QIGGSDQWGNIVNGVELIKRHSSKEVYGLTTPLITLASGAKMGKTEGGAIWLDKNLLSPYDYWQFWRNVDDRDLVKFLKSFTDISPREIELKKNENINDLKILLANEATSMLHGDLEAKKCYEQAKKIFSDNSSDEGLPVIKLSKNNLKSKNLSDLILETKLESSKSEIKRLIKNNGIKINNFKIKEDLKVSKIDLNKKNFFKLSIGKKKHFKIEIN

SEQ ID NO: 158482 - protein, 263 aa, Unknown
  Bacterial polypetide isolated from the Sargasso Sea
KMLSFDSVRLRLDREQSLSYMEFNYMILQAYDFLELNKTKNCLMQIGGSDQWGNIINGVELIKRYSNKKVFGLTTPLITLASGAKMGKTEKGAVWLEKNLLSPYDYWQFWRNTDDRDVLKFLKMFTDLKLEKIDEIKSQNINNLKIILANEATAMLHGNAAAKKAEQTAKNTFDEKLVGDDLPFVKIDKEKIKKGINIVDLVISSNLLKSKSEVRRAINNRGIKVNNETIENDKENISIKNFNNENYLKLSHGKKNHIIIKII

SEQ ID NO: 158483 - protein, 155 aa, Unknown
  Bacterial polypetide isolated from the Sargasso Sea
MNKFLKEFKDRGYFYQCTNENDLSKLLDKEKIKGYIGFDCTAVSLHVGSLLQIMCLRLMQKHGHRPIVLIGGGTTRIGDPSGKDKTRKILSEEEIEKNINNIEKILKNYLENNDPKTKPIFVNNYSWLKGLNYISFLRDIGKHFTINKMLTFESI

SEQ ID NO: 158484 - protein, 49 aa, Unknown
  Bacterial polypetide isolated from the Sargasso Sea
NRDNCILQIGGSDQWGNIVNGVELIRRASGKEAFGLTTPLLNNANGDKM

SEQ ID NO: 158485 - protein, 244 aa, Unknown
  Bacterial polypetide isolated from the Sargasso Sea
MEFNYMILQAYDFYELFKNNECILQIGGSDQWGNIVNGVDLIRRKLKKEAFGVTSPLITLASGAKMGKTEKGAIWLNEEELSSYDYWQFWRNTDDRDVKRFIKFFTEIELDEAENLFKKEKNINNLKILLANEATKILHGEVSAKKAAQAAKNVFEKGALASGLPEINIKKDKIKKGVNILDLIADNKILSSKSETRRVIANKGLKLNDKVIYDEKKVLKLNDFEKDILKLSYGKKKHYIIKII

SEQ ID NO: 158486 - protein, 278 aa, Unknown
  Bacterial polypetide isolated from the Sargasso Sea
IDFLRDVGKHFTINKMLTFDSVKLRLEREQSLSYMEFNYMILQAYDFYQLFKKYNCILQMGGSDQWGNIVNGVELIRRILKKDSFGLTTPLITLSSGAKMGKTEKGAVWLDKKMFSPYDYWQFWRNTADEDVNKFLKYFTEIEINKLSNIINSEKDINKLKILLANEATKILHGEKAAKESEITAKETFQGTGVSKNLPQINLSHSDLEKGINILDLLYLNKIVSSKSDARRAIKGNGIKINDKLIIDEKKIINKNDLENNNFIKVSYGKKKHFLIKS

SEQ ID NO: 158487 - protein, 274 aa, Unknown
  Bacterial polypetide isolated from the Sargasso Sea
KQIKAYIGFDCTAPSLHVGSLMQIMVLRLLQKSGHQPIVLLGGGTTLIGDPSGKDSTRRVLKQKEINTNIISIKKIFDNLLKTKNKKLKHIFVNNFDWLGKLKYIEFLREIGKHFTVNKMLSFDSVKLRLDRQQSLSYMEFNYMILQAYDFYKLFEKHNCILQMGGSDQWGNIVNGVELIRRVLKKDSFGLTTPLITLASGAKMGKTEKGAVWLDKKLFSPYDYWQFWRNTADQDVKKFLMYFTEINCDVLEKKIESERDINKLKILLANEATK

SEQ ID NO: 158488 - protein, 276 aa, Unknown
  Bacterial polypetide isolated from the Sargasso Sea
MKNTFLSEMNSRGFLNQCTDLEGLEKISNQKSIKAYIGFDTTAPSLHVGSLMQIMILRLLQKYGHQPIVLLGGGTTLIGDPSGKDSTRKILKEKEIKNNIKSIKKVFEKLLFSKNKRTKVIFVNNYDWLEKLKYIDFLREIGKHFTINKMLTFDSVKQRLDREQSLSYMEFNYMILQAYDFYQLFKKHDCILQLGGSDQWGNIVNGVDLIRRVLQKSAFGLTTPLITLSSGAKMGKTEKGAVWLDKKMFSPYDYWQFWRNTADEDVEKFLMYLQKA

SEQ ID NO: 158489 - protein, 142 aa, Unknown
  Bacterial polypetide isolated from the Sargasso Sea
MQKNFVEELKWRGLLHDLTPETEKFLLEKPTKGYIGFDPTANSMHIGSLVQIIILIHFQNAGHSPIILLGGATGMIGDPSGKSEERNLLDQEILEKNCNSIRKQFEKFLDFRKNIENPATLVNNYNWMKSYSLIDFSREIGK

SEQ ID NO: 158490 - protein, 247 aa, Unknown
  Bacterial polypetide isolated from the Sargasso Sea
NVFKILLKTNNPKLKPIFVNNYKWLRKLNYIKFLREIGKHFTINKMLSFDSVKLRLEREQSLSYMEFNYMILQAYDFLELNKNKNCLMQIGGSDQWGNIVNGVELIKRQTGNQVYGLTTPLITLASGTKMGKTEKGAIWLDRKMLSSYDYWQFWRNTDDRDVIKFLKMFTNISLIEIEKVKNNNINELKILLANKATAMLHGEKEANNAEKLAKSTFKENSTGENLPNIKIDADILSNNIVEVISCV

SEQ ID NO: 158491 - protein, 167 aa, Unknown
  Bacterial polypetide isolated from the Sargasso Sea
MNKFLKEFKDKGYFYQCTSEEKLSKLLDKEKIKAYIGFDCTAESLHVGSLLQIMCLRLMQKHGHRPIVLIGGGTTRIGDPSGKDKTRKILTESEIEKNIKNIEKILKNYLDNNDPKTKPIFVNNYSWLKGLNYISFLRDIGKHFTINKMLTFESVKTRLDREQSLSY

SEQ ID NO: 158492 - protein, 262 aa, Unknown
  Bacterial polypetide isolated from the Sargasso Sea
RMLTFDSVKLRLDREQSLSYMEFNYMILQAYDFLELNKKESCVLQIGGSDQWGNILNGVELIKRYSNNQTFGLTTPLITIATGAKMGKTENGAVWLDEKFLSAYDYWQFWRNIDDRDVIKFLKMFTDLDISQIEKLKKNNINELKILLANKTTSLLHGEKAAKNSEQAAKEAFSGNSLGSNLPSVTILSENINKKINLLDLIYLSKLENSKSEIRRLIKGNAIKINDNTISDEKFIIDHNLFKENYLKLSIGKKRHIKVKIN

SEQ ID NO: 158493 - protein, 284 aa, Unknown
  Bacterial polypetide isolated from the Sargasso Sea
EKLKYIEFLRDVGKHFTINKMLTFDSVKLRLEREQSLSYMEFNYMILQAYDFYQLFKKYGCILQMGGSDQWGNIVNGVELIRRILKKESFGLTSPLITLSSGAKMGKTEKGAVWLDNKLFSPYDYWQFWRNTADEDVEKFLKYFTEIDTDDLIKKISNERDINKLKILLANEATSILHGAKAAKESAETAIETFVQGGMGKNIPEKKISKKIILQGINIIELIFQNGLVVSKSEGRRILKNNGIRVNDKIISDDKKIINMEDVLDSKKIKLSVGKKNHLKISII

SEQ ID NO: 158494 - protein, 297 aa, Unknown
  Bacterial polypetide isolated from the Sargasso Sea
NSIKKVFNRVLNTKDKKTKPIFVNNDDWLTKLNYIDFLRNVGKHFTINKMLTYDSVKLRLQREQSLSYMEFNYMILQAFDFYKLYKNKNCILQIGGSDQWGNIVNGVDLIRRILNKEAFGLTTPLITLASGAKMGKTESGAIWLNEDLFSSYEYWQFWRNTDDRDVKKFLNFFTDIKNSEIEKMFREEKNINKLKVILANEATKILHGEKSSKKAEATAKETFEGSGVSKNLPEIIIDLDEIKLGINILDLLTKSNIMQSKSEVRRAILNKGIKINNKTISNEKLVINLNDFNQKGL

SEQ ID NO: 158495 - protein, 152 aa, Unknown
  Bacterial polypetide isolated from the Sargasso Sea
MNKFLKEFKDRGFFYQCTSEDELSKKLDKEKIKGYIGFDCTAESLHVGSLLQIMCLRLLQKNGHRPIVLLGGGTTRIGDPSGKDKTRKILSEEEIEKNIKNIKNILKKFLDNDDLNTKPIFVNNYTWLKDLNYISFLRDIGKHFTINRMLTF

SEQ ID NO: 158496 - protein, 298 aa, Unknown
  Bacterial polypetide isolated from the Sargasso Sea
RCDNFKTLGHKVIFLIGDFTGKIGDPSGKNKTRPPLSDNEIQKNANTYKDQVFKVLDAKKTVVDFNSRWGDKLTAADMIKIASQSTVARMLERDDFSKRYKSNQPISIHEFLYPLMQGQDSVELEVDVELGGTDQKFNLLVGRDLQRNIGQEPQCIIMLPLLEGLDGVKKMSKSENNYIGITESADEIFGKTMSIPDEIMIKWFNLLSMKTPAEVSKLEKKLEGGSNPRDIKIELAMELASRYTDENKANEARENFIKKFSSKELPSNIELITLSFSEIPFLPNLLKDIGFTKSTSEG

SEQ ID NO: 158497 - protein, 106 aa, Unknown
  Bacterial polypetide isolated from the Sargasso Sea
CLRLLQKHGHRPIVLLGGGTTRIGDPSGKEETRKILSEKQIESNINNIKKIFKIFLQTKNPKLKPIFVNNYKWLSKLNYINFLRDIGKHFTINKMLTFDSVKLRLE

SEQ ID NO: 158498 - protein, 289 aa, Unknown
  Bacterial polypetide isolated from the Sargasso Sea
DTEIKSLDEILSKNKICGYIGFDITSNSLHVGSLIQLMLLHWLDFYGHKSIALVGGGTTLIGDPSGKDQTRQILTKKQIDKNIENIEETFKRFININKNSLIINNYDWLSNLNYIDFLREFGSKITLNRMLTFESIKGRLDREQPLTILEFNYMLLQAYDFYYLNKNYNCVLQMGGSDQWGNILSGVDLIRKINKTDAFGITSPLITNNDGSKMGKTANGAVWLNKDKISCLDFFQFWRNVEDNDVPKFLKLFTKLPLSEIKKLSLLKDKEINEAKKVLAYEVTKIVRG

SEQ ID NO: 158499 - protein, 188 aa, Unknown
  Bacterial polypetide isolated from the Sargasso Sea
MNKFLKEFKDRGYFYQCTDENELSSLLDKKKIKAYIGFDCTAESLHVGSLLQIMCLRMLQKHGHQPIVLLGGGTTRIGDPSGKDKTRKILSEDEIEKNSKNIETILKKFLDTNDKNVKPIFVNNYEWLKDLNYISFLRDIGKHFTINKMLTFESVKTRLDREQSLSYMEFNYMILQAYHFLELNKKEN

SEQ ID NO: 158500 - protein, 236 aa, Unknown
  Bacterial polypetide isolated from the Sargasso Sea
LQAYDFLELNKKENCTLQIGGSDQWGNIVNGTELIKRHSNKQAYGLTTPLITLASGAKMGKTETGAIWLDKKLLAPYDYWQFWRNIDDKDVIKFLKIFTDLKIDEINNIKNENINKLKIILANETTSMLHGKEAALSAEKTAKKTFEENSLGENLPSVDIQLSSKNNIINIVDLIILSKIEKSKSEIRRLIKGKGIKINNEIISDEKFLIQKKLFGKDSFLKLSIGKKKHVKINLS

SEQ ID NO: 158501 - protein, 142 aa, Unknown
  Bacterial polypetide isolated from the Sargasso Sea
MNKFLKEFKDRGFFYQCTNENLLSELLDKKKIKAYIGFDCTAESLHVGSLLQIMCLKLLQDHGHQPIVLLGGGTTRIGDPSGKDKTRKILSEKEIKKNSKNIEKILKNFLDTKNTKTKPVFVNNFAWLKKLNYISFLRDIGK

SEQ ID NO: 158502 - protein, 228 aa, Unknown
  Bacterial polypetide isolated from the Sargasso Sea
MTTLKSEFLHTISERGFIHQTTDERKLDSILASDKITGAYTGFDCTADSLHIGHLMPIMTLRWYQRCGHKPITLMGGGTTKVGDPSGKDKTRKILDEATIQNNIEGIKGTFEKFLKFGEKPNDAQMVNNADWLDELEYIPFLRQFGKHFSVNRMLSFDSVRLRLEREQPLSFLEFNYMILQAYDFLELSRRADCILQIGGSDQWGNIVNGIELARRSDGTSLFGLTTP

SEQ ID NO: 158503 - protein, 249 aa, Unknown
  Bacterial polypetide isolated from the Sargasso Sea
MILQAYDFYELNKSNKCDLQIGGSDQWGNIVNGVDLIKRVSGNHVYGLTTPLITLASGAKMGKTEKGAVWLNKDMLSPYDYWQFWRNTDDRDVLRFLKMFTDLSLEEIDDKKNKNINELKILLANNVTAMLHGEKEAKKSENLAKNTFKENSTGEDLPGIKIANDILSKSIVEIISYINQNISKSEIRRLIKSNAIKINNKNIQDEKFIIEKNLFLDKGICKVIYRKEKTLQNNKLVTFNFFSSVLVIN

SEQ ID NO: 158504 - protein, 234 aa, Unknown
  Bacterial polypetide isolated from the Sargasso Sea
YDFYQLFKKNNCILQIGGSDQWGNIVNGVDLIRRMLHKNSFGLTTPLITLASGAKMGKTEKGAIWLNENLFSSYDYWQFWRNSDDRDVEKFLNYFTEIDTSEIKNIIKNEKNINNLKILLANEATKILHGEKAAKKAEQTAKKTFEGGGLGEDLPEINVSEKEINKGVAFLEFLSNKKITSSKSEARRAIANRGFKINDKVIVDEKKNLNLEDFKNKTLKLSFGKKKHYIIKII

SEQ ID NO: 158505 - protein, 273 aa, Unknown
  Bacterial polypetide isolated from the Sargasso Sea
LNYVNFLRDYGKHFSINKMLSFDSVKIRLDREQSLNFVEFNYMIFQAYDFFELNNRDNCILQIGGSDQWGNIVNGVELIRRASGKETFGLTTPLLTNANGDKMGKTVDGAVWLNEDMLSAYDYWQFWRNTDDRDVIRFLKLFTDLDKKEIDTIEKENADNINETKIILANEATAMLHGLDEAKKSQETAKDIFTNNNLDADLPTIKLKSEELNKEVVLSDLILRMNFASSKSASRKLIRGNAVKIDKKLIKDEHFSINTLLSDSSSGIVISVG

SEQ ID NO: 158506 - protein, 101 aa, Unknown
  Bacterial polypetide isolated from the Sargasso Sea
MSFLENFEERGFFKQTTHPEELKSRIESGRICAYIGFDPTADSLHVGHLIPLMGLAHLQRDGQRVIALMGGGTAMIGDPSGKTEMRKMLTEKQLEDNVGKI

SEQ ID NO: 158507 - protein, 157 aa, Unknown
  Bacterial polypetide isolated from the Sargasso Sea
MNKFLKEFKERGYFYQCTSENELSNILDKEKVKGYIGFDCTAESLHVGSLLQIMCLRLMQKHGHRPIVLIGGGTTRIGDPSGKDKTRKILNDSEITKNIKNIEKILKSYLDNNDPKTKPLFVNNYTWLKGLNYISFLRDIGKYFTINKMLTFDSIKT

SEQ ID NO: 158508 - protein, 201 aa, Unknown
  Bacterial polypetide isolated from the Sargasso Sea
MNKFLNEFIDRGFFYQCTNKDELSNILDKKKINAYIGFDSTAPSLHVGSLLQIMCLRLLQRHGHRPIVLLGGGTTRIGDPSGKEKTRKILSEEEIERNIKNIKKVFNIFLKTDNPSLKPIYVNNFEWLGKLNYISFLREVGKHFTINKMLSFDSVKLRLEREQSLSYMEFNYMILQAYDFLELNKKKKCLLQIGGSDQWGN

SEQ ID NO: 158509 - protein, 293 aa, Unknown
  Bacterial polypetide isolated from the Sargasso Sea
KEETRKILSEKQIENNIKNIQNVFKIFLKTNNPKLKPIFVNNYKWLGKLNYIKFLREIGRHFTINKMLSFDSVKLRLEREQSLSYMEFNYMILQAYDFLELNKSKNCLMQIGGSDQWGNIVNGVELIKRYSGNQVYGLTTPLITLASGAKMGKTEKGAVWLDKKILSPYDYWQFWRNTDDRDVINFLKIFTDLPLNEIEKIKENNINNLKILLANKTTEMLHGKKAAKESEKLATSTFIEDSSGESLPSVKIQNDILNKNIIELITYVAKQFSKSEIRRLIKSNGIKINNQLV

SEQ ID NO: 158510 - protein, 255 aa, Unknown
  Bacterial polypetide isolated from the Sargasso Sea
MLSFDSVKLRLEREQSLSYMEFNYMILQAYDFLELNKTKNCLMQIGGSDQWGNIVNGVELVKRYSSKQVYGLTTPLITLASGAKMGKTEKGAVWLDKKLLSSYDYWQFWRNTDDRDVVKFLKMFTDKEVSEVESIKDKNINDLKTLLANEATTLLHGKAAAVKASETAKKTFAGGSGDELPVIKIKKNQINNGLNIIDLSIKTNLFSSKSEIRRTIKNSGLKINNSTVADENLAINLSDFEDDILKLSHGKKNHI

SEQ ID NO: 158511 - protein, 199 aa, Unknown
  Bacterial polypetide isolated from the Sargasso Sea
MKESLELIKRGIDEVLTEDDLISKLKSKKQLTVKVGFDPTAPDLHLGHTVILNKMRHFQDLGHKVVFLIGDFTGRIGDPSGKNKTRPSLDKEELEKNAKTYSDQVFKILNKDLTDIRFNSEWCEDLGADGIIGLASKYNLGRMLERDDFSKRYKANQQIAIHEFLYPLIQAYDSIALNADVEMGGTDQKFNLLVGRELQ

SEQ ID NO: 158512 - protein, 264 aa, Unknown
  Bacterial polypetide isolated from the Sargasso Sea
FTINKMLTFDSVKLRLEREQSLSYMEFNYMILQAYDFYELNKSNKCSLQIGGSDQWGNIVNGVELIKRESGNHVYGLTTPLITLASGAKMGKTEKGAIWLNKDMLSPYDYWQFWRNTDDRDVLKFLKMFTDLSLDRLNNLKDKNINELKILLANNATEMLHGKKEAEKSAKLAQNTFKENSSGENLPGIKVKNDILSKNIIELISFVSKDISKSEIRRLIKSNAIKIDNKNILDEKYIVDPILFSDKGFVKLSIGKKKHIKITV

SEQ ID NO: 158513 - protein, 238 aa, Unknown
  Bacterial polypetide isolated from the Sargasso Sea
MILQAYDFLELNKNKNCIMQIGGSDQWGNIINGVELIKRYSGKQSFGLTTPLITLASGAKMGKTESGAVWLDKSLLSPYDYWQFWRNTDDRDVIKFLKMFTDLSLKKIENIKNNNINELKILLANEATTMLHGKSSAEKAEQTAKKTFGSGSIGDDLPTIKIDKKELENGLNIIDLVIVSNLLASKSEVRRIIKNKGIKINNQTIEDQNLQVSLKNFNNQNLLKLSLGKKKHVIIKIN

SEQ ID NO: 158514 - protein, 171 aa, Unknown
  Bacterial polypetide isolated from the Sargasso Sea
MNKFLKEFKDRGYFYQCTSEADLSNLLDKEKIKAYIGFDCTAESLHVGSLLQIMCLRLLQKNGHQPIVLLGGGTTRIGDPSGKDKTRKILDESEIEKNIKNIQNILKKFLDNDDLKTKPIYVNNYTWLKDLNYISFLRDIGKHFTINRMLTFDSVKLRWKENSHLVIWNLI

SEQ ID NO: 158515 - protein, 239 aa, Unknown
  Bacterial polypetide isolated from the Sargasso Sea
MEFNYMILQAYDFFELNKNKNCLMQIGGSDQWGNIVNGVELIKRQSGNQAYGLTTPLITLASGAKMGKTEQGAVWLDKKLLSPYDYWQFWRNTDDRDVIKFLKMFTDIEIQEIEKIKNKDINELKVLLANKATIMLHGKKEAQSSEKLAKSTFVDNLSGENLPSIKIKDITNKNIVDIIIYVNDNLSKSEIRRLIKSNGIKINNKTINDDKILINKKLFDNKGFFKLSIGKKKHFKIVN

SEQ ID NO: 158516 - protein, 251 aa, Unknown
  Bacterial polypetide isolated from the Sargasso Sea
REQSLSYMEFNYMILQAFDFFQLFKKRKCILQIGGSDQWGNIVNGVELIRKLTNQSSLGLTTPLIVTSSGKKMGKTEKGSIWLDKKLISHYDYYQFWRNTNDDDVVKFLKYFTELPINEIDNLSTKEKNINKLKEILAFETTKILHGKKLAEEAKKTSKETFSGTGVSKNLPLIKLDKRETINGFNLINVLTKNNILSSNNEVRRMIKSRGIKINDEIVSDTSDVNSIKIDLSKPNKISIGKKRHYLIKVY

SEQ ID NO: 158517 - protein, 174 aa, Unknown
  Bacterial polypetide isolated from the Sargasso Sea
MNKFLKEFKDRGYFYQCTSEAELSNLLNQKKIRAYIGFDCTAESLHVGSLLQIMCLRLLQKNGHQPIVLIGGGTTRIGDPSGKDKTRKILSEDKIEKNITNIQNILKKFLDNDDPKIKPIFVNNYTWLKDLNYISFLRDIGKHFTINRMLTFDSVKLRLDREQSLSYMEFNYMI

SEQ ID NO: 158518 - protein, 240 aa, Unknown
  Bacterial polypetide isolated from the Sargasso Sea
MEFNYMILQAYDFYELNKSNKCDLQIGGSDQWGNIVNGVELIKRKSGNHVYGLTTPLITLASGTKMGKTEKGAVWLNKEMLSAYDYWQFWRNTDDRDVLKFLRMFTDLSLDEIDNEKHRDINELKILLANNATAMLHGEKEAKKSVNLAKNTFKQNSTGENLPGIKITNDILSNNIVELISFVNNDISKSEIRRLIKSNAIKIDNKNINDEKYIIDNNLFSEKGYVKLSIGKKKHFKITN

SEQ ID NO: 158519 - protein, 293 aa, Unknown
  Bacterial polypetide isolated from the Sargasso Sea
TRPIFVNNYKWLKNLNYISFLRDIGKHFTINKMLTFDSVKNRLEREQSLSYMEFNYMILQAYDFLELNKKENCVLQVGGSDQWGNIINGVELIKRYSDKQVYGLTTPLITLATGAKMGKTADGAVWLDKKLFSPYNYWQFWRNTDDKDVIKFLKFFTDFTTDEIENIKDFEINSLKIMLANKTTELLHGKKESEKSEKIAKETFSGNSKGSNLPSIKLKKSILQNNIDIIDLVIFSKFEKSRSEIRRLIKGNAIKINNENISDEKFIIEYKLFKDDYIKLSIGKKRHLKIELI

SEQ ID NO: 158520 - protein, 181 aa, Unknown
  Bacterial polypetide isolated from the Sargasso Sea
MKESLELIKRGIDEVLTEDDLISKLKSKKQLTIKVGFDPTAPDLHLGHTVILNKMRHFQDLGHKVVFLIGDFTGRIGDPSGKNKTRPSLDKEELEKNAKTYSDQVFKILNKDLTDIRFNSEWCEDLGADGIIGLASKYNLGRMLERDDFSKRYKANQQIAIHEFLYPLIQAYDSIALNADV

SEQ ID NO: 158521 - protein, 264 aa, Unknown
  Bacterial polypetide isolated from the Sargasso Sea
FTINKMLSFDSVKLRLDREQSLSYMEFNYMILQAYDFLELNKKQNCLLQIGGSDQWGNIVNGVDLIKRYSSKEVFGLTTPLITLASGAKMGKTESGAVWLDKNLLSTYDYWQFWRNTDDREVIKFLKMFTDLSIEKIEEIKNENINDLKILLANEATKMLHGEIETKKVEKLAKSTFKENSTGEHLPSVKIGSDLIGKDIISLIEYTNNELSKSEIRRLIQNNGIKIDNEKIEDGKLLISKKLFVNKGFIKLSVGKKKHFKIII

SEQ ID NO: 158522 - protein, 245 aa, Unknown
  Bacterial polypetide isolated from the Sargasso Sea
LSYMEFNYMILQAYDFLELNKKENCVLQIGGSDQWGNIVNGVELIKRYSNNQTYGLTTPLITLATGTKMGKTENGAIWLDEKYLSAYDYWQFWRNVDDRDVIKFLKMFTDIDVSEINSLEGKNINELKILLANKATTMLHGEDAAQNSEQAAKEAFSGNSLGSNLPSIKIETKQLENNINIIDLIILSKVENSKSEIRRLIKGKAIKINDTIVSDEKFIINQQLFTENYLKLSIGKKRHIKVELS

SEQ ID NO: 158523 - protein, 259 aa, Unknown
  Bacterial polypetide isolated from the Sargasso Sea
FESVKTRLDREQSLSYMEFNYMILQAYDFLELNKKENCTLQIGGSDQWGNIVNGTELIKRHSNKQAYGLTTPLITLASGAKMGKTEAGAVWLDKKLLTPYDYWQFWRNTDDRDVIKFLKMFTDLNIDEINQMKDEDINKLKIKLANETTTILHGKNEALSAEKTAKKTFEENSLGENLPSIDIGLENENTNINIVDLIILSKTESSKSEIRRLIKGKGIRINNEIINDEKFSIQKKSFGKNNFLKLSIGKKKHIKIKLA

SEQ ID NO: 158524 - protein, 187 aa, Unknown
  Bacterial polypetide isolated from the Sargasso Sea
MNKFLKEFKDRGYFYQCTDENELSSLLDKKKIKAYIGFDCTAESLHVGSLLQIMCLRMLQKHGHQPIVLLGGGTTRIGDPSGKDKTRKILSEDEIERNSKNIERTLKKFLNTNDKNVKPIFVNNYEWLKGLNYISFLRDIGKHFTINKMLTFESIKTRLDREQSLSYMEFNYMILQAYDFLELTKKK

SEQ ID NO: 158525 - protein, 233 aa, Unknown
  Bacterial polypetide isolated from the Sargasso Sea
DFYQLFKKENCILQIGGSDQWGNIVNGIELIRRILKKESFGLTSPLITLASGAKMGKTEKGAVWLNEKLFSVYDYWQFWRNVDDRDVKKFLYFFTEIEYEKINTLCEKEENINNLKILLANQATSILHGKSAAKKAQKTAKETFEDKSLSLNLPEIKVNSEEVKKGISLIDLLSVNGVMSSKSEARRAILNNGLKINDKLVGDIKRTLKSEDFEEKILKISYGKKKHFKVKII

SEQ ID NO: 158526 - protein, 223 aa, Unknown
  Bacterial polypetide isolated from the Sargasso Sea
KSKNCLMQIGGSDQWGNIVNGVELIKRQSGNQVYGLTTPLITLASGAKMGKTEKGAVWLDKKILPPYDYWQFWRNTDDRDVIKFLKMFTDMPLNEIENIQENNINDLKIILANKATEMLHGEKAAKESEKMAVSTFKNDSSGENLPNIKINKEILNKKIVDLASYVAKEISKSEIRRLINSNGIKINNQLVNDEQFIINKSLFLEKGFIKLSIGKKKHFKIII

SEQ ID NO: 158527 - protein, 229 aa, Unknown
  Bacterial polypetide isolated from the Sargasso Sea
DTTRKLIKETEIKNNIKSIKKVFNKILDTSNKNTSPIFVDNANWLTKLNYIEFLRDTGSHFTINKMLTFDSVKLRLNREQSLSYMEFNYMILQAYDFYQLFKNNNCILQIGGSDQWGNIVSGVDLIRRKLQKEAYGLTSPLITLASGAKMGKTEKGAIWLNEDKLSPYDYWQFWRNTDDRDVKRFLNFFTETQPKELNEIINKEKNINNLKILLANEATKILHGEAASK

SEQ ID NO: 158528 - protein, 262 aa, Unknown
  Bacterial polypetide isolated from the Sargasso Sea
HLVQLMLVRALQERGHKPLLLVGGATGLIGDPKMTGERHMNDREVVAEWVESIKDQVSKYVDTDGRNAAQIVNNYDWTVKYTALDLLRDVGKHFSVNRMLARDVVARRLESGISYTEFSYVLLQSLDFYELHKRYGCTLQTGAQDQWGNITAGAEFIRKTTGDVVHGLVTPLITKADGTKYGKTESGTVWVDPELTSAYAFHQFFLNAEDSKVIEYLKIFSPRSREEIEDLARKTEEEPWRRAAQHCLADDLTDLVHGGSSV

SEQ ID NO: 158529 - protein, 158 aa, Unknown
  Bacterial polypetide isolated from the Sargasso Sea
MNKFLKEFKDRGYFYQCTSETDLSNLLDKEKIKAYIGFDCTAESLHVGSLLQIMCLRLLQKNGHQPIVLLGGGTTRIGDPSGKDKTRKILDESEIEKNIKNIQNILKKFLDNDDPKTKPIYVNNYTWLKDLNYISFLRDIGKHFTINRMLTFDSVKLR

SEQ ID NO: 158530 - protein, 300 aa, Unknown
  Bacterial polypetide isolated from the Sargasso Sea
IKNIEKVFKIYLKTNNTKLKPIFVNNYKWLGKLNYIKFLREIGKHFTINKMLSFDSVKLRLDREQSLSYMEFNYMILQAYDFLELNKNKNCLMQIGGSDQWGNIVNGVELIKRHSSKQVFGLTTPLITLASGTKMGKTEKGAVWLDDKLLSSYDYWQFWRNTDDRDVLRFLKMFTDLDLNRIEKLKNENINKLKVILANEATAMLHGKSSAAKAEKTAKITFETGGVGSNLPEIKVKKVDVNQGIKILDFLSINKIFSSKSEARRAIKSNALKIDNIIITDENKIIRLDDFKNKDFLKIS

SEQ ID NO: 158531 - protein, 137 aa, Unknown
  Bacterial polypetide isolated from the Sargasso Sea
MNSFNWKLITRGIEEVLTEDDLTAKLESKKQLTVKVGFDPTAPDLHLGHTVILNKMRHFQELGHKVVFLIGDFTGRIGDPSGKNKTRPTLQKKELKENAKSYSDQVYKILKKDLTEIKFNSEWCDKLGADGIIELAS

SEQ ID NO: 158532 - protein, 275 aa, Unknown
  Bacterial polypetide isolated from the Sargasso Sea
MNFKSEFINEINERGFIYQHIDIEDLDKLMSKNKISGYIGFDITSDSLHVGSLIQLMLLHWLDFYGHKSIALIGGGTTLIGDPSGKDQTRKILSKKEIDNNITNIEVTFSRFINLQNNSLIINNYDWLSNLNYIDFLREFGSRITLNKMLTFDSVKTRLDREQPLTILEFNYMLLQAYDFYYLNKNLNCVLQMGGSDQWGNILSGVDLIRKINKKEAFGITSPLITNSDGSKMGKTADGAVWLNKEKISSLDFFQFWRNVNDKDVSRFLNLFTKL

SEQ ID NO: 158533 - protein, 319 aa, Unknown
  Bacterial polypetide isolated from the Sargasso Sea
PIVLLGGGTTLIGDPSGKDSTRRILKQKDIKKNILGIKKLFEKLLNHKDKKTKPIFVDNYSWLGKLNYIEFLRNIGSQFTLNKMLTFDSVKSRLEREQSLSYMEFNYMILQAFDFYKLYEKEKCLLQLGGSDQWGNIVNGVDLIRRILKKDAFGLTSPLITLSSGQKMGKTEEGAVWLNEKLFSPYDYWQFWRNSDDRDVVRFLKFFTDIKIQDIQTFEKEKQINELKTILANETTKILHGKIKSLKAEKTAVDIFKLGKINDNLPTKKITRRDIETGVKLLELLVNTNIMNSKSEARRAISNKGIKINDFTIEDENKT

SEQ ID NO: 158534 - protein, 292 aa, Unknown
  Bacterial polypetide isolated from the Sargasso Sea
RGLISDETPGIRKILSSEKISGYIGFDPTSKSLHIGNLLPIMNLMRMQKYGHRPIAVVGGGTGLIGDPSGKSSERNILSKSAIEENLYSIKSQLEKFLDFSKDIKNPALILNNAEWLEKINYLDFLRDIGKHFTINYMMKKESVKSRLSRDTGISYTEFSYMTLQAYDYLYLYENHKCILQMGGSDQLGNIIAGVDLINKKNPGNSNPLAHGIVFPLITSSSGEKFGKSAGSAPTLDPIKTSPYKLYQFFINTPDEDVINYIKYFTNLNESNIKDITNEFKRYPKSRIAQKK

SEQ ID NO: 158535 - protein, 197 aa, Unknown
  Bacterial polypetide isolated from the Sargasso Sea
MNKFLKEFKDRGFFYQCTSEDELSKQLDEEKIKGYIGFDCTAESLHVGSLLQIMCLRLLQKNGHRPIVLLGGGTTRIGDPSGKDKTRKILSEDEIEKNIKNIKNILKKFLDNDDPNTKPIFVNNYTWLKDLNYISFLRDIGKHFTINRMLTFDSVKLRLDREQSLSYMEFNYMILQAYDFLELNKKENCILQIGGSD

SEQ ID NO: 158536 - protein, 399 aa, Unknown
  Bacterial polypetide isolated from the Sargasso Sea
MSQLEVALAEIKRGAEEILVEEELVAKLKEGRPLRIKLGMDPTAPDIHLGHTVILNKLKTFQDLGHEVILLIGDFTAMVGDPSGKNATRPPLSEEAIKHNALTYAEQAFKILDPAKTRIEYNSTWLSELGATGMIKLAAKQTVARMMERDDFKKRYSNGQSIAIHEFLYPLLQGYDSVALKADVELGGTDQKFNLLMGRELQKDAGMATQCVLMMPLLVGLDGVKKMSKSAANYIGVHDAPGEMFGKIMSITDDLMWNYYELLSFRPLAEIEEFKAGIAAGTLNPRDVKIWLAKEIIARYHDEAAAEAAHEDFTQRFSKNAIPDEMPEVELALEGEGLAIANLLKDADLVATTSEALRMIKQGAVKVDGEKLDDGKALIGAGTAVYQVGKRKFARVTVK

SEQ ID NO: 158537 - protein, 322 aa, Unknown
  Bacterial polypetide isolated from the Sargasso Sea
RFYLEKEIEKNIRNIQKVFKIFLKNKNSKIKPIFINNYKWLGKLNYIKFLREVGKHFTVNKMLNLESIKLRLEREQSLSYMEFNYMILQAYDFLELNKTKKCQLQIGGSDQWGNIVNGVELVKRYSNKQVFGLTTPLLTLGSGSKMGKTERGAIWLDKKLLSSYDYWQFWRNTDDRDVIKFLKMFTDLNLEKIEKIKDKNINQLKILLANEATTMLHGKDAANKAEQTAKKTFENKSIGNDLPTINIEKEKFAKGINIMDIVVLSKLLNSKSEVRRTIKNRGIKINNKTVETDQLNIFLNDFDKNILKLSHGKKNHIIIKII

SEQ ID NO: 158538 - protein, 283 aa, Unknown
  Bacterial polypetide isolated from the Sargasso Sea
LGKLNYIKFLREIGKHFTINKMLTFDSVKLRLDREQSLSYMEFNYMILQAYDFLELNKSKNCVMQIGGSDQWGNIVNGVELIKRYSGKHVFGLTTPLITLASGAKMGKTEKGAIWLDKKLLSSYDYWQYWRNTDDRDVLRFIKMYTDLPLEKIEEIKNNDINKLKIILANECTKMLHGSKEAKLSEKTAIKTFSERSTGESLPVIKISQNQLDLSLDIASLILLSNLESSKSEIKRIIKNKGIKINNSTIENEKLIITNDLFDKEKSLKLSVGKKRHVNVKLV

SEQ ID NO: 158539 - protein, 237 aa, Unknown
  Bacterial polypetide isolated from the Sargasso Sea
MSFLETFEERGFFKQTTHPEELKKRVKSGRICAYIGFDPTADSLHVGHLIPLMGLTHLQRDGQRVIALMGGGTAMIGDPSGKTEMRKMLTEKQLEDNVGKIKPQMERFLDFSEDSELINNSEWLRNLNYIDFLRDIGRHFSVNRMLSFETYKVRLETGLSFLEFNYQLLQAYDFLELNKRYQCILQMGGDDQWVNILSGVDLIRRVSQNEAFGWTYPLLTTASGRKMGKTVKRGRLA

SEQ ID NO: 158540 - protein, 303 aa, Unknown
  Bacterial polypetide isolated from the Sargasso Sea
MINNLDWTQNLDLLTFLRTVGKHFSVNSMIQKESVKQRIEREGEGISFTEFSYMLLQSLDFAELHKRFNCTIQVGGSDQWGNITGGIDLTRRMHQKQVFGVTTPLVTKADGTKFGKTEKGTIWISAKKTSPYALYQFWLNVSDLDVYKYLRYFTFLSAKEIREIELADKSSESKPEAQGILASEVTKLLHGAEGLTAAKRISDGLFSGDISKLTRGDLEQLDLDGLPKTSFDEERVDIVQALVRCELAKSNKMAREFIGNNAISVNGSSISSTDLILDSNNALDGGYFVLRRGKKMFHLVKLK

SEQ ID NO: 158541 - protein, 387 aa, Unknown
  Bacterial polypetide isolated from the Sargasso Sea
KLCHSQSIAAYIGFDCTADSLHVGSLTQIMMLRHLQKTGHKPIVLMGGGTTKVGDPSGKDSARPLLTINDINLNMESIKSIFEKYLVFGKNTSDAVMVDNSIWLDKLELISFLRDYGKHFSINRLLSMESVKQRLEREQPLSFLEFNYAILQAYDFLELNRKYNCFLQMGGSDQWGNIISGIDLTRRIQSKEVFGLTSPLITTASGSKMGKTANGAIWLNEDKLSTWDFWQFWRNTEDKDVIRFLKLFTELPISKIQEIQKLKGAQINDAKILLANEVTKLCHGTESAIKAYNSAKETFEKGKLGLDLPKFKVVLSKNDSISLIEALCKTELCKSKGEARRLINGGGARINNQSFRDEDHVIQKSDFDETGTLKISSGKKNHAVLYI

SEQ ID NO: 158542 - protein, 260 aa, Unknown
  Bacterial polypetide isolated from the Sargasso Sea
MLTFESVKTRWDRDQSLSYMEFNYMILQAYDFLELNKKENCSLQIGGSDQWGNIVNGTDLIKRHLNKQAYGLTTPLITLASGAKMGKTETGAVWLDRKLLSPYEYWQFWRNIDDRDVIKFLKMFTDLNIDEINKMKDDDINQLKIKLANETTSMLHGKDEALSAEKTAKKTFEENSLGENLPTAEIKLNSENGMNIIDLVIITKIESSKSEVRRLIKGKGLRINNKIINDEKFLIQKKLFVNNFIKLSIGKKKHVKIKLS

SEQ ID NO: 158543 - protein, 431 aa, Unknown
  Bacterial polypetide isolated from the Sargasso Sea
MNNQFNNVIEEFRWRGSLKDYTTKADSILINEKITCYNGFDPTAKSLHIGNLIPILGLQRLQKYGHTPIVIVGGGTGMIGDPSGRTDERKLMSEALIEENLAGIKGQLEKFLDFDNKKNPAQIINNAEWLNQINLIDFLRDTGKFFNINNMLGKDSVKNRLSRDEGISFTEFSYQLLQAYDFLYLFENYNCSFQMGGSDQWGNIVAGIDLIRKKNPLNKNKAHGITYPLLTTSSGEKFGKSIDGAVTLDPNVTIPYKLFQYFYNTSDDEVLDYIKLFTDINIEEFNELEKITLESPYKREAQLFLSKEITRIVHGEKGMNSALRQTEGLNQGKWEILSDDDFSDLYIGSESINQLSRKKLSNGVNIQELTVDYDLCKSLGESKRLINQGGISLNGNKITDPEMKVFENDLKANKILIISKGKKNHKIIKVD

SEQ ID NO: 158544 - protein, 398 aa, Unknown
  Bacterial polypetide isolated from the Sargasso Sea
MNDFKKQLEIIKQGIDEIIGEDDLIEKLKSGKKLTIKVGFDPTAPDLHVGHTVILRKMRQFQDLGHKVIFLIGDFTGKIGDPSGKNKTRPPLTNDEIKANAKTYEDQVLKVLDPDKTTIDFNSRWGDKMSAADMIKLAAQSTVARMIERDDFSKRYKNNQPISIHEFLYPLMQGYDSVELEVDVELGGTDQKFNLLVGRDLQKNVGQSPQTIITLPLLEGLDGVKKMSKTEENYIGITEKADDIFGKTMSIPDEIMMKWFDLLSLRPLEEIKKVEKDIKGGANPRDAKIDLAMELTTRFTSETEAEKAKDNFFKKFSSNELPSDIEEKEISYTDMPALPNLLKDLGMVGSTSEAIRLIEQGAVKIDQEKVTSKDQEVSFETKKLIQIGKKKFLYVFSK

SEQ ID NO: 158545 - protein, 411 aa, Unknown
  Bacterial polypetide isolated from the Sargasso Sea
MENSYLSEFKNRQYFNQCTNFEELEHLMDKKKIRAYIGFDCTAPSLHVGSLLQIMCLRLLQKHGHQPIVLLGGGTTRIGDPSGKEETRKILSEKQIEINIKNIKKVFKIYLKTNNSKLKPIFVNNYKWLKKLNYIKFLREIGKHFTVNKMLSFESVKSRLEREQSLSYMEFNYMILQAYDFLELNKSKNCIMQVGGSDQWGNIVNGVELIKRYSSKQVFGLTTPLITLASGSKMGKTEKGAVWLDKKLLSAYDYWQFWRNTDDRDVIKFLKMFTDLSLEKIENIKTKEINFLKILLANETTSMLHGAKAARQAEKTAKNTFGNKSIGEELPSVSISKNQIEKGINIIDIVILSKMLSSKSEVRRMIKNKGIKINNITIDDEKKEISTKDFKENSMLKLSLGKKKHTVFKIN

SEQ ID NO: 158546 - protein, 279 aa, Unknown
  Bacterial polypetide isolated from the Sargasso Sea
MGKLNYIKFLREIGKHFTINKMLSFDSVKLRLEREQSLSYMEFNYMILQAYDFLELNKTKNCLMQIGGSDQWGNIVNGVDLIKRQSGNQVYGLTTPLITLASGTKMGKTEKGAIWLDKKLLSPYDYWQFWRNTDDRDVIKFLKMFTQISLMEIDKVKKNNINDLKILLANEATTMLHGKKEAINAEKLAKSTFKENSSGENLPSFKIENIMNKNIVEILSYVNKDISKSEIRRLIKSRGIKIENQTVIDEKFILDEKLFKEKGFVKLSLGKKKHYKIVC

SEQ ID NO: 158547 - protein, 265 aa, Unknown
  Bacterial polypetide isolated from the Sargasso Sea
TINRMLTFDSVKLRLDREQSLSYMEFNYMILQAYDFLELNKKENCVLQIGGSDQWGNIVNGVELIKRYSNNQTFGLTTPLITLATGAKMGKTENGAIWLDEKYLSAYDYWQFWRNVDDRDVIKFLKMFTEIEIKEIETIKDKDINELKILLANKTTEMLHGKEAAKNSEQAAKEAFSGNTLGSNIPKVNIQSNKIEEKINIVDLVLLSKLENTKSEIRRLIKGNAVKINDDVISDEKFEINKNLFKDNYLKLSLGKKRHIKIELN

SEQ ID NO: 158548 - protein, 264 aa, Unknown
  Bacterial polypetide isolated from the Sargasso Sea
EIEVNINNIKKVFKIFLKTNNPKLKPIFVNNYKWLSKLNYINFLRDIGRHFTINKMLSFDSVKLRLEREQSLSYMEFNYMILQAYDFYELNKSNNCNLQIGGSDQWGNIINGVELIKRESRKQAYGLTTPLITLASGAKMGKTEQGAVWLNKEMLSPYDYWQFWRNTDDRDVLKFLKMFTDLSIIEIENIKDKNINELKVLLANKTTEMLHGKKVAEQSWKLAKNTFKENSTGENLPGIKVNNSILSKNIVELISFVKQGNFKI

SEQ ID NO: 158549 - protein, 368 aa, Unknown
  Bacterial polypetide isolated from the Sargasso Sea
KVGFDPTAPDLHLGHTVIINKMRQFQEFGHEVIFLIGDYTGMIGDPSGVNETRPVLTVEQVKENARTYQNQIFKILDKDKTRIEFNSSWMNKVTSAELIDIASKYTVARMLERDDFKKRFKSENPISIHEFIYPLVQGYDSVALECDVEMGGTDQKFNLLVGRHLQQLYGQEPQTIITLPLLEGLDGIKKMSKSADNYVALNDSGDDMFGKIMSVSDDLMWRYFELVSSKNLTEIKNLKNSVNDGANPRDIKFLLAEEIVERFHNQSVAKKAKESFMQRFQKGGIPEDIDLTEVSIKDIQNDDGEINLPRLLAHTNLVNSISEGHRAIKAGSVRIDGEKISQISLKIQSKSELILSQGKRRFIKVKII

SEQ ID NO: 158550 - protein, 311 aa, Unknown
  Bacterial polypetide isolated from the Sargasso Sea
IKKILKKLLHSKNKKTKPIFVNNYDWLGKLKYIDFLRDVGKYFTINKMLTFDSVKLRLDREQSLSYTEFNYMILQAYDFYQLIKKHDCVLQLGGSDQWGNIVNGVDLIRRITQKNAYGLTTPLITLSSGAKMGKTEKGAVWLDEKIFSAYEYWQFWRNTSDEDVKKFLKFFTEDDIDNLTMQIENEKDINKLKILLANKATTILHGSKAAKDSAETAKETFVKGGIGKNIPEKKIEKKIIIQGINIIELIFQNNLAQSKSEARRILKNNGVKINDITVNDEKKIVNLEDVQENNFIKLSIGKKNHIKVKVI

SEQ ID NO: 158551 - protein, 318 aa, Unknown
  Bacterial polypetide isolated from the Sargasso Sea
LSEKQIENNINNIKKVFKIFLKTNNPKLKPIFVNNYTWLSKLNYISFLRDIGRHFTINKMLSFDSVKLRLEREQSLSYMEFNYMILQAYDFYELNKSNKCNLQIGGSDQWGNIVNGVELIKRQSGIQAYGLTTPLITLASGAKMGKTEKGAVWLNKDMLSPYDYWQFWRNTDDRDVIKFLRMFTDLSLNEIDNIKDNNINELKVLLANHATKMLHGKKEAEESEKLAKNTFKENSSGENLPGIKVENDILSKNIVELISFVNKNISKSEIRRLVKSNAIKIDNQNINDEKYIIDLNLFKNKGFVKLSIGKKKHFKIIN

SEQ ID NO: 158552 - protein, 398 aa, Unknown
  Bacterial polypetide isolated from the Sargasso Sea
MNDFKKQLEIIKQGIDEIIGEDDLIEKLKSGKTLTIKVGFDPTAPDLHVGHTVILRKMRQFQDLGHKVIFLIGDFTGKIGDPSGKNKTRPPLSDDEIKANAKTYEDQVLKVLDPSKTTIDFNSRWGDKMSAADMIKLAAQSTVARMIERDDFSNRYKNNQPISIHEFLYPLMQGYDSVELEVDVELGGTDQKFNLLVGRDLQKNVGQSPQTIITLPLLEGLDGVKKMSKTEENYIGITEKADDIFGKTMSIPDEIMMKWFDLLSLRPLEEIKKVDDDIKGGANPRDAKIDLAMELTTRFTSEKEAEKAKDNFFKKFSSNELPSDIEEKEINYTDMPALPNLLKDLGMVGSTSEAIRLIEQGAVKIDQEKVASKDQEVSFETKKLIQIGKKKFLYVSSK

SEQ ID NO: 158553 - protein, 377 aa, Unknown
  Bacterial polypetide isolated from the Sargasso Sea
MKQNKPLKIKVGFDPTAPDLHLGHTVIINKMRQFQEFGHEVIFLIGDFTGMIGDPSGVNETRPVLTKEQVKENARTYKNQIFKILDKNKTRIEFNSTWMNKITSAELIDIASKYTVARMLERDDFKKRFRSENPISIHEFLYPLVQGYDSVALGCDVEMGGTDQKFNLLVGRHLQQIYGQEPQTIITLPLLEGLDGVKKMSKSSNNYVALNDSGDDMFGKIMSISDDLMWKYFELLSTKNLSEIEKLKDAIKKGANPRDIKFLLAEEIVERFHSLSIAKKAKESFLQRFQKGGIPEDIDLIEVSIKDIENDHGEINLPRLLAHTNLVNSVSEGHRAIKAGSVRIDGEKISQISLDIQSDSKLILSQGKRRFIKVKII

SEQ ID NO: 158554 - protein, 399 aa, Unknown
  Bacterial polypetide isolated from the Sargasso Sea
MKDSELALLLRGVEEIVPEKEFHKKLDEKRSLRVKLGFDPTAPDLHLGHTVILNKLKLFQDLGHQVIFLIGDFTGLVGDPSGVNETRPVLTEKEIKENAKTYERQVFKILDKKKTEIRFNSEWMSKFSPEDFIRLSSVQTVARMLERDDFSKRYSSQKPISIHEFLYPLLQGYDSVALDADIELGGTDQKFNLLLGREVQKFYGKEPQVAFTLPLLEGLDGVKKMSKTLDNYIAIEDNADDMFGKIMSISDVLMWRYFELLSFRSEKEIMELKESQKGGSNPRDIKFLLAEEIVNRFHGEGSGNSAKEEFLSRFQKGNNPSDIKEITINLEEKSITLAKVLKEAKMVPSTSEALRLIEQGAVRIEGEKILDSKHEINLNSSLLYQVGKRKFSKIKIVKK

SEQ ID NO: 158555 - protein, 85 aa, Unknown
  Bacterial polypetide isolated from the Sargasso Sea
MNDFKKQLEIIKQGIDEIIGEDDLIEKLKSGKKLTIKVGFDPTAPDLHVGHTVILRKMRQFQDLGHKVIFLIGDFTGKIGDPSGK

SEQ ID NO: 158556 - protein, 203 aa, Unknown
  Bacterial polypetide isolated from the Sargasso Sea
MNKFLKEFKDRGFFYQCTSEDELSKQLDQEKIKGYIGFDCTAESLHVGSLLQIMCLRLLQKNGHRPIVLLGGGTTRIGDPSGKDKTRKILSEKEIEKNIKNIKNILKKFLDNNDPNTKPIFVNNHTWLKDLNYISFLRDIGKHFTINRMLTFDSVKLRLDREQSLSYMEFNYMILQAYDFLELNKKENCLLQMGGSDQWGKHC

SEQ ID NO: 158557 - protein, 413 aa, Unknown
  Bacterial polypetide isolated from the Sargasso Sea
MNKSINSDFLNVMNERGFIHQITDKNNLDQELSTNIMTGYIGFDCTAPSLHVGSLIQIMMLRWFQKTGHKPIVLMGGGTTKIGDPSGKDSARPVLSSENIEKNQNNIRTIFEKFLKFGFSKNDAIMVNNSEWLEKLNYVSFLRDFGSSFSVNKLINLESVKQRLDREQNLSFLEFNYSLLQAYDFLHLYESYGCKIQMGGSDQWGNIVTGLDLIRKKTSKQTFGFTSPLLTTSSGAKMGKTANGAVWLNVEQLSDWDFWQYWRNTEDLDVIKFLKLFTEIPITEINKLQQLKGVELNDAKIILANEVTKLCRSPEAAEKISTSASNLFNKIIDDEGLPTINISKHEISFINALKELNFLKTNGEARRLIRGHGAKINDIMVSDENYILKIDDFKNGKVKISSGKKRHGLLICS

SEQ ID NO: 158558 - protein, 256 aa, Unknown
  Bacterial polypetide isolated from the Sargasso Sea
FDSVKLRLEREQSLSYMEFNYMILQAYDFLELNKSKNCLMQIGGSDQWGNIVNGVELIKRQSGNQVYGLTTPLITLASGAKMGKTEKGAVWLDKKILSHYDYWQFWRNTDDRDVIKFLKMFTDLPLNEIEKIKGNNINNLKILLANEATKMLHGEKAAKESEKMAVSTFKLDSSGETLPNIKIKNDILNKSIIELVAYVIKNISKSEIRRLIKSNGIKINNQLVNDEKLIIENKLFLEKGFIKLSVGKKKHYKIII

SEQ ID NO: 158559 - protein, 365 aa, Unknown
  Bacterial polypetide isolated from the Sargasso Sea
MKDWQTALAEIKRGVDEILPEEDLIEKLKSGKTLTIKAGFDPTAPDLHLGHTVLINKLRTFQQLGHKVVFLIGDFTGLIGDPTGKNVTRKPLSKEQVLENAKTYQEQVFKILDEDKTEIRFNSEWMDGLGAAGMIKLAASQTVARMLERDDFKKRYNNGQPIAIHEFLYPLVQGWDSVALESDVELGGTDQRFNLLMGRELQKEQGQKQQSIVMVPLLEGLDGVQKMSKSLNNYIGITDAPNDMFGKVMSISDDLMWRYYDLLSFRPLEEIAELKTRVANGENPRDIKIMLAKEIIARFHDDAAAEGAHQDFIQRFQKNAIPDDMPELEIALSDEGIAIGNLLKEANLVGSTSDAMRMIKAGAVK

SEQ ID NO: 158560 - protein, 314 aa, Unknown
  Bacterial polypetide isolated from the Sargasso Sea
MNDFKKQLEIIKQGIDEIIGEDDLIEKLKSGKKLTIKVGFDPTAPDLHVGHTVILRKMRQFQDLGHKVIFLIGDFTGKIGDPSGKNKTRPPLTNNEIKANAKTYEDQVLKVLDPDKTTIDFNSRWGDKMSAADMIKLAAQSTVARMIERDDFSKRYKNNQPISIHEFLYPLMQGYDSVELEVDVELGGTDQKFNLLVGRDLQKNVGQSPQTIITLPLLEGLDGVKKMSKTEENYIGITEKADDIFGKTMSIPDEIMMKWFDLLSLRPLEEIKKVDEDIKGGANPRDAKIDLAMELTTRFTSEKEAEKAKDNFFK

SEQ ID NO: 158561 - protein, 233 aa, Unknown
  Bacterial polypetide isolated from the Sargasso Sea
LQAYDFYELNKSNNCNLQIGGSDQWGNIVNGVDLIKRETGNNAYGLTTPLITLASGAKMGKTEKGAIWLNKKMLSPYDYWQFWRNTDDRDVIKFLKMFTDLPLDEIKNLNDKNINELKILLANNATEMLHGKKEAIKSGKLAKNIFKENSTGENLPGIKVNNDILSKNIVELISFVNKSISKSEIRRLIKSNAIKIDNKNIQDEKYIIDPVLFLDKGFVKLSIGKKKHFKITV

SEQ ID NO: 158562 - protein, 398 aa, Unknown
  Bacterial polypetide isolated from the Sargasso Sea
MADLDQVLAEIRRGTDEILLESDLLEKLKEGRPLRIKLGADPTAPDIHLGHTVILNKLRLFQELGHEVIFLIGDFTGMVGDPSGKNSTRPPLTREQVLANAETYKEQVYKILDPAKTRIEFNSSWLEPLGAAGMIRLASQQTVARMMERDDFKKRYASGQSIAIHEFMYPLLQGYDSVALKADVELGGTDQKFNLLMGRELQKAEGQKPQAVIMMPLLEGLDGVKKMSKSAHNYIGVSEPANEMFGKIMSISDELMWRYFELLSFRPLAEIEQFKQDIANGANPRDTKIALAKEIIARFHDEAAAESAHQAFIDRFQKGAIPDDIPEVELAAGEGLAIANLLKDADLVGSTSDAMRMIKQGAVKMDGEKVDDSRMTLSAGTVAVFQVGKRKFAKVTLV

SEQ ID NO: 158563 - protein, 398 aa, Unknown
  Bacterial polypetide isolated from the Sargasso Sea
MADLDQVLAEIRRGTDEILLESDLLEKLKEGRPLRIKLGADPTAPDIHLGHTVILNKLRLFQELGHEVIFLIGDFTGMVGDPSGKNSTRPPLTREQVLANAETYKEQVYKILDPAKTRIEFNSSWLEPLGAAGMIRLASQQTVARMMERDDFKKRYASGQSIAIHEFMYPLLQGYDSVALKADVELGGTDQKFNLLMGRELQKAEGQKPQAVIMMPLLEGLDGVKKMSKSAHNYIGVSEPANEMFGKIMSISDELMWRYFELLSFRPLAEIEQFKQDIANGANPRDTKIALAKEIIARFHDQAAAESAHQAFIDRFQKGAIPDDIPEVELAAGEGLAIANLLKDADLVGSTSDAMRMIKQGAVKMDGEKVDDSRMTLSAGTVAVFQVGKRKFAKVTLV

SEQ ID NO: 158564 - protein, 253 aa, Unknown
  Bacterial polypetide isolated from the Sargasso Sea
RLDREQSLSYMEFNYMILQAYDFLELNKNKNCVMQIGGSDQWGNIVNGVELIKRYSSKQSFGLTTPLITLASGAKMGKTEKGAVWLDKTLLSPYEYWQFWRNTDDRDVIKFLKMFTDLSIKKINEIKNKNVNDLKITLANEATSMLHGKSAAEKAEQTARKTFVSGSIGEDLPTLKIGKKEIENGVNIIDLVVLSKLLVSKSEVRRTIKNRGIKINNEIIEDQNLQILLKDFKNQNFLKLSLGKKKHVIIKMG

SEQ ID NO: 158565 - protein, 295 aa, Unknown
  Bacterial polypetide isolated from the Sargasso Sea
MTSGKEQILEIKRGVDEILVEKDFLDRLKQSKPLKIKVGFDPTAPDLHLGHTVIINKMRQFQEFGHEVIFLIGDFTGMIGDPSGVNETRPVLTKEQVKENARTYKNQIFKILDKDKTRIEFNSFWMNKITSAELIDIASKYTVARMLERDDFKKRFRSENPISIHEFLYPLVQGYDSVALGSDVEMGGTDQKFNLLVGRHLQQIYGQEPQTIITLPLLEGLDGVKKMSKSSNNYVALNDSGDDMFGKIMSISDDLMWKYFELLSTKNLSEIEKLKDTVKNGANPRDIKFLLAEEK

SEQ ID NO: 158566 - protein, 202 aa, Unknown
  Bacterial polypetide isolated from the Sargasso Sea
MNKFLKEFKDRGFYYQCTNEKELSNLINKKKIRAYIGFDCTAASLHVGSLLQIMCLRLLQKHGHQPIVLLGGGTTRIGDPSGKDKTRKILSEKEIKKNSANIKKILKNFLNTKDKKIKPIFVDNFKWLKKLNYISFLRDIGKHFTINKMLTFDSVKTRLEREQSLSYMEFNYMILQAYDFLELNQKEKCELQIGGSDQWGNI

SEQ ID NO: 158567 - protein, 251 aa, Unknown
  Bacterial polypetide isolated from the Sargasso Sea
MNNFLKEFKERGYYYQCTNEIELSNLLNKESTNAYIGFDSTAPSLHVGSLLQIMCLRLLQKYGHRPIVLLGGGTTRIGDPSGKEETRKILSEKQIENNINNIKKVFKIFLKTNNSKLKPIFVNNYKWLSKLNYINFLRDIGKHFTINKMLTFDSVKLRLEREQSLSYMEFNYMILQAYDFFELNKSNKCNLQIGGSDQWGNIVNGVELIKRESGNQAFGLTTPLITLASGTKMGKTEKGTVWLNKENVISI

SEQ ID NO: 158568 - protein, 346 aa, Unknown
  Bacterial polypetide isolated from the Sargasso Sea
MENSFLKEFKDREYFNQCTNSEELEQLMSKKKIKAYIGFDCTASSLHVGSLLQIMCLRLLQKHGHQPIVLLGGGTTRIGDPSGKEETRKILSEKEIEKNIKNIEKVFKIFLKTKSSKLKPIFVNNYKWLGKLNYIKFLREIGKHFTINKMLSFDSVKLRLEREQSLSYMEFNYMILQAYDFLELNKTKNCLMQIGGSDQWGNIVNGVELIKRHSAKHVFGLTTPLITLASGAKMGKTEKGAVWLDEKLLSAYEYWQFWRNTDDRDVIKFLKMFTDLSIDRINKLKNENINNLKIILANETTAMLHGKTAALKAEKTAKATFESRGAGDDLPEIKMKESILKLELKF

SEQ ID NO: 158569 - protein, 330 aa, Unknown
  Bacterial polypetide isolated from the Sargasso Sea
CTSEDELSKKLDEEKIKGYIGFDCTAESLHVGSLLQIMCLRLLQKNGHQPIVLLGGGTTRIGDPSGKDKTRKMLSEEEIEKNIKNIKSIFKKFLDNKDPNTKPIFVNNYTWLKDLNYISFLRDIGKHFTINRMLTFDSVKLRLDREQSLSYMEFNYMILQAYDFLELNKKENCVLQIGGSDQWGNIVNGVELIKRYSNNQSFGLTTPLITLATGAKMGKTESGAIWLDEKYLSAYDYWQFWRNVDDRDVIKFLKMFTEIDIKEIETIKDKDINELKILLANKTTEMLHGKEAAKNSEQAAKEAFSGNALGSNLPKVNIQSNKIKDKINIV

SEQ ID NO: 158570 - protein, 279 aa, Unknown
  Bacterial polypetide isolated from the Sargasso Sea
MKSKFLQELSSRGYLNQCTDLDKLDDICSRKPILGYIGFDCTAKSLHVGSLLQIMILRLMQKHGHRPIVLLGGGTTLIGDPSGKDTTRKILKSKEIQKNIKSIKKTFVKILSNSSTKTKPIFVDNSKWLTKLNYIKFLREIGSHFTINKMLTFESVKSRLEREQSLSYMEFNYMILQAYDFYQLYLKNKCILQIGGSDQWGNILNGVDLIRRILKQDSFGLTSPLITLASGLKMGKTEKGAIWLNKDLLSPYDYWQFWRNTDDRDVRRFLNFFYRLENY

SEQ ID NO: 158571 - protein, 226 aa, Unknown
  Bacterial polypetide isolated from the Sargasso Sea
MNKFLQEFHDRGYFYQCTDNEGLSRILNRKIRAYIGFDCTAESLHVGSLLQIMCLRLLQKHGHQPIVLLGGGTTRIGDPSGKDKTRKILDEKIIEKNIKNIEKILKIFLTSKNKETSPIFVNNYDWLKNLNYISFLRDVRKHFTINKMLSFDSVKLRLEREQSLSYMEFNYMILQAYDFLELNKKKDCVLQIGGSDQWGNIVNGVELVKRYSSKEVFGLTTPLITL

SEQ ID NO: 158572 - protein, 302 aa, Unknown
  Bacterial polypetide isolated from the Sargasso Sea
GFDPTAPDLHLGHTVLINKLRHFQQLGHQIIFLIGDFTGMIGDPSGKNKTRPPLDKTDIDENAKSYKTQIFKILDSKLTDVRFNSEWSKKLGAEGVIKLASQYNLARMLERDDFNKRYKSNQSIALHELLYPLIQANDSITLHADVELGGTDQKFNLLVGRDLQRAFGQEPQVVITVPILEGLDGKNKMSKSLDNYVGIDESPNEMFGKIMSISDELMWRWFDLLSFKSSDEINALKSQQDNGRNPRDIKIELAKELIARFHDEKSANDAESNFIDQFQKKNIPDDIEEILHKISGESIPLA

SEQ ID NO: 158573 - protein, 241 aa, Unknown
  Bacterial polypetide isolated from the Sargasso Sea
NAYIGFDSTAPSLHVGSLMQIMCLKLLQNHGHRPIVLLGGGTTRIGDPSGKEETRKILSEKQIENNIKNIQKVFKIFLKTNNPKLKPIFVNNYKWLGKLNYIKFLREIGRHFTINKMLSFDSVKLRLEREQSLSYMEFNYMILQAYDFLELNKSKNCLMQIGGSDQWGNIVNGVELIKRQSGNQVFGLTTPLITLASGAKMGKTEQGAVWLDKKMLSAYDYWQFWRNTDDRDVIKFLKMFT

SEQ ID NO: 158574 - protein, 297 aa, Unknown
  Bacterial polypetide isolated from the Sargasso Sea
LQIMVLKLLQKYGHKPIILLGGGTTMIGDPSGKDSTRKILSKKEIKKNIVGIKKNFEKLLDFRDKKTKPIFVDNYNWLNNLKYLDFLRDIGRHFTINKMLAFDSVKLRLEREQSLSYMEFNYMILQAYDFLKLNDKKSCHLQIGGSDQWGNILNGVDLIRRVSKKNVFGLTTPLITLSSGAKMGKTEKGAVWLNKNKFSPYDYWQFWRNTEDKDVVNFMKFFTQINLREIDEIVNKEKNINNLKLILANEATKILHGSKAAKDSEKTASDTFLFKGVGKNLPEIKIDRKEMKKGSIF

SEQ ID NO: 158575 - protein, 275 aa, Unknown
  Bacterial polypetide isolated from the Sargasso Sea
LFLRDIGKHFTINKMLTFDSVKTRLEREQSLSYMEFNYMILQAYDFLELNKNENCALQIGGSDQWGNIVNGVELIKRYSNKQGFGLTTPLITLASGAKMGKTENGAIWLDEKYLPAYDYWQFWRNTDDRDVVKFLKFFTDLEIAEIDKVKEKDINELKTLLANETTTMLHGQKAAQESEQAAREAFSGNSLGSNSPSIKISNKDIEKKLGIIDLVILSKLENSKSEIRRLIKGNAIKINDEIISDEKFIINHDLFKEDYLKLSVGKKRHLKIVIS

SEQ ID NO: 158576 - protein, 267 aa, Unknown
  Bacterial polypetide isolated from the Sargasso Sea
MKNNFLQEMQDRGFLNQCTNLDKLKEICNKRSISGYIGFDCTASSLHVGSLLQIMILKLMQKHGHRPIVLLGGGTTLIGDPSGKDITRKILEQSEIKSNIKSIKKLFNKILDTSNKKISPIFVDNADWLTKLNYINFLRDTGSHFTINKMLTFDSVKLRLDREQSLSYMEFNYMILQAYDFYQLFKNNNCVLQIGGSDQWGNIVNGVDLIRRKLQKEAYGLTTPLITLASGAKMGKTEKGAIWLNEDKLSPYDYWQFWRNTDDRDVK

SEQ ID NO: 158577 - protein, 225 aa, Unknown
  Bacterial polypetide isolated from the Sargasso Sea
MQIMCLKLLQKHGHRPIVLLGGGTTRIGDPSGKEETRKILSEKQIEINIKNIQKVFNTFLKSDNPKLKPIFVNNYKWLRKLNYINFLREIGKHFTINKMLSFESVKLRLEREQSLSYMEFNYMILQAYDFLELSKTKNCILQIGGSDQWGNIVNGVDLIKRHSNKHVFGLTTPLVTLASGAKMGKTEKGAIWLDKKLLSPYDYYQFWRNTDDKDVMKFLKMFTDL

SEQ ID NO: 158578 - protein, 262 aa, Unknown
  Bacterial polypetide isolated from the Sargasso Sea
YEDFIEQLKWRGMLHDLIPGTEEHLEKNKTIGYIGFDPTSDSLHIGSLVPIFILKHFQNSGHTPIVLLGGATGMIGDPSGKSDERNLLDKNVLDYNEKKLTKQFEKFLDFKSNKPNKAILVNNYNWMKKFSIIDFSRDIGKHITVNYMMAKESVKKRISKDTTQGMSFTEFTYQLIQGYDFLHLYKEMNCMLQMGGSDQWGNITTGTELIRRKENKKVFAMTCPLIKKSDGSKFGKSEGGNIWLDKEKTSVYKFYQYWLNIS

SEQ ID NO: 158579 - protein, 282 aa, Unknown
  Bacterial polypetide isolated from the Sargasso Sea
APDLHLGHTVLINKLRQFQTLGHNIIFLIGDYTGMIGDPSGKSATRPPLSAEEIKENSKTYEKQIFKILDPDLTTVAFNSSWMNKMNAADLIRLASHHTVARMLERDDFDKRYKSNQAISIHEFLYPLIQGYDSVALDADVELGGTDQKFNLLVGRQLQELHAKSPQVVITMPILEGLDGSQKMSKSLGNYIGVDEPAKEMFGKIMSISDNLMWRYFELLSFKNLEEIEQFKKQVETGTNPRDIKFELAQEIITRFHDLKSAQDAKNDFVKRFSDNAIPECY

SEQ ID NO: 158580 - protein, 89 aa, Unknown
  Bacterial polypetide isolated from the Sargasso Sea
MNFFDELKNRGIINDYSHDELVDLLNNEQVSFYCGFDPTSKSLQLGNLFVVITMMRFQRQGHKPYALVGGATGMIGDPSGKSDERKLLS

SEQ ID NO: 158581 - protein, 232 aa, Unknown
  Bacterial polypetide isolated from the Sargasso Sea
MNKFLKEFKDRGFFYQCTSEDELSKQLDEEKIKGYIGFDCTAESLHVGSLLQIMCLRLLQKNGHRPIVLLGGGTTRIGDPSGKDKTRKILSEEEIEKNIKNIKNILKKFLDNDDPKTKPIFVNNYTWLKNLNYISFLRDIGKHFTINRMLTFDSVKLRLDREQSLSYMEFNYMILQAYDFLELNKKENCLLQIGGSDQWGNIVNGVELIKRHSNTQTFGLTTPLITLATGAK

SEQ ID NO: 158582 - protein, 263 aa, Unknown
  Bacterial polypetide isolated from the Sargasso Sea
IRRWNTRIGDPSGKDKTRKILDESEIEKNIKNIQNILKKFLDNNDPKTTPIFVNNYTWLKDLNYISFLRDIGKHFTINRMLTFDSVKLRLEREQSLSYMEFNYMILQAYDFLELNKKENCVLQIGGSDQWGNIVNGVELIKRYSNNQTYGLTTPLITLATGAKMGKTENGAIWLDEKYLSAYDYWQFWRNVDDRDVTKFLKMFTDIDISEINSLEGKNINESKILLANKATAMLHGEDAAQNSEQAAKEAFSGNSLGSNLPSV

SEQ ID NO: 158583 - protein, 260 aa, Unknown
  Bacterial polypetide isolated from the Sargasso Sea
HQPIVLLGGGTTRIGDPSGKEETRRILSEKQIEKNIKNIKKIFKIYLKTNNLKTKPIFVNNYKWLGKLNYIKFLREIGKHFTINKMLSFDSVKLRLDREQSLSYMEFNYMILQAYDFLELNKNKNCLMQIGGSDQWGNIVNGVELIKRHSNKKVFGLTTPLITLASGSKMGKTEKGAIWLDNKLLSAYDYWQFWRNTDDRDVLRFLKMFTDLSLDKIEQIKNENINNLKILLANESTSMLHGKSMTVKAELTAKNTFEKR

SEQ ID NO: 158584 - protein, 285 aa, Unknown
  Bacterial polypetide isolated from the Sargasso Sea
MQDTFLTEFEKRGYFSQCTDQSSLNELTSRSKIKAYIGFDCTAPSLHVGSLMQIMCLRLLQKYGHQPIVLLGGGTTLIGDPSGKEETRKILSKKEIDKNIKSIEDVFNIFLKSKNPKTKPIFVNNYSWLNKLNYISFLREIGKHFTINKMLTFDSVKLRLEREQSLSYMEFNYMMLQAYDFYELNKMYKCILQIGGSDQWGNIVNGIDLIKRKEKNIVYGLTTPLLTLSSGAKMGKTEKGAIWLNKKMLSPYDYWQFWRNADDKDVINFLKLFTDIDLEQIEDLK

SEQ ID NO: 158585 - protein, 305 aa, Unknown
  Bacterial polypetide isolated from the Sargasso Sea
MCLRLLQKSGHRPIVLLGGGTTRIGDPSGKDKTRKILSEEEIEKNIKNIKNILKKFLDNDDPNTKPIFVNNYTWLKDLNYISFLRDIGKHFTINRMLSFDSVKLRLDREQSLSYMEFNYMILQAYDFLELNRKENCILQIGGSDQWGNIVNGVELIKRYSNNQTFGLTTPLITLATGAKMGKTESGAIWLDEKYLSAYDYWQFWRNVDDRDVIKFLKMFTEVEIKEIETIKDKDINELKTLLANKTTEMLHGKEAAKNSEQAAKEAFSGNTLGSNLPKVNIQSKKIEEKMNIVDLVLLSKLENSK

SEQ ID NO: 158586 - protein, 254 aa, Unknown
  Bacterial polypetide isolated from the Sargasso Sea
MKNSFLKEFNEREYFNQCTNLESLNGLMDKKKIRAYIGFDCTAQSLHVGSLLQIMCLRLLQKHGHQPIILLGGGTTRIGDPSGKEETRKILTEKEIEKNIKNIKKVFSIFLSSKNSKTRPIYVNNYKWLGKLNYIKFLRDIGKHFTINKMLSFDSVKLRLEREQSLSYMEFNYMILQAYDFLELNKTKNCLMQIGGSDQWGNIVNGVELVKRYSSKQVYGLTTPLITLASGAKMGKTEKGAVWLDKKLLSSYDY

SEQ ID NO: 158587 - protein, 267 aa, Unknown
  Bacterial polypetide isolated from the Sargasso Sea
MNNFLKEFKDRGYYYQCTNELELSDLFNKESINAYIGFDSTAPSLHVGSLLQIMCLRLLQKHGHRPIVLLGGGTTRIGDPSGKEETRKILSEKQIESNINNIKNVFKIFLKTNNTKLKPIFVNNYKWLSKLNYINFLRDIGRHFTINKMLTFDSVKLRLEREQSLSYMEFNYMILQAYDFYELNKSNKCKLQIGGSDQWGNIVNGVELIKRESGNHAYGLTTPLITLASGTKMGKTEKGAVWLDKEMLSPYDYWQFWRNTDDRDVLK

SEQ ID NO: 158588 - protein, 205 aa, Unknown
  Bacterial polypetide isolated from the Sargasso Sea
MNKFLKEFKDRGFFYQCTSEDELSKQLDKEKIKGYIGFDCTAESLHVGSLLQIMCLRLLQKNGHQPIVLLGGGTTRIGDPSGKDKTRKILSEEDIEKNIKNIKNILKKFLDNEDPNTKPIFVNNYTWLKDLNYISFLRDIGKHFTINRMLTFDSVKLRLDREQSLSYMEFNYMILQAYDFLELNRKENCVLQIGGSDQWGNILMV

SEQ ID NO: 158589 - protein, 288 aa, Unknown
  Bacterial polypetide isolated from the Sargasso Sea
MNNFLNEFKDRGYFYQCTDEIGLSKLLNEKSNNVYIGFDSTAPSLHVGSLLQIMCLRLLQKHGHRPIVLLGGGTTRIGDPSGKEETRKILSEKQIENNINNIKKVFKIFLKTNDSKLKPIFVNNYKWLSKLNYIKFLRDIGKHFTINKMLSFDSVKLRLEREQSLSYMEFNYMILQAYDFFELNKSNSCNLQIGGSDQWGNIINGVELIKRETGKQAYGLTTPLITLASGTKMGKTEKGAIWLNKEMLSPYDYWQFWRNTDDRDVLKFLKMFTDLPLDKIENIKDPKY

SEQ ID NO: 158590 - protein, 301 aa, Unknown
  Bacterial polypetide isolated from the Sargasso Sea
KRGYFNQCTDLSALAELMSKSKIRAYIGFDCTAQSLHVGSLMQIMCLRLLQKYGHQPIILLGGGTTLIGDPSGKEETRKILDKKEINKNIKSIQNVFKIFLKSKNSKTKPIFVNNYSWLSKLNYINFLRDIGKHFTINKMLTFDSVKLRLEREQSLSYMEFNYMMLQAYDFYELCKRYKCILQIGGSDQWGNIVNGTDLIKRKEKKQTYGLTTPLITLSSGAKMGKTEKGAIWLNKNMLSPYDYWQFWRNTDDKDVINFLKLFTDLSLEKIENLKNNEDINKLKILLANETTKMLHETRLQ

SEQ ID NO: 158591 - protein, 247 aa, Unknown
  Bacterial polypetide isolated from the Sargasso Sea
MNKFLKEFKDRGYFYQCTSEDELSDLLDKKSINAYIGFDSTASSLHVGSLLQIMCLRLLQKHGHRPIVLLGGGTTRIGDPSGKEETRKILSDKQIEKNIKNIKKVFKIFLKTKNPKLKPIFVNNYKWLGKLNYIKFLREIGKHFTINKMLSFDSVKLRLDREQSLSYMEFNYMILQAYDFLELNKNKNCTMQIGGSDQWGNIVNGVELIKRHSSKHVFGLTTPLITLASGTKMGKTEKGAVWLDNKL

SEQ ID NO: 158592 - protein, 294 aa, Unknown
  Bacterial polypetide isolated from the Sargasso Sea
MEELKYRGFLNQCTNEESLNKILKSKNITFYIGFDCTAKSLHVGSLIQIMIMRLFQKYGHTPIILIGTGTTRIGDPSGKDETRKILTEDEIRNNANNLKAVFDKYLSFKNKKNKALIMDNADWLDKLNYVDFLRDFGKHFTINKMLTFDSVKIRLEREQSLSFVEFNYMIFQAYDFYELNNRNSCTLQIGGSDQWGNIVNGVELIRRVSGKEVFGLTTPLLTNSNGDKMGKTVDGAIWLNDDLLSAYDYWQFWRNIDDRDVIRFMKLFTDLSKEQIDGYEENSSKNINDLKIIL

SEQ ID NO: 158593 - protein, 271 aa, Unknown
  Bacterial polypetide isolated from the Sargasso Sea
IFINNYKWLGKLNYIKFLRDIGKHFTINKMLSFDSVKLRLEREQSLSYMEFNYMILQAYDFLELNKTKNCSLQIGGSDQWGNIVNGVDLIKRHSNKQVFGLTTPLITLASGIKMGKTERGAIWLDNKLLSSYDYWQFWRNTDDRDVIKFLKMFTDLKIEKINEIKNKDINTLKILLANEATTMLHGKIAANKAEQTAKNTFENKSVGDSLPTIKVKKEKFKSGINIIDIVFASNLLNSKSEVRRMINNKGIKINNITVENEKLKIFLDTFN

SEQ ID NO: 158594 - protein, 305 aa, Unknown
  Bacterial polypetide isolated from the Sargasso Sea
MKESLELIKRGTDEVLTEDDLVSKLKSKKQLTVKVGFDPTAPDLHLGHTVILNKMRHFQDLGHKVVFLIGDFTGRIGDPSGKNKTRPSLDKEELEKNAKTYSDQVFKILNKDLTDIRFNSEWCEDLGADGIIGLASKYNLGRMLERDDFSKRYKANQQIAIHEFLYPLIQAYDSIALNADVEMGGTDQKFNLLVGRELQRAFNQEPQVCITLPILEGLDGINKMSKSLDNYVGINEDPDEMFGKIMSISDDLMWRWFELLSFRPINEVNELKKEVKSGMNPRDTKILLAEEIIERFHSKKDAENA

SEQ ID NO: 158595 - protein, 305 aa, Unknown
  Bacterial polypetide isolated from the Sargasso Sea
TVKVGFDPTAPDLHLGHTVILNKMRHFQDLGHKVVFLIGDFTGRIGDPSGKNKTRPSLDKEELEKNAKTYSNQVFKILNKDLTDIRFNSEWCEDLGADGIIGLASKYNLGRMLERDDFSKRYKANQQIAIHEFLYPLIQAYDSIALNADIEMGGTDQKFNLLVGRELQRAFDQEPQVCITLPILEGLDGTNKMSKSLDNYVGINEDPDEMFGKIMSISDDLMWRWFELLSFRPINEVKELKNEVKSGMNPRDTKILLAEEIVERFHSKEDAENAKNTFLDRFQKGAKPKNIETFSISLDDDIAIG

SEQ ID NO: 158596 - protein, 222 aa, Unknown
  Bacterial polypetide isolated from the Sargasso Sea
LVSKLKSKKQLTVKVGFDPTAPDLHLGHTVILNKMRHFQDLGHKVVFLIGDFTGRIGDPSGKNKTRPSLDKEELEKNAKTYSDQVFKILNKDLTDIRFNSEWCEDLGADGIIGLASKYNLGRMLERDDFSKRYKANQQIAIHEFLYPLIQAYDSIALNADVEMGGTDQKFNLLVGRELQRAFNQEPQVCITLPILEGLDGINKMSKSLDNYVGINEDPDEMF

SEQ ID NO: 158597 - protein, 259 aa, Unknown
  Bacterial polypetide isolated from the Sargasso Sea
MDFIDELKWRGLIHDSTPGLHEYLKESQRTAYIGFDPTSDSLHIGSLVPIMLLAHFQKCGHQPIALVGGATGMIGDPSGKSAERNLLDEATLKKNESCIKDQLSRFLSFDDKLSNHALIKNNYDWMKDFSFLDFIRDIGKHITVNYMKSKDSVKNRIDSESGTGMSFTEFTYQLVQGFDFLFLNREYNCSIQMGGSDQWGNITTGMELIRRIDNSKGYALTCPLITKSDGSKFGKSEGGNIWLDPKKTSAYKFYQYWLN

SEQ ID NO: 158598 - protein, 314 aa, Unknown
  Bacterial polypetide isolated from the Sargasso Sea
MCLRLLQKYGHRPIVLLGGGTTRIGDPSGKEETRKILSEKQIEKNINNIKKVFKIFLKTNNSKLKPIFVNNYKWLSKLNYIDFLRDIGKHFTINKMLTFDSVKLRLEREQSLSYMEFNYMILQAYDFYELNKSNKCNLQIGGSDQWGNIVNGVELIKRESGNQVFGLTTPLITLASGTKMGKTEKGAVWLNKEMLSPYDYWQFWRNTDDRDVLKFLKMFTDLSLDKIEKEKEKDINELKILLANNATEMLHGIKEAEKSEKLAKNTFKENSTGENLPGIKVNNDILSKNIVELISFVNKDISKSEIRRLIKSNG

SEQ ID NO: 158599 - protein, 272 aa, Unknown
  Bacterial polypetide isolated from the Sargasso Sea
KYGHQPIVLMGGGTTLIGDPSGKEETRKILDKKEIDKNIKSIQNVFNIFLKSKNPKTKPIFVNNYSWLSKLNYISFLREIGKYFTINKMLTFDSVKLRLEREQSLSYMEFNYMMLQAYDFYELSKRNKCILQIGGSDQWGNIVNGTDLIKRKDKKQAYGLTTPLITLSSGAKMGKTEKGAIWLNKKMLSPYDYWQFWRNTDDKNVINFLKLFTDLDIEKINNLKNNQNINDLKVLLANEATTMLHGYKASKDSEITAKKTFEEKSVEKICQQ

SEQ ID NO: 158600 - protein, 242 aa, Unknown
  Bacterial polypetide isolated from the Sargasso Sea
MQKNFVDELRWRGLINDIIPDTEKVLLEGPMNGYIGFDPTSDSLHIGSLVQIIILMHFQKFGHRPIILLGGATGMIGDPSGKSKERNLLDNKTLEENCRLIKFQMEKFLDFDKKKSNSTLIVNNYDWMKDFSLVDFSRKIGKHITVNYMMAKDSVKKRLGKESNEGMSFTEFTYQLIQGYDFLYLHNNYDCKIQIGGSDQWGNITTGTELIRRKTGQKAYALTCPMVKKVDGTKLAKQKKEI

SEQ ID NO: 158601 - protein, 217 aa, Unknown
  Bacterial polypetide isolated from the Sargasso Sea
MNNFLKEFKNRGYFYQCTDEIGLSKLLNDESSNAYIGFDSTAPSLHVGSLLQIMCLRLLQKHGHRPIVLLGGGTTRIGDPSGKEETRKILSEKQIESNINNIKKVFKIFLKTKNKKLKPLFVNNYKWLSKLNYIKFLRDIGKHFTINKMLSFESVKLRLEREQSLSYMEFNYMILQAYDFYELNKSNKCNLQIGGSDQWGNIINGVELIKRESGKQA

SEQ ID NO: 158602 - protein, 225 aa, Unknown
  Bacterial polypetide isolated from the Sargasso Sea
KPIFVNNYKWLSKLNYIDFLRDIGKHFTINKMLTFDSVKLRLEREQSLSYMEFNYMILQAYDFFELNKSNKCNLQIGGSDQWGNIVNGVELIKRESGNQAFGLTTPLITLASGTKMGKTEKGAVWLNKEMLSPYDYWQFWRNTDDRDVLKFLKMFTDLSLDKIEKEKDKDINELKILLANNATEMLHGIKEAEKSEKLAKNTFKENSTGENLPGIKINNDILSKN

SEQ ID NO: 158603 - protein, 283 aa, Unknown
  Bacterial polypetide isolated from the Sargasso Sea
MTESKNKSASKEVLAELKRGVEEMLLEEELLERLASNRPLRIKVGFDPTAPDLHLGHTVIINKMRQFQELGHEVVFLIGDFTGLIGDPSGKNVTRPPLTAEEIEANAATYKAQVFRILDPDKTQVEFNSKWCSELGAEGIIRLASRHTVARMLERDDFSKRYKGGQPIAIHEFLYPLMQGYDSVALKTDVEMGGTDQKFNLLVGRELQKQYGQPSQVVITLPLLEGLDGVQKMSKSLGNIVGITDTPDDMFGKLMSISDDLMWRYFELLSFQSLLDIKKLRES

SEQ ID NO: 158604 - protein, 285 aa, Unknown
  Bacterial polypetide isolated from the Sargasso Sea
IFKRIKDRGYFYQCTSEDELSKLLDKEKIKGYIGFDCTAESLHVGSLLQIMCLRLMQKYGHRPIVLIGGGTTRIGDPSGKDKTRKILTEEEIEKNIKNIEKILKNYLDNNDPKTKPIFVNNYSWLKGLNYISFLRDIGKHFTINKMLTFESVKTRLDREQSLSYMEFNYMILQAYDFLELNKNENCTLQIGGSDQWGNIVNGTELIKRYSNKHAYGLTTPLITLASGAKMGKTETGAIWLDKRLLSSYDYWQFWRNTDDRDVIKFLKMFTDLNIDEINKMKDEDI

SEQ ID NO: 158605 - protein, 255 aa, Unknown
  Bacterial polypetide isolated from the Sargasso Sea
MKKFLDNDDPNTKPIFVNNYTWLKNLNYISFLRDIGKHFTINRMLTFDSVKLRLQREQSLSYMEFNYMILQAYDFLELNKKEDCILQIGGSDQWGNIVNGVELIKRYSNNQTFGLTTPLITMATGAKMGKTESGAIWLDEKYLSAYDYWQFWRNVDDRDVIKFLKMFTEIEIMEIEKNSHKDINQLKILLANKTTEMLHGKEAATNSEQAAKEAFSGNTLGLNLPKFNIQKSKIEEKINIVDLVLLSKLENSKSE

SEQ ID NO: 158606 - protein, 231 aa, Unknown
  Bacterial polypetide isolated from the Sargasso Sea
MNKFLKEFKDRGYFYQCTSEEELSKLLNKEKIKGYIGFDCTAESLHIGSLLQIMCLRLMQKHGHRPIVLIGGGTTRIGDPSGKDKTRKILTEEEIEKNIKNIEKILKNYLDNNDPKTKPIFVNNYSWLKGLNYISFLRDIGKHFTINKMLTFESVKTRLDREQSLSYMEFNYMILQAYDFLELNKKENCTLQIGGSDQWGNIVNGTELIKRYSNKQAYGLTTPLITLASGA

SEQ ID NO: 158607 - protein, 305 aa, Unknown
  Bacterial polypetide isolated from the Sargasso Sea
SEDELSKLLDKEKIKGYIGFDCTAESLHVGSLLQIMCLRLMQKHGHRPIVLIGGGTTRIGDPSGKDKTRKILTEEEIEKNIKNIEKILKNYLDNNDPKTKPIFVNNYSWLKGLNYISFLRDIGKHFTINKMLTFESVKTRLDREQSLSYMEFNYMILQAYDFLELNKNENCTLQIGGSDQWGNIVNGTELIKRYSNKHVYGLTTPLITLASGSKMGKTETGAIWLDKRLLSSYDYWQFWRNTDDRDVIKFLKMFTDLNIDEINKMKDEDINKLKIKLANETTSMLHGKNEALSAEKTAKKTLKKI

SEQ ID NO: 158608 - protein, 222 aa, Unknown
  Bacterial polypetide isolated from the Sargasso Sea
MNKFLKEFKDRGYFYQCTSEDALSNLLDKEKIKAYIGFDCTAESLHVGSLLQIMCLRLLQKNGHRPIVLLGGGTTRIGDPSGKDKTRKILSEEEIEKNIQNIKNILKKFLDNDDPYTKPIFVNNYSWLKNLNYISFLRDIGKHFTINRMLTFDSVKLRLDREQSLSYMEFNYMILQAYDFLELNKKENCVLQIGGSDQWGNIVNGVELIKRYSNNQTFGLTT

SEQ ID NO: 158609 - protein, 302 aa, Unknown
  Bacterial polypetide isolated from the Sargasso Sea
VLINKMRQFQDMGHEVHFLIGDFTGMIGDPSGKNTTRVALTREQVLENSKTYENQIFKILDPNKTKLEFNSSWMNKLDAADMIRLASNCTVARMLERDDFSKRYSQEQPIAIHEFLYPLLQGYDSVALEADVELGGTDQKFNLLMGRELQKHFKQRPQIVITMPLLEGLDGVDKMSKSLNNAIGINDPAEDMFAKLMSISDELMWRYFELLSFKSLSEIEAYQREVEQGKNPRDVKVALAQEIVTRFHDGDAAESALQVFEARFKRHELPDDLEPIDIIVTDDGLEIGYILKQADLVTSTSE

SEQ ID NO: 158610 - protein, 193 aa, Unknown
  Bacterial polypetide isolated from the Sargasso Sea
GSLLQIMCLRLLQKHGHQPIVLLGGGTTRIGDPSGKEETRKILSEKEIEKNIKNIEKIFKIFLKTKKNKTKPIFINNYKWLGKLNYIKFLRDIGKHFTINKMLSFDSVKLRLEREQSLSYMEFNYMILQAYDFLELNKTKNCLMQIGGSDQWGNIVNGVELIKRHSSKQVFGLTTPLITLASGVKMGKTEKGA

SEQ ID NO: 158611 - protein, 242 aa, Unknown
  Bacterial polypetide isolated from the Sargasso Sea
MKNSFLQEFNEREYFNQCTNLESLNGLMDKKKIRAYIGFDCTAQSLHVGSLLQIMCLRLLQKHGHQPIILLGGGTTRIGDPSGKEETRKILTEKEIEKNIKNIKKVFSIFLDNKNSKTRPIYVNNYKWLGKLNYIKFLREIGKHFTINKMLSFDSVKLRLEREQSLSYMEFNYMILQAYDFLELNKTKNCLMQIGGSDQWGNIVNGVELVKRYSSKQVYGLTTPLITLASGAKMGKTEKGAV

SEQ ID NO: 158612 - protein, 223 aa, Unknown
  Bacterial polypetide isolated from the Sargasso Sea
MTLIEELKFRGFLHQCTNEVILNELINSNKIKFYIGFDCTAKSLHVGSLIQIMIMRLFQKYGHTPIVLIGKGTTRIGDPSGKDETRKILSDDEIDSNAENLKQVFDRFLLSDNEDSKWVTKDNSEWLDKLNYVNFLRDYGKHFTINKMLSFDSVKIRLDREQSLNFVEFNYMIFQAYDFFELYKRDNCVLQIGGSDQWGNIVNGVELIRKASGKESFGLTTPL

SEQ ID NO: 158613 - protein, 262 aa, Unknown
  Bacterial polypetide isolated from the Sargasso Sea
MENSYLSEFKNREYFHQCTGSDELKKLMSKKKIRAYIGFDCTASSLHVGSLLQIMCLRLLQKHGHQPIVLLGGGTTRIGDPSGKEETRKILSENKIENNIKNIEKVFKIFLKTKNPKTKPIFVNNFKWLGKLNYIKFLREIGKHFTINKMLSFDSVKLRLDREQSLSYMEFNYMILQAYDFLELNKNKNCLMQIGGSDQWGNIVNGVELIKRHSGKQVFGLTTPLITLASGSKMGKTEKGAIWLDKKLLSSYDYWQYWRNTD

SEQ ID NO: 158614 - protein, 262 aa, Unknown
  Bacterial polypetide isolated from the Sargasso Sea
MNKFLQEFHDRGYYYQCTDNNELSKILDSKKIRAYIGFDCTAESLHVGSLLQIMCLRLLQKHGHQPIVLLGGGTTRIGDPSGKDKTRQLLDEKTIEKNIKNIEKILKIFLTTDNKNTSPIFVNNYEWLKDLNYISFLRDIGKYFTINKMLSFDSVKLRLEREQSLSYMEFNYMILQAYDFLELNKKHGCLLQIGGSDQWGNIVNGVELIKRHSSNESFGLTTPLITLASGAKMGKTESGAIWLDKNLLSPYEYWQFWRNVDD

SEQ ID NO: 158615 - protein, 311 aa, Unknown
  Bacterial polypetide isolated from the Sargasso Sea
NMENSFLKEFKDREYFNQCTNSEELEQLMRKKKIKAYIGFDCTASSLHVGSLLQIMCLRLLQKYGHQPIVLLGGGTTRIGDPSGKEETRKILSEKQIEKNIRNIEKVFKIFLKTKNPKLKPIFVNNYKWLGKLNYIKFLREIGKHFTINKMLSFDSVKLRLDREQSLSYMEFNYMILQAYDFLELNKTKNCLMQIGGSDQWGNIVNGVELIKRYSANQVFGLTTPLITLASGAKMGKTEKGAIWLDQKLLSPYDYWQFWRNTDDRDVIKFLKMFTDLELNKIEKLKNEDINKLKIILANETLLQCYPWKTC

SEQ ID NO: 158616 - protein, 306 aa, Unknown
  Bacterial polypetide isolated from the Sargasso Sea
DPSGKDSTRKILNQKEIKNNIKNIKQVFTKVLDTSKNKTKPIFVDNYDWLAKLNYIDFLRDVGKHFTINKMLTFDSVKLRLEREQSLSYMEFNYMILQAYDFYQLFKKNKCILQIGGSDQWGNIVSGVELIRRMLKKESYGLTTPLITLSSGAKMGKTEKGAVWLNEKLFSSYDYWQFWRNTDDRDVKNFLNFFTEIKSDKVNLLIESEKNINKLKILLANEATKILHGEAAAKKAEKTAKETFVSGGFGSNLPEIKIKKDDLNRGIKILDLLVLNKVMSSKSEVRRAVKSNALKINNEVLTDENK

SEQ ID NO: 158617 - protein, 270 aa, Unknown
  Bacterial polypetide isolated from the Sargasso Sea
MPEHPQSLPAWLARGMADLFPDGDSADVDQALAARLAAASAQGRPLRIKLGIDPTGSNIHLGHSILFRKLRAFQDAGHTAVLIIGDFTARIGDPTGKSATRVQLTAEDVEANAATYLAQLGHGQPRERALLDFETPGRLEVRRNSEWLADLDLPQVIGLLGTATVGQMLAKEDFAKRYGSGTPIALHEFLYPLLQGYDSVAVDADVELGGTDQKFNVAMGRDLQRHFGQRTQFGLLLPILVGLDGVQKMSKSLGNTVGLEEDPLSMYSKL

SEQ ID NO: 158618 - protein, 295 aa, Unknown
  Bacterial polypetide isolated from the Sargasso Sea
SKEKTIKAYIGFDCSAPSLHVGSLLQIMILRLLQKYGHKPIVLLGGGTTLIGDPSGKDATRKIFKQKDIKKNITSIKKLFEKLLFSKNKKTKPIFVDNYQWLSKLKYIDFLRDIGKHFTLNKMLTFDSVKLRLDREQSLSYTEFNYMILQAYDFYQLYKKHDCILQMGGSDQWGNIVNGVELIRRILQKDSYGLTTPLITLSSGAKMGKTEKGAVWLDKKMFSPYEYWQFWRNISDEDVKKFLNYFTEIETNDLSQKIDEEKNINNLKILLANEATTLMHGAKAAKDSADTAKET

SEQ ID NO: 158619 - protein, 235 aa, Unknown
  Bacterial polypetide isolated from the Sargasso Sea
MKNSFLKEFNEREYFNQCTNLESLSGLMDKKKVRAYIGFDCTAQSLHVGSLLQIMCLRLLQKHGHQPIILLGGGTTRIGDPSGKEETRKILTEKEIEKNIKNIKKVFSVFLDSKNSKTRPIYVNNYKWLGKLNYIKFLREIGKHFTINKMLSFDSVKLRLEREQSLSYMEFNYMILQAYDFLELNKTKNCLMQIGGSDQWGNIVNGVELVKRYSSNQVYGLTTPLITLASGAKIG

SEQ ID NO: 158620 - protein, 247 aa, Unknown
  Bacterial polypetide isolated from the Sargasso Sea
MENSFLKEFKDREYFNQCTNSEELEQLMSKKKIRAYIGFDCTASSLHVGSLLQIMCLRLLQKHGHQPIVLLGGGTTRIGDPSGKEETRKILSEKQIEKNIKNIEKVFRIYLKNNNPKLKPIFVNNYKWLGKLNYIKFLREIGKHFTINKMLSFDSVKLRLDREQSLSYMEFNYMILQAYDFLELNKTKNCVMQIGGSDQWGNIVNGIELIKRYSSKQVFGLTTPLITLASGAKMGKTEKGAVWLDDK

SEQ ID NO: 158621 - protein, 243 aa, Unknown
  Bacterial polypetide isolated from the Sargasso Sea
MEEALKIINIGTDEILTESDLKKKLDSGKQLIVKAGFDPTAPDLHFGHTVLLNKLRHFQDLGHKVVFLIGDFTGRIGDPSGKNKTRPTVDSDSLIKNAKTYKEQVFKILKEDLTEVKFNSEWCDELGADGLIKLASKYNVARMLERDDFNKRFTSNKSIAIHEFLYPLVQGYDSVALQADVECGGTDQKFNLLVGRELQRDYDQDPQVVITVPILEGLDGEKKMSKSLDNYIAIDEEPNEMFG

SEQ ID NO: 158622 - protein, 230 aa, Unknown
  Bacterial polypetide isolated from the Sargasso Sea
MENSFLKEFKKREYFNQCTNSDELERLMNKKKIRAYIGFDCTSQSLHVGSLLQIMCLRTLQKHGHQPIVLLGGGTTRIGDPSGKEETRKILSEKEIEKNIRNIQKIFKVFLNTKNTKTKPIFVNNYKWLGKLNYIKFLREIGKHFTINKMLSFDSVKLRLDREQSLSYMEFNYMILQAYDFLELNKTKNCLMQIGGSDQWGNIINGVDLIKRHSNKQVFGLTTPLITLAS

SEQ ID NO: 158623 - protein, 250 aa, Unknown
  Bacterial polypetide isolated from the Sargasso Sea
MCLRLLQHHGHQPIVLLGGGTTRIGDPSGKDKTRKILSEKEIEKNAKNIEKILKKFLNTNNQKTKPIFVNNYKWLRNLNYISFLRDIGKHFTINKMLTFDSVKNRLDREQSLSYMEFNYMILQAYDFLELNKKESCLLQIGGSDQWGNIVNGVDLIKRYSNKQAYGLTTPLITLASGAKMGKTADGAIWLDKKFLSPYDYWQFWRNTDDRDVVKFLKFFTDEAVSDIEKLNENNINNLKILLANKATEML

SEQ ID NO: 158624 - protein, 154 aa, Unknown
  Bacterial polypetide isolated from the Sargasso Sea
MENLMASSNLIKQLQERGLVAQVTDEEALAERLAQGPIALYCGFDPTADSLHLGHLVPLLCLKRFQMAGHKPVALVGGATGLIGDPSFKAAERKLNTEDTVQEWVDKIRKQVAPFLDFNCGDNAAIAANNYDWFGTMNVLTFLRDIGKHFSVNR

SEQ ID NO: 158625 - protein, 300 aa, Unknown
  Bacterial polypetide isolated from the Sargasso Sea
QLSKEDVAANASTYLRQLGQDQPKETALLDFETPGRLEVRYNTEWLEGMDLPAVIGLLGTGTVGQMLAKDDFSKRYGSGTPIALHEFLYPLLQGYDSVAVDADVELGGTDQKFNVAMGRDLQRHFGRSTQFGLLLPILVGLDGVQKMSKSLGNVVGLEEDPLSMYSKLEKVGDAAINDYVTLLTDLDLATLPENPREKQKAMALAVTASRYGMEAAHKAQVDAASLVGGAGDASAEVPEASLAEVNFPAKAFYLLSAVGICASSSDARRQIKGGAVRLEGEKIIDPNQEFASADELEGKV

SEQ ID NO: 158626 - protein, 244 aa, Unknown
  Bacterial polypetide isolated from the Sargasso Sea
MNDFNWKLINRGVDEILTKDDLTAKLDSKKQLIVKVGFDPTAPDLHLGHTVILNKMRHFQELGHKVVFLIGDFTGRIGDPSGKNKTRPTLQKDELEENAKSYSDQVYKILKKELTEIRFNSEWCDKLGADGIIELASKYNLGRMLERDDFNKRYKANQQIALHEFLYPLIQAYDSIALKADIEMGGTDQKFNLLVGRELQRAFGQEPQVCITLPILKGLYGVNKMSKSLDNYIGINEKPDDMFG

SEQ ID NO: 158627 - protein, 309 aa, Unknown
  Bacterial polypetide isolated from the Sargasso Sea
MNKFLKEFKDRGFFYQCTDESQLSELLNKKKIKAYIGFDCTAESLHVGSLLQIMCLKLLQDHGHQPIVLLGGGTTRIGDPSGKDKTRKILSEKEIERNSKNIEKILKNFLDTKNKKTKPIFVNNFTWLKSLNYISFLRDIGKHFTINKMLTFDSVKTRLDREQSLSYMEFNYMILQAYDFLELNRNEGCILQIGGSDQWGNIVNGVDLIKRYSDNQTYGLTTPLITLASGAKMGKTSDGAVWLDKKLLSPYDYWQFWRNTDDRDVIKFLKFFTDIKVKEIKNLENKNINDLKNILANKATELLHGKKKL

SEQ ID NO: 158628 - protein, 265 aa, Unknown
  Bacterial polypetide isolated from the Sargasso Sea
ISGKLNEVINKKPIKAYIGFDCTAKSLHVGSLLQIMILRLLQKHGHQPIVLLGGGTTLIGDPSGKDTTRQILKHKDIKANISSIKKIFERLLKNKNKKVKPIFVDNYDWLGKLKYIEFLRDVGKHFTINKMLSYDSVKLRLDREQSLSYMEFNYMILQAFDFYKLFEKQNCVLQMGGSDQWGNIVNGVELIRRILKKESFGLTTPLITLSSGAKMGKTEKGAVWLDKKLFSPYEYWQFWRNTSDQDVKKFLMYFSEIDLSELKKI

SEQ ID NO: 158629 - protein, 264 aa, Unknown
  Bacterial polypetide isolated from the Sargasso Sea
SLHVGSLLQIMILRLMQKHGHKPIVLLGGGTTLIGDPSGKDSTRKILHQSEIRKNIKSIKQVFNKVLDTTNKKTSPIFVDNSKWLTKLNYINFLRDIGCHFTVNKMLTFESVKLRLEREQSLSYMEFNYMMLQAYDFYQLFKKNNCVLQIGGSDQWGNIVNGVDLIRRKLQKESYGLTSPLITLASGTKMGKTEKGAIWLNEDQFSAYDYWQFWRNTDDKDVKRFLNFFTEIDSKKIDDICFKEKNINNLKVLLANEATKILHG

SEQ ID NO: 158630 - protein, 257 aa, Unknown
  Bacterial polypetide isolated from the Sargasso Sea
DPSGKDKTRQILDEVTIEKNIKNIEKILKKFLSTDNNETKPIFVNNYDWLKNLNYISFLRDIGKHFTINKMLSFDSVKLRLEREQSLSYMEFNYMILQAYDFLELNNSFQCLLQIGGSDQWGNIVNGVELIKRHSSKEVFGLTTPLITLASGAKMGKTESGAIWLDENLLPAYDYWQFWRNVDDRDLLKFLKMFTDISIKEIENKKNDNINDLKVLLANHATSMLHGEQIAKECFEQAKKIFSDNSTDEGLPSVKIN

SEQ ID NO: 158631 - protein, 314 aa, Unknown
  Bacterial polypetide isolated from the Sargasso Sea
IFKEFKDRGYFYQCTDEKALSKKLNEESIKGYIGFDCTAQSLHVGSLLQIMCLRLMQKHGHKPIVLLGGGTTRIGDPSGKDKTRKILEENEIEKNIKSIENILKKFLETKDEKVAPIFVNNYTWLKNLNYISFLRDIGKHFTINKMLSFDSVKLRLEREQSLSYMEFNYMILQAYDFLELNKKENCLLQIGGSDQWGNIVNGVELIKRYSSNEVYGLTTELITLASGAKMGKTESGAIWLDKKLFSVFEYWQFWRNTDDKDVLKFLKMFTDLKLSQIEDISNQDINKQKIILANEATSILHGAYEAAEAEKIAK

SEQ ID NO: 158632 - protein, 210 aa, Unknown
  Bacterial polypetide isolated from the Sargasso Sea
MKNTFLTEMSSRGFLNQCTDLEKLSKVSDEKQIKAYIGFDCTAPSLHVGSLMQIMILRLLQKYGHQPIVLLGGGTTLIGDPSGKDSTRKILKHTDIKKNISNIKKIFEKLLYSKNKKTKPIFVDNYNWLGKLKYIDFLRDIGKHFTINKMLTFDSVKLRLDREQSLSYMEFNYMILQAYDFYQLHKKYNCILQMGGSDQWGNIINGVELI

SEQ ID NO: 158633 - protein, 304 aa, Unknown
  Bacterial polypetide isolated from the Sargasso Sea
HQPIVLLGGGTTLIGDPSGKEETRKILDKKIIDKNIKSIKNIFKIFLKSKSSKTKPIFVNNYSWLSKLNYISFLREIGKHFTVNKMLTFDSVKLRLEREQSLSYMEFNYMMLQAYDFYELNKRYKCILQIGGSDQWGNIVNGTDLIKRKNKKQTYGLTTPLITLSSGTKMGKTEKGAVWLNKKMLSPYDYWQFWRNADDKDVVNFLKLFTELDIEKIDNLKNSQDINELKILLANEATTMLHGSKAAKDSEVTAKKTFKDRSVGKDLPTIKIKKNDIANGINILDLVLLTKLYNSKGEVRRVIK

SEQ ID NO: 158634 - protein, 272 aa, Unknown
  Bacterial polypetide isolated from the Sargasso Sea
MCLRLLQKHGHQPIVLLGGGTTRIGDPSGKEKTRKILSENEIEKNSKNIKKILEKFLKSKDKNIKPIFVNNFDWLKNLNYISFLRDIGKHFTINKMLTFESVKTRLEREQSLSYMEFNYMILQAYDFLELNKKENCLLQIGGSDQWGNIVNGIDLIKKYSNNQAYGLTTPLITLASGAKMGKTETGAIWLDKKFLSPYDYWQFWRNIDDRDVLKFIKFFTDLSVKDIEKVKNEEINKQKIILANEATSMLHGYDEAKNLKKQQKTFSENHLV

SEQ ID NO: 158635 - protein, 283 aa, Unknown
  Bacterial polypetide isolated from the Sargasso Sea
MNKFLKEFKDRGFYYQCTAGDELSKLLDKEKIKAYIGFDCTAGSLHVGSLLQIMCLRLLQKHGHQPIVLIGGGTTRIGDPSGKDKTRKILSETEIEKNIKNIQNILKKYLNSDDEKIKPIFVNNFSWLKDLNYISFLRDIGKHFTINKMLTFDSVKTRLEREQSLSYMEFNYMILQAYDFLELNKKHNCVLQLGGSDQWGNIVNGVELIKRYSDKIAFGLTTPLITLASGAKMGKTETGAVWLDKQFLSPYDYWQFWRNSDDRDVIKFLNYFTDLSIDEMKRE

SEQ ID NO: 158636 - protein, 245 aa, Unknown
  Bacterial polypetide isolated from the Sargasso Sea
SEILEKNIAGMKSQLNNLIDFDCGANSAKILNNNNWLSKINMIEFLRDIGKNFSIGYMMSKESVKNRINERGISYTEFTYMILQAYDFLHLFDTEKCQLQIGGSDQWGNITAGIELIRRMRSENLWGITFPLITTSSGKKFGKTEEGNIWLDPKLTSPYRFYQYWIQTNDEDVIKFLAYFTFLTEKEIEEIANAQKENPEKREAQLQLARLITSFVHGDSSTESALRVSDLLFTGNIEGISEEDL

SEQ ID NO: 158637 - protein, 164 aa, Unknown
  Bacterial polypetide isolated from the Sargasso Sea
MSKNLITDFKERGLIHQTTDADSLHDWLATPGRRIYAGFDPTADSLHVGHLVAIILLRRVARAGHEPIALIGGATGMIGDPSGRSEERNLLSHEALAANIAAVGNQIRGLLESTNQTIHVVNNADWMQGVGYLEFLRDVGKHVPLSQMLAKDSVKSRLDRDGGL

SEQ ID NO: 158638 - protein, 286 aa, Unknown
  Bacterial polypetide isolated from the Sargasso Sea
TDLNKLEEICNKESLQGYIGFDCTAKSLHVGSLLQIMILKLMQKHGHRPIILLGGGTTLIGDPSGKDTTRKILEKREINKNIKSIKKVFNKILDNTNKKTKPIYVDNAKWLTKLNLIKFLREIGVNFTINKMLTFDSVKLRLEREQSLSYMEFNYMLLQAFDFYQLFKTHKCKLQIGGSDQWGNIINGVELIRRKLKKESFGITSPLITLASGAKMGKTEKGAIWLNKDLFSPYEYWQFWRNTDDRDVRRFLNYFTDIKTEEIENICGKEKNINKLKILLANNATR

SEQ ID NO: 158639 - protein, 270 aa, Unknown
  Bacterial polypetide isolated from the Sargasso Sea
SELLENEKIKGYIGFDCTAESLHVGSLLQIMCLRLLQKHGHRPIVLLGGGTTRIGDPSGKDKTRKILTEKEIEKNIKSIEKILKNFLDNKDPKIKPIFVNNYSWLKGLNYISFLRDVGKHFTINKMLTFESVKTRLDREQSLSYMEFNYMILQAYDFLELNKKENCSLQIGGSDQWGNIVNGTELVKRYLSKQVYGLTTPLITLASGAKMGKTETGAIWLDKKMLSSYDYWQFWRNVDDKDVIKFLKIFTDLSIEEIDKNKDEDINKLKV

SEQ ID NO: 158640 - protein, 285 aa, Unknown
  Bacterial polypetide isolated from the Sargasso Sea
MKSTFLSEMNSRGFLNQCTDLEGLKKILNQKPIKAYIGFDTTAPSLHVGSLMQIMILRLLQKYGHQPIVLLGGGTTLIGDPSGKDSTRKILKEKEIKNNIKSIKKIFEKLLQTKNKKTKPIFVNNYDWLGKLKYIDFLRDVGKHFTINKMLTFDSVKLRLDREQSLSYTEFNYMILQAYDFYQLLKKYDCVLQLGGSDQWGNIVNGVELIRRIMQKNAFGLTTPLITLSSGVKMGKTEKGAVWLDKKMFTPYDYWQFWRNTSDEDVKKFLKYFTEDDIDSLTKRD

SEQ ID NO: 158641 - protein, 282 aa, Unknown
  Bacterial polypetide isolated from the Sargasso Sea
MLDIKEQLSIIKRGVDEILVEEELIEKLKLKRPLKVKLGCDPTAPDIHLGHAVVLNKLRQFQDLGHEVQFLIGDFTGLIGDPSGKSATRKPLSEEAIAANAKTYEQQVYKILDPEKTTIMFNSAWMNKRSPADMIKLASSVTVARMLERDDFSKRFKNEQPIAIHEFLYPLLQGYDSVAMECDIELGGTDQKFNLLMGRELQKLHGMTPQIVITMPLLEGLDGVKKMSKSLNNYIGIADSPNDIFGKIMSVSDELMWRYFELLSAKTSTEIQSYKKEVSEGE

SEQ ID NO: 158642 - protein, 231 aa, Unknown
  Bacterial polypetide isolated from the Sargasso Sea
MKYKRIFKILEKILKNYLDNDNPKTKPIFVNNYSWLKGLNYISFLRDIGKHFTINKMLTFESVKTRLDREQSLSYMEFNYMILQAYDFLELNKKENCTLQIGGSDQWGNIINGTELIKRHSNKQAYGLTTPLITLASGAKMGKTETGAVWLDKKLLSPYDYWQFWRNIDDRDVLKFLKMFTDLSTDEINQIKDEDINKLKIKLANETTSMLHGKDEAMSAEKTAKKTFEEN

SEQ ID NO: 158643 - protein, 275 aa, Unknown
  Bacterial polypetide isolated from the Sargasso Sea
TSSKNGHRPIVLLGGGTTRIGDPSGKDKTRKILSEEEIEKNIENIKNILKKFLDNDDPNTKPIFVNNYTWLKGLNYISFLREIGKHFTINRMLTFDSVKLRLDREQSLSYMEFNYMILQAYDFLELNKKENCVLQIGGSDQWGNIVNGVELIKRYSNNQTFGLTTPLITLATGAKMGKTENGAIWLDDKYLSAYDYWQFWRNVDDRDVIKFLKMFTEIDIEEIEQIKNKDINELKILLANKTTEMLHGNEAAKNSEQAAQEAFSGNSLGSNLPKV

SEQ ID NO: 158644 - protein, 278 aa, Unknown
  Bacterial polypetide isolated from the Sargasso Sea
TVLINKLRQFQELGHQVVFLIGDFTAMIGDPSGKSATRPRLSVEEVSENAKSYEQQIFKILDPDLTKVEFNSRWMKKMNAAELIGLASNHTVARMLERDDFDKRYKSNQSISIHEFLYPIIQGYDSVALDADVELGGTDQKFNLLVGRQFQTLHGQSPQVVITMPILEGLDGTQKMSKSLGNYIGIDEPATEMFGKIMSISDVLMWRYYELLSFKDLEEISSYKKDVEKGVNPRDIKFKLAEEIVGRFHDAKLAKIAKDDFVERFSKNAIPENIEQVK

SEQ ID NO: 158645 - protein, 250 aa, Unknown
  Bacterial polypetide isolated from the Sargasso Sea
MNKFLKEFKDRGYFYQCTSENELSELLNKEKIKGYIGFDCTAESLHVGSLLQIMCLRLLQKYGHKPIVLLGGGTTRIGDPSGKDKTRRILTEKEIDRNIKSIEKILKKFLDNDNPKTKPIFVNNYSWLKGLNYISFLRDIGKHFTINKMLTFESVKTRLEREQSLSYMEFNYMILQAYDFLELNKKHSCNLQIGGSDQWGNIVNGTELIKRYSSKQVFGLTTPLITLASGAKMGKSESGAIWLDEKLLSS

SEQ ID NO: 158646 - protein, 349 aa, Unknown
  Bacterial polypetide isolated from the Sargasso Sea
MKNAFLQEMQSRGYLNQCTDLDKLDDICNKQSINAYIGFDCTAASLHVGSLLQIMVLKLMQKHGHRPIVLLGGGTTLIGDPSGKDSTRKILNHKEIKKNIKNIKKVFNKILDTSNKKTKPIFVDNYNWLAKLNYIEFLRNIGKHFTINKMLTFESVKLRLEREQSLSYMEFNYMILQAYDFYQLFKNKKCILQIGGSDQWGNIVNGVELIRRILKKESYGLTTPLITLASGAKMGKTEKGAVWLNSDLFSPYDYWQFWRNTDDKDVKNFLKFFTELSSKKIDILTNNETNINNLKILLANEATKILHGKAAAEKSEKTAKETFEVGGIGKELPEIKIKENDIKKGIQIV

SEQ ID NO: 158647 - protein, 364 aa, Unknown
  Bacterial polypetide isolated from the Sargasso Sea
MPEHPQSLPAWLARGMADLFPDGDPADADQALAARLAAASAQGRPLRIKLGIDPTGSNIHLGHSILFRKLRAFQDAGHTAVLIIGDFTARIGDPTGKSATRVQLTAEEVEANAATYLAQLGQGLPKEGALLDFETPGRLEVRRNSEWLADLDLPQVIGLLGTATVGQMLAKEDFTKRYGSGTPIALHEFLYPLLQGYDSVAVDADVELGGTDQKFNVAMGRDLQRHFGQRTQFGLLLPILVGLDGVQKMSKSLGNTVGLDEDPLSMYSKLEKVGDGAIDDYITLLTDLDLAGLPANPRERQKAMALAVTASRHGSEAAQKAQADAANLVGGAGDAGAEVPAASLADVSFPGKAFYLLSAVGICA

SEQ ID NO: 158648 - protein, 407 aa, Unknown
  Bacterial polypetide isolated from the Sargasso Sea
MNKFLKEFKDRGYFYQCTNENELSDLLNKKSINAYIGFDSTAPSLHVGSLMQIMCLKLLQNHGHRPIVLLGGGTTRIGDPSGKEETRKILSEKQIEQNIKNIQNVFKIFLKTNNPKLKPIFVNNYKWLRKLNYIKFLREIGKHFTINKMLSFDSVKLRLEREQSLSYMEFNYMILQAYDFLELNKSKNCLMQIGGSDQWGNIVNGVELIKRQSGNQVFGLTTPLITLASGAKMGKTEKGAVWLDKKILSPYDYWQFWRNTDDRDVIKFLKMFTNIPLDEIENLKKNNINDLKILLANKTTEMLHGEKAAKDSEKMAASTFKGDSSGENLPSIKISKDILNKNIVELAAYVAKDISKSEIRRMIKANGIKVDNQLVNNEKLIVDNKLFEEKGFIKLSIGKKKHYKVII

SEQ ID NO: 158649 - protein, 276 aa, Unknown
  Bacterial polypetide isolated from the Sargasso Sea
MNKFLKEFKDRGYFYQCTNEEDLSKLLEKEKIKGYIGFDCTAESLHVGSLLQIMCLRLLQKHGHRPIVLLGGGTTRIGDPSGKDKTRKILTEKEIEKNIKSIEKILKNFLDNKNPKTKPIFVNNYSWLKGLNYISFLRDIGKHFTINKMLTFESVKTRLDREQSLSYMEFNYMILQAYDFLELNKKENCSLQIGGSDQWGNIVNGTELIKRYSSKQAYGLTTPLITLASGAKMGKTETGAIWLDKKMLSSYNYWQFWRNIDDKDVIKFLKIFTDLS

SEQ ID NO: 158650 - protein, 409 aa, Unknown
  Bacterial polypetide isolated from the Sargasso Sea
MNKFLKEFKDRGYFYQCTNEKDLSKLLENEKIKGYIGFDCTAESLHVGSLLQIMCLRLLQKHGHKPIVLLGGGTTRIGDPSGKDKTRKILTEKEIEKNIKSIEKILKNFLDNKNPKTKPIFVNNYSWLKGLNYISFLRDIGKHFTINKMLTFESVKARLDREQSLSYMEFNYMILQAYDFLELNKKENCSLQIGGSDQWGNIVNGTELIKRYSSKQAYGLTTPLITLASGAKMGKTETGAIWLDKKMLSSYNYWQFWRNIDDKDVIKFLKIFTDLSIEEIDKNKDEDINKLKIRLANEATTMLHGKKAALNSEQAAKEAFSGNLLGSNLPTIKIKAKNINETITVLDLIILSKLEKSKSEIRRLIKGNAIKLNNEMISNENFIISDKLFQNNYLKLSIGKKRHIKIEKD

SEQ ID NO: 158651 - protein, 217 aa, Unknown
  Bacterial polypetide isolated from the Sargasso Sea
MNKFLKEFKDRGYFYQCTSEDELSKLLDKEKIKGYIGFDCTADSLHVGSLLQIMCLRLMQKHGHRPIVLIGGGTTRIGDPSGKDKTRKILTEQEIEKNIKNIEKILKTYLDNNDPKTKPIFVNNYFWLKGLNYISFLRDIGKHFTINKMLTFESVKTRLDREQSLSYMEFNYMILQAYDFLELNKKENCNLQIGGSDQWGNIVNGTELIKRHSNKQA

SEQ ID NO: 158652 - protein, 349 aa, Unknown
  Bacterial polypetide isolated from the Sargasso Sea
HTVLLNKLRHFQDLGHKVVFLIGDFTGRIGDPSGKNKTRPTVDSDSLIKNAKTYKEQVFKILKEDLTEVKFNSEWCDELGADGLIKLASKYNVARMLERDDFNKRFTSNKSIAIHEFLYPLVQGYDSVALQADVECGGTDQKFNLLVGRELQRDYDQDPQVVITVPILEGLDGEKKMSKSLANYIAIDEEPNEMFGKIMSISDNLMWRWFELLSFLPEEEISKLKDEMKEGRNPRDIKFILAEELVDRFHEIGDGKNCKENFLNRFQKGKMPDNIETFEIDIKNESIPLVNLLKDTQMISSVSEGNRLIKQGGIKINQEKVMDLKFEISKGSENIYQVGKRKFLKIKVK

SEQ ID NO: 158653 - protein, 408 aa, Unknown
  Bacterial polypetide isolated from the Sargasso Sea
MNKFLQEFHERGYFYQCTDNNGLSRTLEDKKIKAYIGFDCTAESLHVGSLLQIMCLRLLQKHGHQPIVLLGGGTTRIGDPSGKDKTRQILEEKTIENNIKNIEKILKIFLKTKNKNTSPIFVNNYDWLKNLNYISFLRDIGKHFTINKMLNFDSVKLRLEREQSLSYMEFNYMILQAYDFLELNKKYDCILQIGGSDQWGNIVNGVDLIKRHSSNETFGLTTPLITLASGAKMGKTESGAIWLDKKLLSTYDYWQFWRNVDDKDLTKFLKIFTEISLDEIEKRKNDNINDLKILLANHATSMLHGEEEAKKCYDQAKKIFSDKSSDDGLPKIKVKKNEMKNKNLSDLIISAKLETSKSEIKRLIKNNGIKVNNIKIEEDSPISQINLNEKNYFRLSIGKKKHFKIEFN

SEQ ID NO: 158654 - protein, 223 aa, Unknown
  Bacterial polypetide isolated from the Sargasso Sea
MNKFLKEFKDRGYFYQCTSEHELSNLLDKEKIKAYIGFDCTAESLHVGSLLQIMCLRLLQKNGHRPIVLLGGGTTRIGDPSGKDKTRKILSEKEIEKNIKNIKNILKKFLDNNDPNTKPIFVNNFNWLKNLNYISFLRDIGKHFTINRMLTFDSVKLRLDREQSLSYMEFNYMILQAYDFLELNKKEKCVLQIGGSDQWGNIVNGVELIKRYSNNQSFGLTTP

SEQ ID NO: 158655 - protein, 266 aa, Unknown
  Bacterial polypetide isolated from the Sargasso Sea
MNKFLKEFKDRGYFYQCTSENELSKLLDKKKIKGYIGFDCTAESLHVGSLLQIMCLRLMQKHGHRPIVLIGGGTTRIGDPSGKDKTRKILSEKEIEKNIKNIEKILKNYLDNNNPKTKPIFVNNYSWLKGLNYISFLRDIGKHFTINKMLTFESVKTRLDREQSLSYMEFNYMILQAYDFLELNKNENCDLQIGGSDQWGNIVNGTELIKRYSNNQAFGLTTPLITLASGAKMGKTENGAIWLDKNLLSAYNYWQFWRNIDDNDVV

SEQ ID NO: 158656 - protein, 409 aa, Unknown
  Bacterial polypetide isolated from the Sargasso Sea
MNKFLKDFKEKGYFYQCTDEKGLSDILNKQNIKAYIGFDCTAESLHVGSLMQIMCLRLLQDNGHQPIVLLGGGTTRIGDPSGKDKTRQILDEKTIEKNITNIRKILENYLITEDEKVKPIFVNNFDWLKNLNYISFLREIGKHFTINKMLSFDSVKLRLEREQSLSYMEFNYMILQAYDFLELNKKENCLLQIGGSDQWGNIVNGVDLIKRFSNKNVYGLTTPLITLASGAKMGKTENGAIWLDKKLLSAYDFWQFWRNIDDKDVSKFLKYFTNLSIDKINQIEKYEINKQKIILANEATKLLHGEKEAKIAEETALKTFQDRSAGEGLPSVKIAEKELNNIDIVSLIVLSDLESSKSEVKRIIKNKGVKIDNQIITDEKIKINKDFFKGRNFFRLSLGKKRHIKISLK

SEQ ID NO: 158657 - protein, 344 aa, Unknown
  Bacterial polypetide isolated from the Sargasso Sea
MESSFLSEFKKRDYFNQCTNSEELETLMNKNKIKAYIGFDCTASSLHVGSLLQIMCLRMLQKYGHQPIVLLGGGTTRIGDPSGKDETRKILSEKEIEKNIKNIEKVFKIYLKTNNPKTKPIFVNNYKWLGKLNYIKFLRDIGKHFTINKMLSFDSVKLRLDREQSLSYMEFNYMILQAYDFLELNKSKNCVMQIGGSDQWGNIVNGVELIKRHSSKQVFGLTTPLITLASGAKMGKTEKGAVWLDEKLLSSYDYWQFWRNTDDRDVLKFLKMFTDIELNKIEEIKDKEINDLKVLLANEATSMLHGKKAAQKAEETAKKTFGKGSFGDDLPNYNLSKSNIDKRN

SEQ ID NO: 158658 - protein, 432 aa, Unknown
  Bacterial polypetide isolated from the Sargasso Sea
MPNNFKNELEWRGLIQDVTNGFDDEINKNCVSAYIGFDPTSDSLHIGSLVQLVILRHFQICGHKPIVLIGGATGMIGDPSGKSKERNLLSADVIEKNISALKIQFSKFLDFDEKNPNAAIIVNNYEWNSKLNIIEFFRDFGKLLTVNYMMSKDSVKKRISNSDLSEGMSFTEFTYQLFQAYDFYYLIENYNCTIQMGGSDQWGNITSGVELIRKKKGKKAYALTCPLITKSDGSKFGKTEEGNVWLDRRKTSPYKFYQYWLNSSDEDSYKYVKIFTFAKKEFIEKLIKDHNDEPHLRKLQKFIAEEITTMVHSEEDLKNVKNASSILFGKNTEQDLSLIDEETFLDVFSGVPHKELTKSELTDCKLVENLLEKSGFFGSKSEIRRLIDQNSISINKAKINLEFKISDLNLINNKYILLQKGKKNYFLIILIT

SEQ ID NO: 158659 - protein, 339 aa, Unknown
  Bacterial polypetide isolated from the Sargasso Sea
MTSNKEQILEIKRGVDEILVEKDFLEKLKKNKPLKIKVGFDPTAPDLHLGHTVIINKMRQFQEFGHEVIFLIGDYTGMIGDPSGVNETRPVLTVEQVKENARTYKNQIFKILDKDKTRIEFNSSWMNKVTSAELIDIASKYTVARMLERDDFKKRFKSENPISIHEFIYPLVQGYDSVALECDVEMGGTDQKFNLLVGRHLQQLYGQEPQTIITLPLLEGLDGIKKMSKSANNYVALNDSGDDMFGKIMSVSDDLMWRYFELVSSKDLKEIKNLKDSLNDGANPRDIKFLLAEEIVERFHNQSIAKKAKESFMQRFQKGGIPEDIDLTEVSIKDIQNDD

SEQ ID NO: 158660 - protein, 407 aa, Unknown
  Bacterial polypetide isolated from the Sargasso Sea
MNDFIREFKDRGFFYQCTDEAELSNLLNKESIKGYIGFDCTAQSLHVGSLLQIMCLRQLQKHGHQPIVLLGGGTTRIGDPSGKDKTRKILDESEIEKNIKSIELVLKKYLNTENKATSPIFVNNYSWLKELNYISFLRDIGKHFTINKMLSFDSVKLRLDREQSLSYMEFNYMILQAYDFLELNKKHNCLLQIGGSDQWGNIVNGVDLIKRYLSKEVFGLTTPLITLASGAKMGKTESGAVWLDKNLLSIYDYWQFWRNTDDRDVIKFLKMFTDLSLEKIENIKNENINDLKILLANEATKMLHGEIETKKVEELAKSTFKENSTGEHLPSVKIGSDLIGKDIISLIEYTNNELSKSEIRRLIQNNGIKIDNEKIEDGKLLISKKLFENKGFIKLSVGKKKHFKIII

SEQ ID NO: 158661 - protein, 270 aa, Unknown
  Bacterial polypetide isolated from the Sargasso Sea
MNKFLKEFKDRGYFYQCTSEADLSSLLDKEKIKAYIGFDCTAESLHVGSLLQIMCLRLLQKNGHQPIVLLGGGTTRIGDPSGKDKTRKILDESEIEKNIKNIQNILKKFLDNDDPKTTPIYVNNYSWLKDLNYISFLRDIGKHFTINRMLTFDSVKLRLEREQSLSYMEFNYMILQAYDFLELNKKENCVLQIGGSDQWGNIVNGVELIKRYSNNQTYGLTTPLITLATGAKMGKTENGAIWLDEKYLSAYDYWHFWRNVDDRDVIKFLK

SEQ ID NO: 158662 - protein, 233 aa, Unknown
  Bacterial polypetide isolated from the Sargasso Sea
MKNTFLSEMNSRGFLNQCTDLEGLKKILNQQTIKAYIGFDTTAPSLHVGSLMQIMILRLLQKYGHQPIVLLGGGTTLIGDPSGKDSTRKILKEKEIKNNIISIKKIFEKLLHSKNKKTKPIFVNNYDWLSKLKYIDFLRDIGKHFTINKMITFDSVKLRLDREQSLSYMEFNYMILQSYDFYQLFKKHDCILQLGGSDQWGNIVNGVELIRRILQKNAFGLTTPLLTLSSRCK

SEQ ID NO: 158663 - protein, 410 aa, Unknown
  Bacterial polypetide isolated from the Sargasso Sea
MKNSFLKEFNEREYFNQCTNLKSLNELMDKKKIRAYIGFDCTAQSLHVGSLLQIMCLRLLQKHGHQPIILLGGGTTRIGDPSGKEETRKILTEKEIEKNIKNIKKVFSIFLNNKNSKTRPIFVNNFKWLGKLNYIKFLREIGKHFTINKMLSFDSVKLRLEREQSLSYMEFNYMILQAYDFLELNKTKNCLMQIGGSDQWGNIVNGVELVKRYSSKQVYGLTTPLITLASGAKMGKTEKGAVWLDKKLLSSYDYWQFWRNTDDRDVIKFLKMFTDKDVSEIESIKDKNINELKTLLANEATTLLHGKAAAVKASETAKKTFAGGSGDELPIIKIKEDQINNGLSIIDLSMKTNLFSSKSEIRRTIKNSGLKVNNSTVTDENLIIYLSDFSGEVLKLSHGKKNHVLIKIIG

SEQ ID NO: 158664 - protein, 400 aa, Unknown
  Bacterial polypetide isolated from the Sargasso Sea
MNNYKEQLQIIKQGIDEIIGEKELIAKLKKGKKLNIKVGFDPTAPDLHLGHTVILRKMRQFQDLGHNVVFLIGDFTGKIGDPSGKNKTRPPLSEKEIKNNAETYKSQVFKVLDDKKTIVDFNSRWGNKLTATEMITLAAQSTVARMIERDDFSKRYKNNQPISIHEFLYPLMQGYDSVFLKTDVELGGTDQKFNLLVGRDLQKNAQQEPQTVITLPLLEGLDGVKKMSKSEDNYIGITEDPDEIFGKTMSIPDEIMFKWFDLLSLKPLDEISALKKAISKGDNPRDIKILLALELTERFSSEESAQNAKENFLKKFSKNEIPDNIPEKILKTKEAIPLANILKDIDMVSSTSEALRLINQGAVKIDQQKVESKDYDFGLDEKKLVQIGKKKFIYLTLKNH

SEQ ID NO: 158665 - protein, 350 aa, Unknown
  Bacterial polypetide isolated from the Sargasso Sea
MTTAAVSKPQLVDDLLERGLIAQSSNPELLHDFLSSRQSLYCGFDPTAGSLHIGHLVPLLMLKRFQDAGHHVIALIGGATGFIGDPSFKATERSLNAPEIVKVWAEQLGSQIIALLQPVLSEPLQLVNNADWLSTLDVISFFRDVGKHFSVNAMMRKDSVRQRLERADQGISFTEFSYSLLQSFDFAMLNQRFGCTLQIGGNDQWGNIVAGIDLTRRLNHAKVEGLTLPLITKADGTKFGKTESGTIWLDKTKTSPYSFYQFWLNTDDKDVYNLLRYYSFLTCAEIAAIEQSDRNSGSKPQAQRILAEQVTRFVHGDAGLLSAERITKALFAGQPQQLRLAELQQWNRML

SEQ ID NO: 158666 - protein, 336 aa, Unknown
  Bacterial polypetide isolated from the Sargasso Sea
MNKFLKEFKDRGYFYQCTSESELSKLLDKEKIKGYIGFDCTAESLHVGSLLQIMCLRLMQKHGHRPIVLIGGGTTRIGDPSGKDKTRKILNDKEIEKNIKNIEKILRNFLDNNDPKTKPIFVNNYSWLKGLNYISFLRDIGKHFTINKMLTFESIKSRLDREQSLSYMEFNYMILQAYDFLELNKKENCALQIGGSDQWGNIVNGTELIKRHSNNQAYGLTTPLITLASGAKMGKTEYGAIWLDKKLLSAYDYWQFWRNIDDRDVLKFLKMFTDLNIEEINKIENNDINQLKIILANEATTMLHGKKSAQNSEKTAKEIFSGNSLGSNLPSIKIEK

SEQ ID NO: 158667 - protein, 411 aa, Unknown
  Bacterial polypetide isolated from the Sargasso Sea
MTLIEELKYRGFLHQCTDEESLNKKLESENITFYIGFDCTAKSLHIGSLIQIMIMRLFQKYGHTPIILIGTGTTRIGDPSGKDETRKILTEDEIKNNAKNLKTVFDKYLSFKNEKNKALIMDNADWLDKLSYVDFLRDFGKHFTINKMLTFDSVKIRLEREQSLSFVEFNYMIFQAYDFYELNNQNSCTLQIGGSDQWGNIVNGVELIRRVNGKEVFGLTTPLLTNSNGDKMGKTADGAIWLNDDLLSAYDYWQFWRNVDDRDVIRFMKLFTDLSKEQIDSHEQNSSENINDLKIILANEVTAMLHGVESSRKAEQAAKQIFENKSLSEDMPTLNLSNEDVQNGALLSDLIVQMKYANSKSESRKLIRGKGVKLNGKIVENELQLLDYDQITQFENVISVGKKKHFKVIIG

SEQ ID NO: 158668 - protein, 404 aa, Unknown
  Bacterial polypetide isolated from the Sargasso Sea
MTSNKEQILEIKRGVDEILVEKDFLEKLKKNKPLKIKVGFDPTAPDLHLGHTVIINKMRQFQEFGHEVIFLIGDYTGMIGDPSGVNETRPVLTIEQVKENARTYKNQIFKILDKDKTRIEFNSSWMNKVTSAELIDIASKYTVARMLERDDFKKRFKSENPISIHEFIYPLVQGYDSVALECDVEMGGTDQKFNLLVGRHLQQLYGQEPQTIITLPLLEGLDGVKKMSKSANNYVALNDSGDDMFGKIMSISDDLMWRYFELVSSKDLKEIKNLKDSVNDGVNPRDIKFLLAEEIVERFHNQSIAKKAKESFMQRFQKGGIPEDIDFTEVSIKDIQNDDGEINLPRLLAHTNLVNSISDGHRAIKAGSVRIDGEKISQTSLEIQNKSELVLSQGKRRFIKVKII

SEQ ID NO: 158669 - protein, 344 aa, Unknown
  Bacterial polypetide isolated from the Sargasso Sea
IVLLGGGTTRIGDPSGKEETRKILSEKQIEKNIKNIQKVFKIYLKTNNPKLKPIFVNNYKWLGKLNYIKFLREIGKHFTINKMLSFDSVKLRLDREQSLSYMEFNYMILQAYDFLELNKSKNCQMQIGGSDQWGNIVNGVELIKRYSSKQVFGLTTPLITLASGAKMGKTEKGAVWLDDKLLSSYDYWQFWRNTDDRDVIKFLKMFTDLKLKKIEEIKNENINKLKIILANEATSMLHGKPSAIKAEKTAKETFESGGSGANLPEIKIKKVELELGIKILDLLSSNKIVSSKSDARRAIKSNALKINNKVLTEENKIIKLNDFNNEKVLKISFGKKKHYLVKII

SEQ ID NO: 158670 - protein, 409 aa, Unknown
  Bacterial polypetide isolated from the Sargasso Sea
MNKFLKEFKDRGFFYQCTSEDELSKKLDEEKIKGYIGFDCTAESLHVGSLLQIMCLRLLQKSGHQPIVLLGGGTTRIGDPSGKDKTRKILSEEEIEKNIKNIKNIFKKFLNNDDPNTKPIFVNNYTWLKNLNYISFLRDIGKHFTINRMLTFDSVKLRLDREQSLSYMEFNYMILQAYDFLELNKKENCVLQMGGSDQWGNIVNGVELIKRYSNNQTFGLTTPLITLATGAKMGKTESGAIWLDEKYLSAYDYWQFWRNVDDRDVIKFLKMFTEIEISEIETIKDKDINELKILLANKATEMLHGKEAAKNSEQAANEAFSGNTLGSNLPKVNIQSNKIEEKINIVDLVLFSELENSKSEIRRLIKGNAVKINDNIISDEKFEINKNLFKDNYLKLSLGKKRHIKVELN

SEQ ID NO: 158671 - protein, 409 aa, Unknown
  Bacterial polypetide isolated from the Sargasso Sea
MNKFLKEFKDRGFFYQCTSEDELSKQLDKEKIKGYIGFDCTAESLHVGSLLQIMCLRLLQKNGHQPIVLLGGGTTRIGDPSGKDKTRKILSEEEIEKNIKNIKNILKKFLDNDDQNIKPIFVNNYTWLKDLNYISFLRDIGKHFTINRMLTFDSVKLRLDREQSLSYMEFNYMILQAYDFLELNKKENCVLQIGGSDQWGNIVNGVELIKRYSNNQTFGLTTPLITLASGVKMGKTETGAIWLDEKYLSAYDYWQFWRNVDDRDVIKFLKMFTEIEIKEIEKIKDKDINELKILLANKTTEMLHGKETAKNSEQAAKEAFSGNSLGANLPKVNIQSKKIEEKITIIDLVLLSKLENSKSEIRRLLKGNAVKINENIISDEKFEINKNLFKENYLKLSLGKKRHIKIELD

SEQ ID NO: 158672 - protein, 411 aa, Unknown
  Bacterial polypetide isolated from the Sargasso Sea
MENSFLTEFKDRDYFHQCTQFDELDQLMRKKKIRAYIGFDCTAKSLHVGSLLQIMCLRLLQKHGHQPIVLLGGGTTRIGDPSGKEETRKILSDKEIEKNIKNIQKVFKVFLNTKNIKTKPIFVNNYKWLKKLNYIKFLREIGKHFTVNKMLSFDSVKLRLEREQSLSYMEFNYMILQAYDFLELNKSKNCLMQIGGSDQWGNIVNGVDLIKRYSKNQVYGLTTPLITLASGAKMGKTEKGAIWLDKKLLSAYEYWQFWRNTEDTHVLKFLKMFTDLPLKKIDQIKNNNINDLKIILANEATSMLHGKDSSKKAEMTAKNTFEKGFVGESLPTLNLEQNKIKTGLNVLELVLFSKLLSSKSEIRRMIRNKGIKINNETVNDEKLIISIDNFNTNNFLKLSHGKKNHVIIKLV

SEQ ID NO: 158673 - protein, 217 aa, Unknown
  Bacterial polypetide isolated from the Sargasso Sea
MNNFLKEFKERGYYYQCTNEIELSNLLNKESTNAYIGFDSTAPSLHVGSLLQIMCLRLLQKYGHRPIVLLGGGTTRIGDPSGKEETRKILSEKQIEKNINNIKKVFKIFLKTNNSKLKPIFVNNYKWLSKLNYIDFLRDIGKHFTINKMLTFDSVKLRLEREQSLSYMEFNYMILQAYDFYELNKSNKCNLQIGGSDQWGNIVNGVELIKEKLEIKY

SEQ ID NO: 158674 - protein, 394 aa, Unknown
  Bacterial polypetide isolated from the Sargasso Sea
MKESLELIKRGIDEVLTEDDLVSKLKSKKQLTVKVGFDPTAPDLHLGHTVILNKMRHFQDLGHKVVFLIGDFTGRIGDPSGKNKTRPALDKEELEKNAKTYSDQVFKILNKDLTEIRFNSEWCEDLGADGIIGLASKYNLGRMLERDDFSKRYKANQQIAIHEFLYPLIQAYDSIALNADVEMGGTDQKFNLLVGRELQRAFDQEPQVCITLPILEGLDGTNKMSKSLDNYVGINEDPDEMFGKIMSISDDLMWRWFELLSFRPINEINELKKEVKSGMNPRDTKILLAEEIIERFHSKEDAENAKNTFLDRFQKGAKPKDIETFSISLDDDIAIGNLLKESGLVQSTSEAMRLVKQGAVKINDEKIDDPKLSIEKNQKLLFQVGKRRFLKIKT

SEQ ID NO: 158675 - protein, 263 aa, Unknown
  Bacterial polypetide isolated from the Sargasso Sea
MKESLELIKRGTDEVLTEDDLVSKLKSKKQLTVKVGFDPTAPDLHLGHTVILNKMRHFQDLGHKVVFLIGDFTGRIGDPSGKNKTRPSLDKEELEKNAKTYSDQVFKILNKDLTDIRFNSEWCEDLGADGIIGLASKYNLGRMLERDDFSKRYKANQQIAIHEFLYPLIQAYDSIALNADVEMGGTDQKFNLLVGRELQRAFDQEPQVCITLPILEGLDGINKMSKSLDNYVGINEDPDEMFGKIMSISDDLMWRWFELLSLG

SEQ ID NO: 158676 - protein, 294 aa, Unknown
  Bacterial polypetide isolated from the Sargasso Sea
MEQFIDELKWRGMLHDVIPGTEEYLSKNKTIGYVGFDPTSDSLHIGSLVPIFILRHFQNAGHTPVVLLGGATGMIGDPSGKSDERNLLDKKILKYNEKKLKLQFEKFLDFKSKKNNRAILVNNYDWMSKFSIIDFSRDIGKHITVNYMMAKESVKKRISKDTSQGMSFTEFTYQLIQGYDFLHLYKDMNCMLQMGGSDQWGNITTGTELIRRKENKKAYAMTCPLIKKSDGSKFGKSEGGNVWLDKNKTSVYKFYQYWLNISDEDALSYIKVFTFLSKSKVEELILEHNKDKAR

SEQ ID NO: 158677 - protein, 352 aa, Unknown
  Bacterial polypetide isolated from the Sargasso Sea
MENSFLSEFKKRDYFNQCTNSGELEHLMAKKKIRAYIGFDCTAPSLHVGSLLQIMCLRLLQKHGHQPIVLLGGGTTRIGDPSGKEETRKILSEKEIDKNIKNIQKIFKIYLKPNSSKTKPIFVNNYKWLGKLNYIKFLREIGKHFTINKMLSFDSVKLRLDREQSLSYMEFNYMILQAYDFFELNKNKNCSMQIGGSDQWGNIVNGVELIKRKSNTQAFGLTTPLITLASGIKMGKTEKGAVWLDKKMLSPYDYWQFWRNTDDRDVLKFIKMFTDLKLEKIDEIKNQDVNRLKILLANEATTMLHGKEAASKAEKTAKNTFEKGAIGDDLPFLKIKKEELENGINVIDIVVN

SEQ ID NO: 158678 - protein, 395 aa, Unknown
  Bacterial polypetide isolated from the Sargasso Sea
MKEDLNLIKRGIDELIGEDELISKLKSKKELIVKAGFDPTAPDLHLGHTVLINKLRHFQQLGHQIIFLIGDFTGMIGDPSGKNKTRPPLDRADINENAKSYKKQVFKILDPKLTEIRFNSEWSKKLGAEGIIKLASQYNLARMLERDDFNKRYKSNQSIAMHELLYPLIQANDSITLNADIELGGTDQKFNLLVGRDLQRAFDQEPQVVITVPILEGLDGKNKMSKSLDNYVGIDESPNEMFGKIMSISDELMWRWFDLLSFKSSGEIKNLKSEQAKGKNPRDIKIELAKEIIARFHNEKSANDAESKFIDQFQKKNTPDDIEEISYKISGDLIPLPNLLKECGMTASTSEAMRMIQQGAVRIDEQKITDKKYQVSKNTSAIYQVGKRKFKKIIL

SEQ ID NO: 158679 - protein, 395 aa, Unknown
  Bacterial polypetide isolated from the Sargasso Sea
MKEALKLINRGTDEILTESDLKKKLDSGKQLIIKAGFDPTAPDLHLGHTVLLNKLRHFQDLGHRVVFLIGDFTGRIGDPSGTNKTRPTLDAKDLEENAKTYEKQVFKILKKDLTDVRFNSEWCEKLGADGLIRLAAKYNVARMLERDDFSKRFSENKSIAIHEFLYPLVQGYDSVALKADVELGGTDQKFNLLVGRELQRDYDQEPQVVITVPILEGLDGVKKMSKSLNNYVAIDEEPDEMFGKIMSISDDLMWRWFELLSFMSEEEINSLKKEMQDGKNPRDIKFILAEEIVDRFHKDGDGQKCKESFLNRFQKGQIPENVDLVKVNIDGESILLVNLLKETNMIASVSEGNRLIKQGGIKVNSEKVNDPKFEISVNSENLYQVGKRRFLKIKI

SEQ ID NO: 158680 - protein, 411 aa, Unknown
  Bacterial polypetide isolated from the Sargasso Sea
MENSYLSEFKNREYFNQCTNFQELEQLMTKKKIRAYIGFDCTAQSLHVGSLLQIMCLRLLQKHGHQPIVLLGGGTTRIGDPSGKEETRKILSEKQIEKNIKNIEKVFKIYLKTNNPKLKPIFVNNYKWLGKLNYIKFLREIGRHFTINKMLSFDSVKLRLEREQSLSYMEFNYMILQAYDFLELNKVKNCIMQIGGSDQWGNIVNGVELIKRQSGNTAYGLTTPLITLASGAKMGKTEQGAVWLDKKMLSPYDYWQFWRNTDDRDVIKFLKMFTDLSLEKIENIKTKDINYLKILLANETTSMLHGAESARQAERTAKNTFKNKSIDENLPSVTINKNQIEKEINILNIVILSKMLSSKGEIRRMIKNKGIKINNVTIDNEKRMISKKDFKENSMLKLSLGKKKHTVFKIN

SEQ ID NO: 158681 - protein, 409 aa, Unknown
  Bacterial polypetide isolated from the Sargasso Sea
MNKFLKEFKDRGYFYQCTDENELSSLLDKKKIKAYIGFDCTAESLHVGSLLQIMCLRMLQKHGHQPIVLLGGGTTRIGDPSGKDKTRKILNEDEIKKNSKNIEKILKKFLSTDNKNIKPIFVDNFEWLKGLNYISFLRDIGKHFTINKMLTFESVKTRLDREQSLSYMEFNYMILQAYDFLELNKKENCILQIGGSDQWGNIINGTELIKRHSNNIAYGLTTPLITLAGGTKMGKTETGAIWLDKNLLSSYEYWQFWRNTDDNDVIKFLKMFTDLTIDEINKSKDNDINQLKIKLANEATTMLHGKKESEKAEATAKKTFEQNLSGEGLPTYSISKSKLNNLTIVELVSLTKIQISKSEVRRLIKGSGIKINNKTIDDEKYLIKNESFNKDGFIKLSIGKKKHIKIELD

SEQ ID NO: 158682 - protein, 407 aa, Unknown
  Bacterial polypetide isolated from the Sargasso Sea
MNKFLKEFKDRGYFYQCTNENELSNLLDKKSINAYIGFDSTAASLHVGSLMQIMCLKLLQKHGHRPIVLLGGGTTRIGDPSGKEETRKILSEVQIENNIKNIQNVFKIFLKTNNPKLKPIFVNNYKWLGKLNYIKFLREIGRHFTINKMLSFESVKLRLEREQSLSYMEFNYMILQAYDFLELNKSKNCLMQIGGSDQWGNIVNGVELIKRQSGNQVYGLTTPLITLSSGAKMGKTEKGAVWLDKKMLPPYDYWQFWRNTDDRDVIKFLKMFTDMPLNEIENIQENNINDLKIILANKATEMLHGEKTAKESEKMAVSTFKNDSSGENLPNIKINKEILNKNIVELTAYVAKGISKSEIRRLIKSNGIKINNQLVNDEKYIINDALFLENRFIKLSIGKKKHFKIIL

SEQ ID NO: 158683 - protein, 398 aa, Unknown
  Bacterial polypetide isolated from the Sargasso Sea
MIDYIQLFKDRNLFNQCTNEIELNNLLNKKKIIFYIGFDATADALHAGSLVQLRAIKTLIKHGHQAIVLLGGGTTKIGDPSGKDASRQILTYETIQKNIENFKRIFEHYFRDFKENIKFINNDQWLDKLNYIELLRDLGSQVSINRMLTFESVKERLKREQSLSFLEFNYMILQSYDFLHLNKHENCELQIGGSDQWGNIVLGMEIISKINKKDAFGLTTPLLTTSTGKKMGKTEQGAVWIDQNKYSSYDFYQYWRNVDDNDVEKLLLIFSDLDKEEIKILIKEDINNAKKKLAYLVTTDCHSESSAQEAEEKARSIFENNSYDNIDEINFKIDSKLIDTLTSNSSVSSKSEAKRLIEGGGIKIDDDQINDINLTIDKSYNGKILKIGKKKYFKIIVK

SEQ ID NO: 158684 - protein, 409 aa, Unknown
  Bacterial polypetide isolated from the Sargasso Sea
MNKFLKDFKDRGYFYQCTSEDELSNLLDKEKIKAYIGFDCTAESLHVGSLLQIMCLRLLQKNGHRPIVLLGGGTTRIGDPSGKDKTRKILSEEEIEKNILNIKNILKKFLDDDDPSTKPIFVNNYSWLKNLNYISFLRDIGKHFTINRMLTFDSVKLRLDREQSLSYMEFNYMILQAYDFLELNKTENCVLQIGGSDQWGNIVNGVELIKRYSNNQTFGLTTPLITLATGAKMGKTENGAVWLDEKFLSAYDYWQFWRNIDDRDVIKFIKMFTDLDIVEIEKLKKNNINELKILLANKTTSLLHGEKAAKNSEQAAKEAFSGNSLGSNLPSVNISLENVDKKINVLDLILLSKLENSKSEIRRLIKGNAIKINDNTISDEKFIIDHNLFKENYLKLSIGKKRHIKVELN

SEQ ID NO: 158685 - protein, 268 aa, Unknown
  Bacterial polypetide isolated from the Sargasso Sea
MNNFLREFKDRGYYYQCTNETALSDLLNKENINAYIGFDSTAPSLHVGSLLQIMCLRLLQKHGHKPIVLLGGGTTRIGDPSGKEETRKILSEKQIEKNINNIKNVFKIFLKTNNPQLKPIFVNNFKWLSKLNYINFLRDIGRHFTINKMLTFDSVKLRLEREQSLSYMEFNYMILQAYDFYELNKTNKCNLQIGGSDQWGNIVNGVELIKRESGNQAYGLTTPLITLASGTKMGKTEKGAVWLNKEMLSPYDYWQFWRNTDDRDVLKF

SEQ ID NO: 158686 - protein, 407 aa, Unknown
  Bacterial polypetide isolated from the Sargasso Sea
MNKFLKEFKDRGYFYQCTNENELSDLLDKKSISIYIGFDSTAPSLHVGSLMQIMCLKLLQNHGHRPIVLLGGGTTRIGDPSGKDETRKILSEKQIEQNIKNIKNVFKIFLKTKNPKLKPVFVNNYKWLGKLNYIKFLREIGRHFTINKMLSFDSVKLRLEREQSLSYMEFNYMILQAYDFLELNKNKNCLMQIGGSDQWGNIVNGVELIKRQSGNQVYGLTTPLITLASGAKMGKTEQGAVWLDKKMLSPYDYWQFWRNTDDRDVIKFLKMFTTISINEIEKIKDKNINDLKIILANKTTEMLHGEKSAKESEKMALSTFKDNSSGENLPNIKINKEIMDKNIVELTAYVTKDISKSEIRRMIKANGIKIDNQLVNDEKYIINSQLFLEKGFIKLSIGKKRHYKIII

SEQ ID NO: 158687 - protein, 324 aa, Unknown
  Bacterial polypetide isolated from the Sargasso Sea
TRKILDENEIEKNIKNIQNILKKFLDSEDPITSPIYVNNYTWLKDLNYISFLRDIGKHFTINRMLTFDSVKLRLEREQSLSYMEFNYMILQAYDFLELNKKENCVLQIGGSDQWGNIVNGVELIKRYSNNQTYGLTTPLITLATGAKMGKTENGAIWLDEKYLSAYDYWQFWRNVDDRDVMKFLKMFTDIDINEINALEEKNINELKILLANKATAMLHGEDAAQNSEQAAKEAFSGNSLGSNLPSVKIETTQLENNINIIDLIILSKAENSKSEIRRLIKGKAIKINDAVVSDEKFIINQDLFSENYLKLSIGKKRHIKVELI

SEQ ID NO: 158688 - protein, 366 aa, Unknown
  Bacterial polypetide isolated from the Sargasso Sea
NVKAGFDPTAPDLHLGHTVLINKLRQFQTLGHNIIFLIGDYTGMIGDPSGKSATRPPLSAEEIKENSKTYEKQIFKILDPDLTTVVFNSSWMNKMNAADLIRLASHHTVARMLERDDFDKRYKSNQAISIHEFLYPLIQGYDSVALDADVELGGTDQKFNLLVGRQLQELHGKPPQVVITMPILEGLGGSQKMSKSLSNYIGIDESAKEMFGKIMSISDNLMWRYFELLSFKNLEEIEQFKKQVETGTNPRDIKFELAQEIITRFHDLKSAQDAKNDFVKRFSDNAIPDIIDDIEIKVSNKGIVFANLLKETQLVSSTSDAHRMIKQAAVKIDGKRADDGKQILEAGFSAVIQVGKRKFIRVKLTE

SEQ ID NO: 158689 - protein, 363 aa, Unknown
  Bacterial polypetide isolated from the Sargasso Sea
MTSNKEQILEIKRGVDEILVEKDFLEKLKKNKPLKIKVGFDPTAPDLHLGHTVIINKMRQFQEFGHEVIFLIGDYTGMIGDPSGVNETRPVLTVEQVKENARTYKNQIFKILDKDKTRIELNSSWMNKVTSAELIDIASKYTVARMLERDDFKKRFKSENPISIHEFIYPLVQGYDSVALECDVEMGGTDQKFNLLVGRHLQQLYGQEPQTIITLPLLEGLDGIKKMSKSANNFVALNDSGDDMFGKIMSVSDDLMWRYFELVSSKNLTEIKNLKNSVNDGANPRDIKFLLAEEIVERFHNQSIAKKAKESFLQRFQKGGIPEDIDLTEVSIKDIQNDDGEINLPRLLAHTNLVNSISEGHRA

SEQ ID NO: 158690 - protein, 329 aa, Unknown
  Bacterial polypetide isolated from the Sargasso Sea
MSIKSEDIIFELESRGLIAQLAGEDNLREHLASGKRVVYCGFDPTAESLHVGSVVPLLVLRRFQLAGHKPIALVGGATGLIGDPSFKSAERQLNSADVVEEWVERLKPQLSQFLDFDCGANSAVLVNNLDWTQNLDLLTFLRTVGKHFSVNSMIQKESVKQRIEREGEGISFTEFSYMLLQSLDFAELHERFDCTIQVGGSDQWGNITGGIDLTRRMHQKQVFGVTTPLVTKADGTKFGKTEKGTIWISAKKTSPYALYQFWLNVSDLDVYKYLRYFTFLSAKEIREIELADKSSERKPEAQGILASEVTKLLHGAEGLTAAKRISDGL

SEQ ID NO: 158691 - protein, 394 aa, Unknown
  Bacterial polypetide isolated from the Sargasso Sea
MKESLELIKRGIDEVLTEDDLISKLKSKKQLTVKVGFDPTAPDLHLGHTVILNKMRHFQDLGHKVVFLIGDFTGRIGDPSGKNKTRPSLDKEELEKNAKTYSDQVFKILNKDLTDIRFNSEWCEDLGADGIIGLASKYNLGRMLERDDFSKRYKANQQIAIHEFLYPLIQAYDSIALNADVEMGGTDQKFNLLVGRELQRAFDQEPQVCITLPILEGLDGINKMSKSLDNYVGINEDPDEMFGKIMSISDDLMWRWFELLSFRPINEVNELKKEVKSGMNPRDTKILLAEEIIERFHSKEDAENAKNTFLDRFQKGAKPKDIETFSISLDDDIAIGNLLKESGLVQSTSEAMRLVKQGAVKINDEKIDDPKLSIEKNQELLVQVGKRRFLKIKT

SEQ ID NO: 158692 - protein, 356 aa, Unknown
  Bacterial polypetide isolated from the Sargasso Sea
MTSNKEQILEIKRGVDEILVEKDFLEKLKKKKPLKIKVGFDPTAPDLHLGHTVIINKMRQFQEFGHEIIFLIGDYTGMIGDPSGVNETRPVLTLEQVKENARTYKNQIFKILDKDKTRIEFNSTWMNKVTSAELIDIASKYTVARMLERDDFKKRFKSKNPISIHEFIYPLVQGYDSVALECDVEMGGTDQKFNLLVGRHLQQLYGQEPQTIITLPLLEGLDGVKKMSKSANNYVALNDSGDDMFGKIMSVSDDLMWRYFELVSSKNLTEIKNLKDSVDDGANPRDIKFLLAEEIVERFHNQPIAKKAKESFMQRFQKRGIPEDIDLSEVSIKDIQNDNGEINLPRLLAHTNLVNS

SEQ ID NO: 158693 - protein, 395 aa, Unknown
  Bacterial polypetide isolated from the Sargasso Sea
MKAALELIRRGVDEILTEEDLIAKLKSKKQLLIKVGFDPTAPDLHLGHTVILNKMRHFQELGHKVVFLIGDFTGRIGDPSGKNKTRPTLDAEDLVNNAQTYADQVFKILDKQLTEIRFNSEWCEQLGADGIIRLASQYNLGRMLEREDFNARYKANEQIALHEFLYPLIQAYDSIALEADIEMGGTDQKFNLLVGRELQRGYGQDPQVCITLPILEGLDGVHKMSKSLNNYVGINEPPAEMFGKIMSISDDLMWRWFELLSFESTTTIANYQKDVKTGTNPRDIKFKLAHELVARFHSDSAAAQALQSFTAQFQKGAKPEHIDTQMLTLTEDTIAIGNLLKETQLTSSTSEAMRLVKQGAVKVDDEKITDPKLQLDKGKSYLVQVGKRKFLTVQL

SEQ ID NO: 158694 - protein, 201 aa, Unknown
  Bacterial polypetide isolated from the Sargasso Sea
MNEFLKEFKDRGYFYQCTDEKALSKKLSEESVKGYIGFDCTAQSLHVGSLLQIMCLRLMQKHGHKPIVLLGGGTTRIGDPSGKDKTRKILDENEIEKNIKSIENILKKFLVTKDEKISPIFVNNYSWLKDLNYISFLRDIGKHFTINKMLSFDSVKLRLEREQSLSYMEFNYMILQAYDFLELNKKKNCLLQIGGSDQWGN

SEQ ID NO: 158695 - protein, 430 aa, Unknown
  Bacterial polypetide isolated from the Sargasso Sea
MKNFIDELKWRGMLQDIIPGTEAHLNKNKSLGYIGFDPTSDSLHVGSLVPIFILMHFQKYGHTPVVLLGGATGMIGDPSGKSDERKLLDKDILDYNFKKLKKQFEKFLDFDSKKENPAILLNNYDWMSKFSVIDFSRNIGKHITINYMMAKDSVKKRIGKESNDGMSFTEFTYQLIQGYDFLYLFQNMNCTVQMGGSDQWGNITTGTELIRRKENKKAFALTCPLVTKSDGSKFGKSESGNIWLDKNKTSAYKFYQYWINISDEDAKNYIKIFTFLEKNEVEKLIKQHDDNKGLRILQNHLADSLTKLIHGDKELQNSVKASKILFGKSSEDDLKSVDPSTIMEIFEGVPKSTISSQKLKAGIDIEILLSKETNFLKSLSEAKRALGENSIYVNKTKVQNNFVVSDKNLINNKLILLQRGKKNYFLVNVK

SEQ ID NO: 158696 - protein, 291 aa, Unknown
  Bacterial polypetide isolated from the Sargasso Sea
LKPIFVNNYKWLSKLNYIDFLRDIGKHFTINKMLTFDSVKLRLEREQSLSYMEFNYMILQAYDFFELNKSNKCNLQIGGSDQWGNIVNGVELIKRESGNQAFGLTTPLITLASGTKMGKTEKGAVWLNKEMLSPYDYWQFWRNIDDRDVLKFLKMFTDLSLDEIEKAKDKDINELKILLANNATEMLHGIKEAEKSEKLAKNTFKENSTGENLPGIKVNNDILSKNIVELISFVNKEISKSEIRRLIKSNGIKLNNETVLDEKYIIDPNLFSDKGFIKLSIGKKKHFKITN

SEQ ID NO: 158697 - protein, 364 aa, Unknown
  Bacterial polypetide isolated from the Sargasso Sea
HVGSLLQIMCLRLLQKNGHRPIVLLGGGTTRIGDPSGKDKTRKILSEDEIEKNIKNIKNILKKFLDNEDPNTKPIFVNNYTWLKNLNYISFLRDIGKHFTINRMLTFDSVKLRLDREQSLSYMEFNYMILQAYDFLELNKKENCVLQIGGSDQWGNIVNGVELIKRYSNNQTFGLTTPLITLATGAKMGKTESGAIWLDQKYLSAYDYWQFWRNVDDRDVIKFLKMFTEIEIKEIETIKDKDINELKILLANKTTEMLHGKEAAKNSEQAAKEAFSGNTLGSNLPKVNIQSNKIEEKINIVDLVLLSKLENSKSEIRRLIKGNAVKINDNVISDEKFEINKNLFKDNYLKLSLGKKRHIKIELN

SEQ ID NO: 158698 - protein, 110 aa, Unknown
  Bacterial polypetide isolated from the Sargasso Sea
MEEITIEDFIKIDLRVAKIIEVNEVEDADKLIQLKLDIGETGTKTVFAGIKSAYKPDELLNKHVVCVNNLKPRKMRFGTSEGMILAAGDDDLGIFVLSPDEGALPGMKVR

SEQ ID NO: 158699 - protein, 182 aa, Unknown
  Bacterial polypetide isolated from the Sargasso Sea
MDKNFYITTPIYYPSAKPHMGHAYSSIIADFFARFKKIDGFNVSFLTGTDEHGLKIQRAAKNKGIDTLQFCDEISKTFKDLSKILNLTNTDFIRTTEDRHKISVQNLWKELEKNEDIYLSKYSGWYSVSDEAFYTEDEIEEVDGKKQAILSKSSVEWMDEESYFFKLSKWEKPLLEHYKKNP

SEQ ID NO: 158700 - protein, 106 aa, Unknown
  Bacterial polypetide isolated from the Sargasso Sea
NQYIDHHKPWVIAKQTITDDSKKELQGICTMGINLFRLLIIYLKPVLPNVACQAENFLKIEPLQWEDVKTTLLNHQINSYEALMVRIEKENIEAMIKKSKKDLIKI

SEQ ID NO: 158701 - protein, 98 aa, Unknown
  Bacterial polypetide isolated from the Sargasso Sea
WSIVSASNKYIDEQAPWKLLKTEPERMQTVLFTLLETIRCIGIVLQPVMPGSANEILNQLAIDPSARSFSTLSEQHCLQPGTKLQQPNPIFPRFDEKT

SEQ ID NO: 158702 - protein, 110 aa, Unknown
  Bacterial polypetide isolated from the Sargasso Sea
MDKNFYITTPIYYPSARPHMGHAYSSIIADFFSRFKTIDGYKVYFLTGTDEHGLKIQRSAEKEGLDPLKFCDQISTTFRDLSKTLNLSNTDFIRTTEERHKKTVQHLGKS

SEQ ID NO: 158703 - protein, 86 aa, Unknown
  Bacterial polypetide isolated from the Sargasso Sea
HGTPIMLKAQKLGITPEQLVKDTSARQHKDFTDFGIIYDHYHSTHDDLNKQIVCDLYNTLKSKNLFEAKDIEQLYDPKDNMFLPDR

SEQ ID NO: 158704 - protein, 103 aa, Unknown
  Bacterial polypetide isolated from the Sargasso Sea
DFAKVELRVAKIVKAEGIEEADKLIKLHLDVGDLGERTVFAGIKSAYDPESLNGRHVVLVANLEPRKMKFGVSEGMVLASSNDEGSIYLISPDEGAKPGQLVK

SEQ ID NO: 158705 - protein, 182 aa, Unknown
  Bacterial polypetide isolated from the Sargasso Sea
MSKNVLVCVAWPYASGSRHLGHIGGAYLPADIFARYHRAVGNNVLMVSGSDVHGTPITVRADAEGVQPIDIVNKYHNEFLGYWEKLGISWDNYTTTMTDNHKKVTQEMFLKIKENGFIEKNKSIQAFDPQEKKFLPDRYVEGTCPCPVAYSEARGDQCDSCGKLLIQRVNNPYSKYLEQSRI

SEQ ID NO: 158706 - protein, 119 aa, Unknown
  Bacterial polypetide isolated from the Sargasso Sea
METQKNDNKDDSGKITIDEFMKVDLRTGKILEAEKVKKSKKLIQLKVDIGTETRQILAGIAESYEPENLIGRTVVIVANLKPAKLMGIESQGMVLAASNDGTILLAGFDQEPGQGIQVR

SEQ ID NO: 158707 - protein, 112 aa, Unknown
  Bacterial polypetide isolated from the Sargasso Sea
MDNINLINIDHFAAVDLRVAKIIKAEHVEGADKLLQLHLDVGELGSRKVFAGIKNAYEPEQLTNKLVVLVNNLEPRKMKFGVSEGMVLASSKDNNIYLVSPDKGAEPGMKVR

SEQ ID NO: 158708 - protein, 42 aa, Unknown
  Bacterial polypetide isolated from the Sargasso Sea
MEKNQRFTITSALPYTNGPIHIGHLAGAYLPADIYARYKRLC

SEQ ID NO: 158709 - protein, 145 aa, Unknown
  Bacterial polypetide isolated from the Sargasso Sea
MYVWLDALTCYANGVNYLNDNDNELEEYWKNVVHIVGKDILRHHTVYWPAFLLAADLELPRKIFAHGWWTNEGKKISKSLGNVIDPIEIINNYGLDQFRYFLLREVPFGNDGDFSKNALINRINSDLVNDLGNLCQRSLTMMKKN

SEQ ID NO: 158710 - protein, 50 aa, Unknown
  Bacterial polypetide isolated from the Sargasso Sea
MDTKHYYITTPIYYPSGKPHMGHAYSSIIADVIARYKRLEGFKVHFLTGT

SEQ ID NO: 158711 - protein, 59 aa, Unknown
  Bacterial polypetide isolated from the Sargasso Sea
MDKNFYITTPIYYPSAKPHMGHAYSSIIADFFARFKRIDGFDVKFLTGTDEHGLKIQRA

SEQ ID NO: 158712 - protein, 60 aa, Unknown
  Bacterial polypetide isolated from the Sargasso Sea
MQNKNFYITTPIYYPSGKPHMGHAYSSIIADTFARFKRLEGKEVFYLTGTDEHGLKIQRE

SEQ ID NO: 158713 - protein, 248 aa, Unknown
  Bacterial polypetide isolated from the Sargasso Sea
RFHAVYWPAMLISAGMKVPKKVFGHGFLTREGQKMGKSLGNVLDPDLLLSKYGNDPVRWYLIKDISLGNDGDFQDRRFVDIINNDLANTIGNLLNRTSSMSRKWFDNKVPDYIKNSSENKLELLAINSVENYFNKFNIYKLDQAANEVLKLAINTNLYLNDNQPWLLIKDNDKLPVVKEIIYNVLESTRIIGLLLLPLLPELSSKINIQLGSIYKQNIPWENQLKWGLLISNSSLPKPTPVINKLEYE

SEQ ID NO: 158714 - protein, 194 aa, Unknown
  Bacterial polypetide isolated from the Sargasso Sea
GLKIQRAAEKKGMDTKKFCDEISTTFRDLSKILNLSNNDFIRTTEERHFISVQHLWNILEKKNEIYLSKYSGWYSVSDEAFYSDDEIEDINGLKKSKLSGSPVEWVEEESYFFKLSKWQEPLLKFYKENSKFILPESRKNEVISFVSSGLKDLSVSRKSFSWGIKVPSNRNHVIYVWLDALTNYKSALNYPDEN

SEQ ID NO: 158715 - protein, 247 aa, Unknown
  Bacterial polypetide isolated from the Sargasso Sea
DGLKDKVFYGWFDNHFAYISSTLKFLNDKNIDGKSFWNDADIYHFIGKDIVYHHYLFLPAMRLGLEKEFKLPDYIPTRGHLTLEGKKISKSRNWYIGLKDFLEKFPADYLRFYLISINPYSQDDLNFDWEQFSTKINSELIGNLGNLVNRALGFTNKTFDGVVPEPEKFDEKDSESEQKIKSLAEDIGKLMEENHLDRALKQLMEFSAHFNQYFQHKEPWKKGPGTNACIYLSVNAVRSIAICLHSF

SEQ ID NO: 158716 - protein, 205 aa, Unknown
  Bacterial polypetide isolated from the Sargasso Sea
NHLAYISSTLKFLNDKNIDGKSFWNDADIYHFIGKDIVYHHYLFLPAMRLGLEKEFKLPDYIPTRGHLTLEGKKISKSRNWYIGLKDFLEKFPADYLRFYLISINPYSQDDLNFDWEQFSTKINSELIGNLGNLVNRALGFTNKTFDGVVPEPEKFDEKDSESEQKIKSLAEDIGKLMEENHLDRALKQLMEFSAHFNPILPNIR

SEQ ID NO: 158717 - protein, 120 aa, Unknown
  Bacterial polypetide isolated from the Sargasso Sea
QQETTSNLPVLKDEIVFDDFVKMDLRVGEIKSAEKVEKSNKLLKFSVDMGLETRTILSGVAKHFNAEEMVGKKVVVMANLAPRKIMGIESQGMLLFAENADGKLVAVAPGSNAENGATIA

SEQ ID NO: 158718 - protein, 152 aa, Unknown
  Bacterial polypetide isolated from the Sargasso Sea
WIQLGSIELISSKSTIKNEGLLFEKIEKETIQKVIQKLSESQDDEKQLTYAPMKENISFEEFQKIDLRLGTIQSAEKVEKSSKLLKLRIDLGFEERTIVSGIAKYYTPKELIGKQVEVIVNLAARKIMGIESQGMLLMAEDTRWQIEFTEVR

SEQ ID NO: 158719 - protein, 153 aa, Unknown
  Bacterial polypetide isolated from the Sargasso Sea
MNKKAIITSALPYSNGEIHLGHVASTYLPADVTTRFLKQNGVEAYYVCASDDFGTPILIQSEKLGQTPEEYVAHWNKRDYEDFSAFDIAFDYFYKTSSSENISFVQQVFEKLQKNGYIYEKEIIQFFCNSCHKFLPDRFVIGTCPHLHAEDQY

SEQ ID NO: 158720 - protein, 307 aa, Unknown
  Bacterial polypetide isolated from the Sargasso Sea
IQYRMGINVGDVILSDNDVFGDSVNIASRLEGLSVPGGICLSDIVYQLINEDKKKLFKDLGSQRVKNISRPIKVWQWDPNSELENRKKSVEELKQHVQFCLAEDDAQIAFARVGTGATILKAPNWMSHIEYEWRSPIWGPLLNKIAAQHELIRFDQRGGGLSDWDVAEISEDRMISDINDIVNYESLERFTMLGLSQGCAFSIRFALENPEKVNGLILFGGYTRGRLMRNSDEATTLHKTAHNLITAGWGSNNPAYRTFFTSSFIPDATIEQASSFDELQRVCTSAENAARIHEMNGTVDVSEIAKQ

SEQ ID NO: 158721 - protein, 222 aa, Unknown
  Bacterial polypetide isolated from the Sargasso Sea
TNQYIDKTGPWNLAKTGEGKERLKTVMYNAAESLRILGVLLFPFMPKSSESLMLQLGIQKTIEEQGMASLKNWGKLPPGTKTQKAKQLFPRIEDKQVTKILAELKNKKSDKEDDSGKITIDEFMKVDLRTGKILEAEKVKKSKKLIQLKIDIGTETRQILAGIAESYEPESLIGRTVIIVANLKPAKLMGIESQGMVLAASNDGTILLAGFDQEPEQGIQVR

SEQ ID NO: 158722 - protein, 113 aa, Unknown
  Bacterial polypetide isolated from the Sargasso Sea
MSKNFYITTPIYYPSAKPHMGHAYSSIVSDFFARFKKNDGYSVQFLTGTDEHGLKIQRSAEKNNMKPKDFCDQISKTFENLSRTLNLSNTDFIRTTETRHIKSVQHLWKILED

SEQ ID NO: 158723 - protein, 165 aa, Unknown
  Bacterial polypetide isolated from the Sargasso Sea
MNKNYYITTPIYYPSAKPHMGHAYSSIIVDFFARFKRIEGYKVFFLTGTDEHGLKIQRAAEENQKKPLEFCDEISKTFKELSNTLNLSNNDFIRTTEKRHHKSVQNLWNILEKKGEIYLSKYSGWYSVSDEAFYLDDEIETIDSVKVAKSSGSPVEWLEEESYFF

SEQ ID NO: 158724 - protein, 136 aa, Unknown
  Bacterial polypetide isolated from the Sargasso Sea
MSKNFYITTPIYYPSAKPHMGHAYSSIIADFLARFKRIDGFNVNFLTGTDEHGLKIQRAAEKKKIEPLKFCDEISQTFRNLSKTLNLTNTDFIRTTEKRHKLSVQNLWNELKKNDEIYLSKYSGWYSVCDEAFYSD

SEQ ID NO: 158725 - protein, 263 aa, Unknown
  Bacterial polypetide isolated from the Sargasso Sea
FRALIGEKPTFLTGLDEHGLKVQQAAEKNGKAPQDHCDLMAPAFIDLWKKLNINYSDFIRTTEHRHTKIVQKILTKVHESGDIYMDEYEGWYSISEERFITEKELDSGQFGEAKQIKEKNYFFRMSKYQKTLIDKIEKDELLIQPKSRKNEVLGFLKNELSDLCISRPKSRLEWGIELPFDNNYVTYVWFDALINYISAIGVFKNDEQFSSLWPADVHLIGKDILTTHSVYWPTMLLSLGLPLPQRIFAHGWWLTDDQKMSKS

SEQ ID NO: 158726 - protein, 246 aa, Unknown
  Bacterial polypetide isolated from the Sargasso Sea
FVGKDNVPFHAIIWPAMLLAYGDLNLPTNVPANQYILIKGEKASASRGVGKTLNDYLDEWNPDSLRYSLASILPEQNDSEISEDEMIRRNNEELVAAWGNLVQRVFSQYINNFDDLDISFEYEKIDEELMEGAKSCFKTTGEMIEKVELKSSLQNVMAYVNSINAYLNETEPWKVIKTDRKRASGILHCAITAIDACATMFTPFMPTTSQIVSDAIQKDDQNNWGINEIKKGAPLKNIGHLFKKFD

SEQ ID NO: 158727 - protein, 152 aa, Unknown
  Bacterial polypetide isolated from the Sargasso Sea
LPSISEKLEIGKGRVIKEGKNIAVINFGTRLTECLMASENLSKKGINITIVDARFAKPLDVNLIWQIANDHEAVITIEEGSIGGFGSHVSQFLNEKNLLDNNLKFRSMFLPDRFIDHDKPEMMYKNAGMDALNIENKILDTINSKVIVKKSN

SEQ ID NO: 158728 - protein, 276 aa, Unknown
  Bacterial polypetide isolated from the Sargasso Sea
LNWGVPVKKGQENWPGMDGKVFYVWFDAPIEYIACAEEWVDSGKGKDWHRWWKTDKGADDVIYTQFMGKDNVPFHTLSFPATILGSGEPWKLVDYIKSFNYLNYDGGQFSTSRNRGIFMDQALEILPPDYWRWWLLSHAPESSDSEFTWENFQQTVNKDLADVLGNFVSRVTKFCRSKFGEVIPTGGVWSQNEKKLVNEIEKRVMNYEVCMESKEIRKSANELRAIWACGNEYLQSAEPWSTFKSDPEASAMQIRLSLNLIKLYGVLSAPFIPDAA

SEQ ID NO: 158729 - protein, 315 aa, Unknown
  Bacterial polypetide isolated from the Sargasso Sea
MVASTYLPADVTTRFLKQNGIEAYYICASDDFGTPILIQSEKEGKTPQEYVAHWNKRDLEDFTAFDIAFDFFYKTSSEENIEFVQDVFKKLQDNGHIYENEIIQFFCENDKKFLPDRFVKGICPYCKAEDQYSDLCEKCGRVPEEIENPHCSICGQTPVKKSTNHYFFKLKNFSAPLLDYLNNAPYLQKDVKKYVENWIEEGLVDWDITRDISWGVPIPIDGLDNKVFYGWFDNHLAYISSSIKFLNDKGVDGKSFWNDADIYHFIGKDIVYHHYLFLPAMRLGINKEFKLPDYIPTRGHLTLESKRFQRAEIGI

SEQ ID NO: 158730 - protein, 199 aa, Unknown
  Bacterial polypetide isolated from the Sargasso Sea
ILRFHAVYWPAFLMAAGIEPPKRIFAHGWWTNEGQKISKSLGNVIDPYDIINEYGLDQIRFFLFREVPFGNDGDFSKKAIANRINADLSNNFGNLVQRISSFAVKNNDSILKPSENLTNDDQDLINILQNKFDEYCIFMNNQQIDRAIKSVLELISACNAYVDTQAPWSLKKTNKIRMEEVLYLVTNIIIKSAIMLYPI

SEQ ID NO: 158731 - protein, 101 aa, Unknown
  Bacterial polypetide isolated from the Sargasso Sea
MNKNFYITTPIYYPSAKPHMGHAYSSIIADFFARAKKIQGLNVFFLTGTDEHGLKIQRAAEKKKMNPKEFCDEISLTFRELTKTLNLSNNDFIRTTETRHY

SEQ ID NO: 158732 - protein, 73 aa, Unknown
  Bacterial polypetide isolated from the Sargasso Sea
MNKYFYITTPIYYPSAKPHMGHAYSSIVSDVIARFKRLDGYNVEFLTGTDEHGLKIQRAAEERGVDPKKSVMR

SEQ ID NO: 158733 - protein, 77 aa, Unknown
  Bacterial polypetide isolated from the Sargasso Sea
MNKNFYITTPIYYPSAKPHMGHAYSSIIADFFARIKRIQGVNVFFLTGTDEHGLKIQRSAEKKKMEPKDFCDEISVT

SEQ ID NO: 158734 - protein, 308 aa, Unknown
  Bacterial polypetide isolated from the Sargasso Sea
DVKKYVENWIKEGLVDWDITRDISWGVPIPIEGLDNKVFYGWFDNHLAYISSSIKFLNDKGIDGKSFWNDADIYHFIGKDIVYHHYLFLPAMRLGINKEFKLPDYIPTRGHLTLESKKISKSRNWYIGLKEFLEIFPADYLRFYLISINPYSQDDLNFDWDQFATKINSELIGNLGNLVNRALGFTNKAFDGVLPVPEDFDEKDSESEKRITSLADDISKLMIDNQLDRALKQIMEFSAHFNQYFQHKEPWKKGPGTSSCVYLSVNAVRSLAIAIHSFLPKASQQIWEQIGMNGDVSETNWNEMSEIS

SEQ ID NO: 158735 - protein, 99 aa, Unknown
  Bacterial polypetide isolated from the Sargasso Sea
MSKRNFYITTPIYYPSGKPHMGHAYSSIIADVLARFKNIDGYNVHFLTGTDEHGLKIQREAKKNNKDPKSFCDEISITFKNLTKTLNLSNNDFIRTTEK

SEQ ID NO: 158736 - protein, 229 aa, Unknown
  Bacterial polypetide isolated from the Sargasso Sea
EQCREQYLDENKPWKLAKEEDESERLGTVLYTALDASAWLVCLLEPVMPEKMKAARIQLGLGESPMTLEILKPGLVQSGTPLPLPEPLFPRIQLKQKEPEKPGPTPKAKPQSEEKQEAELENLVGIESFQKLDFRTGRILESKKVKGSDKLLVSQVDLGESKPRSIVSGVAEFYRPEDLPGMNVVVVSNLKPVKLRGELSEGMILATDDGNSLKIVEAPGDSKPGTVVR

SEQ ID NO: 158737 - protein, 166 aa, Unknown
  Bacterial polypetide isolated from the Sargasso Sea
GIKKTIEEQGMVSLKTWGNLSPETQTQKAKQLFPRIEDKQAEKILVKLETQKEDKSEATGKITIEDFKKIDLRTGKILEAEKVKKSKKLIQLKVDIGTETRQILAGIAENYEPEILIGRTVIIVANLKPAKLMGIESQGMILAASSDETILLAGFDQEPGKGIQVR

SEQ ID NO: 158738 - protein, 198 aa, Unknown
  Bacterial polypetide isolated from the Sargasso Sea
TDDKLYKNFWPANLHIIGKDILRFHAIYWPAFLLAANISPPKKVYGHGWILSEDKKMSKSVGNILDPIEIIKNFGIDQLRYYLIKEVSLGNDGSISLKNLKNCINNDLANNFGNLCQRVFSFVEKNCNSKIPKSGNFEKIDKDFQNELIDKIPSLIKMMDDQKLNSYIKEVINLSFNSNKYFNDLEPWKLKKSNLNRM

SEQ ID NO: 158739 - protein, 204 aa, Unknown
  Bacterial polypetide isolated from the Sargasso Sea
MVNYFIRRLLLMIPTFLGSTVLVFTILQMAPGGPIEQMMLELQMGGAVAGEGGAQSSSGVTGGVSLPPKALKELERFYGFDKPIYQRYLSWLGIWPREIKHRDFTVPESINSFEKRVGKVDGKLWKVDIVLSDDSSPVVYEKNGDISKNWHAKIEEHNDDGSIDAVVFQKEYSGILTGNLGKSYTYLKPVTEVMKPRFKISLFF

SEQ ID NO: 158740 - protein, 156 aa, Unknown
  Bacterial polypetide isolated from the Sargasso Sea
VGIELPNISEKIEIGKGRLIKEGKKVAIINFGARLNECLIARENLLKKGINITLVDARFAKPLDENLIWQIATDHEVVITIEEGSIGGFGSHVGQFLNEKNLLDNNLKFRSMFLPDRFIDHDKPEIMYKYAGLDSLNIESKILDTLNSKVVIKKSN

SEQ ID NO: 158741 - protein, 155 aa, Unknown
  Bacterial polypetide isolated from the Sargasso Sea
MDKTFYITTPIYYPSAKPHMGHAYSSIIADFFARFKLIDDYQVHFLTGTDEHGLKIQRSAEKAGEEPQIFCDQISQTFRDLSDTLNLSNTDFIRTTEARHKNTVQHLWNELEKNDDIYLSNYSGWYSVSDEAFYNEDEFEEVDGKKIAISSKSLV

SEQ ID NO: 158742 - protein, 156 aa, Unknown
  Bacterial polypetide isolated from the Sargasso Sea
MASTLTTPLYYVNDKPHIGSVYTTLAVDTLARFKRLSGEQVMFITGCDEHGQKIQQTAESAGIEPQQHCDEISSTFASTWSQWQISNDRFIRTTDPRHQSIVEEFFARVEANGDIVEGRQQGWYCVACEEYKDDPADAQSPHCPIHQKPLEWRDEA

SEQ ID NO: 158743 - protein, 109 aa, Unknown
  Bacterial polypetide isolated from the Sargasso Sea
MDKNFYITTPIYYPSAKPHMGHAYSSIIADFFSRFKKIDGYNVYFLTGTDEHGLKIQRSAEKQNKDPKTFCDEISKTFENLTKTLNLSNNDFIRTTEYRHKISVQKFYV

SEQ ID NO: 158744 - protein, 212 aa, Unknown
  Bacterial polypetide isolated from the Sargasso Sea
HVAGNCLPADIQYRYERARGRSVLMCSGSDEHGTPITITAEEMGISPQEVVDRYHEVNTKALADLGCSWINNVDPRGPEFGGALYNRTSDDKHKELVREVFTNLLNSGFLERKTMQQYCSVGRGGSVRFLPDRYVEGQCPVCSSDGARGDQCDSCGATYEANELINPRSKLDTESEIEIRDTDHFFLRLGDFQDSLEKHASERKGVWKPNVR

SEQ ID NO: 158745 - protein, 189 aa, Unknown
  Bacterial polypetide isolated from the Sargasso Sea
MSKLPKRYTVTAALPYTNGPLHIGHLAGVYIPADIYCRFLRCKKRDVIFICGSDEHGVAISIKAKKENKSPQEIVDKYDKLIRDSFKDFGISFDNYSRTSLPIHHETATDFFNLLKSKNKFFEKESEQLFDVKESQFLADRFVTGTCPVCKEKDAYGDQCESCGTSLSPDELINPKSTLSGSVPIKRKT

SEQ ID NO: 158746 - protein, 295 aa, Unknown
  Bacterial polypetide isolated from the Sargasso Sea
IYPADIFARFNRMIGNNVLMVSGSDQHGTPVTIRAKEENTTPEKIAEKYHKVWSETFKELDFSFDLYTKTGTDNHKEIVQNLFNSLNENGFLEEKYSEQPYSEKSEMFLSDRYIEGDCPHCPSRTKGDQCDDCGKDFEPIDLKNLISTIDSSEVTFKSTKHIYLKLPEFQEELDKWIKSKTYWRSAVKNQSLGFLSNGLIDRAITRDIDWGVKVPINGYEDKRIYVWFEAVIGYLSASIEWSKSKNNKEQKEDLWKDWWLNPDSKHFYFQGKDNIPFHTIILPAILIGSGSYNLP

SEQ ID NO: 158747 - protein, 154 aa, Unknown
  Bacterial polypetide isolated from the Sargasso Sea
MDKTFYITTPIYYPSAKPHMGHAYSSIISDFFARFKTIDNYQVHFLTGTDEHGLKIQRSAEKAGKEPQIFCDQISQTFRDLSDTLNLSNTDFIRTTETRHKKTVQHLWNELEKNDDIYLSNYSGWYSVSDEAFYNEDEIEELDGKKIAISSKSP

SEQ ID NO: 158748 - protein, 69 aa, Unknown
  Bacterial polypetide isolated from the Sargasso Sea
MNKNYFITTPIYYPSAKPHMGHAYSSIVSDVIARFKRLDGYNVEFLTGTDEHGLKIQRAAEAKGIDTKK

SEQ ID NO: 158749 - protein, 57 aa, Unknown
  Bacterial polypetide isolated from the Sargasso Sea
MDKTFYITTPIYYPSAKPHMGHAYSSIICDFFARFKTIDGYEVHFLTGTDEHGLKVQ

SEQ ID NO: 158750 - protein, 270 aa, Unknown
  Bacterial polypetide isolated from the Sargasso Sea
DHKDKVKKILTSFYEKGDIYFDEYEGLYSVSEERFITEKEKEEGQFREVKTIKEKNYFFRMSKYQKKLIDHINKNENFIRPESRKNEILGFLKKPLNDLCISRPKSRLSWGIDLPFDNDYVTYVWFDALINYISGIGWGEKSSENFDNYWPANYHLMAKDILTTHCVYWPTMLMACDIDLPKSIFAHGWWLIDNMKMSKSIGNVIRPLDLANEYGSDSLRYYLMRNMVLGQDSTFTTDSFIERYNADLANDYGNVVNRVVILTKKYYNSK

SEQ ID NO: 158751 - protein, 54 aa, Unknown
  Bacterial polypetide isolated from the Sargasso Sea
MSNKNFYITTPIYYPSGKPHMGHAYSSIIADIFARFKRIDEFDVFFLTGTDEHG

SEQ ID NO: 158752 - protein, 96 aa, Unknown
  Bacterial polypetide isolated from the Sargasso Sea
MDKNFYITTPIYYPSAKPHMGHAYSSIIADFFSRFKTIDGYDVHFLTGTDEHGLKIQRSAEKQGLDPHKFCDQISETFRDLSKTLNLTNTDFIRTT

SEQ ID NO: 158753 - protein, 242 aa, Unknown
  Bacterial polypetide isolated from the Sargasso Sea
MTFVITTPLYYVNDKPHLGSVYTTIICDAIARYKRLAGEDVIFITGVDEHGLKIQRTANEKGIEPKSHCDEISEVFNNNWKNWNISFDKFIRTSSKNHEFVVNEFYERVKASDDIYMGVQKGWYCVGCEEFKDNPENSSTYKCPIHQKNLEWKNEENLFFRLSKYQKEIEKIINEPSFIEPIERKNEIINFVSRGLKDFSISRTNVSWGIPVPGHDNHTFYVWFDALLGYVSAISSDATEHS

SEQ ID NO: 158754 - protein, 97 aa, Unknown
  Bacterial polypetide isolated from the Sargasso Sea
MDKNFYITTPIYYPSGRPHMGHAYSSIIADFFARFKSIDDYNVHFLTGTDEHGLKIQRSAEKAGKEPKEFCDQISKTFKDLSNTLNLSNTDFIRTTE

SEQ ID NO: 158755 - protein, 137 aa, Unknown
  Bacterial polypetide isolated from the Sargasso Sea
MDKTFYITTPIYYPSAKPHMGHAYSSIIADFFARFKIIDDYQVHFLTGTDEHGLKIQRSAEKAGKEPQIFCDQISQTFRDLSDTLNLSNTDFIRTTETRHKNTVQHLWNETEKNDDIYFINYSGWVSVSDEAFYNED

SEQ ID NO: 158756 - protein, 114 aa, Unknown
  Bacterial polypetide isolated from the Sargasso Sea
MDKNFYITTPIYYPSAKPHMGHAYSSIIADFFSRFKKIDGYNVYFLTGTDEHGLKIQRSAEKQNKDPKTFCDEISKTFENLTKTLNLSNNDFIRTTEYRHKISVQKFYVYIQLF

SEQ ID NO: 158757 - protein, 202 aa, Unknown
  Bacterial polypetide isolated from the Sargasso Sea
DITYLSTLPNFVVMAASDESELVKMINTSIDINDRPSAFRYPRGNGVGIELPNISEKIEIGKGRLIKEGKKVAIINFGARLNECLIARENLLKKGVNITLVDARFAKPLDENLIWQIATDHEVVITIEEGSIGGFGSHVGQFLNEKNLLDNNLKFRSMFLPDRFIDHDKPEIMYKYAGLDSFNIESKILDTLNSKVVIKKSN

SEQ ID NO: 158758 - protein, 124 aa, Unknown
  Bacterial polypetide isolated from the Sargasso Sea
MDKTYYITTPIYYPSGKPHMGHAYSSIIADFFARFKIIDDYQVHFLTGTDEHGLKIQRSAEKAGKEPLVFCDQISQTFRDLSDTLNLSNTDFIRTTEARHKKTVQHLWNELEKNDDIYLSNYSG

SEQ ID NO: 158759 - protein, 124 aa, Unknown
  Bacterial polypetide isolated from the Sargasso Sea
MSNKKFYITTPIYYPSGKPHMGHAYSSIIADVIARFKKTEGYEVYFLTGTDEHGLKIQREAKKNNKNPKNFCDDLSLTFKKLTKILNLSNNDFIRTTEDRHHKSVREIWERLEKSGDIYLDKYS

SEQ ID NO: 158760 - protein, 239 aa, Unknown
  Bacterial polypetide isolated from the Sargasso Sea
AYNDDGKKLSELIYELNEMNDLKRIRYTTSHPKDMTSDLIDAHAKCNKLMPILHLPVQSGSSKILKLMNRRHNISEYLEIIKKLKKINKNIKFSSDFIIGYPGEDEKDFEESIELMRKIKFINSYSFVFSPRPGTPASNLERINDKVSKDRLRLFQKFSNEIKFQYRQSLLNKKIKVLFENKTNNINQYFGRDEYNNSVIVNSSENLIGKIYNVYVSSLNQNTLFGKIDFNINNEYFAA

SEQ ID NO: 158761 - protein, 118 aa, Unknown
  Bacterial polypetide isolated from the Sargasso Sea
MNKNFYITTPIYYPSAKPHMGHAYSSIIADFFARFKKIDGYNIYFLTGTDEHGLKIQRAAESKKADTLKFCDEISETFRNLTKTLNLINTDFIRTTEKRHKDSVQHLWNVLLKNDDIY

SEQ ID NO: 158762 - protein, 253 aa, Unknown
  Bacterial polypetide isolated from the Sargasso Sea
NNVIHIVGKDIFRHHAVYWPAFLLAAELDLPKKIFAHGWWTNEGSKISKSLGNVIDPMEIINDYGLDQFRYFLLREVPFGNDGDFSRRALINRINSDLVNDLGNLCQRSLSMIEKKLGSIVPDITNNGHDESMLQESTEMILNKGFEMVEDFKIHDYIKLVWAHIGKVNKYFNDNKPWELEKNNKEKFLNVLAATTEQIKNIAFFIHPIMPNKSMELLKIIGIKDINVTFDEMKRVNVFGNKLSKVSHLFSRV

SEQ ID NO: 158763 - protein, 207 aa, Unknown
  Bacterial polypetide isolated from the Sargasso Sea
NKISKSLGNVIDPIDIINNYGLDQFRYFLLREVPFGNDGDFSIKALMNRINSDLVNDLGNLCQRSLTMIEKKLESIIPGKTSKGPYEEILEKSSEEVIIKGSKMIDEFKIHDYIRLVWEHIGRVNKYFNDSKPWELEKSDKEKFSNVLAVTTEQIRNIAFFINPIIPQTSIKILQIIGIDESQFLFKKIKNHNIVGNNISNVNHLFT

SEQ ID NO: 158764 - protein, 110 aa, Unknown
  Bacterial polypetide isolated from the Sargasso Sea
MDEISIEDFIKIDLRVAEIKHAENVEEADKLLKINLDLGELGERTVFAGIKKFYDPEKLIGLKIICVANLKPRKMRFGVSEGMILAASTDEEGVFILHPDQGAKPGMRVS

SEQ ID NO: 158765 - protein, 125 aa, Unknown
  Bacterial polypetide isolated from the Sargasso Sea
MLAEISNEIGNGQEMTYLKPVLDRAGVPVRSEFTSGQASFRDAIMQEYKFELIGEGQDSFHNRRRGLQYFLDHTILPHNNSIGTKVAVGAKKYAANREVIFSTDPNQIMKLQIPLSEINTNELIN

SEQ ID NO: 158766 - protein, 144 aa, Unknown
  Bacterial polypetide isolated from the Sargasso Sea
MDKIYITTPIYYVNDKPHVGHAYTSIACDALARFYRIAGYDVFFLTGTDEHGLKIQQSAEKKDINIQTFVDDVSKNFQNLSKSLMLTNDYFIRTTSEQHKNSASFFWETLVKKGQIYLDKYAGWYSVRDEAYYQEEELINGKAP

SEQ ID NO: 158767 - protein, 262 aa, Unknown
  Bacterial polypetide isolated from the Sargasso Sea
LYKKYWPADLHVIGKDILRFHAIYWPAFLMAAKLPLPKRIFGHGWILSDDKKMSKSIGNILDPIDIIKNYGIDQLRYYLIKEVSLGNDGNVSLENLKNCINNDLANNYGNLCQRVFSFLKKNCSNKIPKSDFFSDEDKILTNKLKKDVNKLSEFVNKQDLNNYIKKVIEYSFDSNKYFNDSEPWSLKKTNVKKMNSVLYSIIEQIKNISILLLPIIPISANKILDILNVKKDLRIIEEINKNFSINHDKELGNIEILFKKVE

SEQ ID NO: 158768 - protein, 108 aa, Unknown
  Bacterial polypetide isolated from the Sargasso Sea
MDEIDYDLFSKIDLRVGEIISAEDVEGADKLLCLKIDIGSITKTIFAGIKKFYEPESLLGKKIIIVNNLKSRKMKFGESEGMLLAADNDEKVYLIEIDKDVINGAKIR

SEQ ID NO: 158769 - protein, 110 aa, Unknown
  Bacterial polypetide isolated from the Sargasso Sea
MDEISIEDFIKIDLRVAEIKNAENVEEADKLLKIILDLGDLGERTVFAGIKKYYDPEKLIGLKIICVANLKPRKMRFGVSEGMILAASNDEEGVFILHPDQGAKPGMRVS

SEQ ID NO: 158770 - protein, 113 aa, Unknown
  Bacterial polypetide isolated from the Sargasso Sea
MSNEENIINFDEFIKVDLRVAKIIEAKDVEEADKLLEIRVDIGSEERTIFAGIKGYYDPSELVGKMIVVVANLKPRKMRFGVSEGMLLASGDDDSGVFLISPDDGAEPGQRVS

SEQ ID NO: 158771 - protein, 113 aa, Unknown
  Bacterial polypetide isolated from the Sargasso Sea
MSNEENIINFDEFIKVDLRVAKIIEAKDVEEADKLLEIRVDIGSEERTIFAGIKGYYDPSELVGKMIVVVANLKPRKMRFGVSEGMLLASGDDDSGVFLISPDDGAKPGQRVS

SEQ ID NO: 158772 - protein, 112 aa, Unknown
  Bacterial polypetide isolated from the Sargasso Sea
MKYTITTPLYYVNDKPHLGSSYTTIACDAIARFERLNGNTVLFLTGVDEHGQKIERTAESKNLEPQLHCDEITEKYKYLWDKLNITYDRFVRTTSIEHTSLVHQFYSKSFEI

SEQ ID NO: 158773 - protein, 144 aa, Unknown
  Bacterial polypetide isolated from the Sargasso Sea
EIGKGRLIKEGKKVAIINFGARLNECLIARESLLKKGVNITLVDARFAKPLDENLIWQIATDHEVVITIEEGSIGGFGSHVGQFLNEKNLLDNNLKFRSMFLPDRFIDHDKPEIMYKNAGLDSFNIESRILDTLNSKVVIKKSN

SEQ ID NO: 158774 - protein, 522 aa, Unknown
  Bacterial polypetide isolated from the Sargasso Sea
MKSNNNIYNQTNSWPFFEAKRVLKRISKSKQNKELVTFQTGYGPSGLPHIGTFGEVVRTNMVRTAFSFLNETPTRLICFSDDLDGLRKIPTNVPTPEKLEEDLDLPLTKVRDPFGKFNSFGDHNNAKLKEFLDKYNFNYNFESATKNYKDGIFDDALIKILENYDKIMEVILPSLREERKKTYSPFLPISPITGKVLQVAIEEINKTKGTITYTEQSGEKIELSVKSGNVKLQWKPDWAMRWFALDVDYEMFGKDLIPSAELAAKICRIIGGSPPELLNYELFLDEHGQKISKSKGNGLSIEDWLRYADQDSLSFFMFQKPKTAKRLYFDVIPKMVDDYHQHLNKFIDQKEEEKINNPVWHIHTGNPPISNMIINFSMLLNLVSASGSEDEKTLWTFIKRYKPNIVASEHPDLGSAVKYAINYYQDFVKPNKKFRNATIIEKDALIDLYHRLENLKSDCEIEEIQTLLFSIGKDHKFDNLRDWFSAFYEIILGAKSGPKLGGFISIYGIEETRTLICKRLSL

SEQ ID NO: 158775 - protein, 68 aa, Unknown
  Bacterial polypetide isolated from the Sargasso Sea
ERTVFAGIKSAYDPESLNGRHVVLVANLEPRKMKFGVSEGMVLASSNDEGSIYLISPDEGAKPGQLVK

SEQ ID NO: 158776 - protein, 99 aa, Unknown
  Bacterial polypetide isolated from the Sargasso Sea
VELRVAKIVKAEGIEEADKLIKLHLDVGDLGERTVFAGIKSAYDPENLNGRHVVLVANLEPRKMKFGVSEGMVLASSNDEGSIYLISPDEGAKPGQLVK

SEQ ID NO: 158777 - protein, 55 aa, Unknown
  Bacterial polypetide isolated from the Sargasso Sea
MSNNAEKRDILVTSALPYATAPLHLGHILEHTQTDKWVRYQRLIENNCTYVWLTT

SEQ ID NO: 158778 - protein, 188 aa, Unknown
  Bacterial polypetide isolated from the Sargasso Sea
SKLSTGVDDIDLNLEDLKQKVNADLVNKLVNIASRSANFLNKYFNNELSKEIDNVELVEYFIKSSEEISKHYENLELNKAMKEIMALADKANQYVDKMEPWVLIKDERNLELVHRICSTALNLFRILIIMIEPVTPNLSKKSLNFLNEELSWDSIKSPLLNHKINSFETLLIRIEDNQINQLMELKNV

SEQ ID NO: 158779 - protein, 110 aa, Unknown
  Bacterial polypetide isolated from the Sargasso Sea
MSEITIEDFIKLDLRIAKIKKAESVEGADKLLKLELDLGALGSKTVFAGMKQAYDPDNLVNKLVVCVNNLKHRKMRFGTSEGMILAAGDDELGIFIISPDEGAKPGMQVR

SEQ ID NO: 158780 - protein, 113 aa, Unknown
  Bacterial polypetide isolated from the Sargasso Sea
MSDEENIINFDEFINVDLRVARIVDAKDVEEADKLLEIRVDIGSEQRTIFAGIKGYYDPSELIGKLIVVVANLKPRKMRFGVSEGMLLASGDDDSGVFLISPDEGAKPGQRVS

SEQ ID NO: 158781 - protein, 64 aa, Unknown
  Bacterial polypetide isolated from the Sargasso Sea
IQGFNVYFLTGTDEHGQKIQRAAEEKKMDPLLFCNEISKTFRDLSGTLNLSNNDFIRTTGEKTF

SEQ ID NO: 158782 - protein, 88 aa, Unknown
  Bacterial polypetide isolated from the Sargasso Sea
MDNSKKTKRKILVTQALPYANAPLHLGHILEAVQTDIWTRFQNFNGNECLFFCADDTHGTPVMLKANEMGIKPEELISDVYKDHKSSY

SEQ ID NO: 158783 - protein, 275 aa, Unknown
  Bacterial polypetide isolated from the Sargasso Sea
YLLCHGVSYLNDKENELKEYWKNVVHIVGKDILRHHAVYWPAFLLAADLDLPKKIFAHGWWTNEGNKISKSLGNVIDPIEIINNYGLDQFRYFLLREVPFGNDGDFSKNALINRINSDLVNDLGNLCQRSLTMIEKKLNSIIPQVNNTNEAGGKLFKMYDETVERSLTLVENYKLHDYIKLVWLYINEVNKFFNDSKPWELSDSDPKLFADILGLTSDNIKKIAFLINPIMPDTSLKIFNMLDIKLENINFEMEKSISISGNRLNQVKHLFSRIQ

SEQ ID NO: 158784 - protein, 67 aa, Unknown
  Bacterial polypetide isolated from the Sargasso Sea
TRNVFAGIKSSYTPSDLDNRLVILVYNLAPRKMKFGISEGMVLASSNDDGIYLISPDEGAKPGMKVK

SEQ ID NO: 158785 - protein, 272 aa, Unknown
  Bacterial polypetide isolated from the Sargasso Sea
LERLEQCGWPASVHVIGKDILRFHAVFWPAMLMSAGLPLPKSVFGHGFLTREGLKMGKSLGNVLDPEHLLECCGSDAVRWYLLRDIQFGDDGDFQQQRFVDVVNNDLANTIGNLLNRTSSMARKWFADAVPPHTDAVGPHHPLAATANTAVTTVVTSMPSLGFKPAAEAVLQLAIAANGHLNDTAPWSRMKQPGLESEVGDDLYAVLEATRIVGLLLNPLLPDLSNRILEQLGTSINPDGWTEQLSWGGLVSGASLPKPSPVMQRLELEESL

SEQ ID NO: 158786 - protein, 56 aa, Unknown
  Bacterial polypetide isolated from the Sargasso Sea
MTQAKRHTITAALPYANGPLHLGHLAGVYISSDIYARFLRSNGKDVAFICASDEHG

SEQ ID NO: 158787 - protein, 114 aa, Unknown
  Bacterial polypetide isolated from the Sargasso Sea
MDNPKKNKRKILVTQALPYANAPLHLGHILEAVQTDIWTRFQNINNNECYFFCADDTHGTPVMLKANELGITPEELIKDVYKDHKSTYELYDIKFANFHSTHSDENKKFSELIY

SEQ ID NO: 158788 - protein, 266 aa, Unknown
  Bacterial polypetide isolated from the Sargasso Sea
MPSKSKKHLVTAALPYANGPLHIGHLAGAYLPADIYVRYLKSKGEEVVFVCGSDEHGAAITLRAKKEGKSPSEIVNQYHELNDKAFKTLGIDFDIFHRTSDPLHHQTAKDFFLTLEQKGVFTKETSEQFYDESYGQFLADRYITGQCPKCDYENAYGDQCENCGSALSPNELIHPKSTLSGEPPILKTTTHWYLPMQDHESWLKEWIEKGTLEGQFHHRPSEWRNQVIGQCKSWLDAGLKPRAMTRDLDWGVKVPLKDAKGKVLYV

SEQ ID NO: 158789 - protein, 37 aa, Unknown
  Bacterial polypetide isolated from the Sargasso Sea
MKKSKETFTITAALPYANGPIHIGHLAGVYIPAARHI

SEQ ID NO: 158790 - protein, 304 aa, Unknown
  Bacterial polypetide isolated from the Sargasso Sea
LGSPVRFVTGLDEHGQKVQQGAEAEGIDPIQRCDRVAEEFESMLRLLDISNDDYIRTTQERHKKVVAHLLRELHDRGEIYQAEYQGYYSTRAEQFLQEKDKVDGEWPEIFGEVTRITERNYFFRLSNYQDWLVSHLEENPGFIEPAHRQKQVLEFLKEPLNDLCISRPKDRLNWGIPLPFDPDYVTYVWFDALVNYVSAAGFGDPGFEQLWPADLHVIGKDILAPPHAVYWPIMLKASNLPLPAKILAHGWWTSSGAKMSKSTGETVDPLSLAERYGSDPFRYFVMREMTVGNDAEFSLERLSR

SEQ ID NO: 158791 - protein, 219 aa, Unknown
  Bacterial polypetide isolated from the Sargasso Sea
MDKNFYITTPIYYPSAKPHMGHAYSSIIADFFARFKKIDGFNINFLTGTDEHGLKIQRAAEKQGIDTLEFCNQISQTFKDLSKILNLTNTDFIRTTEDRHKISVQNLWKELEKNEDIYLSKYSGWYSVSDEAFYTEEEIEEIDGKKKAISSKSTVEWVDEESYFFRLSKWEKPLLDHYDKNPDFILPESRKNEVIRFVKSGLKDLSVSRKSFSWGIKVP

SEQ ID NO: 158792 - protein, 186 aa, Unknown
  Bacterial polypetide isolated from the Sargasso Sea
MSKNFYITTPIYYPSAKPHMGHAYSSIIADFFSRFKKIDGYNVYFLTGTDEHGLKIQRSAEHQKKDPKSFCDEISKTFEDLTKTLNLSNTDFIRTTENRHKVSVQNLWNILEKNNQIYLSKYSGWYSVSDEAFYNIDEVEEKDGSKIAKISGSVVEWVEEESYFFKLSEWEKPLLEFYEKNKNFIL

SEQ ID NO: 158793 - protein, 222 aa, Unknown
  Bacterial polypetide isolated from the Sargasso Sea
MDKNFFITTPIYYPSAKPHMGHAYSSIVSDVIARFKRLDEYNVEFLTGTDEHGLKIQRAAEEKGIEPKKFCDEISKTFRNLSNTLNLSNTDFIRTTEDRHIKSVQNLWKILEKKDQIYLSKYSGWYSVSDEAFYNNDEIKEENGKNFSIISGSKVEWVEEESYFFKLSKWENQLLKFYEDNPKFILPESRRNEVLNFVKSGLKDLSVSRKSFSWGIKVPVTK

SEQ ID NO: 158794 - protein, 260 aa, Unknown
  Bacterial polypetide isolated from the Sargasso Sea
KFWPANIHIIGKDILRFHAVYWPAFLLAAKLPLPQKIFGHGWILSDDKKMSKSVGNILDPIEIVNNYGTDQLRYYLVKEVSLGNDGSISMNNLKNCINNDLANNYGNLCQRVFSFIKKNCSNKIPKAKKLEKVDNLLLSKLKDNLPNLVELMNNQNLNEYIKTVVSYSFDANKYFNDSEPWSVKKKDIDKMETILFTTCTQIKNISILLNPIIPKATEKVLETMNIEKKDILINQINVLDCFDHNKELKKLDILFNKIEK

SEQ ID NO: 158795 - protein, 277 aa, Unknown
  Bacterial polypetide isolated from the Sargasso Sea
DALINYITAPGYLNDKNLFKKFWPADIHLIGKDILTTHAVYWPTMLMSAGIKLPKMIFAHGWWLMDKEKMSKSSGNVINPMDLIDDYGVDPVRYYLMREMVLGQDANFTVKSFINRYNSDLANDLGNLLSRISTLIKKNYNGQIPEGYSPGNKEKEIRDKSIELVKNFDKNMSSLSINDAIEETLQFVRSINRYFEHKAPWKLVKEDLESAGAVLYTGAEALRICAILLSPIMPKRMKLLRSILNAESSDRTWGNLESGKLMGEHKPLFPRINPENI

SEQ ID NO: 158796 - protein, 295 aa, Unknown
  Bacterial polypetide isolated from the Sargasso Sea
GHTFYVWFDALLGYITALLDSDDEPDLQKAISRGWPASLHVIGKDILRFHAVYWPAMCLSAGIDPPQAVFGHGFLTREGQKMGKSLGNTIDPSRLLEYCGADAIRWYLLRDIQFGEDGDIKQQRLLDLVNNDLANTIGNLVNRTVAMSRKWFDGVPELSSTPDDQHPLALAAAAAIRQAPTYYKELAFHLAAQDALQLATDANGYLSEKAPWSAIKDPNNRDAVAADLYAVLETARLVGVLLAPLLPDLSERLLKQLDQPPLDWRRDGQWGQLNPGASLPEPVPLLQRLELEEPI

SEQ ID NO: 158797 - protein, 252 aa, Unknown
  Bacterial polypetide isolated from the Sargasso Sea
YWPAMLLAAGEPLPAQVFAHGWLLVGGEKMSKSKLTGIAPEDIIGHFGSDAFRYYFMRAISFGQDGSFSWEDMSARYTSELANGLGNLASRSTAMVGKYRDGALPEPGPLTAAEDAVVERLASATTSADAAMDELDFSTAIAEIRGVVELVNQYVTEVEPWVLAKDDANTQRLDTVLYTMCEVLRAVAVLYNAVMPKAMASLWSQLGAGEALGALAAQRTADAGRWGQLPPGSTVTKGDALFPRLPDEPTES

SEQ ID NO: 158798 - protein, 272 aa, Unknown
  Bacterial polypetide isolated from the Sargasso Sea
NYPNINDNLYKNFWPASIHLIGKDILRFHAIYWPAFLLAAEIPLPKRVYGHGWILSGEEKMSKSKGNILDPLEIIDRYGLDSLRYYLIKEVSFGNDGNISKDKLENCINSDLANNYGNLCQRVISFCEKNCNLVIPSQIKFNKEDLDLLDYFKDNYLNLDDYIENQDLNSYMNFIVDRLFATNKYFNDQEPWKKKSDILRLNTIVYVALESIRKISIMLYPVIPSSSLKVLNMFHIDEKDISFSSIKNHDSLKSSDKINKIDILFKKIEKDD

SEQ ID NO: 158799 - protein, 298 aa, Unknown
  Bacterial polypetide isolated from the Sargasso Sea
YLRYYFSSRLTNKIEDIDLNFDDFITRVNSDLVGKIINIGSRCAKFINKDFDNKLSSEVGNEELIKSILSRKEDIIQNYETRNYAANMRIISSLSDEVNKYLDDEKPWIKIKDDSTKSHVQTICSDGINGFKLIIGYLKPVLPEIAKKVENLLNCDLITWSNVDNQLKNHKINAFEPLITRINKESIEKMKEENNKETVVAEDTDKITIDDFVKVDLRVAKVINARELEDSRKLLELEVDLGDETRTIFAGIKKSYSPDELIGKQVVVIANLKPRKMKFGTSNGMVLATQHDGDVIII

SEQ ID NO: 158800 - protein, 205 aa, Unknown
  Bacterial polypetide isolated from the Sargasso Sea
MENIYITTPIYYVNDKPHVGHAYTSVACDALARFYRLKGYEVFFLTGTDEHGLKIQQAAEQKEVTTQTFVDDMSTNFQNLTQILNLTNDDFIRTSSDRHIAGVRKFWEKLSTNNQIYLDKYSGWYSVRDEAFYNEDEIKDGKAPSGSPVEWVEESSYFFKLSEWEGPLLKFYSDNPDFVQPKSRFNEVISFVKQGLKDLSISRTS

SEQ ID NO: 158801 - protein, 266 aa, Unknown
  Bacterial polypetide isolated from the Sargasso Sea
LKIQRTASDKGIEPKSHCDEISEIFNINWKNWDISFDKFIRTSSEKHEFVVNEFYERVKASDDIYMGVQKGWYCVGCEEFKDNPENSSTYQCPIHQKNLEWKNEENLFFRLSKYQKEIEKIINEPSFIEPIERKNEILNFVSRGLKDFSISRTNVSWGIPVPGYDNHTFYVWFDALLGYVSAISSDAKDNSLEKSINGGWPADVHLIGKDILRFHAVYWPAMLISAHMKIPKKVFGHGFLTREGQKMGKSLGNVLDPDLLLSKYGN

SEQ ID NO: 158802 - protein, 293 aa, Unknown
  Bacterial polypetide isolated from the Sargasso Sea
DEFEDFIRDWITKEHKDDWKPNVLGQVKSWLDNGLKPRAVTRDLDWGIPIKIDGEEGKVLYVWFEAPIGYISATKEWAEKNNKNWNKYWKDKDTKLVHFIGKDNIVFHCIIFPIILRMTGDHILPFNVPANEFLNLEGNKISTSRNWAVWLHEYLKDFPDMQDVLRYVLTVNAPETKDNDFTWKEFQMRNNSELVAIYGNFINRVLTLIIKYYNGILPNPESIDEENQKIINEAKTFPKLIGNFLDEFKFREAIKSLMNLARNGNKFLAESEPWKLQKSNPEKVKEILYVGYI

SEQ ID NO: 158803 - protein, 303 aa, Unknown
  Bacterial polypetide isolated from the Sargasso Sea
IWVRNLNLNSHQAYYFCASDTHGTPVMLKAKELSIKPEDLVNKMKIEHQKTFEDFNINLTNFHTTHSKESEELTLNIFNKLSKNKKIYTKDIIQLFDEKENIFLSDRFVKGTCPACGAADQYGDACEVCGKTYDALDLIDPVSTLSNTTPIQKKSSHYFFSLSEFKDFLKIRVSELSDQKPVIHKINEWLEDDLKDWDVSRDEPYFGFKIPGEESKFIYVWLDAPVGYFASIKNWCDQNNHKYEDFLDKDSKLVHFIGKDIMYFHLLFWPSTLHAAQVKQPDKVFVHGFMTIEGNKMSKSRGN

SEQ ID NO: 158804 - protein, 145 aa, Unknown
  Bacterial polypetide isolated from the Sargasso Sea
MSDKTFYITTPIYYPSGKPHMGHAYTGIISDVFARFKRLDDCRVLFLTGTDEHGLKMQREAKKKSKEVKLFCDELSSKFKNLTKILNLSNDDFIRTTEKRHFKAVEEIWKRLIDSKDIYLSKYKGWYSVSDEAYYDDDEIENKNN

SEQ ID NO: 158805 - protein, 187 aa, Unknown
  Bacterial polypetide isolated from the Sargasso Sea
MNKNFYITTPIYYPSGKPHMGHAYSSIIADIFARFKRIEGYNVLFLTGTDEHGQKIQKEAEKNNKDPKIFCDELSDKFRSLTKILNLTNDDFIRTSEKRHSKSVNELWKKLVKSGDIYLDKYSGWYSVSDEAFYDEDEIEVKEGKKISKSSGSLVEWVEEESYFFKLSSWTKKLLEHYKNNKEFILP

SEQ ID NO: 158806 - protein, 45 aa, Unknown
  Bacterial polypetide isolated from the Sargasso Sea
MRRIIVTSALPYANGSIHLGHLVEYLQTDIWVRSQKMAGNDCVYI

SEQ ID NO: 158807 - protein, 260 aa, Unknown
  Bacterial polypetide isolated from the Sargasso Sea
KQQDIAKLYENLDYSKAVRLIMASADLANKFINEKQPWVIAKDNPQSEELQAICSTGINAFRLLIIYIKPVLPALAVKAESFLKIDPLNWKDLNYILTNHKISKFNAMVQRIEPDKVNLMVDETKHGSESKPSVKEEAKEPEGTFEPEISVDDFFKIDLRIAKIISASEIEDADKLLKLQLDLGKDEKGNQIHRTVFSGIKSAYKPEEMIGMLTVVVANLRPRKMKFGISEGMILAAGPGGKDIWLIEPHSGASPGMRVT

SEQ ID NO: 158808 - protein, 183 aa, Unknown
  Bacterial polypetide isolated from the Sargasso Sea
MDKTYYITTPIYYPSAKPHMGHAYSSIVADFFARFKIIDNYQVHFLTGTDEHGLKIQRSAEKAGKEPLVFCDQISQTFRDLSDTLNLSNTDFIRTTEARHKKTVQHLWNELEKNDDIYLSNYSGWYSVSDEAFYNEDEIEELDGKKIAISSKSPVEWIEEESYFFRLSKWEKPLLDYYKSNPD

SEQ ID NO: 158809 - protein, 167 aa, Unknown
  Bacterial polypetide isolated from the Sargasso Sea
MSKNFYITTPIYYPSAKPHMGHAYSSIIADFFARIKKIQGYKVFFLTGTDEHGLKIQRAAEKNGMKPIDFCDKISVTFRKLSKILNLSNNDFIRTTEERHFRSVQKLWNILEKKNEIYLSKYSGWYSVSDEAFYSNEEVESIEGVKIAKSSNSPVEWVEEESYFFKL

SEQ ID NO: 158810 - protein, 258 aa, Unknown
  Bacterial polypetide isolated from the Sargasso Sea
EKNLFSLIKSEQFFDVNENQFLADRYISGTCPVCGFDEAYGDQCEKCGSTLSPEELINPKSTISNSSPILKETKHYYIKLDEFEEFIRNWITVENKDKWKTNVVGQVKSWLDSGLKPRAVTRDLDWGIPVKIDDEDGKVLYVWFEAPIGYISSTIEWANANDKDWQQYWKNPETNLIHFIGKDNIVFHCIIFPIMLRMFGDFILPKNVPANEFLNLEGNKISTSKNWAVWLHEYLIDFPNMQDVLRYVLTSTCPETKD

SEQ ID NO: 158811 - protein, 158 aa, Unknown
  Bacterial polypetide isolated from the Sargasso Sea
MLDIDDLKIENLENELVDTKIGDFQPILSRVKPLNIQDFYKKEEEMKEDNVIQIDDFMKVDLRVAQVEEASHVEGADKLLAIKLNLGELGTKNVFAGIKSAYEPSDLKGKLVVMVYNLAPRKMKFGLSEGMILAASDSEGGIFVLSPDSGAQPGQRIK

SEQ ID NO: 158812 - protein, 255 aa, Unknown
  Bacterial polypetide isolated from the Sargasso Sea
AYTTILADVLSRYQKQAGNKPFFLTGLDEHGQKVQDAAKDRGIETQNHCDEMSKRFISLWERLHISNDDFIRTTEIRHKNVVREILKTVFDAGDIYEDEYQGLYSVSEERFITEKEADTGQFRDIKTLKEKNYFFRMSKYQDRLINHIEANPSFIQPDHRKNEILGFLNQPLNDLCISRPKSRLNWGIELPFDSDYVTYVWFDALINYITAPGYLDDKSLFKKFWPADIHLIGKDILTTHAVYWPTMLMSAGIKL

SEQ ID NO: 158813 - protein, 110 aa, Unknown
  Bacterial polypetide isolated from the Sargasso Sea
MKKNNFYITTPIYYPSGSPHMGHAYSSILADIFARFNRLNGNKVHFLTGTDEHGLKIQKAANKNKLDPKTYCDKISKIFKDLTVKLNLSNDDFIRTTEKRHYDSVNDLGI

SEQ ID NO: 158814 - protein, 198 aa, Unknown
  Bacterial polypetide isolated from the Sargasso Sea
MNKNFYITTPIYYPSGKPHMGHAYSSIVADIFARFKRIEGFNVLFLTGTDEHGQKIQKEAEKNKKEPKLFCDEISETFRSLTKTLNLTNNDFIRTTEPRHFKSVNEIWKRLVNSGDIYLDKYSGWYSVSDEAYYDEDEIEEKDGIKTSKISGSSVEWVEEESYFFKLSAWQKKLLNYFEKNKEFILPPSRRNEVIRFV

SEQ ID NO: 158815 - protein, 280 aa, Unknown
  Bacterial polypetide isolated from the Sargasso Sea
VEEPSYFFNLSAWQDKLLAFYDENPHFVGPESRFNEVKSFVRSGLRDLSVSRASFKWGIPVPSDDNHVMYVWLDALTNYLTAAGWPEDGPAGDMEKYSRVWPADLHMVGKDILRFHAVYWPAFLMAADLPLPKRVYAHGWWTNDGQKISKSLGNTIDPNQLAATYGLDQTRYFLMREVPFGNDGDFSVQAITQRINGDLANDLGNLSQRVLSMVFKNCDGIMPARPEPLQLEDKELLERVDSLLIDVRRHIDNQAFHEALRIIWQVISQANRYVDAVAPW

SEQ ID NO: 158816 - protein, 242 aa, Unknown
  Bacterial polypetide isolated from the Sargasso Sea
MDKNYYITTPIYYPSAKPHMGHAYSSIIADFFARFKRIDGFNVYFLTGTDEHGLKIQRAAEKKGLQTLEFCNQISKTFKDLSLTLNLTNTDFIRTTEDRHKKSVQFIWSQLEKNNDIYLSKYSGWYSVSDEAFYNDDEVEKIDGKNFAISSKSSVEWVDEESYFFKLSKWEKPLLKFYKDNPDFIAPESRKNEVVSFVKSGLKDLSISRKSFTWGIKVPNNDNHVIYVWLDALTNYLSALNY

SEQ ID NO: 158817 - protein, 62 aa, Unknown
  Bacterial polypetide isolated from the Sargasso Sea
MRRIVVTSALPYANGSIHIGHLVEYIQTDIWARSQKMTGNECVYICADDSHGTPIMLKAKKL

SEQ ID NO: 158818 - protein, 195 aa, Unknown
  Bacterial polypetide isolated from the Sargasso Sea
MDKNYYITTPIYYPSARPHMGHAYSSIVADFFARFKRIEGYKVFFLTGTDEHGQKIQRAAEKIGKDPLIFCDEISKTFKDLSIKLNLSNNDFIRTTEKRHFDSVTELWNILEKKKEIYLSKYSGWYSVSDEAFYSEDEIETNNEKKISKISGSEVEWVEEESYFFKLSKWQEPLLKFYSENPKFILPESRKNEVI

SEQ ID NO: 158819 - protein, 294 aa, Unknown
  Bacterial polypetide isolated from the Sargasso Sea
FYFASKLNAKIDDIDLDLKDFVKKINSSLVGKLFNIASRLDGFLSKSSYQTSKNIDDAFLDECSYEYELIRKDLNNKDFSKAVSRILKVADDTNSYINNKTPWKLNDDDALEVATTGISIYKDLCILMMPIMPSLASKALAQLKIKNPSFDDLDNELTNEEINAYNPLLNRLEDKDLLTPSKEMKMTEIDNNEITIDDFAKIDLRVAEVIEANHIDGADKLIQLTLDVGELGQRNVFAGIKSMYSPEDLQGKFVALVANLKPRKMKFGTSEGMVLAASNDEGGIFIMSPASGAK

SEQ ID NO: 158820 - protein, 268 aa, Unknown
  Bacterial polypetide isolated from the Sargasso Sea
FDDFMTRVNSDLVGKIINIGSRCAKFINKDFNNQLSKDVGNKSLLDSMLSKKDEIISNYELRNFATNIRVITSLSDEVNKYLDEEKPWIKIKNQDTKESVQTICTDGINAFRIIITYLKPVLPEIASKVESMLITDSLSYQNISDMILDHKINTFEPLITRINRESIEKMKDENKQEDAVTEDTNKITIDDFIKVDLRVAKVTNVKEIEDSRKLLELELDLGDETRTVFAGIKKSYSPDELIGKSVVVIANLKPRKMKFGVSNGMVLA

SEQ ID NO: 158821 - protein, 167 aa, Unknown
  Bacterial polypetide isolated from the Sargasso Sea
ESILTNHAIGKFESLLHRIESDKVQTMIEETKKVFQSKEEVKGKTDKLKDTFEPEIMVDDFFKIDLRIARIISATQVEGADKLLKLTLELGQDEEGETIQRTVFSGIKSAYEPEKIIGMLTIVVANLRPRKMKFGLSEGMILAAGPGGKDIWLIEPHAGARPGMRVT

SEQ ID NO: 158822 - protein, 60 aa, Unknown
  Bacterial polypetide isolated from the Sargasso Sea
MEKYYITTPIYYVNDKPHIGHAYTTILADTISRFRALIGEKPTFLTGLDEHGLKVQQAAK

SEQ ID NO: 158823 - protein, 270 aa, Unknown
  Bacterial polypetide isolated from the Sargasso Sea
FIKPKSRYNEVIKFVEAGLQDLSISRTSFSWGINVPRSSDHIIYVWLDALFNYISVLRTEKDNFKKYWPADAHIVGKDILKFHAIFWPAFLLSANLKLPKKIFAHGWWTINGEKMSKSLGNVIDPIYLAKKYGIDQIRYFLLREIPFGEDGNFSELSLIKRLNSDLTNDLGNLVQRVLSMIIKYNDGVILKRNSMDKDDNKLLNLPEEIFLKYCKLMDNFEFSNALIMIWDIIRKANSYVDHKAPWKLFKEDKDQLSTTLNVLINSIYKI

SEQ ID NO: 158824 - protein, 271 aa, Unknown
  Bacterial polypetide isolated from the Sargasso Sea
NTKALLDLGCSWEPNIDPRGVEYGGSLFNRTSDPEHHEFVKQNFLSLLNAGLFEKKTMQQYYELRADGGRFLPDRYVEGECPNCGEDGARGDQCDQCGVTYESHELKNPRSKMNPDSEIEIRDTEHLFYRLDLFQSVLEEHASQRQGVWKSNVRAMTKQWLDMGLRPRAVTRDLQWGIPLPLDGKEWEGKCIYVWFEAVQGYYSCARLWAQRHGGAESDWEKWWKISADGTKPRHLYFLGKDNIPFHTVIWPALIMGLNHASKGLNADDIT

SEQ ID NO: 158825 - protein, 108 aa, Unknown
  Bacterial polypetide isolated from the Sargasso Sea
MSKKNFYITTPIYYPSGKPHMGHAYSSIVADIFARFKRIDDYNVMFLTGTDEHGLKMQREAKKKSKDTKLFCDELSSKFRDLTKILNLSNDDFIRTTEKRHYTSVIDI

SEQ ID NO: 158826 - protein, 102 aa, Unknown
  Bacterial polypetide isolated from the Sargasso Sea
MDKNFYITTPIYYPSAKPHMGHAYSSIAADFFARFKRLQGFNVFFLTGTDEHGQKIQRAAKENNKEPQVFCDEISKTFFNLSKTLNLSNDDFIRTTEKRHKS

SEQ ID NO: 158827 - protein, 219 aa, Unknown
  Bacterial polypetide isolated from the Sargasso Sea
MDNSKKTKRKILVTQALPYANAPLHLGHILEAVQTDIWARFHNLNNNECLFFCADDTHGTPVMLKANEMGVKPEELIANVYKDHKSTYKLYDINFANFYSTHSDENKKFSEYIYECAKNNNLISKLSIEQYYDEKEKIFLSDRYIKGTCPKCGAEDQHGDNCGVCGASYDVLDVKNPVSILSNSTSIKKKSDHIFFDLPQKNKMLKDFLNKVDLQESIK

SEQ ID NO: 158828 - protein, 195 aa, Unknown
  Bacterial polypetide isolated from the Sargasso Sea
MNKKAIITSALPYSNGEIHLGHVASTYLPADVTTRFLKQNGVEAYYVCASDDYGTPILIQSEKLKQTPQEYVAHWNKRDFEDFTAFDIGFDFFYKTSSEENISFVQDVFKKIEKNGHIYEKEIIQAFCTSCDKFLPDRFVKGTCPFCDAEDQYSDLCEKCGRIPEEIENPHCSICGETPVQKSTNHYFFKLKNFS

SEQ ID NO: 158829 - protein, 299 aa, Unknown
  Bacterial polypetide isolated from the Sargasso Sea
GIKVPEDNNHVIYVWLDALTNYISALNYPNKKEKLFKQFWPASLHLIGKDILRFHAIYWPAFLLAAKIELPKKVYGHGWILSDDEKMSKSKGNILDPLEIIDQYGLDPLRYYLIKEVSFGNDGNISQDRLENCINSDLANNFGNLCQRVTAFTIKNCDSKIPTEIEFRKDDLNILDKYKNSIDEIRNKIDKQDLNYYIEYIVNSLFEANKYFNDQEPWKKKNDKKRLNTIVFTTLEIVRKISFMLYPVIPETSLKALAIFNIKEDQIEFSSIADNNFLKKGNSIKSIGLLFKKIEKKND

SEQ ID NO: 158830 - protein, 319 aa, Unknown
  Bacterial polypetide isolated from the Sargasso Sea
YYVCASDDFETPILIQSEKLDQTPEEYVAHWNKRDYEDFSAFDIGFDYFYKTSSSENISFVQQVFEKLQKNGHIYEKEIIQFFCENDQKFLPDRFVKGTCPYCDAEDQYSDLCEKCGRVPEEISNPHCSICGQSPVKKSTNHYFFKLKNFSEPLLDYLTNAPHLQKDVKKYVENWIKEGLVDWDITRDISWGVPIPIEGLKDKVFYGWFDNHLAYISSTLKFLEDKNIDGKNFWNDADIYHFIGKDIVYHHYLFLPAMRLGIDKEFKLPDYIPTRGHLTLEGKKISKSRNWYIGLKDFLETFPADYLRFYLISINPYSQ

SEQ ID NO: 158831 - protein, 262 aa, Unknown
  Bacterial polypetide isolated from the Sargasso Sea
MRQNQSLEKSINGGWPADVHLIGKDILRFHAVYWPAMLISAKMKVPKKVFGHGFLTREGQKMGKSLGNVLDPDLLLTKYGNDPVRWYLIKDISLGNDGDFQDKRFVDIINNDLANTIGNLLNRTSSMSRKWFDNKVPNNEKILSENKLENFAKIAVNKYIYNFDNYKLDLAANEVLSLAINTNLYLNDNQPWVLIKEKDNLPLVKEIIYNVLESTRIIGLLLLPLLPELSTKIMKHLALYTEKKFLGKNINLGDYSLALKSS

SEQ ID NO: 158832 - protein, 262 aa, Unknown
  Bacterial polypetide isolated from the Sargasso Sea
HGQKVQEAAEQKDIDAQKHCDEMAPRFVKLWEKLYISNDDFIRTTEERHKRIVQYILQRVMDNGDIYEAEYEGLYSVSEERFITEKEAESGEFRDIKQLKEKNYFFKMSKYQDQLIDHIQSNPKFIQPEHRKNEILGFLRKPLNDLCISRPKSRLAWGIELPFDKDYVTYVWFDALINYLTAAGFNQSSENFKKRWPASCHLIGKDILTTHAVYWPTMLFSAGVSLPLSIFAHGWWLTGESKMSKSLGNVINPMDLIKDYGV

SEQ ID NO: 158833 - protein, 188 aa, Unknown
  Bacterial polypetide isolated from the Sargasso Sea
MDKTFYITTPIYYPSAKPHMGHAYSSIIADFFARFKLIDDYDVYFLTGTDEHGLKIQRSAENVGKEPKIFCDQISQTFRDLTDTLNLSNTDFIRTTEDRHKKTVQHLWKELEKNDDIYLSNYSGWYSVSDEAFYNEDEIEEVDGKKIAISSKSSVEWIEEESYFFRLSKWQKPLLEYYKANPNFSLQT

SEQ ID NO: 158834 - protein, 198 aa, Unknown
  Bacterial polypetide isolated from the Sargasso Sea
MKKSKETFTITAALPYANGPIHIGHLAGVYIPADIYARYKRLTKNDVAFICGSDEHGVAISLASKKASISPKELIDKYDKIIKSSFQKFGISFDNYSRTSKKVHHETSIDLFNLLKEKDLFSLIESEQFFDINENQFLADRYIIGDCPVCKSEGAYGDQCEKCGSALSPEELKNPKSTISDSTPILKKTKHYYIKLNE

SEQ ID NO: 158835 - protein, 246 aa, Unknown
  Bacterial polypetide isolated from the Sargasso Sea
LSALNYPDQNNEFYKKFWPADVHIIGKDILRFHAIYWPAFLLAAGISPPKKVYGHGWILSGDQKMSKSKGNILDPLEMIQKYGLDPLRYYLLKEVSFGNDGNISNEKLESCINSDLANNYGNLCQRVISFCEKNIGLKIPDCHEFSEEDLAILDIYKNSIEDLKKNIDNQNINFYLNFIVDQLFKANKYFNDQEPWKKKEDKSRLNTIVYVSLEIIRKISILLYPIIPDTSLKALNIFSIKENEIN

SEQ ID NO: 158836 - protein, 32 aa, Unknown
  Bacterial polypetide isolated from the Sargasso Sea
MNRTFYVTTPIYYVNAHPHIGHAYTTVMETSK

SEQ ID NO: 158837 - protein, 234 aa, Unknown
  Bacterial polypetide isolated from the Sargasso Sea
MVAIVESKKRYTITSALPYTNGRLHIGHLAGAYIPADIYARFKRITDNDVAYICGSDEHGVAISIRAKKENKTPKEIIDKYHALIKKSFDDFGISFDNYSRTSSKIHHETASEFFKFLNKKNCFEIKKSKQLYDPVENQFLADRFVEGECPHCGFEHAYGDQCENCGSSLSPEQLINPISKISGAKPEEKETTHWYLPLGEYENFIKNWFLKDKKDSAKSNVYGQVKSWIDQGL

SEQ ID NO: 158838 - protein, 54 aa, Unknown
  Bacterial polypetide isolated from the Sargasso Sea
MNNFYITTPIYYVNDRPHIGHAYTSIACDILARYYKLKNFNVYFLSGTDEHVKK

SEQ ID NO: 158839 - protein, 81 aa, Unknown
  Bacterial polypetide isolated from the Sargasso Sea
MRRIIVTSALPYANGSIHLGHLVEYLQTDIWVRSQKMAGNDCVYICADDSHGTPIMLKAKELGVTPEELIKNTYNEHVKDF

SEQ ID NO: 158840 - protein, 303 aa, Unknown
  Bacterial polypetide isolated from the Sargasso Sea
NNLPADIFARYHRMVGNNVLMVSGSDQHGTPVTIRAREENTTPKEISEKYHNIWSETFKDLDFSFDLYTKTGTENHKEVVQKLFNLLNEKGYLQEKVSKQPYSEESEMFLSDRYIEGDCPHCPSRTKGDQCDDCSKDFEPIDLKNLISTIDNSKVTFKETNHIYLKLPEFQEDLNKWIKSKSYWKPSVKNQSLGFLSNGLIDRAITRDIDWGVKVPLKNYEKKRIYVWFEAVIGYLSASIEWAKSDKNISNNKDIWKEWWQNPDSKHFYFQGKDNIPFHTIILPAILMGSGEYNLPYDVVANE

SEQ ID NO: 158841 - protein, 145 aa, Unknown
  Bacterial polypetide isolated from the Sargasso Sea
MKNKFYITTPIYYPSAKPHMGHAYSSIVADFFARFKRIDNYDVFFLTGTDEHGQKIERASKDNNKDTLKFCDEISSIFKDLTFKLNLSNNDFIRTTEKRHFDAVEHLWNILEKKNYIYLSKYSGWYSVSDEAFYSEDEIEEIDNI

SEQ ID NO: 158842 - protein, 291 aa, Unknown
  Bacterial polypetide isolated from the Sargasso Sea
ARFMRLNDYDVRFQTGTDEHGLKIQKAAESKGKEPLELCDENSRIFRDLTTTLDLSNDDFIRTTEQRHIDGASFLWNRLYERNQIYLGEYTGWYSINDETFYNEKDLVKQSDGSFKTVTGGPVEWITEKSYFFKLSEWSDKLLDLYKKYPDFISPKSKRNEVIKFVESGLNDLSVSRTSFNWGIKTPTDNDHIMYVWLDALTCYANGVKYLTDSKNDLSVYWNNVVHIVGKDILRHHAVYWPAFLLAADLKLPNKVFAHGWWTNEGKKISKSIGNVIDPIEIINNYGLDQF

SEQ ID NO: 158843 - protein, 265 aa, Unknown
  Bacterial polypetide isolated from the Sargasso Sea
NKDSPSEVFHFIGKDIMYFHTLFFPAMLSNADLKTPNGVFVHGFLTLNGEKMSKSRGNFISAENYIDTLDSDYLRYFFASKLSTGVDDIDLNLEEFKQKCNSDLVNKYANIASRSARFINKNFNNILSEELDSPELIEEFKNTSQKIADHYEKLEFSKAQKEIMLLADKANQYVDSKQPWVLIKEKGNEKLVHSICTTSINLFRILTIMLQPVIPSFVDKSLRFLKEDKIEWNSINKTLLNCKIGNFEAIVTRIDDNHLDKLIGS

SEQ ID NO: 158844 - protein, 93 aa, Unknown
  Bacterial polypetide isolated from the Sargasso Sea
MTKNFYITTPIYYPSGKPHMGHAYSSIVADIFARFKRLEGYKVLFLTGTDEHGQKIQKEAKKNNKDPKIFCDELSETFRSLTKTLNLSNDGFY

SEQ ID NO: 158845 - protein, 258 aa, Unknown
  Bacterial polypetide isolated from the Sargasso Sea
IELPFDKNFVTYVWFDALLNYASALGWPDGEKYKKFWPHVHHTIGKDILKTHGIYWPCMLKAAGIPIFKKLVVHGHWVVGGSKMSKSLGNVVDPLAVKDKLGVDALRYFLLRDMSFGEDSNFTEELAITRYNSDLANNFGNLMNRSISMSRKNFQGCVPPLGKAGKQEKELHESFAKGVQKCREYIIKFQPHRALEHVAFLSSKVNKYIDTCKPWTLTKEEKNSERLGTVLYTALDMSRIIKGLLDPVMPKKMCEARK

SEQ ID NO: 158846 - protein, 160 aa, Unknown
  Bacterial polypetide isolated from the Sargasso Sea
MPDKNFYITTPIYYPSGKPHMGHAYSGIVSDVFARFKRLDGFNVMFLTGTDEHGLKMQREAEKKTKDVKIFCDELSEKFKELSQTLNLSNDDFIRTTEQRHFKAVEDIWMRLIKSKDIYLSKYKGWYSVSDEAYYDDDEIETKDNIKYSKSSGSKVEWVE

SEQ ID NO: 158847 - protein, 194 aa, Unknown
  Bacterial polypetide isolated from the Sargasso Sea
MKKILITSALPYINGIKHLGNLIGSQLPADVYARYMRATGHRVLYICATDEHGTPAELAAIEDNLTVEKFCEKMWHIQKKIADEFHISFDYFGRSSSKHNHELTQYFATKLWENNFLEEVNEKQFFSLKDNRYLPDRYITGTCPSCGYEKARGDQCENCTKQLDPTDLIDPVSTISGSKDLEIRETKHLYLRQK

SEQ ID NO: 158848 - protein, 263 aa, Unknown
  Bacterial polypetide isolated from the Sargasso Sea
ELGIDPKEYVDEISKEFIQLSISLNCSNDDFIRTTDERHVKNVQSIWKILFDKGDIYLDQYSGWYSITDEAFYNEEELMKTESNSFLSPNGNPVEWVDEESYFFKLSKYQNDLLELYEKNEKFILPSSRMNEIKNFVKSGLKDISISRKNISWGIPVKGNKDHSIYVWLDALTNYISALDWCDSNESFKRFWPADIHLIGKDITRFHAVYWPAFLFSAGIEIPKMIFSHGFLLNKGEKISKSLGNTVDPFKLINFFGVDQLRF

SEQ ID NO: 158849 - protein, 146 aa, Unknown
  Bacterial polypetide isolated from the Sargasso Sea
MSQKPAYYITTAISYVNGLPHLGHAYEAISADAMARFKRLDGYHVFFLTGTDEHGQKVEKSAIEAGEEPLRFCDENADAFRQMTHLLNISNDDFIRTTEQRHIRASQSIWKNLLDAGDIYLGKYAGWYSVKDEAYFEEAELAMTQV

SEQ ID NO: 158850 - protein, 213 aa, Unknown
  Bacterial polypetide isolated from the Sargasso Sea
MTLENKKIFVTNALPYANGPIHIGHMVGYIQADIWSRFQRMQGHDVVFICASDAHGTPIMLSAEDLGVEPVELAAEYTRQHENDFNDFHVSFDNYHTTHSEENEELVGEIYQRLKENDCIRTEVIEQAYDDQENMFLPDRYVRGTCPKCNTPDQYGDNCEKCGATYKPTDLIDPISAISGKAPSLKESEHYFMKLTKFENMLEDWIETIDIHS

SEQ ID NO: 158851 - protein, 213 aa, Unknown
  Bacterial polypetide isolated from the Sargasso Sea
MKRHLITSAIPYINGVKHLGNLVGSQLPADLFARYQRAKGNEVLFLCATDEHGTPAELAAEKAGKPIAEYCDEMHTIQSKLAKGFRLSFDHFGRSSSQQNHKLTQHFAAKLSERGLVKEITEKQVFSNQDQRFLPDRYIEGTCPNCGFEEARGDQCDNCTKQLQPNELINPRSTISGSTDLEERETKHLHLRQSLMKEELESWIDSKSDWPIL

SEQ ID NO: 158852 - protein, 219 aa, Unknown
  Bacterial polypetide isolated from the Sargasso Sea
MDNSKKIKRKILVTQALPYANAPLHLGHILESVQTDIWTRFQNLNGNECLFFCADDTHGTPVMLKANEMGIRPEKLIEDIYKDHKSTYELYDINFTNFYSTHSDENRKYSEYIYECAKKNNLISKSNVEQYYDKEEKMFLSDRLIKGTCPKCGAEDQHGDNCSVCGASYNVLEIKNPISILSNTRPIKKKSEHIFFDLPKKIEMLKDFIKKVDLQESIK

SEQ ID NO: 158853 - protein, 313 aa, Unknown
  Bacterial polypetide isolated from the Sargasso Sea
GKTFLLDYYKKNPDFICPSSRKNEVISFVKSGLKDLSVSRKSFSWGIQVPDNKDHIIYVWLDALTNYISALNYPNTDDPLFKKFWPASIHLIGKDILRFHAIYWPAFLLAAKIPLPKKIYGHGWILLGEQKMSKSKGNILDPIEIINEYGLDPLRYYLIKEVSFGNDGNISKDKLEDCINSDLANNFGNLCQRVTAFAVKNCNSKIPVEIDFQKDDLEILDKFKSNLDKIRIKIDNQDINFYTDFIINRLFETNKYFNDQEPWKKKDNLIRLNTIVYTTLEIVRKISYMLYPIIPQSSLKALKIFDIKENKIE

SEQ ID NO: 158854 - protein, 216 aa, Unknown
  Bacterial polypetide isolated from the Sargasso Sea
FAHGWWLTGESKMSKSLGNVINPMDLIKDYGVDPVRYYLMREMVLGNDSSFTIESFIQRYNSDLANDFGNLLSRVTTLIKKNYDGLVPEPGDLGDLDIGIKKKGEALSKTVHRYVDDMRLNDAIEEIMQFIRGVNKYMEENAPWKMVKEDKDGAGRILYTAGEALRLGAVLLSPIMPNRTKTLLDALNVKEKDFSWGALKAGTRIKSHEPLFPRIK

SEQ ID NO: 158855 - protein, 170 aa, Unknown
  Bacterial polypetide isolated from the Sargasso Sea
MDKNYYITTPIYYPSAKPHMGHAYSSITADFFARFKKIEGYNVFFLTGTDEHGQKIQRAAEKIGKDPLIFCDEISKTFKDLSLKLNLSNNDFIRTTEKRHFNSVTELWNILEKRKEIYLSKYSGWYSVSDEAFYSEEEIESNNNKKISKISGSEVEWVEEESYFFKLSKW

SEQ ID NO: 158856 - protein, 52 aa, Unknown
  Bacterial polypetide isolated from the Sargasso Sea
VKSKLKEWFDVGLRDWDISRDAPYFGFLIPGEEDKYFYVWLDAPIGYFASLK

SEQ ID NO: 158857 - protein, 269 aa, Unknown
  Bacterial polypetide isolated from the Sargasso Sea
MEKSINGGWPADVHFIGKDILRFHAVYWPAMLISANMKVPKKVFGHGFLTREGQKMGKSLGNVLDPDLLLSKYGNDPVRWYLIKDISLGNDGDFQNKRFVDIINNDLANTIGNLLNRTSSMSRKWFDNKVPNIEKISSENKLEDFAKIAVENYIHKFDIYKLDLAANEVLSLAIKTNLYLNDNQPWMLIKEENNLPFVKEIIYNVLESTRIIGLLLLPLLPELSSKINEQLCSTYNKEIPWEQQLKWGLLNSNSSLPKPTPIINKLEYE

SEQ ID NO: 158858 - protein, 115 aa, Unknown
  Bacterial polypetide isolated from the Sargasso Sea
MKNSFYITTPIYYVNDIPHLGHAYTSFVADTISRYKRLSNFDVYFTTGTDEHGQKVENSARDKNIDTLEFTDKVSARFKDLCSKLKLTNNDFIRTTENRHKNKVQKIWNKLIENN

SEQ ID NO: 158859 - protein, 191 aa, Unknown
  Bacterial polypetide isolated from the Sargasso Sea
MDKNFYITTPIYYPSAKPHMGHAYSSIIADFFSRFKKIDGFTVHFLTGTDEHGLKIQRSAEKKGLKPLEFCDEISKTFRNLSEILNLTNTDFIRTTEARHKISVQHLWRELEKNDDIYLSKYSGWYSVSDEAFYSEEEIEEINGSKVATSSKSTVEWVDEESYFFRLSKWEKPLLEFYEKIQISFHLKAEK

SEQ ID NO: 158860 - protein, 80 aa, Unknown
  Bacterial polypetide isolated from the Sargasso Sea
MNKNFYITTPIYYPSGKPHMGHAYSSIVADFFARFKRIQGHNVFFLTGTDEHGQKIQRAAEKKGMEPKAFCDEISKTFFD

SEQ ID NO: 158861 - protein, 54 aa, Unknown
  Bacterial polypetide isolated from the Sargasso Sea
MSNSFYITTPIYYVNDIPHIGHAYTTILADVLSRYQKQVGNKPFFLTGLDEHGQ

SEQ ID NO: 158862 - protein, 287 aa, Unknown
  Bacterial polypetide isolated from the Sargasso Sea
YLASHLNYLIKQDCEKDFESFWSKDSASEVFHFIGKDIMYFHTLFFPAMLANADLKTPNGVFVHGFLTLNGEKMSKSRGNFISAENYIDNLDSDYLRYFFASKLSTGVDDIDLNLDEFKQKCNSDLVNKYANIASRSAKFINKNFDNNLSEILDSPDLIEEFKVTSEKIADHYEKLEFSKALKEIMLLADKANQYIDSKQPWVLIKEEGNEQLVHSICTTSLNLFRILTIMLQPVIPGFVDKSLRFLKEDKIEWNSINKTILNCKIDNFEAIVTRIDDNHLAKLMGN

SEQ ID NO: 158863 - protein, 253 aa, Unknown
  Bacterial polypetide isolated from the Sargasso Sea
MDKNFYITTPIYYPSAKPHMGHAYSSIIADFFARFKKIDGFKVNFLTGTDEHGLKIQRAAEVKGIDPLKFCDEISLTFKDLSKTLNLTNTDFIRTTESRHKKSVQNLWKVLEKNNEIYLSKYSGWYSVSDEAFYSDDEIEEINGKKISSSSKSSVEWVDEESYFFRLSKWEKPLLDLYKDNPYFISPPSRKNEIVSFVKSGLKDLSISRKSFSWGIPVPNNKDHVIYVWLDALTNYLSALNYPDTNNELYKNF

SEQ ID NO: 158864 - protein, 183 aa, Unknown
  Bacterial polypetide isolated from the Sargasso Sea
MNKNFYITTPIYYPSAKPHMGHAYSSIVADFFARFKKIQGFDVFFLTGTDEHGQKIQRAAEKKKMDPQSFCDEISKTFKDLSKSLNLSNTDFIRTTEVRHKKSVSNLWNILEKKGEIYLSKYSGWYSVSDEAFYSEDEVVENNGSKISKISGSLVEWVEEESYFFKLSKWQKPLLDYYKKNPN

SEQ ID NO: 158865 - protein, 84 aa, Unknown
  Bacterial polypetide isolated from the Sargasso Sea
KGADKLLRLTLDVGDLGTRNVFAGIKSAYEPNELTDKHIVLVNNLEPRKMKFGVSEGMVLASSNDEGIYLVSPDSGAKPGMKVR

SEQ ID NO: 158866 - protein, 199 aa, Unknown
  Bacterial polypetide isolated from the Sargasso Sea
MNKNFYITTPIYYPSARPHMGHAYSSIVSDFFARLKKIQGYEVFFLTGTDEHGQKIQRAAEKKKKDPLKFCDEISATFKDLSKILNLSNNDFIRTTEARHKKSVENLWKVLEKKKEIYLSKYSGWYSVSDEAFYSEDEIEDDGDLKISKLSGSKVEWVEEESYFFKLSKWQEPLLSFYEKNPDFILPKTRKNEVVSFVR

SEQ ID NO: 158867 - protein, 268 aa, Unknown
  Bacterial polypetide isolated from the Sargasso Sea
MSRILITSALPYINGIKHLGNLIGSQLPSDVYARFMRANGHEVLLICATDEHGTPAELAATKADCAVADYCEKMWKAQKELAAGFCLSFDFFGRSSSKQNHKLTQHFAKKLCEAGLISEIVEKQIFSIDDNRFLPDRYVEGECPECGYSRARGDQCESCTKQLNPVDLIKPRSVISGSENLELRETKHLYLRQSLMRERLRRWLDQKSDWPILTTSIAKKWLNDGEGLQDRGITRDLEWGIPVHTPEDQWPGLENKVFYVWFDAPIGV

SEQ ID NO: 158868 - protein, 148 aa, Unknown
  Bacterial polypetide isolated from the Sargasso Sea
MDKYYYITTPIYYPSAKPHMGHAYSSIVSDVFARFKTIDGYKVHFLTGTDEHGQKIERAAKEKQMDPLAFCNEISKTFKDLCSLLNLSNTDFIRTTENRHKISVQHLWNELEKSGDIYLSKYSGWYSVSDEAFYQEDEIETKNNQKIS

SEQ ID NO: 158869 - protein, 245 aa, Unknown
  Bacterial polypetide isolated from the Sargasso Sea
DEHGQKIAESAAISGIEPKEFVDKISEEFRQLWPNLNIDHDQFIRTTDSNHKTCVQKILQKIYDQGEIYIKEYEGLYCIGCERFFDESELENGNCPDHQTPPEFYKEKNYFFKMSSYQEWLTKELKQNVDWIYPGRYRNELIQLLKDPLQDLCISRPKSRVRWGIELPFDNKFVTYVWFDALLNYVSALEWPDGEKFKKFWPHVNHTIGKDILKTHGIYWPCMLKAAGMPVFKKLVVHGHWVVGG

SEQ ID NO: 158870 - protein, 166 aa, Unknown
  Bacterial polypetide isolated from the Sargasso Sea
MNKKAIITSALPYSNGEIHLGHVASTYLPADVTTRFLKQNGVEAYYVCASDDYGTPILIQSEKLKQTPQEYVAHWNKRDYEDFTAFDIGFDFFYKTSSEENISFVQDVFKKIEKNGHIYEKEIIQAFCTSCDKFLPDRFVKGTCPFCDAEDQYSDLCEKCGRIPKK

SEQ ID NO: 158871 - protein, 171 aa, Unknown
  Bacterial polypetide isolated from the Sargasso Sea
MDKNFYITTPIYYPSANPHMGHAYSSIIADFFARFKRIDGFNVNFLTGTDEHGLKIQRAAKKKGMETQKFCDQISQTFRDLSEKLNLTNTDFIRTSEERHKISVQNLWNELKKNDDIYLSKYSGWYSVSDEAFYSDNEVEEVDGNKQSISSKSPVEWMDEESYFFRLSKWE

SEQ ID NO: 158872 - protein, 123 aa, Unknown
  Bacterial polypetide isolated from the Sargasso Sea
MNKNFYITTPIYYPSGKPHMGHAYSSIIADIFARFKRLEGNNVLFLTGTDEHGQKIQKEAEKNKKDPKKFCDEISETFRSLTKILNLSNNDFIRTTEPRHLKSVNEIWYRLIKSGDIYLDKYS

SEQ ID NO: 158873 - protein, 168 aa, Unknown
  Bacterial polypetide isolated from the Sargasso Sea
MKNKFYITTPIYYPSAKPHMGHAYSSIVADFFARFKRIDNYDVFFLTGTDEHGQKIERASKDNNKDTLKFCDEISSIFKDLTFKLNLSNNDFIRTTEKRHFDAVEHLWNILEKKNYIYLSKYSGWYSVSDEAFYSEDEIEEIDNIKKSKSSGSKVEWEEEESYFFKLS

SEQ ID NO: 158874 - protein, 114 aa, Unknown
  Bacterial polypetide isolated from the Sargasso Sea
MSNKNFYITTPIYYPSGKPHMGHAYSSIIADIFARFKRIDEFDVFFLTGTDEHGLKMQREAEKNSKDVKLFCDELSSKFKDLTNILYLSNDDFIRTTEKRHFKSVVDIWSKLEK

SEQ ID NO: 158875 - protein, 225 aa, Unknown
  Bacterial polypetide isolated from the Sargasso Sea
YALRDEAFYSEKEITNGKAPTGAEVTWVEEESYFFDLSKWQDQLLNFYDENPSFIYPISRMNEVKSFVKSGLRDLSVSETSFEWGVKVPNNNHHIMYVWLDALTNYLSAVGYPDINNIEYIDFWPSNLHMVGKDILRFHAVYWPAFLLAADLPLPKRIFAHGWWTNEGKKISKSDGNVIDPIDIINDYGLDQIRYFLMREVPFGSDGDFSKTALKARINSDLSND

SEQ ID NO: 158876 - protein, 298 aa, Unknown
  Bacterial polypetide isolated from the Sargasso Sea
KYLWDRLYQKGHIYQGEYEGWYSVSDETFYNEKDLIKTDNGSFKTITNGSVEWISEKSYFFKLSEWSSKLLDLYKYNKNFINPESKKNEVIKFVESGLNDLSVSRTSFNWGIKTPTDSKHIMYVWLDALTCYANGVNYLNDENDNIKDYWNNVTHIVGKDILRHHAVYWPAFLMAAELELPKKIYAHGWWTNEGQKISKSLGNTIDPIDIINNYGLDQFRYFLLREVPFGNDGDFSKSALINRINSDLVNDLGNLCQRSLSMIEKKLNSIIPKIKEESRNNKLMKMYEEIISETSVLV

SEQ ID NO: 158877 - protein, 190 aa, Unknown
  Bacterial polypetide isolated from the Sargasso Sea
MDKTFYITTPIYYPSAKPHMGHAYSSIIADFFARFKIIDDYQVHFLTGTDEHGLKIQRSAEKAGKEPQIFCDQISQTFRDLSDTLNLSNTDFIRTTEARHKKTVQHLWNELEKNDDIYLSNYSGWYSVSDEAFYNEDEIEEVDGKKIALSSKSPVEWIEEESYFFRLSKWEKPLLDYYEANPDFISPESR

SEQ ID NO: 158878 - protein, 275 aa, Unknown
  Bacterial polypetide isolated from the Sargasso Sea
CNYITALNYPNTETKSFKTFWPGIHVVGKDILRFHAVYWPAFLMAAGIEPPKKIFAHGWWTNEGQKISKSIGNIINPYDIIGKYGLDQIRFFLFREVPFGNDGDFSKDAISERVNADLSNNYGNLIQRISSFILKNSDSKVFKPINYEQTDLNIFQSFDETLNIYLKNMNSFKIDKALKCIFDYLSSINAYVDTQAPWSLKNTHHERMGDVLYVITLMTIKCSILLYPVIPSSIIKVLNIYNLSISDLNLNNVESFLPDTIILNKAEPIFPRIEL

SEQ ID NO: 158879 - protein, 228 aa, Unknown
  Bacterial polypetide isolated from the Sargasso Sea
SFWPADLHLIGKDILRFHAIYWPAFLLAADINPPKRVFGHGWILSGDEKMSKSKGNILDPLEIIDTYGLDPLRYYLIKEVSFGNDGNISQEKLEACINSDLANNYGNLCQRVLSFCDKNSNFEVPDNDAFTEDDKLILDQYSKNYENLIKYSDNQDVNLYINFIVEQLFAANKYFNDQEPWKKKNDKSRMNTIIYVALELIRKVTILLYPIIPSSSIKVLEIFGIKED

SEQ ID NO: 158880 - protein, 181 aa, Unknown
  Bacterial polypetide isolated from the Sargasso Sea
MNKNFYITTPIYYPSAKPHMGHAYSSIVADFFARFKKIDGFNIHFLTGTDEHGLKIQRAAEKKKLEPLTFCDEISKTFKDLSKTLNLSNTDFIRTTEKRHKKAVQHLWNELIKNDNIYLSKYSGWYSVSDEAFYSEDEIEEKNGLKISKLSSSKVEWVDEESYFFRLSKWEKPLLDYYEKN

SEQ ID NO: 158881 - protein, 167 aa, Unknown
  Bacterial polypetide isolated from the Sargasso Sea
MEKNNDIYLSKYSGWYSVSDEAFYADDEVEDFEGKKQAISSKSQVEWMDEESYFFRLSKWQNHLLDHYNKNPEFISPPSRKNEVISFVKSGLKDLSVSRKSFSWGIKVPNNNDHIIYVWLDALTNYISALNYPNTENEIYKQFWPADIHLIGKDILRFHAVYWPAFL

SEQ ID NO: 158882 - protein, 124 aa, Unknown
  Bacterial polypetide isolated from the Sargasso Sea
MDKNFYITTPIYYPSAKPHMGHAYSSIVADFFARFKRIQGYKVYFLTGTDEHGQKIQRAAEKKGMDPKAFCDEISKTFFDLSKILNLSNDDFIRTTEDRHRKSVENLWNILEKKNEIYLSKYSG

SEQ ID NO: 158883 - protein, 221 aa, Unknown
  Bacterial polypetide isolated from the Sargasso Sea
MDNSKKTKRKILVTQALPYANAPLHLGHILEAVQTDIWTRFQNFNDNECLFFCADDTHGTPVMLKANEMGIKPEELISDVYKDHKSSYELYGINFANFYSTHSDENRKYSEYIYECAKNNNLISKANIEQYYDEKEEMFLSDRFIKGTCPKCGAEDQNGDNCGVCGASYNVLDVKKPISIISNTVPIKKESEHIFFDLPQKNKMLKDFLKNVDLQESIKNS

SEQ ID NO: 158884 - protein, 276 aa, Unknown
  Bacterial polypetide isolated from the Sargasso Sea
YKKNKDFILPETRKNEVISFVESGLNDLSVSRKSFSWGIKVPKNNDHVIYVWLDALTNYLSALNYPDEKDKKYKNFWPANLHIIGKDILRFHAIYWPAFLLAAEIPPPKRVYGHGWILSGDEKMSKSKGNILDPIEIIDKYGLDPLRYYLLKEVSFGNDGSISKDQLENCINSDLANNYGNLCQRVLAFNEKNLNLKVPENYNLNDLDKKILDKYSLSYNQIISFIDNQDINNYMLFIQKQLFEANKYFNDQAPWNKKDDNERLNTIIYVSLELIR

SEQ ID NO: 158885 - protein, 236 aa, Unknown
  Bacterial polypetide isolated from the Sargasso Sea
SISPKELIDKYDKIIKSSFQKFGISFDNYSRTSKKVHHETSIDLFNLLKEKDLFSLIESEQFFDINENQFLADRYIIGDCPVCASEGAYGDQCEKCGSALSPEELKNPKSTISDSTPILKKTKHYYIKLNEFEDFLRNWITVENKDIWKANVIGQVKSWLDSGLKPRAVTRDLDWGIPIQVDGDDGKVLYVWFEAPIGYISSTKEWAARNNKDWEHYWKSPKTNLIHFIGKDNIVF

SEQ ID NO: 158886 - protein, 240 aa, Unknown
  Bacterial polypetide isolated from the Sargasso Sea
KIQRAAEKRNMDPLSFCDEISKTFRNLSKTLNLSNTDFIRTTEKRHAVSVTNLWNILEKKKEIYLSKYSGWYSVSDEAFYTDDEIDDDNGNKVSKNSGSPVEWVEEESYFFKLSKWQEPLLKFYSENPNFILPESRKNEVISFVKSGLKDLSVSRKSFSWGIKVPSNKDHVIYVWLDALTNYLSALNYPDENHKLYKNYWPADIHLIGKDILRFHAVYWPAFLLAADIPLPKRIYGHGWI

SEQ ID NO: 158887 - protein, 295 aa, Unknown
  Bacterial polypetide isolated from the Sargasso Sea
AALPYANGPIHIGHLAGVYIPADIFARYKRLTNNDVAFICGSDEHGVAISLASKKASISPKELIDKYDKMIKKSFDEFGILFDNYSRTSNKIHHETSINFFENLKEKNLFSLIKSEQFFDVNENQFLADRYISGTCPVCGYDEAYGDQCEKCGSTLSPEELKNPKSTISNSAPILKETKHYYIKLDEFEDFIKNWITVENKDKWKTNVVGQVKSWLDSGLKPRAVTRDLDWGIPVKIDDEDGKVLYVWFEAPIGYISSTIEWAKANDKDWEQYWKNPETNLIHFIGKDQYCFSLV

SEQ ID NO: 158888 - protein, 271 aa, Unknown
  Bacterial polypetide isolated from the Sargasso Sea
KTFTITAALPYANGPIHIGHLAGVYIPADIFARYKRLTNNDVAFICGSDEHGVAISLASKKASISPKELIDKYDKMIKKSFDEFGILFDNYSRTSSKVHHETSLMFFENLKEKNLFSLIKSEQFFDVDENQFLADRYISGTCPFCDFDEAYGDQCEKCGSTLSPEELKNPKSTISNSSPILKETKHYYIKLDEFEEFIRNWITVENKDNWKANVVGQVKSWLDSGLKPRAVTRDLDWGIPVKIDDEDGKVLYVWFEAPIGYISSTIEWAKA

SEQ ID NO: 158889 - protein, 170 aa, Unknown
  Bacterial polypetide isolated from the Sargasso Sea
MTNKNFYITTPIYYPSGKPHMGHAYSSIVADVIARFKRIEGYNVHFLTGTDEHGLKIQREAEKNNKTSQVFCDELSKKFKELTKILNLSNNDFIRTTEKRHFKSVEDLWIKLVNSGDIYLDKYKGWYSVSDEAYYDEDEIEEKNGTKVSKLSGSKVEWVEEESYFFKLSA

SEQ ID NO: 158890 - protein, 213 aa, Unknown
  Bacterial polypetide isolated from the Sargasso Sea
FCDKISKTLRDLSETLNLSNTDFIRTTEARHKKTVQHLWNELLKNDDIYLSNYSGWYSVSDEAFYNEDEIEEIDGKKISISSKSAVEWIEEESYFFRLSKWEKPLLDYYKANPDFIAPQSRKNEVISFVKSGLKDLSVSRKSFSWGIPVPNNKNHVIYVWLDALTNYLSALNYPDTNDDLFNKFWPASIHLIGKDILRFHAVYWPAFLLAAKN

SEQ ID NO: 158891 - protein, 268 aa, Unknown
  Bacterial polypetide isolated from the Sargasso Sea
WGIKVPNNDNHVMYVWIDALCNYLTSIGYPDVNHKTFKKFWPGFHMIGKDILRFHAIYWPAFLMAADIDPPKRIFAHGWWTNEGQKISKSVGNIIDPYEIINKYGLDQIRFFLFREVPFGNDGDFSKDAIANRLNADLSNNYGNLVQRIATFCVKNCNSNIKNNSNFTKADKNLIEFMNLKFDEYKKFMNEEKIDKSIKCVFELLSETNAYIDTEAPWNLKKTNKNRMNDVLFLTLNIIKNSSIMLIPVMPDSANKILDILNVYKTER

SEQ ID NO: 158892 - protein, 55 aa, Unknown
  Bacterial polypetide isolated from the Sargasso Sea
MKNNYYITTPIYYPSAKPHMGHAYSSIVADFFARFKRISEHNVFFLTGTDEHGQK

SEQ ID NO: 158893 - protein, 95 aa, Unknown
  Bacterial polypetide isolated from the Sargasso Sea
MPYTLTTPLYYVNDKPHLGSTYTTIACDALARYQRLRNGSVVFITGVDEHGQKIQRTAERQGVSPQEHCDRISSTYRDLWARWGISQDRFIRTTD

SEQ ID NO: 158894 - protein, 206 aa, Unknown
  Bacterial polypetide isolated from the Sargasso Sea
MQDKTFFITTPIYYPSGKPHMGHAYSSIIADIFARFKRIENFEVMFLTGTDEHGLKIQREAKKNSKDPKIFCDEISLKFKDLTKILNLSNDDFIRTTEKRHHKAVNEIWSRLIKSNDIYLSKYKGWYSVSDEAYYDEDEIEIKGDTRFSKLSGSKVEWVEEESFFFKLSSWQKKLIKFYDDNPEFILPKSRKNEVVEFVKSGLKDL

SEQ ID NO: 158895 - protein, 302 aa, Unknown
  Bacterial polypetide isolated from the Sargasso Sea
EDQHKATVTAFLQRLWDRDQIYEGTYSGWYCVSDERYWTEKDLGEGRTCPICGREVTYVEEKNYFFKMSEWQDALVKQIQDNPDWIVPEIRKNEILSFLKQPLGDLSISRPKSRLSWGIDLPFDQDHVAYVWVDALINYLTASGAIDPSRAEGDQGFEDVTLSWWPADMHLVGKDILTTHSVYWPTLLMGVGLPVPRQILAHGWWVVGETKMSKSLGNVVDPLMLRDTFGTDAVRWYLMREMPTGADASYTPERFLARYDELANVLGNLVSRSTSMINKYRAGLVPEAASNGLDPEVDHALK

SEQ ID NO: 158896 - protein, 131 aa, Unknown
  Bacterial polypetide isolated from the Sargasso Sea
NEIEDKDNVKVNKLSGSKVEWVEEESFFFKLSKWEKKLLEYYDKNPEFIRPESRRNEVISFVKGGLKDLSVSRKSITWGINVPSQKDHIIYVWLDALTNYLSALDYPNIDTVKYKNFWPASVHIIGKDILR

SEQ ID NO: 158897 - protein, 227 aa, Unknown
  Bacterial polypetide isolated from the Sargasso Sea
LSAGIKLPESIFAHGWWLMGESKMSKSLGNVINPMDLIDDYGVDPVRYYLMREMVLGQDSNFTMESFIQRYNSDLANDFGNLLSRVTTLITKNYDGKIPEPGEYLESDLQIRLKGESLSSKVEMLIGEMRLNEAIEDIMQYIRTVNKYMEENAPWKLVKEDKVAAGRILYVAGEALRLGAVLLSPVMPHRTRILLDALNAHDTDKSWGRLKPNSMLKDHEPLFPRIK

SEQ ID NO: 158898 - protein, 153 aa, Unknown
  Bacterial polypetide isolated from the Sargasso Sea
MKNNYYITTPIYYPSAKPHMGHAYSSIVADFFARFKRIQGYNVFYLTGTDEHGQKIERAANIKKKNPQDFCDDISQIFKDLTKTLNLSNNDFIRTTETRHKKSAINVWKILEEKKEIYLSKYSGWYSVSDEAFYSEDEIMEEDGKKNLNYLDL

SEQ ID NO: 158899 - protein, 281 aa, Unknown
  Bacterial polypetide isolated from the Sargasso Sea
ALQNYLSAVNFPNMSDELYKDFWPADLHVIGKDILRFHAIYWPAFLLAADIKLPKRVFGHGWILSDEKKMSKSLGNILDPVDITEKYGSDQLRYYLMKEVSHGNDGNISLQNLENCINNDLANNFGNLCQRVFSFIKKNLDNKIPKYKNIEKKDRQLKEKIKKDLKLLSKTINNQELNLYIKKVVEYSFEANKYFNDAAPWDLKDSPEKMGNVLYVSLLHILYIAILLNPLIPIATIKVLKIFKLDENDLKLETITKDNFLKSGIELNQSSILFKKVEHDN

SEQ ID NO: 158900 - protein, 347 aa, Unknown
  Bacterial polypetide isolated from the Sargasso Sea
EVKQIKEKNYFFTMSKYQNTLINKIESDELLIQPKSRKNEVLGFLKNELSDLCISRPKSRLEWGIELPFDDNYVTYVWFDALINYISAIGAYKDDKKFSSLWPADVHLIGKDILTTHSVYWPTMLLSLGLPLPKRIFAHGWWLTDNQKMSKSLGNIVSPLMLIDDFGVDSVRYYLMSEMVLGMDATFSSESFEKKYNSDLANDFGNLVSRVSTLIKNNFDEKIPKNSLAESDLSSNFQKIVLKEQVDNLEIDKVINDIMIFIRSINVFMEQNEPWKLVKSDKEQAGNILYHCAESLRLAAVMLSPVMPSKTKDILDILGTNEAELVWGKLNSGSKISTTEPIFPRIN

SEQ ID NO: 158901 - protein, 252 aa, Unknown
  Bacterial polypetide isolated from the Sargasso Sea
MDKTFYITTPIYYPSAKPHMGHAYSSIVADFFARFKIIDDYEVHFLTGTDEHGLKIQRSAEKAGKEPQIFCDQISQTFRDLSDTLNLSNTDFIRTTESRHKKTVQHLWNELEKNDDIYLSNYSGWYSVSDEAFYNEDEIEEVDGKKIAISSKSPVEWIEEESYFFRLSKWEKPLLDYYENNPDFIYPQSRKNEVISFVKSGLKDLSVSRKSFSWGIPVPNNKNHVIYVWLDALTNYLSALNYPNKDDDLYKK

SEQ ID NO: 158902 - protein, 555 aa, Unknown
  Bacterial polypetide isolated from the Sargasso Sea
MVNKQKNILVCVAWPYVNGPPHLGHIAGMSIPADIFARYNRLIGNNVAMVSGSDMHGTPVTLLANDLGVSPEEISSKYHDIWSKSLKDMNFQYDLYTNTHTDNHMEIVKDIFSDLLAKELLEIREQLMPYSITENIFLSDRLVEGECPCGDNEKARGDQCEQCGKTLDPSDLKNIRSKRDGSIPEFRKTSHYFLKLSQMESKIKKWINSREGWRQNVKNQSLSFINEGLRDRAITRDLSWGIDIPVEGWDDKKIYVWFEAVLGYLTATVELFSKTENPDQWKDFWEKEDSESYYFQGKDNIPFHTIILPAILLGIGGKNLPTDVVANEYLNFAGREFSKSSNWAVWLPDFLEKYSPDSLRYYLTSIMPETSDSDFTWEGYVASNNNELVATLGNFIHRVLTMSHRNFDGEVPYFDTNSSSTKEIIEKSEKALEEVGESISKRKFRESLNKLMNLARFGNQYLDKHEPWKKIKEDKKSAGEVLGQSMIIISAISSMLEPFLPNSAEKLQKVIFNDKKNNWNLILPISGDKFDKPTPLFEKLEEEKVLEENGMISDE

SEQ ID NO: 158903 - protein, 435 aa, Unknown
  Bacterial polypetide isolated from the Sargasso Sea
MKKILITSALPYINGIKHLGNLIGSQLPADVYARYMRARGNKVLFICATDEHGTPAELAAIEKKETVEKFCEKMWNIQKNIADGFFISFDYFGRSSSQQNHELTQHFATRLWENGFLKEVNEKQFFSTEDSRYLPDRYITGTCPSCGYEKARGDQCENCTKQLQPTDLIDPSSTISGSKSLEIRETKHLYLKQSELKNKLDDWISKKDDWPILTKSIAKKWLHNKEGLKDRGITRDLTWGVKVKKNGKAWKGFENKVFYVWFDAPIAYIAATKEWSENNSNKEWKKWWITDQGADEVYYVQFMAKDNIPFHTLSFPATIFGSGENWKLVDYIKGFNWLLYEGGKFSTSEKRGIFMDVALKIFPADYWRWWLLSNAPENSDTNFTWDSFQNTINKDLADVLGNFITRVTKFSLAKFGSKIPISNKYGVLETKTINE

SEQ ID NO: 158904 - protein, 258 aa, Unknown
  Bacterial polypetide isolated from the Sargasso Sea
MKKSKETFTITAALPYANGPIHIGHLAGVYIPADIYARYKRLTENDVAFICGSDEHGVAISLASKKASISPKELIDKYDEMIKSSFQEFGISFDNYSRTSKKIHHETSIDLFNLLKEKDLFSLIESEQFFDINESQFLADRYITGDCPVCGSEGAYGDQCEKCGSALSPEELKNPKSTISDSIPILRNTKHYYIKLNEFEDFLRGWITIDNKDIWKANVIGQVKSWLDNGLKPRAVTRDLDWGIPIEVDGDDGKVLYV

SEQ ID NO: 158905 - protein, 354 aa, Unknown
  Bacterial polypetide isolated from the Sargasso Sea
TKLVLQKIFLFVQQVFEKLQKNGHIYEKEIIQFFCNSCQKFLPDRFVIGTCPHCNAEDQYSDLCEKCGRIPEEIDNPHCSICGEKPENKSTNHYFFKLKNFSEPLLDYLTNTPHLQKDVKKYVENWIKEGLVDWDITRDISWGVPIPIEGLKDKVFYGWFDNHLAYISSTLKFLEDKNIDGKNFWNDADIYHFIGKDIVYHHYLFLPAMRLGIDKEFKLPDYIPTRGHLTLEGKKISKSRNWYIGLKDFLETFPADYLRFYLISINPYSQDDLNFDWEQFSTKINSELIGNLGNLVNRALGFTNKAFDGVLPEPENFDEKDSESEEKIKSLAENVGKLMQENHLDRALKQLMEF

SEQ ID NO: 158906 - protein, 248 aa, Unknown
  Bacterial polypetide isolated from the Sargasso Sea
KNIDHDFLDECSSEYELIRKDLNNKDFSKAVSRILKVADDTNSYINNKTPWKLNDDDALEVATTGISIYKDLCILIMPIIPNLASKGLSQVKIENPSFDDLNNELTNVEINAYNPLLNRLEDKDLLTPSKEMKMTEIDNNEITIDDFAKIDLRVAEVIEANHIDGADKLIQLTLDVGELGQRNVFAGIKSKYSPEDLQGKFVALVANLKPRKMKFGTSEGMVLAASNDEGGIFIMSPASGAKAGDKIK

SEQ ID NO: 158907 - protein, 383 aa, Unknown
  Bacterial polypetide isolated from the Sargasso Sea
NSTPILKQTKHYFIKLNEFEEFIRNWITVENKDKWKTNVVGQVKSWLDNGLKPRAVTRDLDWGIPVKVDNEDGKVLYVWFEAPIGYISSTIEWAKKNNKDWEKYWKNPDTNLIHFIGKDNIVFHCIIFPIMLKMFGNFILPKNVPANEFLNLEGNKISTSRNWAVWLHEYLIDFPDMQDVLRYVLISTCPETKDNDFTWKDFQARNNSELVAIYGNFANRVLSLIKKYYDGKIPKVKSKNRVDDLVLEDVKVLKEEIELNLDSFKFREATKNLMNIARIGNKYLAETEPWKIKESDPLRVEQILHTSFIIISYLAIVSEPFLPFTSVKLKNMIGLNDYSWDDLDKIFGTINYNFTIVDIEILFKRIEDSEIEYQIDKLKKSAS

SEQ ID NO: 158908 - protein, 36 aa, Unknown
  Bacterial polypetide isolated from the Sargasso Sea
MKSRKILVTSALPYANGSIHIGHVLESVITDIWVRY

SEQ ID NO: 158909 - protein, 172 aa, Unknown
  Bacterial polypetide isolated from the Sargasso Sea
MESKKRYTITSALPYTNGKIHIGHLAGAYIPADIYARFKRVTDNDVAYICGSDEHGVAISIRAKKEKKTPKEIIDKYHDLIKKSFSDFGISFDNYSRTSSKIHHETASEFFKFLENKKVFEIKDSKQLYDPQENQFLADRFVEGECPHCGFEHAYGDQCENCGSSLSPEELI

SEQ ID NO: 158910 - protein, 262 aa, Unknown
  Bacterial polypetide isolated from the Sargasso Sea
MKYLVTSALPYANAPLHLGHVLEIVQTDVWVRQKNLSNEEALYFCASDTHGTPIMLKAKEMNVTPEELIKDIHEKHHQTFKNFNVKLANFHSTHSDENKHLTSEIFQNAIKNKYIHKKEISQLYDEKEQIFLADRFVKGSCPACGAEEQYGDACEKCGSTYDALELKNPISVLSNTAPVVKESEHYFFKLNEFNAFLKENVQKISNQTPIKAKLDEWLNEDLRDWDVSRDEPYFGFNVPGEDSKYIYVWMDAPSRVSVIYSK

SEQ ID NO: 158911 - protein, 368 aa, Unknown
  Bacterial polypetide isolated from the Sargasso Sea
IITSALPYSNGEIHLGHVASTYLPADVTTRFLKQNGVEAYYVCASDDYGTPILIQSEKLKQTPQEYVAHWNKRDFEDFTAFDIGFDFFYKTSSEENISFVQDVFKKIEKNGHIYEKEIIQAFCTSCDKFLPDRFVKGTCPFCDAEDQYSDLCEKCGRIPEEIENPHCSICGETPVQKSTNHYFFKLKNFSEPLLEYLENAPHLQKDVKKYVENWIKEGLVDWDITRDIPWGVPIPIDGLKDKVFYGWFDNHLAYISSTLKFLNDKNIDGKSFWNDADIYHFIGKDIVYHHYLFLPAMRLGLEKEFKLPDYIPTRGHLTLEGKKISKSRNWYIGLKDFLEKFPADYLRFYLISINPYSQDDLNFDWEQF

SEQ ID NO: 158912 - protein, 180 aa, Unknown
  Bacterial polypetide isolated from the Sargasso Sea
MDKNFYITTPIYYPSGRPHMGHAYSSIIADFFARFKSIDDYNVHFLTGTDEHGLKIQRSAEKAGKDPKEFCDQISQTFKDLSKTLNLSNTDFIRTTEDRHKKTVQHLWSLLEKNDDIYLSNYSGWYSVSDEAFYNEDEIEEIEGKKIAKLSKSTVEWIEEESYFFRLSKWQKPLLEFYEN

SEQ ID NO: 158913 - protein, 358 aa, Unknown
  Bacterial polypetide isolated from the Sargasso Sea
MKHGLKIQKAAESMGKEPLELCDENSQIFRDLTAILDLSNDDFIRTTEQRHIDGASFLWKRLHERNQIYLGEYRGWYSINDETFYNEKDLVKQSDGTFKTVTGGPVDWITEKSYFFKLSEWSGKLLDLYKKNPDFICPRSKRNEVIKFVESGLNDLSVSRTSFNWGIKTPTDKDHIMYVWLDALTCYANGVNYLTDLENGLSDYWNNAIHIVGKDILRHHAVYWPAFLLAADLKLPNKIFAHGWWTNEGNKISKSLGNAIDPLEIINNYGLDQFRYFLLREVPFGNDGDFSVKALVNRINSDLVNDLGNLCQRSLTMIEKKLKSIIPGKTSIGPNEEILENSSEEVIIKGSKMIDELR

SEQ ID NO: 158914 - protein, 290 aa, Unknown
  Bacterial polypetide isolated from the Sargasso Sea
HVIYVWLDALTNYLSALNFPDIDDKSYQNFWPADIHIIGKDILRFHAIYWPAFLLAAKLPLPKKIFGHGWILSDDKKMSKSLGNILDPIEIIENYGLDQLRYYLIKEVSLGNDGNISMKNLKNCINNDLANNYGNLCQRVFSFIKKNCSNKIPKPKKLESIDLKLIDKLKKDVPNLVKLMDNQNLNEYIKSVVSYSFDANKYFNDLEPWSVKKKDPERMQAILFTASEQIKNISILLNAIIPSSTEKVFKTLNINKKDITINQINSLDTFDHNKELKELDILFNKIENDN

SEQ ID NO: 158915 - protein, 318 aa, Unknown
  Bacterial polypetide isolated from the Sargasso Sea
FCNFRLPDSINVHGFLTINGEKMSKSTGTGILAKDFVKFTNPETLRYYFGAKLNNKVEDIDLNFDDYIQRINSDLVGKYLNIASRSASFLKKNSNVISSDIDQEVINKLIEKKNEIINLYESKQYSKVVRIIMDLADDINKYINEQTPWKKDNDEAVIIASTAINAFKILSIYLHPIIPNITNEAFKFLNIDSPLFDDIDEKLINKINNYKPLLNRLDKIIIPKEEDMDNVNLINIDQFSVVDLRVAKITDASNVEGADKLLQLTLDVGEFGTRNVFAGIKSTYEPDDLINRLVILVNNLEPRKMKFGVSERYGSCLE

SEQ ID NO: 158916 - protein, 355 aa, Unknown
  Bacterial polypetide isolated from the Sargasso Sea
ELDSGQFGEAKQIKEKNYFFRMSKYQKTLIDKIEKDELLIQPKSRKNEVLGFLKNELSDLCISRPKSRLEWGIELPFDNNYVTYVWFDALINYISAIGAFKNDEQFSSLWPADVHLIGKDILTTHSVYWPTMLLSLGLPLPQRIFAHGWWLTDDQKMSKSLGNVVSPLILIDDFGVDSVRYYLMSEMVLGMDATFSSESFEKKYNSDLANDFGNLVSRVSTLIKNNFDEKIPKSGLIESDLSSNFQKIVLKRKLDNLEIDKVINDIMTFIRSINVFMEQNEPWKLVKSDKAQAGDILYHCAESLRLAAVMLSPVMPSKTKDILDILGTNDVELVWGKLKSGSKISTSEPIFPRIS

SEQ ID NO: 158917 - protein, 394 aa, Unknown
  Bacterial polypetide isolated from the Sargasso Sea
GIRVPSNENHTIYVWLDALTNYLSALNYPDTKNNLYKNFWPASLHLIGKDILRFHAVFWPAFLLAAKIDPPKRIYGHGWILSGDEKMSKSKGNILDPIDIIKEYGLDPLRYYLIKEVSFGNDGNISRDQLERCINSDLANNYGNLCQRVISFLDKNLNLEIPNNANFENEDHNILNKFDENYNNLINEIDNQNINYYINFVINQLFAANKYFNDQEPWNKKNDVKRLHTILYVSLELIRKISILLYPVIPESALKVLSIFNVKETELTYISIKNNNFLKPKTKIKKIEILFKKIEKKKLIDSHCHLDHEPLFADLDNVIIRAKNIGVKKFLTICTNKKSYKNIITFIDKYPEVYGTFGIHPHNTENELLTKNEIIEKVKINKKFIGVGESGLDF

SEQ ID NO: 158918 - protein, 216 aa, Unknown
  Bacterial polypetide isolated from the Sargasso Sea
MDKNFFITTPIYYPSAKPHMGHAYSSIISDVIARFKRLDGYNVEFLTGTDEHGLKIQRAAEAKGVDTKDFCDEISKTFRNLSDLLNLTNTDFIRTTEERHIKSVQNLWNTLLKNNQIYLSKYSGWYSVSDEAFYNENEIKEENGIYISINSGSKVEWVEEESYFFKLSEWENKLLNFYEKNPKFILPNSRRNEVIQFVKSGLKDLSVSRKSFSWGI

SEQ ID NO: 158919 - protein, 68 aa, Unknown
  Bacterial polypetide isolated from the Sargasso Sea
MNNSFYISTPIYYVNDKPHIGHAYTTILADVIARFYRQLNYDTFFLTGLDEHGQKVQEAASNRKVEPQ

SEQ ID NO: 158920 - protein, 245 aa, Unknown
  Bacterial polypetide isolated from the Sargasso Sea
HAVYWPAFLLAAGLEPPERVFAHGWWTNEGQKISKSLGNVIDPIELVEKYGLDQVRYFLLREVPFGNDGDFSKSSMINRINSDLSNDLGNLCQRVLSFVQKNCDARIPQNNGFSIDDERLIAQVYGVLPSLRADFNSQSFNVALERIWSIVSSSNKYIDEQAPWKLRKTEPERMQTVLFTLLETIRCIGILLQPVMPASANGILNQLAIDPSDRSFSALNEEHCLQSGAKLQQPNPIFPRFDEKT

SEQ ID NO: 158921 - protein, 162 aa, Unknown
  Bacterial polypetide isolated from the Sargasso Sea
VVNMPSRCAGFLRKKFDNRMDKECAEPELVQSFIDAGDSIAGLYETREFNRAMREIITLADRANQYIDEKKPWVMAKDDALVDEVQAVCSVGINLFRVLATYLKPVLPAMAEKSETFLQHSLDWTALSAPLVDHQLATFEALLQRVDADVVAAMVEASKSGL

SEQ ID NO: 158922 - protein, 264 aa, Unknown
  Bacterial polypetide isolated from the Sargasso Sea
KDELYKNFWPADVHIIGKDILRFHAIYWPAFLMAAKLPLPKRVYGHGWILSGDEKMSKSKGNILDPLEIIDVYGLDTLRYYLLKEVSFGNDGNISQEKLESCINSDLANNYGNLCQRVLTFCEKNCGSKIPTSDFINDDLEILKNFENLAYLRDLIDNQNINDYMKFIIDMLFSSNKYFNDQEPWKKKNDKNRLNTIVYTALDLIRKISILLNPVIPDTTLKVLKIFDINNDKLKFEDINNHKFLESGKNIGKLNILFKKIEND

SEQ ID NO: 158923 - protein, 220 aa, Unknown
  Bacterial polypetide isolated from the Sargasso Sea
MIDTNFIKDNPKLVFDKLRLRNYNFNLDLFESTEANRKKYQTETEDLQARRNILSKEYGMLKKEGKDDPALSKKIESIKADLDECSSQLNHIQLTLNEFLLDVPNLPDDSVPKGENEENNVKIREHGEPSILKGKDHLEITSMIDTDAANFLAGSRFAVLRGDIAKLQRALITFMLDKASEHGYTEHYLPMVANTESLTSTGQLPKFSEDLFQLTEDYYL

SEQ ID NO: 158924 - protein, 198 aa, Unknown
  Bacterial polypetide isolated from the Sargasso Sea
MAPILFLRVFLPFALGYFISYFFRNVNAIIEADLVGDLGFSAASLGLLTSVYFISFASFQLPLGLLLDRFGPRRTESVLLIFAALGALIFSMAESLSGLILGRLLIGFGVSACLMASFKAYVLWFPPYRLPLMNGLQMVAGGLGAMSATVPLRTALEFTDWRGVFLILSGLTLLSALVLWLVYPEKEGSAGPVPMKKQ

SEQ ID NO: 158925 - protein, 218 aa, Unknown
  Bacterial polypetide isolated from the Sargasso Sea
MHSVKFIRENLELYKKKFLERNIKVNFIELLDLDKKIREFIQKKEKLEQEKKIISKNKDKRQFESSKKISNDIEILELKLTGLKKDINRILGFLPNIALDDVPVGKDESSNKIIGSFGKIPKFNFDIKTHYEIGQNLELMDFDLATKVSGTRFVFLKGKLAELERAISNFMIDTHIRHFGYKEISPPLIVSEETMYGTGQLPKFENDQFEIKLDNTKD

SEQ ID NO: 158926 - protein, 58 aa, Unknown
  Bacterial polypetide isolated from the Sargasso Sea
MKTKYRNNKDNDFIGTLNGSGLATGRLMISLMENYQNSDGSITIPDPLKKYMDNKDKI

SEQ ID NO: 158927 - protein, 267 aa, Unknown
  Bacterial polypetide isolated from the Sargasso Sea
MVIYGSSYEELEKIQKEVIKKVRSNKNLSRIESDYNRNKPEVKLIVNKNKAKDLGVSTKSIGETLETLYGGKKITTFNKLGKEYPIIVQQYLSDRRNKEGISKIFVRSETSGKLISLSNLVSFKEEGSAKELARYNRQRAVTISANINEDYTLTEAIKFFEDVMVNLAPNNQITWKGKSEEIKETSNELFIIFALALITAYLVMAATFNSFIHPFIIILTVPLAIFGGLVFILFLNSSVNIFSQIALIILIGISTKNSILIVDYANQ

SEQ ID NO: 158928 - protein, 314 aa, Unknown
  Bacterial polypetide isolated from the Sargasso Sea
NLLNQNLHKPLTSIPDPFKKYKSFGDHNNEMLKKFLDRFKFKYNFKSSTNLYTSGFFNSSLQKILENYQEIMNIILPTLGKERQKTYSPFLPICPESGIVLEIPVLEIFKEKSKILFDNNGKKLEVSILDGKCKLQWKVDWAMRWYALDVDFEMYGKDLIESAILSSKIIKLLGKNNPSGFAYELFLDEKGEKISKSKGNGITIEQWLEYASPESLSLFMYQNPKRAKKLYKEIVPKAVDEYLDFIQKSKSQNELQILLNPAWHVHNGKIPKEELIMSFSMLLNLVEASNADSKELLWKFVKKYKKNIIENEFP

SEQ ID NO: 158929 - protein, 216 aa, Unknown
  Bacterial polypetide isolated from the Sargasso Sea
MHNIKDIRDNIDNFIKLISKRNVKIDKNNIIDLDKNNRKLIQEKEKLEKEKKDISKSKDKTLYEKSKKISLEIEKISKLQSDTKKKLDDIFSSIPNVPLSDVPEGKDESSNVEIEKKGTIKNFTFKPKSHYELGNNLNMLDFDLATKTTGSRFVFIKNKFALLERALSNFMLDNHINKNGYTEISPPLMASESTMYGTGQLPKFETDQFEVKLDDK

SEQ ID NO: 158930 - protein, 179 aa, Unknown
  Bacterial polypetide isolated from the Sargasso Sea
MLDPQLLRRDLEGVTSALAKRGFALNTETFAALEKERRKVQTETEELRSERNKRSRLIGVAKQQGEDIASLKEAVSGLGERLRRLEARLVKVSLDLENFSLLIPNLPDESVPQGNSELENEEIRYWGSPREFNFEIRDHVELGQKLNGIDFDTASRLSGSRFVVLKGAVARLHRALTQF

SEQ ID NO: 158931 - protein, 135 aa, Unknown
  Bacterial polypetide isolated from the Sargasso Sea
MAPLLFLRVFLPFALGYFISYFFRNVNAIIEADLVGDLGFSAASLGLLTSVYFISFASFQLPLGLLLDRFGPRRTESVLLIFAALGALIFSMAESLSGLILGRLFIGFGVSACLMASFKAYVLWFPPDRLPLMNG

SEQ ID NO: 158932 - protein, 110 aa, Unknown
  Bacterial polypetide isolated from the Sargasso Sea
ELKLDFRILNLCAGDLGFTSSITYDFEVFSKGQEKWLEISSVSNFKTYQSNRLNLKFKDKDGKKYTLHTLNGSSLALPRVMAGLIENNQSENGIIIPDVLVPYTGFDIIN

SEQ ID NO: 158933 - protein, 269 aa, Unknown
  Bacterial polypetide isolated from the Sargasso Sea
MFRENADAIRADHDRRGIPHDSIDEVIRLDEEWRRTQYDVDQLRRKRNEAARGIADAKKSGDEDAAKAIMDEVATIGSQIDELTAHSEECLATRDTLRMSIPNILHEDVPVGEDDQKNTLHSLHGEKAELAFEPRNHNELIEMNGWVDQARGAKVAGSRFYFMQGDLARMEMALQQYGADFLMERGYTLVQPPLMMNREAYEGVTDLSDFETVMYGIEPDKYYLIATSEHPLTAMRMDEVIEPSELPIKMVGVSPCFRREVGAHGLSDR

SEQ ID NO: 158934 - protein, 32 aa, Unknown
  Bacterial polypetide isolated from the Sargasso Sea
ENYQQSDGSVIIPKVLRPYMGGMEVVSPAVDA

SEQ ID NO: 158935 - protein, 170 aa, Unknown
  Bacterial polypetide isolated from the Sargasso Sea
MHNLKDIRNNTEFFKKKIKDRNVSVNFKELLKLDINNRDLIKQKEKLEQEKKILSKNKDPKNFKKSKDLSNNIKKFEEKQKILQKKINIIISSIPNVALDDVPIGVDEKSNIIIKKNGLVKEFKFKIKSHDILGKNLMDFEIGSKLSGSRFVVLKDNLALLERALINFML

SEQ ID NO: 158936 - protein, 48 aa, Unknown
  Bacterial polypetide isolated from the Sargasso Sea
MELLMGSGLAVGRTLIAILENYQTEDGSIIIPDVLKPYMGNIDKISIN

SEQ ID NO: 158937 - protein, 120 aa, Unknown
  Bacterial polypetide isolated from the Sargasso Sea
MAPVLFLRVFLPFALGYFISYFFRNVNAIIEADLVGDLGFSAASLGLLTSVYFISFASFQLPLGLLLDRFGPRRTESMLLIFAALGALIFSMAESLSGLILGRLLIGFGVSACLMASFKA

SEQ ID NO: 158938 - protein, 74 aa, Unknown
  Bacterial polypetide isolated from the Sargasso Sea
EISSCSSCGQFQSRRMKAKFKDTKNKSDFLGTLNGSGLAVGRTLIAIMENYQNSDGSITIPDALSPYMRNLKKI

SEQ ID NO: 158939 - protein, 236 aa, Unknown
  Bacterial polypetide isolated from the Sargasso Sea
MISIKKLRTDFQNIEKALRSKGYEDSINDIISLDENFRKSTHSLEQLRAKKNTVSEQVAKAKRNGEEAAEKINEMRDLGDQIKILENESNRFKLNLTSLLEQIPNLPHKSVPIGTDENDNVIIREWGKKKIFDFNEKTHLELSKSLKLLDLERGAKISGSGFPLYVGKGAELERRLINCMIEHHVREYNFTEMFPPVLMLEQSMKTTGQLPKFKEDMYLTDLDQLYLAPTAEVPIT

SEQ ID NO: 158940 - protein, 75 aa, Unknown
  Bacterial polypetide isolated from the Sargasso Sea
LEVSSCSNFESFQARRGNIRFRDSDNNVKFLHTLNGSGVATPRLMVALIETYQNQNGTISFPEKVAEFLGIKEIT

SEQ ID NO: 158941 - protein, 221 aa, Unknown
  Bacterial polypetide isolated from the Sargasso Sea
MHNIRFIRKNSELFIKKIKTRNVDLDYKIISDLDEKNRKLITDKENLERDKKEISKKKDKTLFQKSKEISIEIENLTKKQSEIQNELNKILSNLPNLPHEDVPIGKDEGSNKVVNTVGTIRNFDFKVKSHFELGEKLNMLDFDLATKTTGSRFVFIKNDLAMLERAISNFMIDLHTKHNGYVEVSPPLIASSDSMYGTGQLPKFENDQFELKLDDSNERKF

SEQ ID NO: 158942 - protein, 192 aa, Unknown
  Bacterial polypetide isolated from the Sargasso Sea
QSALSLHGDLKQRDRDQTLVRFANGSSRVLVATDVAARGLDIKSLELVVNYELAWDPEVHVHRIGRTARAGESGLAISLCAPEEAQRANILAEMLQLKLNWVSAPTNGNVKPLHAEMATLCIDGGKKAKMRAGDVLGALTGDMGFDGADIGKINVHPAHVYVAIRQSVAQKAYKQLQNGKIKGKNCRVRLLK

SEQ ID NO: 158943 - protein, 183 aa, Unknown
  Bacterial polypetide isolated from the Sargasso Sea
MLDPQLLRTEAESVAERLTVKKYILDVDQLRSLEEQRKGLQSGLQDLQAERNRSAKEVGQRKAAGEDVSDLIEQTSGLSGKISAIENDLEGVRSALDELMYGIPNIPHESVPVGDSDTDNEEVRRWGDPTAFAFEPGDHVSLGSGLGMMDFELAAKDHRQPVCRHVRRNRSASSGTGSIHAGS

SEQ ID NO: 158944 - protein, 57 aa, Unknown
  Bacterial polypetide isolated from the Sargasso Sea
IRFKNSDGNTDFIHTLNGSGLATPRIFAAFIETHQREDGSIRIPKSLQPYMEISEIK

SEQ ID NO: 158945 - protein, 221 aa, Unknown
  Bacterial polypetide isolated from the Sargasso Sea
MFDIKLIRDDPAAFDAALARRFMEPQSSRILKLDAKRREVVAAMQDAQSRRNAASKQIGAAKGKGDDETANALMAQVAELKTKIQDGEEEERQLDAALKDILSGLPNLPHEDVPLGADEEANVERHKVGEPRQFNFEPREHFDIGEALGLMDFETAAKLSGSRFVILRKNLARLERAIGNFMLDLHTTKFGYQEIAPPLLVKDDAMFGTNQLPKLPRKPSI

SEQ ID NO: 158946 - protein, 236 aa, Unknown
  Bacterial polypetide isolated from the Sargasso Sea
MISIDLIRTNPQLVIDALANRGESNSLEDILSLDESRRKNIIENDELKRHRNEVSKSIGERRANGQDIDPSEMEVMKTVGEKISSLDNDIKELETTINDLLSRIPNLPDTQVPIGKDENDNPITRQHGEIPQYSFDLEPHWDIGERLDIIDLPRGAKLSGSRFYSLKGLGSKLERALIAWMLDYHTDKHGYTEVSVPYMVRQDIIFGSGNLPKFGDNLYHDDEDDLWLIPTAEVQL

SEQ ID NO: 158947 - protein, 176 aa, Unknown
  Bacterial polypetide isolated from the Sargasso Sea
LNIALVHGKMKADEKQAVMQQFKANELQLLIATTVIEVGVDVPNASIMVIENAERLGLSQLHQLRGRVGRGAKASFCALLYKSPLSQNGQERLRIMRETNDGFLIAEKDLEIRGPGELLGTKQTGDMGFRVAKLERDDHLLNQAHFVAAQILKDYPKNAEALLKRWLPEAPRYAYV

SEQ ID NO: 158948 - protein, 125 aa, Unknown
  Bacterial polypetide isolated from the Sargasso Sea
ESLLEDAEKVLQSLGLHYRVIELCTGDLSFSAAKCYDIEVWSPYENKYLEVSSCSNFESFQANRGSIRFRSSKTGKMEFVHTLNGSGVATPRLLVALIENYQQKDGTIQLPKALQRYMNISAIKD

SEQ ID NO: 158949 - protein, 298 aa, Unknown
  Bacterial polypetide isolated from the Sargasso Sea
RAGCSWWVIFFKLIRLGQKFAVSTTSDYGGGSFTGFNGTTAGEGPIIDIQRSRGTTTVGTAVATNDRLGSIVFRGDDGTDFADAAYILGEVDGTPSGGFVPGRLTFYTGTGSAAPTERMRIHSSGYLTLDGNSNTSGIQLKANGTVAGYVAPAGFLGGSDSDLGFRSEAGSNYVFYVGTGEKMRLDSSGRLGLGFSSPARALSVHATGTDSVTGYLQSGVANVYLQLGNSVDGNGYIGYQSTSLTFYTNNDLKMLIDNNGNLGLGTSSLSNSSGYNTMTLGDGSSTGGQIVLKNSSNH

SEQ ID NO: 158950 - protein, 404 aa, Unknown
  Bacterial polypetide isolated from the Sargasso Sea
MAWKAAIDFKYVRDNAAAVQSNAKVRNVDVNVQEIIEKYEALNALNFKCDEIREKRNANAKSMKGKMEKEVRDKLIAEGKALKDELAVIEVDVVALESELQTMAQRLPNLTHPDVPIGSEENTVTIAAVGEKRAFTFPVQNHVDVGEKLGMFDFETGSKVSGSRFVYLTGVGAMLELALINWAFAKVVSKGFKPMMVPDMVRSSVVEKCGFQPRAENTQVYSIENSELCMAGTAELLLGGVYMDEVVEESQLPIKMAAFSHCFRTEAGAAGAQTRGMYRLHQFSKVEMFVVATPEQSDALHDELINIEKEMFEELGFHFKVLDMPTEDLGAPAYRKFDIEAWMPALERYGEISSASNCTDYQARRLNIKYRPNAVDGKKQPLVHCHTLNATACAIPRMIVTILE

SEQ ID NO: 158951 - protein, 343 aa, Unknown
  Bacterial polypetide isolated from the Sargasso Sea
MLDIKLIRSEPELIAENCRKRNVSVDIDKLLKLDEKVRQTTTEVDSFRQIRNDISNKMKGNLSAEERQPLIEESKQLRDQEGEKESFLRELTDQRLDLLKQVPNLTHPDSPEGLTDEENQPIRKVGEIPEFDFQPKDHVELMESLDLIDFDGGAKVSGQKFYFLKNQAVFLELALANYALNLLQKEGFTVHMTPDLARNQILDGIGFSPRGTETQIYSVEDSDLCLIATAEITLGGLLSDQVLDPERLPIMYAGFSHCYRTEAGAAGRESRGLFRVHQFSKVEMFAFTHPDQSEVMHQKMLTIEEQIYQNLGIPYQVVNICCGDLGGAAYRKYDLEAWMPGRG

SEQ ID NO: 158952 - protein, 613 aa, Unknown
  Bacterial polypetide isolated from the Sargasso Sea
MDSAFDRAYAAHRAGRLAEAEHGYRNALASNPADADALHLFGVLRHQQGQHAEAADLVGRAVALRPGDAALQLNLGNALKALGRLDEAVDRFRNALTLAPEFPLAHYNLGNAYAALQRHDDAIDAFGRALRLTPDDASIHNNLGNALNALGRHDDALAAFHRALELRPGHAGAHNNLAMALNAMGRADDAIAHFQAAIAAQPGFVAAHFNLGNTFDAVGRHAEAAAAFEAALALHPSFPLALFGLANALGAQGRHRDALPYYERAVGLDPSFSLAWLNLGNAHHALGAHEMALRAFDQALRVAPDLTLARLHRAVTLLTLGDFTRGLPAYEARHDTPGATPLGTLPRWQGEPIASRTLLIRAEQGFGDTLQFVRFVPLARARCARVVLEVQPELVTLLAPAAARWRVTLVALGAAKPPAADVACTLMSLPFLLGLQTQEDIVAGARYLDVPDGAGRRFRGSLGGRSKRKFGLAWSGRRQAQENRSMPFDALAPLLALPGIDWIVLQPALDDDERARVDAHPRVHRLDGRLNDFADTAALIDRLDGVVTIDTAVAHLAGALGKPLWVMLPFAPDWRWFTGDDCPWYPQARLARQPAPGEWHDVAAAVAGMLREA

SEQ ID NO: 158953 - protein, 193 aa, Unknown
  Bacterial polypetide isolated from the Sargasso Sea
MHNLKEIRKNIALFEKKIKERNSTVDLKSLIKHDKENRELIQRKEKLEQEKKLLSKKKDPNNFDKSKNLTNQITELENSQKEIQGKIHTILSSVPNLALDDVPVGNDEKSNKIIKKSTEIKKFNFKVKSHIELSKNYMDFETATKLSGSRFVVLKDKLALLERALINFMIDIHTKKFGYVEISPPLIVNEKIM

SEQ ID NO: 158954 - protein, 363 aa, Unknown
  Bacterial polypetide isolated from the Sargasso Sea
MLNNITSVAPARICLYGDHQDYLNLPIIAIAIDRYIKVEAIPNLAESFYINKIDIKKKDIIDYNLDYNYKGKAEFLRISLNVLKRYGCIPNRGYDISISSNIPINSGLSSSSALTVAWIQFLLKSFLPEEKIEYKTLAELAYQTEVVETGSSGGNMDQYTISHGGTIFLNTLNSNIHSYKYNFSDVDLVVGVSAAGKDTRGMLKKLKSNQILALETIKNFAPEFDLYDKDSYDYNSCYDSLDQNLKPYFKAAIKNFDITKAADNELRKDNPDMKILGSLMTDHHNLLKDELKNTTDEIDKMIDICNSMGAYGSKIVGSGGGGSIVAIFDKNISESVVSKLKENGAKDAFIASQSNGPEIKANE

SEQ ID NO: 158955 - protein, 510 aa, Unknown
  Bacterial polypetide isolated from the Sargasso Sea
WPFVEAKKILRERKKNIEDKGKIVLQTGYGPSGLPHIGTFGEVARTSMLVNALNHLTDVPKEIITFSDDMDGLRKIPENIPNSEKLQENLHKPLTQVPDPFEKFSSFGEHNNEMLKKFLNNFKFKYTFKSSTELYKSGFFNPTLKLILENYQGVMDIIIPTLGKERQKTYSPFLPICPDTGYVLEIPIIEIDTKNSKIVFDNNGKKLEQSILDGNCKLQWKVDWAMRWYALDVDFEMYGKDLIESAILSTKIIRLLGKSNPSGFAYELFLDEKGEKISKSKGNGITIDQWLEYASPESLSLYMYQNPKRAKKLYNEVVPKAVDEYLDFIEKGKSQNELQKLMNPVWHVHNGKIPNENHIMSFSMLLNLVETSNADSKELLWKFVKKYKKDILESSYPIFDNLIEYAIKYFNDVIKSKKVYKKPNENEKAALDALIVVLDKCNDSMKPEDIQTNIYTVGKENGYKENLRDWFKLIYEVVFGDENGPRMGFFISFFGVKETKELIKNKLRNV

SEQ ID NO: 158956 - protein, 432 aa, Unknown
  Bacterial polypetide isolated from the Sargasso Sea
MLDLKLIRSQSETIAENCKNRNLDLDIPELLRLDEEVRAMNTQLDTIRQQRNEISKTMKQPLSQEERQPLIESSKSLRDEESKLEENFRELKEKRDDLHRMIPNLTHPDSPIGLTDEDNLPLREVGKVPEFEFEPKDHVDLMESLDLVDFEGGAKVAGQKFYYLKNQAVFLELALANYALNLLREEGFTPFMTPDLARNQILDGIGFNPRGEETQIYSVENSELSLIATAEITLGGLLANQIIDADQLPLLYAGLSHCYRTEAGAAGRESRGLYRVHQFSKIEMFAFTHPDRSEEMHERMREIEERIYQDLEIPFRVVDICTGDLGSPAYRKYDLEAWMPGRGKWGEITSTSNCSDYQSRRLNIRFKDKQTGNNRFVHMLNGTAIAVSRALIALIENGQRADGSIKLPSCLGIPDIPAPRLNTSCFPLRRSE

SEQ ID NO: 158957 - protein, 370 aa, Unknown
  Bacterial polypetide isolated from the Sargasso Sea
SDGVHPGYGFLSENPDFAEKVEKSGFDFVGPSASVIRMMGNKVSAKEFALKSGLPIVPGSSGAVDENVHEEAEKLGYPVIIKAASGGGGRGMKIVYSPEELDSAIELTQQESAVAFGDSTVYLEKFLENPRHIEVQVLADRHGNIIHLGDRDCSLQRRHQKVIEEAPAPGIKEEKRQEIYEQCIEACRQLDYVSAGTFEFLYENDNFYFIEMNTRIQVEHPVTESVTGIDLVKLQLRIARDEEIKIKQEDIILKGHAIECRINAENSETFLPSPGKILEYHAPGGIGVRMDSHLYKDYVVPPYYDSLIAKVICRANDREDARARLERALDEMYVLGIDTNLEMHRKLINDPNFINGTFNINYLENLNKEN

SEQ ID NO: 158958 - protein, 200 aa, Unknown
  Bacterial polypetide isolated from the Sargasso Sea
MHDIKKIRENPSDLDELLAKRKHPPVSNQIIELDEKNRKIIGELQVIQEERNTKSKLIGEYAANGKNDEAAKLKAEVASLKDKMQDLENSQREKQEELNTVLSSLPNNPADDVPVGDESLNKEIKLEGTKKEFSFTPKEHDELGENLNMMSFEQAAKISGSRFVVQSGLIARMERAISNFMLDLHTNEFGYIEMNVPILV

SEQ ID NO: 158959 - protein, 507 aa, Unknown
  Bacterial polypetide isolated from the Sargasso Sea
VEAKKILKERKKNIENKGKIVLQTGYGPSGLPHIGTFAEVARTSMIVNALNQLTEIPKQIITFSDDMDGLRKIPENIPNPEKLEINLHKPLTQVPDPFEKYNSFGEHNNEMLKKFLNNFNFNYTFKSSTTLYKSGFFNSTLNLILENYQGIMDIIIPTLGKERQKTYSPFLPICLETGHVLEIPVIEIDKKNSKIVFDNNGKKLEQSILDGNCKLQWKVDWAMRWYALDVDFEMYGKDLIESAILSTKIIKLLGKPNPSGFAYELFLDERGEKISKSKGNGITIDEWLEYASPESLSLYMYQNPKRAKKLYREVVPKAVDEYLDFIEKSKTQNELQKLMNPVWHVHNGKIPEENSIMSFSMLLNLVETSNADSKELLWKFVKKYKDNISQSNQTIFDNLIKYAIKYFNDVIKSKKVYKKPNEKEKVALNALVQALDNCNDKMKPEDIQTNIYTVGKENGYKENLREWFKLIYEVVFGDENGPRMGFFISFFGVKETKELIENKLRDV

SEQ ID NO: 158960 - protein, 179 aa, Unknown
  Bacterial polypetide isolated from the Sargasso Sea
MVPERLPIMYAGFSHCYRTEAGAAGRESRGLFRVHQFSKIEMFAFTHPDQSEEMHQKMLAIEEQIYQDLGIPYQVVNICSGDLGGPAYSKYDLEAWMPGRGKWGEVTSTSNCTDYQSRRMNIRFKDSETGKNRFVHMLNGTAIAVSRTLIALIENGQQKDGSIKLPSCLNLPDIPAPNN

SEQ ID NO: 158961 - protein, 287 aa, Unknown
  Bacterial polypetide isolated from the Sargasso Sea
MHDIKYIRNNFSEFKKQVNNRNTEVNLDKILELDTKNRSLIQEKEKLESEKKTLSKQNDKSLFAKSKDLSKKIDKISEDQLNESKKLNQILSQIPNIALEDVPVGKDEKSNKEIKKSGNIPNFKFKPKSHYELGENLDMLDFELATKTTGSRFVFVKDKLAQLERAISNFMIDTHINENGYKEISPPLFASENSMFGTGQMPKFEDDQFEIKLDNKSGRKFLIPTAEVILTNMVNDTILNHSDLPLRFVASTPCFRKEAGSYGKDTKGMIRQHQFYKVELVSIVDPS

SEQ ID NO: 158962 - protein, 119 aa, Unknown
  Bacterial polypetide isolated from the Sargasso Sea
LSVEEEILQELEIPYRVVDVCTGDLGSSAAKKFDIEAWIPSQNTYREVTSCSNTTDFQARRLNIRTKVEKDTALLHTLNGTAIAVGRILIALLENNQTEDGGVEFSDSLGNILGIEKLS

SEQ ID NO: 158963 - protein, 232 aa, Unknown
  Bacterial polypetide isolated from the Sargasso Sea
KRRGYVFDESLWNELEEKRKKLQGFTEEQQSELNDLSKAIGIGKKNSEDTSLIQNQATKLTAQIKELSAELESLLEEIDNFVLSIPNLIDEDVPDGADETENIEIRKEGKPRAFAFTVKDHLEIGRNHEIDMEAGVRITGSRFKVLRSDIAHLQRALINFMIDTHVDEHGYEEVYVPYIVNKDSLLGTGQLPKFEEDLFKINNESNFYLTSTAEVPVTNLFRDEILESKNLP

SEQ ID NO: 158964 - protein, 48 aa, Unknown
  Bacterial polypetide isolated from the Sargasso Sea
NNQGSKPKFLHTLNGSGLAIPRVMIAIMENYQEEDGSIVVPEVLRPYT

SEQ ID NO: 158965 - protein, 229 aa, Unknown
  Bacterial polypetide isolated from the Sargasso Sea
MHNIKDLRNNFEEFNNLIKTRNVKINIDEIRDLDQDNRKLIQEKENLEKEKKEISKKQDKSLFEKSKKISVEIESLNEKQIIIKRKLNLILSSIPNLPLKDVPVGKDENSNKEIKKSGEIKKFNFKPKSHYEIGENLKMLDFNLATKTTGSRFVFVKGKLAQLERAISNYMIDTHTNLNGYKEISPPLMASDETMYGTGQLPKFENDQFEIKIDEKNSRKFLIPTAEVI

SEQ ID NO: 158966 - protein, 202 aa, Unknown
  Bacterial polypetide isolated from the Sargasso Sea
MHNLKDIRKNLEHFKKKLNNRNTDINFDILIKLDKENRDFIQKKEILEQEKKSLSKTRKEENFKKSKKISQELDKIIDKQLSVQEKINNLLASLPNLPLDEVPEGIDEKSNKVIRKEGEIKNFNFSIKSHFELGEKNNQIDFRTSTKLSGSRFVVLKDKIALLERALINFMIDTHTQKFEYTEISPPLLVNEKIMFGTGQLP

SEQ ID NO: 158967 - protein, 41 aa, Unknown
  Bacterial polypetide isolated from the Sargasso Sea
LSAFHRNDIIDFKQLPLKYVAYSPCFRREAGSYGRDTKGLI

SEQ ID NO: 158968 - protein, 248 aa, Unknown
  Bacterial polypetide isolated from the Sargasso Sea
RNNFENFKKLLKNRNVQFDLDLILNLDEKNRDLIEKKEKLEKEKKDISKSKDKSLFAKSKELSVKIEDLLKKQVQTQDELDDILSSLPNLPLDDVPIGEGESSNKEINKFGNLPKFDFKPKSHTELGNNLNMLDFDLATKTTGSRFVFVKDKLALLERALSNFMLDIHTKVNGYKEISPPLIASDNTMFGTGQLPKFENDQFEIKFDDKGRKFLIPTAEVILTNMVKNQILSVNDLPIRNWLHQHQLR

SEQ ID NO: 158969 - protein, 44 aa, Unknown
  Bacterial polypetide isolated from the Sargasso Sea
NGSGLAVGRTLIAILENYQNSDGSITIPDALKPYMNNLEKISNI

SEQ ID NO: 158970 - protein, 169 aa, Unknown
  Bacterial polypetide isolated from the Sargasso Sea
AGLSHCYRTEAGAAGRESRGLYRVHQFSKIEMFAFTHPDRSEEMHERMREIEERIYQDLEIPFRVVDICTGDLGSPAYRKYDLEAWMPGRGKWGEITSTSNCTDYQSRRLNIRFKDKQTGNNRFVHMLNGTAIAVSRTLIALIENGQRADGSIRLPSCLGIPDIPAPGA

SEQ ID NO: 158971 - protein, 256 aa, Unknown
  Bacterial polypetide isolated from the Sargasso Sea
MHNIKDIRQNPDQFIENIKNRFVNIDLKKILELDENNRKLIQKKESLEKEKKEISKKKDKSLFEKSKEISEKISKYTNEQTVIKNELESILSSIPNIALKDVPIGKDESFNKEVFKKGEIPKFSFKPKSHYELGEDLKMLDFDLATKTTGSRFVFVKDKLAQLERAITNFMLDTHIKNNGYKEISPPLMASDTTMFGTGQLPKFENDQFEIKFDASSGRKFLIPTAEVILTNMVKEQIVNHKDLPMRFVASTPCFR

SEQ ID NO: 158972 - protein, 270 aa, Unknown
  Bacterial polypetide isolated from the Sargasso Sea
MFRENADAIRADHDRRGIPHDSIDEVIRLDEEWRKAQYDVDQLRRRRNEAARGIADAKKSGDEDAAKAIMDEVSTIGSQIDELTAHSEECLATRDSLRMSIPNILHEDVPVGEDDQKNTLHSLHGEKGELSFEPKNHNELIEMNGWVDQARGAKVAGSRFYFLQGDLARMEMALQQYGADFLMDRGYTLVQPPLMMNREAYEGVTDLSDFETVMYGIEPDKYYLIATSEHPLTAMRMDEVIEPSELPIKMVGVSPCFRREVGAHGLSDRG

SEQ ID NO: 158973 - protein, 189 aa, Unknown
  Bacterial polypetide isolated from the Sargasso Sea
QKKENLEKEKKDISKSKDESLFKKSKELSTELEKIAEQQKITKIELDKILSIIPNIPHQDVPNGKDENDNVEVLKAGKLPEFDFKPKSHYELGENLGMLDFDLATKTTGSRFVFVKKELALLERALSNFMLDTHIIKNGYQEISPPLIASDNTMYGTGQLPKFENDQFEIKFDQGSDRKFLIPTAEVIL

SEQ ID NO: 158974 - protein, 232 aa, Unknown
  Bacterial polypetide isolated from the Sargasso Sea
NNDIKDLKEKSSEIKDKSKSTGEELKTIEKEIQNILVNIPNIPDSKVPEGNSENENIEILKNEVDIDENQKLKPHWELIKDFNLIDFENGNKITGAGFPIYTNKGAKLQRALINYFLDEAEKNGYIEIQPPILINEQSGFGTGQLPDKEGMMYKIEDENLFMIPTAEVPITNMYRKNIIENKDLPIKNVGYTPCFRKEAGSWGAHVRGLNRLHQFDKVEIVHIEKQENSEKA

SEQ ID NO: 158975 - protein, 257 aa, Unknown
  Bacterial polypetide isolated from the Sargasso Sea
SYIFGDLVKIEFNLVSYVLDKLSNNGFLPTVPPVLVRENALFGTGFFPDDAEQVYEIPNDDLYLVGTSEVSLAALHGEEILEHKSLPIRYAGFSTCFRREAGTYGKDTTGIFRVHQFDKVEMFSFCDSDNSKEEHEYLLSLEEEILQDLEIPYRVVDVCSGDLGASASKKFDIEAWIPSQNNYREVTSCSNTTDYQARRLNIRTKKEKEMELIHTLNGTALAVGRILIALIENNQQEDGSVKFSDSLSKIIGVESLS

SEQ ID NO: 158976 - protein, 189 aa, Unknown
  Bacterial polypetide isolated from the Sargasso Sea
MHNLKDIRKNLDFFKKKIKERNVEVNFENLINLDKQNRDLISNKEKLEHEKKLLSKTKDESNFKDSKKLTKDIEIIDTKQKELQKKIKSIVSSIPNIALDDVPIGKDEKSNKLIKNTGNIKKFDFKVKSHVEIGEKNKYLDFDSATKISGSRFVVLKDKFALLERALINFMLDIHTKKFNYIEISPPII

SEQ ID NO: 158977 - protein, 211 aa, Unknown
  Bacterial polypetide isolated from the Sargasso Sea
FPDDAEQVYEIPNDDLYLVGTSEVSLAALHGEEILEHKSLPIRYAGFSTCFRREAGTYGKDTTGIFRVHQFDKVEMFSFCDSDTSKEEHEYLLSLEEEILQDLEIPYRVVDVCSGDLGASASKKFDIEAWIPSQNNYREVTSCSNTTDYQARRLNIRTKKEKETALIHTLNGTALAVGRILIALIENNQQEDGSVKFSDSLSKIIGVESLS

SEQ ID NO: 158978 - protein, 256 aa, Unknown
  Bacterial polypetide isolated from the Sargasso Sea
MHNINYIRENPVKFDNFMKTRGEPPIADKIIEIDKEKRETQTILQNLLAERNSLSKIIGKLKSEKKDPVNEMTKVEDLKKELNTLKELETIKDDELKAILSRLPNIPDSTTPIGKNEEDNILYKDWGSKPSFDFEPKSHFDIGENLNLMNFETATKLSGSRFVILKGQMAKLERAIANYMLDKHTSTNGYVEMHVPYLVKEETLYGTGQLPKFAEDLFTAGENHWLIPTAEIPLTSLCSNEILNVNQLPKRVTSYT

SEQ ID NO: 158979 - protein, 106 aa, Unknown
  Bacterial polypetide isolated from the Sargasso Sea
FPYRVVDVCTGDLGSSAAKKFDIEAWIPSQNTYREVTSCSNTTDFQARRLNIRTKVDKDSALLHTLNGTAIAVGRILIALLENNQAEDGVEFSDNLGNILGVEKLS

SEQ ID NO: 158980 - protein, 220 aa, Unknown
  Bacterial polypetide isolated from the Sargasso Sea
MHNLKHIRQNPDFFKKKISQRNSKFNINDLLDLDEQNRKLIQKKEKLEQEKKIISKNKNKTQFEKSKNISKEIENLVNSQNLLQIKIDAILNSAPNIALDDVPVGENDKSNKDLKTYGKISKFNFKILSHFEIGKQMNLMDFDLATKTSGSRFVFLKGKLAELERAISNFMIDIHTKEFGYLEISPPLIASESTMFGTGQLPKFESDQFEIKLDNKQKKF

SEQ ID NO: 158981 - protein, 150 aa, Unknown
  Bacterial polypetide isolated from the Sargasso Sea
TTGIFRVHQFDKVEMFSFCDSENSKEEHEYLLSLEEEILQDLEIPYRVVDVCSGDLGASASKKFDIEAWIPSQNNYREVTSCSNTTDYQARRLNIRTKKEKETELIHTLNGTALAVGRILIALIENNQQEDGSVKFSNSLSKIIGVESLS

SEQ ID NO: 158982 - protein, 230 aa, Unknown
  Bacterial polypetide isolated from the Sargasso Sea
MLDSKLLRKETKEVISNLKRRGFEFDETLWTKLESKRKDLQGSTENQQAKLNELSKNIGIAKQNSEDTKDLEKMASELTATLKEQSNELDNLLEQIENFVLSIPNLIDHDVPDGEDETSNLELKKIGSPRVFDFPIKDHLDIGRSYEIDMEAGVKLTGSRFKVLRNDIAHLQRALINFMIDTHVQEHGYEEVYVPYIVNKESMIGTGQLPKFEEDLFKIDNKNDFYLTST

SEQ ID NO: 158983 - protein, 53 aa, Unknown
  Bacterial polypetide isolated from the Sargasso Sea
GKVELVHTLNGSGLAVAGTLVAILENYQDADGNIQIPSVLRPYLNGVSLLELG

SEQ ID NO: 158984 - protein, 219 aa, Unknown
  Bacterial polypetide isolated from the Sargasso Sea
MHNLKEIRKDFKTFKELIKNRNIDIDIENLKKLDELNRELIQKKESFEKEKKDISKSKDESLFKKSKKISIELDKIYEEQKKIKNELDDILSNIPNIPHKDVPNGIDENDNVQISKSGEIPVFDFEPKTHYDLGEKLAMLDFDLATKTTGSRFVFVKDKLALLERALSNFMLDKHIINNGYQEISPPLIASENTMFGTGQLPKFETDQFEIKFDEGSDR

SEQ ID NO: 158985 - protein, 189 aa, Unknown
  Bacterial polypetide isolated from the Sargasso Sea
MHNIKDLRKNIENYKKKFSERNFDFKINEFKKFDDENRKLIYEKEKLEQEKKILSKSKDKSNFEKSKKISEEISQLAMQQTLTQKKLNDLLYIMPNLALEDVPIGKDERSNKLISKNGRIKSFSFKTKSHAEIGLKNNQIDFDTSIKLSGSRFVVLKDKFALLERALINFMLDIHSKEFEYVEVSPPLI

SEQ ID NO: 158986 - protein, 240 aa, Unknown
  Bacterial polypetide isolated from the Sargasso Sea
IIRKDFDAFKKALEKRSIDIDYDKLKILDEQNREFIQRKEKLEKEKKDISKSKDKSLFSKSKEISLIIDDIIKKQKKIKLDLNKILSNIPNIPHIDVPNGKNENDNVEIIKSGKIPEFDFKPKSHYELGESLEMLDFDQATKTTGSRFVYVKDKLALLERAISNFMLDIHINKNGYLEISPPLLASENTMFGTGQLPKFENDQFEVKLEDTNDRKFLIPTAEVILTNIVKDKIIDLKNLP

SEQ ID NO: 158987 - protein, 84 aa, Unknown
  Bacterial polypetide isolated from the Sargasso Sea
APGQGGYLEVSSVSNTEDFQARRMKTRFKAEQGGNQLPHILNGSGVALARLFVALIETHQQNDGSIKIPEPLQPYLRADTIPAA

SEQ ID NO: 158988 - protein, 86 aa, Unknown
  Bacterial polypetide isolated from the Sargasso Sea
DIEAWIPSENKYREISSCSSCGTFQSRRMNAKHRGQKGLEFVGTLNGSGLAVGRLLIALVENNQNEDGSISIPAPLKKYMNNLDKI

SEQ ID NO: 158989 - protein, 92 aa, Unknown
  Bacterial polypetide isolated from the Sargasso Sea
TYDIEVWLTSENKYREISSCSSCSTFQAIRMKSRYRDSKKEILYTGTLNGSGLAVGRTLIAIMENYQQKDGSIIIPKVLRPYMNDLEKISIN

SEQ ID NO: 158990 - protein, 208 aa, Unknown
  Bacterial polypetide isolated from the Sargasso Sea
MHDIKIIRKDSETFSKKLLERNIKFDLKNFLKLDEKNRKLIQEKEKLEQEKKIISQKRDEKQFKKSKDISLKIEELIKEQSEIKNKIDSILVSIPNIAQKDVPVGKDENSNKEINKFGQITKFKFNPLSHDEIGKKLKQMDFDTATKTSGARFVFLKDKLALLERAISNFMLDVHTREFGYKEISPPLIVSADTMFGTGQLPKLKLIS

SEQ ID NO: 158991 - protein, 251 aa, Unknown
  Bacterial polypetide isolated from the Sargasso Sea
MISIEEIRKNTSLVKKKLAKKGDKSSIDNLLELDKEYRSLITNANKLRSERNIVSKKIASLKKDRLSAKTEINQMKEVGESISNIEKESNKIKKLIDTILLNIPNLPHDSTPNGIGSKDNKLVREFGKLKKTDYKIKNHIELGRDLNLFDFDRAAKISGSGFPLYTNRGAKLERALINYMLDLHSLEFGYVEIFPPFLVNSKSPKTTGNLPKFSEDMYQIENDNLWLIPTAEVPITNIHKDEIISEKNLPI

SEQ ID NO: 158992 - protein, 280 aa, Unknown
  Bacterial polypetide isolated from the Sargasso Sea
MKKKKILLKKAADLSESFKSLSEKAEKQEKLFLDLWIKIPNIVDPSSPVGKTDQDNKEIKKVGEIKEYKSVKDHLEIGESLGLINVEKASEVSGSRFSYIFGDLVKIEFNLVSYVLDKLSNNGFLPTVPPVLVRENALFGTGFFPDDAEQVYEIPNDDLYLVGTSEVSLAALHGEEILEHKSLPIRYAGFSTCFRREAGTYGKDTTGIFRVHQFDKVEMFSFCDSDNSKEEHEYLLSLEEEILQDLEIPYRVVDVCSGDLGASASKKFDIEAWIPSQNNY

SEQ ID NO: 158993 - protein, 134 aa, Unknown
  Bacterial polypetide isolated from the Sargasso Sea
FVEPENSMDHLEKMVENARTLCDRLGLSSKLIQLSTGDIGFQSGITFDIEVWAAGSKEWLEVSSISNCFDFQTRRNNTRYKSNQSSPTSFPHTLNGSGLALPRIWVAIIENGQKADGSIEIPEVLVPYTGFEYI

SEQ ID NO: 158994 - protein, 252 aa, Unknown
  Bacterial polypetide isolated from the Sargasso Sea
MHNIKDIRNDFENFKERLKNRNIDINLDNILSLDEENRKLIQEKEKFEMEKKSISKSKDQSLFEKSKELSLKIEEINKNQIKLQNRITDILSSIPNIPLSDVPVGQNENSNKEIEKKGEIKEFNFVPKSHYELGDKLNMLDFDLATKTTGSRFVFVKKELAQLERAISNFMIDTHTQKNGYTEISPPLIATAETMFGTGQLPKFENDQFEIKLDEGDGRKFLIPTAEVILTNIVKNQILEKNELPIRVVAST

SEQ ID NO: 158995 - protein, 269 aa, Unknown
  Bacterial polypetide isolated from the Sargasso Sea
ADGRRRSAMHDAEEARAAQNAASKEIGQAEPSDRESKIAEASRLKAELEKLEEVEAAAVEEMRELALQIPNPAHESVPVGGEDDFVTEKEVGEQTPPRLHDHAELGELLGLVDSERAGRNSGSRFAYLMGPAVRLEFALVQFAFDILEEHSFVPVVPPVLVREEMMVDAGFFPTDRHQVYEIAGDDLFLIGTSEVALAGLHRGERLERDSLPVRYAGFSSCFRREAGTYGKDTRGIFRVHQFDKVEMFSFCDPEVSWDELEMLRSIQEQ

SEQ ID NO: 158996 - protein, 57 aa, Unknown
  Bacterial polypetide isolated from the Sargasso Sea
TRYKNNEKNTHVHTLNGSGLAVGRTLIAILENYQTEDGNIKIPDVLKKYFDYQDTLL

SEQ ID NO: 158997 - protein, 83 aa, Unknown
  Bacterial polypetide isolated from the Sargasso Sea
SEKKYREISSCSSCGTFQATRMKARYKNKSNETTFVGTLNGSGLAVGRTLIAVLENYQNSDGSVNIPDVLKPYMNNLDKISNN

SEQ ID NO: 158998 - protein, 165 aa, Unknown
  Bacterial polypetide isolated from the Sargasso Sea
MLDIKLLRSNPEDLRDRLAIKGYALDVNEFLSLDNQRRLAQEETESLQNERNVKSKSIGQAKSKGEDVDGLIKEVGDLGDRLEKAKTTLATVREKFDLILHGIPNIPDESVPAGDNELGNKEIKRFGEPLQFDFEPKDHVDLTSAGELDFERAAKITGSRYVVMR

SEQ ID NO: 158999 - protein, 251 aa, Unknown
  Bacterial polypetide isolated from the Sargasso Sea
KEIRKDFLKFEKNLEKRSVKIDFNNLKKLDELNRDLIQKKENLEKEKKDISKSKDESLFKKSKEISTELEKISEQQKKTKNELDNILSSIPNLPHQDVPNGKDENDNVEVLKAGKVPEFDFKPKSHYELGENLGMLDFDLATKTTGSRFVFVKKELALLERALSNFMLDTHIIQNNYQEISPPLIASENTMYGTGQLPKFENDQFEIKFDQGSDRKFLIPTAEVILTNIVKDKIVDQKDLPMRFVASTPWF

SEQ ID NO: 159000 - protein, 247 aa, Unknown
  Bacterial polypetide isolated from the Sargasso Sea
MHDIKYIRENFDIFKKKISKRNNATDIDKFPELDKKNRELIQEKEKLEQEKKIISKSKDEKMFIKSKDISSKIKKISDNQLKIKTELNNLLSSIPNIAHEDVPEGNDEKLNKIIEIKGEIKSKNFKIKSHYELGENLKMLDFDLATKTTGSRFVFVKDKLAMMERALSNFMLDVHTLENGYREISPPLIASESTMYGTGQLPKFENDQFEIKLDTDDGRKFLIPTAEVILTNIVKNQIIKSSELPLR

SEQ ID NO: 159001 - protein, 285 aa, Unknown
  Bacterial polypetide isolated from the Sargasso Sea
KEVEAALLKRMDEISFDELLAWDQRRRDIIPEIDGLRGKRNKVSAEIPALKKEGKDTIAVREEMREVSTRIKDLESTLTDVEASIREFLESLPNIPAADVPAGDKENNEVIRTFGEKPDLSGLAPKDHVDLATDLGLIDYERGVKMGGNGFVLYRGDGALLEWALLNYFVDEHVKDGYEFVLPPHLLIEECGFAAGQFPKFRDDVFHIRGDGDEPSKHFLLPTSETALINFHRGEIIPEAELPKKYFAYTPCYRKEAGSYRANERGMIRSHQFNKVEIFQFTRPQ

SEQ ID NO: 159002 - protein, 109 aa, Unknown
  Bacterial polypetide isolated from the Sargasso Sea
LEIPYRVVDVCTGDLGSSAAKKFDIEAWIPSQNTYREVTSCSNTTDFQARRLNIRTKVEKDTALLHTLNGTAIAVGRILIALLENNQTEDGGVKFSDSLGNILGVEKLS

SEQ ID NO: 159003 - protein, 178 aa, Unknown
  Bacterial polypetide isolated from the Sargasso Sea
RLYPRRGGLYRARSGTPDTQTRTEEKQARLFFLSKQIGGMKGRGEDTSALMAEVGGIGDEMKASAARLDDIQKRLSDLLLGVPNLAHESVPVGTDEAGNVEVRRWGTPRQFDFEVKDHVDIGTAAWPRLRNRREAVGCALHLAARPDCPAASRAGAVHDRHAHAAPRLHRGVHAVHRE

SEQ ID NO: 159004 - protein, 226 aa, Unknown
  Bacterial polypetide isolated from the Sargasso Sea
MLDIKKLRDSFEEVKVALKKRGFDIDQEKFQSLDKKRKVLQVDVENLQAEKNKLSSEFGKLKSAGESTDSLKETIDKKTLELNEKDSELKIILDKIESFLLRIPNISDDSVPEGKNEEDNVVVSTHGSIDSTNTLDHLEITGLIDVDLAVKLAGARFSVLKGDLAKLQRALITFMLDKATGHGYEEYYLPFMANRNSLIGTGQLPKFEEDLFKTKDKLYLIPTAEV

SEQ ID NO: 159005 - protein, 204 aa, Unknown
  Bacterial polypetide isolated from the Sargasso Sea
MLDPKVIRNELEVVAKRLKVKNFELDIEQLKEWEGARKDLQLDTEKLQNKRNSKSKLIGEAKSQGKDVSAILTDMENLKSSLDKKKNELSEIQSRLHEYLLNVPNIPDKEVPPGKDESDNEVISTWGSLPKYNFDVKDHSELGEQLEQGLDFAAAVTLSGSRFVVLEGRLAKLHRALSQFMLDVHTEEHGYLEFNLPLIVNNES

SEQ ID NO: 159006 - protein, 109 aa, Unknown
  Bacterial polypetide isolated from the Sargasso Sea
ITYRVVELCTGDLSFAAAKCYDIEIWSPGEQKWLEVSSCSNFEDFQARRGKIRYRKDEDKRVDLLHTLNGSGLATPRLMVSLLETFQTKNGTIEFSDSAAEFIGIKEIS

SEQ ID NO: 159007 - protein, 234 aa, Unknown
  Bacterial polypetide isolated from the Sargasso Sea
MDQRLLRENPELISQQLGRRGMTVDLTKLQLIAKQERDLEEQRSNLQAEGNRTGKEVGMLIKGGAAPDSDEVKALREKGNRIKQQVAVLEEEEKSLEVKLRDQLLALPNLPSAEAPDGKSEADNVEVKRWGEPRQGKDFEEHWQLADRLGLFETERSVRIAQSRFITLMGDGARLERALISFMLDLHSTKGYTEVMPPILVNSASLTGSGQLPKFAEESFRCADDDLWLTPTAE

SEQ ID NO: 159008 - protein, 239 aa, Unknown
  Bacterial polypetide isolated from the Sargasso Sea
MHNLKEIRKDFSKFEKDLEKRSVKIDFDNLKKLDELNRDLIQKKENLEKEKKDISKSKDESLFKKSKDISTELEKITEQQKNTKNELDTILSSIPNIPHQDVPNGEDENDNVEVLKAGKVPEFDFKPKSHHELGENLGMLDFDLATKTTGSRFVFVKKELALLERALSNFMLDTHIVQNGYQEISPPLIASDNTMYGTGQLPKFENDQFEIKFDEGSDRKFLIPTAEVILTNIVKDKIV

SEQ ID NO: 159009 - protein, 67 aa, Unknown
  Bacterial polypetide isolated from the Sargasso Sea
IDFQARRSSIRSKINKKNIYLHTLNGSGLAIGRTMAAILENGQQTDGSVKIPDALVPYFGSNFLKTS

SEQ ID NO: 159010 - protein, 289 aa, Unknown
  Bacterial polypetide isolated from the Sargasso Sea
MFRDNADAIRADHDRRGIPHDSIDEVIRLDEEWRKAQYDVDQLRRRRNEAARGIADAKKSGDEDAAKAIMDEVSTIGSQIDELTAHSEECLTTRDSLRMSIPNILHEDVPVGEDDQKNTLHSLHGEKAELPFEPRNHNELIEMNGWVDQARGAKVAGSRFYFLQGDLARMEMALQQYGADFLMERGYTLVQPPLMMNREAYEGVTDLSDFETVMYGIEPDKYYLIATSEHPLTAMRMDEVIEPSELPIRMVGVSPCFRREVGAHGLSDRGIWRVHQFTKVEQIVICDPR

SEQ ID NO: 159011 - protein, 263 aa, Unknown
  Bacterial polypetide isolated from the Sargasso Sea
EGLTDEDNQPIKQVGEIPEFDFEPKDHVKLMENLDLIDFDGGAKVSGQKFYFLKNQAVFLELALANYALNLLQNEGFTVHITPDLARNKILDGIGFSPRGDETQIYSVEDSELCLIATAEITLGGLLSDQVLDPERLPIMFAGLSHCYRTEAGAAGRESRGLFRVHQFSKVEMFAFTHPDKSEKMHQKMLEIEEKIYQDLGIPYQVVNICSGDLGGPAYRKYDLEAWMPGRGKWGEVTSTSNCTDYQSRRMNIRFKDSDTGKN

SEQ ID NO: 159012 - protein, 236 aa, Unknown
  Bacterial polypetide isolated from the Sargasso Sea
MHDIKFIRDNFDIFKKKISKRNNTTNIENLINLDKTNRKLIQEKEILEKQKKDISKSKDEKLFEKSKEISSKIKEISDQQIKIKLELESILSSIPNIPHSDVPEGEDENSNKVIDTQGEIISKKFKELSHFELGEKLGMLDFDLATKTTGSRFVFVNDKLALLERAISNFMLDVHTLENKYQEVSPPLMASENTMYGTGQLPKFENDQFEIKFEKNEDRKFLIPTAEVILTKYCEK

SEQ ID NO: 159013 - protein, 230 aa, Unknown
  Bacterial polypetide isolated from the Sargasso Sea
EKLKNLDVKNRELIQKKETLEKEKKEISKIKDKSLFEKSKIISKKIETIISEQRNVKNELNNILSNLPNIALENVPIGKDETFNEVVSTHGEIKEFDFKPKTHFELGEKLKMLDFDLATKTTSSRFVFVKSELASLERAISNYMIDLHTKINGYLEISPPLIANESTMFGTGQLPKFENDQFELLLDDKSDRKFLIPTAEVILTNMVKNKILNIKDLPIRLVASTPCFRK

SEQ ID NO: 159014 - protein, 212 aa, Unknown
  Bacterial polypetide isolated from the Sargasso Sea
MHNIKDIRQNPEKFKKDLINRLVDFDLKKILSLDEKNRKLIHEKEKLEKEKKDISKIKDAKMFEKSKKISELISKYSKDQVNIKLELDSILSSLPNIALADVPVGKDDTFNKEISKKGEIRKFNFKPKSHFEIGEKLNMLDFDLATKTTGSRFVFVKDKLAQLERALSNFMIDTHIKVNSYKEISPPLMASENTMFGTGQLPKFENDQFEIK

SEQ ID NO: 159015 - protein, 226 aa, Unknown
  Bacterial polypetide isolated from the Sargasso Sea
MHDIDFIRKNPVEFDNLINVRGEKSLSSIIIKIDEEKRNTQTILQNILSERNTISKEIGILKSKNQESSNLINKVEELKKQISNLKELEKIKEEELNAILTRIPNLASKDVPIGNNEKDNTVYKTWGKKPDFNFTPKRHFEIGENLNLMNFETATKLSGSRFVVLKGMLSKLERAITNFMLEKHTTENGYTEMNVPFLVRNETLFGTGQLPKFSEDLFTAGENLWL

SEQ ID NO: 159016 - protein, 51 aa, Unknown
  Bacterial polypetide isolated from the Sargasso Sea
TIFVGTLNGSGLAVGRTLIAILENYQQKDGSIVVPKILRSYMNNLELISLK

SEQ ID NO: 159017 - protein, 302 aa, Unknown
  Bacterial polypetide isolated from the Sargasso Sea
EEWRKAQYDVDQLRRKRNEAARGIADAKKSGDDAAAKSIMDEVSTIGSQIDELTKHSEECLATRDSLRMSIPNILHEDVPVGEDDQKNTLHSLHGEKTELPFEPRNHNELIEMNGWVDQARGAKVAGSRFYFLQGDLARMEMALQQYGADFLMERGYTLVQPPLMMNREAYEGVTDLSDFETVMYGIEPDEYYLIATSEHPLTAMRMDEVIEPSELPIKMVGVSPCFRREVGAHGLSDRGIWRVHQFTKVEQIVICDPEDSWGHHEDLLTNAVDMWDSLGLHYRVVNICTGDMGTVAAKKYD

SEQ ID NO: 159018 - protein, 250 aa, Unknown
  Bacterial polypetide isolated from the Sargasso Sea
MHNIKDIRDNLDNFKKLISKRNVKVETNNISELDKQNRTLIQNKELLEKEKKDISKKKDQNLFEKSKEISKKIEKISSDQSQVKFKLDEILSSIPNIPLDDVPEGKDENSNLEIEKSGEIKNFDFKPKSHIDLGDNLKMLDFDLASKTSGSRFVFVTKKLAMLERALSNFMIDTHVNKNNYLEISPPLIANENTMYGTGQLPKFENDQFELVLEDKNDRKFLIPTAEVILTNMVKDQILDIKNLPLRFVA

SEQ ID NO: 159019 - protein, 309 aa, Unknown
  Bacterial polypetide isolated from the Sargasso Sea
LKKRNLPPCSSEIVTIHNEYLEHLNLKQKLLEEKNSLSKLFVNKKLKEEEIKTSVYELKTKIDKLSNLAESKLKELNKLILLLPNILSKNVPDGESEKDNKIIKTCGIIKNFNFKPKNHLELAENLNLLDYKKAIKISGSRFSIIKNDLAKLHRGLINFLLDNNSLEFGFEEYIVPELVKGEALEGTGQLPKFEEDLFKTNFNDLYLIPTSEVPLTNLNRDSIINKKDIPLKYTTYTNCFRAEAGASGIDTKGLMREHQFGKVELVTISEPDQSDAELNNMISCVENILKKLSIPYRIVELCSGDIGFS

SEQ ID NO: 159020 - protein, 174 aa, Unknown
  Bacterial polypetide isolated from the Sargasso Sea
MHNLKEFRKNLDKLVQKFKDRNVNFDINDFKKKDALNRDLISKKEKLEQEKKSLSKSKDKSNFEKSKKISQEISNIEKKQTISQGEVDKIIFSLPNLPSDDVPVGSDEKSNKLIKKNGDIKNFSFKAKSHVELGAKDQNIDFDTSIKLSGSRFVVLKDKYATLERALINFMLDT

SEQ ID NO: 159021 - protein, 260 aa, Unknown
  Bacterial polypetide isolated from the Sargasso Sea
LFPQNQAVFLELALANYALYLLQMEGFTVHMTPDLARHQILDGIGFNPRGEETQIYSIEDFDLSLIATAEITLGGLLVNQVLEPDSLPIMYAGFSHCYRTEAGAAGRESRGLFRVHQFSKVEMFAFTHPDNSEEMHQKMLAIEEQIYQELRIPYQVVNICSGDLGGPAYRKYDIEAWMPGRGKWGEVTSTSNCTDYQSRRMNIRFKDPKTSKNRFVHMLNGTAVAVSRTLIALIENGQQEDGSIKLPPCLNLPDIPAPKK

SEQ ID NO: 159022 - protein, 36 aa, Unknown
  Bacterial polypetide isolated from the Sargasso Sea
RTLIAILENYQNSDGSITIPDALKPYMNNLEKISNN

SEQ ID NO: 159023 - protein, 59 aa, Unknown
  Bacterial polypetide isolated from the Sargasso Sea
NSRYKEGKESKFLHTLNGSGLAVGRTLISILENYQNEDGTIQVPDALIPYMGGINQISN

SEQ ID NO: 159024 - protein, 105 aa, Unknown
  Bacterial polypetide isolated from the Sargasso Sea
LNLMDFDVAARTSGARFVFLKGNLAKLERAISDFMLDTHTKKFNYLEISPPLIASSDAMFGTGQLPKFENDQFEIKFDEEKNRKFLIPTAEVILTNMIMGKTITI

SEQ ID NO: 159025 - protein, 245 aa, Unknown
  Bacterial polypetide isolated from the Sargasso Sea
MHNIKDIRKDIDNFKNTIKNRNVDVDFDQILNLDEENRKLIQEKEKLEMEKKSISKSKDETLFEKSKEISNKIDDLSKNQKSVKDQLDQILSNIPNLPLNDVPVGKDENSNKEVVKSGEIKEMSFKPKSHYEIGEKLNMLDFDLATKTTGSRFVFVKDKLASLERAISNFMIDTHVNNNGYTEISPPLMATDNTMFGTGQLPKFENDQFEIKFDDKNDRKFLIPTAEVILTNMVKNQILNIKSLP

SEQ ID NO: 159026 - protein, 108 aa, Unknown
  Bacterial polypetide isolated from the Sargasso Sea
LDYRVIELCSGDLSFAAAKCFDLEVWSPGEEKWLEVSSCSNFEDFQSRRGNIRFKNSDGDIDFVHTLNGSGLATPRIFVALLETHQNKDGSIRIPQCLQPYMGISEIK

SEQ ID NO: 159027 - protein, 495 aa, Unknown
  Bacterial polypetide isolated from the Sargasso Sea
MKPFSLPRRPALTLCAAACLLAGCTVGPDYRGAPAAPDAPTFVRAPASGVDPAAPAPSAWWHALNDRQLDDLITAALAYNPDLHAAQARLRASRAQLSQQRAAQLPKSSATVAAIRMREPDVSALGSLLPSNGSSQSSGTSPSLGGSGPLQLYSAGFDATWEIDLFGGTRRAVEAASAQAEAVDADLADTQVSIAAEVANAYVDLRDQQQRLALSRRTAELQQRMLELTQQRRARGVAADVDLERLTTQVETTRASLIPLDAQVTESLDRLAILTGRAPGALDAALSTPDAPLPTLPGSVAIGDPATLLKQRPDIRAAERRLASSNAQIGEHVADYFPKVTLLGDLGFSATDPGHLFRKQNFTWVGAPYLQWNILDFGRTRGAVRAAEASRDEAEANYQKAVLGALQDANTALQRYGHQREHVVALTKVQTSAVHSRALMDERYRAGVASMIDLLDTQREALSAQQNVIAGQAELIKDYVSLQKNLGLGWQAGAG

SEQ ID NO: 159028 - protein, 242 aa, Unknown
  Bacterial polypetide isolated from the Sargasso Sea
MHNIKDIRNDFEDFKEKLKNRNIDISLDNIISLDEENRKLIQEKEKFEMEKKAISKSKDQSLFEKSKELSLKIEEINKNQIKLQSQITDILSSIPNIPLGDVPVGQDENSNKEIEKKGEIKEFNFKPKSHYELGDKLNMLDFDLATKTTGSRFVFVKKELAQLERAISNFMIDTHTQKNGYTEISPPLIATAETMFGTGQLPKFENDQFEIKLDEGDGRKFLIPTAEVILTNIVKKSNFRKK

SEQ ID NO: 159029 - protein, 307 aa, Unknown
  Bacterial polypetide isolated from the Sargasso Sea
MLDSQILKNNIEEFNENLKKRDIDVDTNLLIELDEKRRKAKFEAEQVRAEQNKLGKEIAKAENKEKENLLKKAADLSESFKNLSEKAEKQEKLFLDSWIKIPNIVDPSSPVGKTDQDNNEIKKVGEIKEHKNVKDHLEIGESLGLINVEKASEVSGSRFSYIFGDLVKIEFNLVSYVLEKLSSNGFLPTVPPVLVRENALFGTGFFPDDAEQVYEIPNDDLYLVGTSEVSLAALHGEEILEHKSLPIRYAGFSTCFRREAGTYGKDTTGIFRVHQFDKVEMFSFCDSENSKEEHEYLLSLEEEILKN

SEQ ID NO: 159030 - protein, 250 aa, Unknown
  Bacterial polypetide isolated from the Sargasso Sea
MHNIKEIRKNFDNFKKLLKSRNVEINLDEIITLDKENRDLIQEKENLEMEKKKISKSKDESLFSKSKEISKKIDELNKKQSLINNNLNNILSSLPNIPLSDVPIGNDESSNKEILKVGNIKNFNFKAKSHYEIGEKLNMLDFDLATKTTGSRFVFVKDKLATLERAISNFMVDTHTKINDYTEISPPLLATDDSMFGTGQLPKFENDQFEIKIDEKSDRKFLIPTAEVILTNMVKNQIIDLNSLPMRLVP

SEQ ID NO: 159031 - protein, 416 aa, Unknown
  Bacterial polypetide isolated from the Sargasso Sea
MLDSQILKNNIEEFNENLKKRDIDVDTSLLIELDENRRKAKFEAEQIRAEQNKLGKEIAKAENEEKENLLKKAADLSENFKSLSEKAEKQEQLFLDLWIKIPNIVDPSSPVGKTDQDNKEIKKVGEIKEYKSVKDHLEIGESLGLINVEKASEVSGSRFSYIFGDLVKIEFNLVSYVLDKLSNNGFLPTVPPVLVRENALFGTGFFPDDAEQVYEIPNDDLYLVGTSEVSLAALHGEEILEYKSLPIRYAGFSTCFRREAGTYGKDTTGIFRVHQFDKVEMFSFCDSGNSKEEHEYLLSLEEEILQDLEIPYRVVDVCSGDLGASASKKFDIEAWIPSQNNYREVTSCSNTTDYQARRLNIRTKKEKETALIHTLNGTALAVGRILIALIENNQQEDGSVKFSDSLSKIIGVESLS

SEQ ID NO: 159032 - protein, 53 aa, Unknown
  Bacterial polypetide isolated from the Sargasso Sea
NENEFVGTLNGSGLAVGRSLIAILENYQTEDGSIIIPEKLRPYMNNIEKIGIN

SEQ ID NO: 159033 - protein, 85 aa, Unknown
  Bacterial polypetide isolated from the Sargasso Sea
EVWLPSEERYREISSCSNFKDFQTRRANIKIKSNNKVEFANTLNGSGLAIGRTLVAIIENFQQKDGSIKIPNKLQPYLDNKTHIK

SEQ ID NO: 159034 - protein, 252 aa, Unknown
  Bacterial polypetide isolated from the Sargasso Sea
MHNIKDIRNNIESFKSSLKNRKTNINFNELLDLDQKNRKIIQEKESLEQKKKEISKKQDKSLYEKSKEITKKISELSDDQVVVKEKLNSILSSIPNVAINDVPEGADESSNSVIEKKGSIKNFDFNPKSHYELGENLNMLDFELATKTTGSRFVFVKKELALLERAISNFMLDTHTKINGYSEISPPLMATDNSMFGTGQLPKFENDQFEIKLDSSSDKKYLIPTAEVILTNMVREKILNKNDLPLRFVAST

SEQ ID NO: 159035 - protein, 60 aa, Unknown
  Bacterial polypetide isolated from the Sargasso Sea
MNSRYKEGKETKFLHTLNGSGLAVGRTLISILENYQNEDGTIQVPDALIPYMGGINQISN

SEQ ID NO: 159036 - protein, 59 aa, Unknown
  Bacterial polypetide isolated from the Sargasso Sea
MRNKICEELNNTDIGKLVNLCGWVDRRRDHGGVIFIDLRDHSGFLQITINPDDGSNLFK

SEQ ID NO: 159037 - protein, 64 aa, Unknown
  Bacterial polypetide isolated from the Sargasso Sea
MSLHGGIAFGLDRIVMLVTDTTNIRDVIAFPKTQSATCLLTDAPSKVDKDQLDELKIISTHKEE

SEQ ID NO: 159038 - protein, 66 aa, Unknown
  Bacterial polypetide isolated from the Sargasso Sea
MKSHYCGEITSSNLKEEVTICGWIHRRRDHGGVIFLDVRDIKGICQAVVNPDNKESFQLAESIRNE

SEQ ID NO: 159039 - protein, 301 aa, Unknown
  Bacterial polypetide isolated from the Sargasso Sea
MQEMFGDLGPHGLQAGDLWLTLALYVAALWLRMFVHYMGQYLYLQANSIPLFRFEVQAYMVQFKYLFTSMTTGVEIGAVIMGPLACVATLLFLTAVGHSLVKFVGHAPEWFSKFVAGWCFATVFDAVLVLAVDLVAGNFGCSRLPSCRDDYTAAACDCVVGDAFKLWSRLESEDASGVMGLVYTVIIYCAMGIVSLGASYGGSDEGPYVAREPRPLGRTLLTPHHPWTLSVLLARPHERAHAGRVPARPQPGGSLLRAARLRDVGVGAHGDPHRSAGVEGVRRRDHGHDRLRLRVRRPLAR

SEQ ID NO: 159040 - protein, 104 aa, Unknown
  Bacterial polypetide isolated from the Sargasso Sea
MRNKICKELNNTDIGKLVNLCGWVDRRRDHGGVIFIDLRDHSGFLQITINPDDGADLFKQAETLRNETVIMVSGIINERPKDSINKNVSTGELELKVKDLQILN

SEQ ID NO: 159041 - protein, 155 aa, Unknown
  Bacterial polypetide isolated from the Sargasso Sea
MNIYRSHYCSDLNIKNLDQEVKLSGWIDTIRDHGNLIFIDLRDNYGITQCVVDAQHNLFSEISKLSNESVITVSGSVVERSNETINKSISTGEIEVKIDNYKLLSESEVLPLPVNSDIEYGEEVRLKNRFLDLRRNKLHKNILLRSKIISSIRKK

SEQ ID NO: 159042 - protein, 165 aa, Unknown
  Bacterial polypetide isolated from the Sargasso Sea
MQNRYRNILAKDLNKDKVGQSVRLSGWVHRFRDHGGVIFIDLRDHTGLTQVVCNPEDKAVFELAERLRFEYVVSVEGVIRLRPEGTENTDLSSGSIELVCKDLIILNSSLPLPFPIDQHVDGDVGEEVRVKYRFFDLRRHEMATALPARSTLLNCVRSVLQEAGF

SEQ ID NO: 159043 - protein, 125 aa, Unknown
  Bacterial polypetide isolated from the Sargasso Sea
MKRTHKCNQVTAALIGQEITISGWIHRRRDHGGVIFFDVRDEDGLVQVVYNPESKDIFSLAETCRNEFVIFSKGVVSERPVGTANDNLVTGEVEIIASDLQILNPSLPIPFQLDEYSSVGEETRL

SEQ ID NO: 159044 - protein, 77 aa, Unknown
  Bacterial polypetide isolated from the Sargasso Sea
MNKRTHKCNEVTKDLIGKDISITGWIRRRRDHGGVIFFDIRDETGLVQVVYNPELKEIFGLAESCRNEFVIYSKRQK

SEQ ID NO: 159045 - protein, 101 aa, Unknown
  Bacterial polypetide isolated from the Sargasso Sea
MSKYRTHTCGELTLNNKDQTIKLSGWINKKRDHGNLLFLDLRDHYGLTQCVIDEGKKIFKEIEKLPLETVLQVEGKVLVREKDTINKNLNTGEIEVGIEKI

SEQ ID NO: 159046 - protein, 42 aa, Unknown
  Bacterial polypetide isolated from the Sargasso Sea
RYAPPPHAGWGLGVARLLMVLTGAGNVREVVLFPRDRGRVTP

SEQ ID NO: 159047 - protein, 155 aa, Unknown
  Bacterial polypetide isolated from the Sargasso Sea
MNNYRTHMCSELTLKDLDLSVTLSGWVDTIRDHGNLLFIDLRDNYGITQCVVDGKHNLFGEISKINNESVIKIIGTVVKRSDETINMNLNTGEIEVQIEKFELLSKSNVLPLPVNSDIDYGEEIRLKYRFLDLRRNKLHSNILLRNKVISDIRKK

SEQ ID NO: 159048 - protein, 144 aa, Unknown
  Bacterial polypetide isolated from the Sargasso Sea
MNKYRSHLCSDLSISNLSDKVTLSGWADTIRDHGNLLFIDLRDNYGITQCVIDGTHSLFNEISKLSNESVITIAGVVVKRSEETINKNLLTGEIEVKIDDYKLLSKSEILPLPVNSDIEYGEEIRLKYRFLDLRRNKLHKNILL

SEQ ID NO: 159049 - protein, 58 aa, Unknown
  Bacterial polypetide isolated from the Sargasso Sea
GSAPGIDRIVMLLADEPNIREVIAFPMNQQAMDLMMEAPAEINKERLEELGLKLIEKN

SEQ ID NO: 159050 - protein, 145 aa, Unknown
  Bacterial polypetide isolated from the Sargasso Sea
MKYSSCGHVNLANVEEPTRLRGWIDSVRDHGGVIFIDLRDETGITQVVVEPENKEFFSMAERCRSEFVLSVVGKIRRRPDGTINKQIPSGEVELLVSSLEILSESYPLPFQLDDYSSAGEEVRLKYRFLDLRRSEMQNNIRARSK

SEQ ID NO: 159051 - protein, 314 aa, Unknown
  Bacterial polypetide isolated from the Sargasso Sea
VTRDGEKLVGTKVTVAGYAETVRGRGAICFLMLRDGTGKIQAFLKKDNMDEGSFDSIQSATRESTIQVTGKVAMKRSPKVAEGEPVPPPEFEVNVESGDILAHADTPLPLGVTDDVRVGLDVRLDNRHLDVRRSHVNAMFQLRSKVLQYGREHLISEGFQEINSPKIIAAAAEGGTNLFPMKYFETDAYLSQSPQLYKQLAVLGGLERVFEIGPAFRAEKHDTYRHLNEFVSFDIEGAWMDDEDVMGVQERMIHHIWTRVLENDQTLIDAVNDYRASQGNESIQVTVPELPFPRIPYCEAIEIVKSGGGEIPMG

SEQ ID NO: 159052 - protein, 302 aa, Unknown
  Bacterial polypetide isolated from the Sargasso Sea
SIIAHIDHGKSTLADRLIQECGALEDREMKEQILDNMEIERERGITIKAQTVRLKYKHKDGNVFILNLMDTPGHVDFAYEVSRSLSACEGSLLVVDSSQGVEAQTLANVYQAIEVNHEIITVLNKIDLPASEPNRIRKQIDEVIGLPGNDAIETSAKTGQGIKDVLSNLVEKLPPPKGDINKTLKAMLVDSWYDPYLGILTLIRVVDGKISKGQKIRFMSTGASYTVEGLGVFTPKIVQVNQLGPGEIGFITASVKTVADCKVGDTVTDDKNPVSKMLEGFKPSVPVVFCGLFPTDYANFSD

SEQ ID NO: 159053 - protein, 87 aa, Unknown
  Bacterial polypetide isolated from the Sargasso Sea
MDKGTVIKKYNLSRKQIDLIDNYILKLTKSNQIHNLVGLSTIDVAWDRHINDSLQLSEFISKKNASIIDLGTGAGLPGVILHIFGYQ

SEQ ID NO: 159054 - protein, 323 aa, Unknown
  Bacterial polypetide isolated from the Sargasso Sea
DTRHSIVANIRKNVSKQLEAIEIYPKMIPALKRNINYQYNKSKISPGESVGVLTAQSIGERQTQMTLDTFHSAGVAIKTVITGVPRFSELLNATKDPKSRVCNVYFNKGNDTISNLRDTIGNSIVQYKFQDLYKSYTINTQITEKTWYKSFEILYSDDFRSYNNNISFKIDIQKIHEYSIDIKLIAEKIEEEYDDIYCVFSPNYIGELDIFINTSELEIPNDNEYIKKNYLNIYIDEVIINNINSLLICGIKDIEDIFYKRDDSKWMIETYGSNFQRLMSHPDVDKYRLISNDMWEIYNNLGIEAAREFLIEEFKNVISSDGT

SEQ ID NO: 159055 - protein, 60 aa, Unknown
  Bacterial polypetide isolated from the Sargasso Sea
MGGSAPGIDRIVMLLADEPNIREVIAFPMNQQAMDLMMEAPAEVDSLRLEELGIKLIDKN

SEQ ID NO: 159056 - protein, 242 aa, Unknown
  Bacterial polypetide isolated from the Sargasso Sea
MSNIKYIRNFSIIAHIDHGKSTLADRLIQVCGGLEDREMKDQILDNMDIERERGITIKAQTVRLKYKHDDGFIYTLNLMDTPGHVDFSYEVSRSLSACEGSLLVVDASQGVEAQTLANVYQAIDANHEIVTVLNKIDLPASEPERVRKQIDEVIGLPGADAIEVSAKTGKGIKNVLSDLVNTLPCPAGDEGKPLKAMLVDSWYDPYLGILTLIRIVDGKIFKGQKIRFMSTNANYTVESLGV

SEQ ID NO: 159057 - protein, 90 aa, Unknown
  Bacterial polypetide isolated from the Sargasso Sea
MNKYRSHLCNQLNEDDSGSSVLISGWVHRKRDHGNLLFIDLRDHYGITQCVIDKSNEDLLFIAEKLKSETVISISGNVVLRDNETINENL

SEQ ID NO: 159058 - protein, 66 aa, Unknown
  Bacterial polypetide isolated from the Sargasso Sea
HIPDLMYKLFSIAGYERKDVHEKFSGMINALSYGAPPHGGSAPGIDGIVMLLANEKNIIEVTMFPM

SEQ ID NO: 159059 - protein, 193 aa, Unknown
  Bacterial polypetide isolated from the Sargasso Sea
MAILGQALKHSNKPKPFVDSRSLLTRKQIDEAKVPVLFVELQSGQNGTLTPYPGEGIGQTWLGADGATITLDRGVLKASRGMGDDLMGSSSFMPPWSNIDKKSENYSRELNHITGNNEISKRVFSCDIRKTNDEEIIKIWGVNFKVEKFEESCSNGSLAFKNIYQIDSQWIVRRSTQYHSETLGSMLIERLDR

SEQ ID NO: 159060 - protein, 254 aa, Unknown
  Bacterial polypetide isolated from the Sargasso Sea
MNIKMLDKELSETEFNVFNNSLKDGGTIRGLSVPKNESMTRKFYDKLNEFVRSIGGDGIIPISIDKDLSGIEFEDIKSPISKFLSVEHVEKIFNIFNSDSDDVILICAGKKNIVLDCLGQVRNKLAKDFELIDDEKLNFLFVTDFPLFEKDLESGNWTAMHHVFSSPNDETINYLDSDPSKVIGNLFDLVCNGVELGSGSIRIHDKKTQEKVFSIIGYKDDQIQDRFGPLLESFDYGAPPHGGMGLGIDRLVAT

SEQ ID NO: 159061 - protein, 156 aa, Unknown
  Bacterial polypetide isolated from the Sargasso Sea
MNKYRTHLCNQLRESDAGKNVSISGWIHRKRDHGNLVFVDLRDHYGITQCVVDKTNEELLNTIDNLRSESVIKISGKVVERDKETINVSIDTGKIEISIEQLNVLSSADELPMPVFGDQEYPEDIRLKYRFLDIRREGLHKNLILRSSVISYIKEQ

SEQ ID NO: 159062 - protein, 160 aa, Unknown
  Bacterial polypetide isolated from the Sargasso Sea
MIKRTHTCGELNISNEGDQVSLNGWISKRRDLGGLIFFDLRDRYGITQIVFDDKKNAESFNAAKKLGFEDVIGISGTVIKRPDEAINDKMNTGLIDIAVDKIIIYNESEPPPFDINDRSSASEEHRLKFRYLELRTKELQHYMKTRHRATLEVRKFLSEQ

SEQ ID NO: 159063 - protein, 47 aa, Unknown
  Bacterial polypetide isolated from the Sargasso Sea
GCLAGTDNIRDVIAFPKTTSATSLMDESPSRVDLNQLKDLGLKIEDN

SEQ ID NO: 159064 - protein, 47 aa, Unknown
  Bacterial polypetide isolated from the Sargasso Sea
LAKESDIREVIAFPKTKTASDLLTGAPSEIDKESLDELHLNIDRSSS

SEQ ID NO: 159065 - protein, 166 aa, Unknown
  Bacterial polypetide isolated from the Sargasso Sea
MHPYRTHTCGELRETHIDQNVRISGWVHSKRDHGNLVFIDLRDHFGLAQCVIDVSSELFSVVETTRPESVLTITGVVVPRTEDTINQTIETGRVELRIEEIVVENQSEVLPMQVAGEQEFGEDVRLKYRFLDLRRDKVHKNIILRSEVISSIRRRMTEQGFLEIQT

SEQ ID NO: 159066 - protein, 209 aa, Unknown
  Bacterial polypetide isolated from the Sargasso Sea
MLHTRKCGEISEEDFGSEQTLCGWLQDTRNLGGIAFLQLRDITGVIQLTLLKKKLGDNFKPWASINRESIVQVTGTVKENKEAPGGVEMLPEKLEVLNNAEAPLPLGVIDKIDSEIETRLNARYLDLRKKEISANFQIRAAVSGAVHDHLRKEKFLEVHTPKIIASATEGGTSLFEMKYFDKVAYLAQSPQLYKQMLMSGGLERVYEVG

SEQ ID NO: 159067 - protein, 273 aa, Unknown
  Bacterial polypetide isolated from the Sargasso Sea
MKEHSSIAVVGKTRKNEKSPTGIEVVPSEMRVFSEVEKIPPFEPYAKTVKNIDTRLEVRAIDLRRNVLQKIFLARSVTLKALRDYLGKEDFVEVNTPKMIATATEGGAALFPIFYYNKEAFLAQSPQLYKEQLTMSFEKVFEIAPIFRAEPSRTNRHLSEAISIDFEEAYVDYNDIMDRIEELIKSCISTVQNFVKEHPDVEFTVPEVPDKIPRYKYAELIEKMQAAGVKAQWGDDLYPKNLQKIGLSGFYFIVDWPMGQKPFYVKVKKDDPK

SEQ ID NO: 159068 - protein, 71 aa, Unknown
  Bacterial polypetide isolated from the Sargasso Sea
RIEKKSELEDRMKNKGMKTEAFGYHLNIFDFGVPPHAGCGIGLERLMMALTGTENIRDTTFYPRDVDRLTP

SEQ ID NO: 159069 - protein, 52 aa, Unknown
  Bacterial polypetide isolated from the Sargasso Sea
MRNKICKELINTDIGKLVNLCGWVDRRRDHGGVIFIDLRDHSGFLQITINPD

SEQ ID NO: 159070 - protein, 159 aa, Unknown
  Bacterial polypetide isolated from the Sargasso Sea
VPEVPDKIPRYKYAELIEKMQAAEVKAQWGDDLYPKNLQKIGLSGFYFIVDWPMGPKPFYVKVKKDDPKISESFDLMWGDLELSSGSTRIEKKSELEDRMKNKGMNTEAFDYHLNIFDFGVPPHAGCGIGLERLMMALTGTENIRDTTFYPRDVDRLTP

SEQ ID NO: 159071 - protein, 234 aa, Unknown
  Bacterial polypetide isolated from the Sargasso Sea
MRDSTNWEPTAYRTHTIGQVVEAGESLVGSEVTVAGYAETVRGRGAICFLMLRDGTGRIQAFLKKDNMDGDLFDSIQSSTRESTIQITGKVAKKRPPKVPDGEPLPPPEYEVNVEDGMILAVSETPLPVGVTDDVNVGLDVRLDNRHLDLRRAHVNAMFQLRSKVLQYGREHLIKEGFQEINSPKIIAAAAEGGTNLFPMKYFETDAYLSQSPQLYKQLAVLGGLERVFEIGAA

SEQ ID NO: 159072 - protein, 124 aa, Unknown
  Bacterial polypetide isolated from the Sargasso Sea
MHKYRTHKCHELRIENVQDSVKLSGWVHRKRDHGQLIFIDLRDHYGLTQVVVDSSNKNFSVVENVSLESVITISGTVVERSEETINKNLPTGNIEVNLSELKIISKSNTLPLQVNSDEDYGEET

SEQ ID NO: 159073 - protein, 131 aa, Unknown
  Bacterial polypetide isolated from the Sargasso Sea
MKSYRTHNCAELNLTHVNEEVTLSGWVHRVRDHGGVLFIDLRDHYGITQVVIDPDSKDFSTAESYRSEWCVKIKGIVKAREADLINKSLKTGDIEVFIERTEIISTAEDLPVPVFGEHDYPEETRLKYRFI

SEQ ID NO: 159074 - protein, 274 aa, Unknown
  Bacterial polypetide isolated from the Sargasso Sea
QSATRESTIQVTGKVAMKRAPKVAEGEPLPPPEFEVNVESGDILAHAGTPLPLGVTDDVRVGLDVRLDNRHLDVRRSHVNAMFQLRSKVLQYGREHLISEGFQEINSPKIIAAAAEGGTNLFPMKYFETDAYLSQSPQLYKQLAILGGLERVFEIGPAFRAEKHDTYRHLNEFISFDIEGAWMDDEDVMGVQERMIHHIWTRVLENDQTLIDAVNMYRASQGNDPIQVTIPELPFPRIPYCEAIDIVKSGGGEIEWGDDIESHHCDIIAAQHPG

SEQ ID NO: 159075 - protein, 46 aa, Unknown
  Bacterial polypetide isolated from the Sargasso Sea
SSPEGARDFLVPSRLHPGKFYALPQAPQQFKQMIMIAGFDKYFQIA

SEQ ID NO: 159076 - protein, 235 aa, Unknown
  Bacterial polypetide isolated from the Sargasso Sea
KMIGTELGDLRRTHYSVELSSLEEGTEVIVMGWVLTVRGHGNIVFGTIRDKLGNIQIITKSGECDDDIREKLSSLKEHSSIAVVGKTRKNEKSSTGIEVVPSELRVFSDVEKIPPFEPYAKTVKNIDTRLEIRAIDLRRTVLQKIFLARSLTLKSIRDYLSKKDFVEINTPKMIATATEGGAALFPIFYYNKEAFLAQSPQLYKEQLTMSFEKVFEIAPIFRAEPSRTNRHLSEA

SEQ ID NO: 159077 - protein, 195 aa, Unknown
  Bacterial polypetide isolated from the Sargasso Sea
MSKFRTHTCEELNKKHIDKKVLLSGWVHKKRDHGNLLFIDLRDNFGLTQCIIDKDNKNFSQLEKISLETVIKIEGSVLARTSDTVNKELSTGDIEVKIDKFEVLGKTKELPLPVFSDQEYSEEIRLKYRFLDLRRKKIHNNIVLRSKIISFIRKEMEKLGFNEFQTPILTSSSPEGARDFLVPSRLNPGKFYALP

SEQ ID NO: 159078 - protein, 56 aa, Unknown
  Bacterial polypetide isolated from the Sargasso Sea
CIDRIVMLLAQEKNIREVILFPMNQQAQDLMMLAPAEVDDKTLDELSLKVIPNEED

SEQ ID NO: 159079 - protein, 151 aa, Unknown
  Bacterial polypetide isolated from the Sargasso Sea
MNKFRTHKCNELRKEKVGDEVTLSGWINKKRDHGNLLFIDLRDNYGITQCIIDKENSNFKRLEKMQLETVIKIDGKVVERSKDSINNDIETGEIEVAIKNFQVLGECKELPLPVFSDREYAEEVRLKYRFLDLRRKKIHENIILRSKSNFI

SEQ ID NO: 159080 - protein, 191 aa, Unknown
  Bacterial polypetide isolated from the Sargasso Sea
MIRSHNCGELKLADVNKKVILSGWVQKIRNKGFIIWIDLRDRYGITQLVFDEKRSPKKVFDIAKNILREFVIQISGHVIERESKNDNIRTGSIEVLVNSIEILNPSKTPPFTIEDISDGGDELRMKYRYLDIRRNKIKENLIFRHKVSMEVRKYLSNNGFIDIETPYLIKSTPEGARDLIVPSRMNPGEFY

SEQ ID NO: 159081 - protein, 204 aa, Unknown
  Bacterial polypetide isolated from the Sargasso Sea
MNKYRSHLCSDLSINNLGEKVTLSGWADTIRDHGNLLFIDLRDNYGITQCVIDGTQSIFEEISKLSNESVLTISGEVVKRSDETINKNLKTGEIEIKIQDYKILSKSEILPLPVNSDIEYGEEIRLKYRFLDLRRNKLHKNIILRSKIISDIRKKMIDKNFIEFQTPILTSSSPEGARDYLVPSRIHQGKFYALSSAPQQFNNY

SEQ ID NO: 159082 - protein, 82 aa, Unknown
  Bacterial polypetide isolated from the Sargasso Sea
MHIYRTHNCSELRLKDKNKTVRLSGWVHRKRDHGNLLFIDLRDHYGITQVVLDKKNKHFPTAEKTSSESVITVTGKVMPRSK

SEQ ID NO: 159083 - protein, 161 aa, Unknown
  Bacterial polypetide isolated from the Sargasso Sea
MHRYRTHTCNELNLKDKNQKVILSGWINKKRDHGNLLFIDLRDNYGLTQCVIDKNSKSFSELEKIQLESVIKIEGTVVARTKETINKELKTGEIEIKILTFEILGRCNELPMPVFTDQEYAEDIRLKYRFLDLRRKKNHENIILRSKIIAFIRSEMIKQGF

SEQ ID NO: 159084 - protein, 204 aa, Unknown
  Bacterial polypetide isolated from the Sargasso Sea
MYKEWGCGEIGIDQEKNEITIAGWVDSWRDHGSLLFIDLRDSTGTVQVVFDKSKSNSNHQIASSFRAEWVVQIKGMVEKRIEGAENPNISTGYIEVHATEINVLNESKTPPFEVNSENIDETTRLRYRFLDLRSSRMQNNIRLRNDVILSICNFLNDKNFVHIETPILIKSTPEGARDYIVPSRVHPGEFYALPQSPQQIKQML

SEQ ID NO: 159085 - protein, 175 aa, Unknown
  Bacterial polypetide isolated from the Sargasso Sea
ETVKNFAKENENVDFQIPDMPDKIPRYKYSELIEKMQAAGVKTQWGDDLYPKNLQKIGLTGFYFIIDWPMGPKPFYVKVKKDDPKISESFDLMWGDLELSSGSTRIEKKSELEDRMKNKGMNVDAFGYHLNVFDFGVPPHAGCGIGLERLMMALTGTENIRDTTFYPRDVDRLTP

SEQ ID NO: 159086 - protein, 274 aa, Unknown
  Bacterial polypetide isolated from the Sargasso Sea
MEISRTHLIEELNSSMEGQDVLFGGWVVDLRKLGKMAFLTVRDVTGMCQVIVKGDSMNLLEGLNRQSVVRISGKVQSSKAKDFDFEISATEIQILAKAEYPLPIDPIGRLESDIDNRLNSRALDMRNQKTASIFKLRSQVLASIRETLIKRKFIEINTPKIIGSASEGGADLFSLDYFGKQGYLAQSPQLYKEQMTIGLERVFEISSFYRAEKSHTGRHLSEFTSVDIEAAMMDYTDVMDVLESIVVDVFKNTAENSKTEQKEMDMKSKFQIHH

SEQ ID NO: 159087 - protein, 134 aa, Unknown
  Bacterial polypetide isolated from the Sargasso Sea
MHKYRTHKCNELSIENVKDQVRLSGWVHRKRDHGQLIFIDLRDHYGLTQVVVDSSNKNFSIFESLPLESVITVSGMVVERSNETINDNLPTGKIEINLSELEIISQSKALPLQVNSDEDYGEETRLKFRIFRLR

SEQ ID NO: 159088 - protein, 226 aa, Unknown
  Bacterial polypetide isolated from the Sargasso Sea
EKVFEIAPIFRAEPSRTNRHLSEAISIDFEEAYVDYNDVMDRIEDLIKTCVETVQNFAKENENVDFQIPEIPEKIPRYKYSELIEMMQAAGVKAQWGDDLYPKNLQKIGLTGFYFIIDWPMGPKPFYVKVKKDDPKISESFDLMWGDLELSSGSTRIEKKSELEDRMKNKGMNVDAFGYHLNVFDFGVPPHAGCGIGLERLMMALTGTENIRDTTFYPRDVDRLTP

SEQ ID NO: 159089 - protein, 319 aa, Unknown
  Bacterial polypetide isolated from the Sargasso Sea
QRIELADKFENMGAQMIKEVANKTNDSAGDGTTTSTVLCQALATEGMKAVAAGLNPMDLKRGMDAATDAIISELQKNSKIVKSDKEVQQVGTIASNGDREVGGMISEAMQKVGKEGVITVEEAKSLDTELDVVEGMMFDRGYLSPYFVTNADKMKAEMEDCLILLHEKKLASLQPMLPLLESVVQSTKPLLIISEDVEGEALATLVVNKLRGGLKIAAVKAPGFGDRRKAMLEDIAILTGGQVISEDLGIKLESVTMDMLGKAKRVVVDKENSTIVGGAGKKKDIEARCDQIRKQIDETTSDYDREKLQRKISKTRWRC

SEQ ID NO: 159090 - protein, 254 aa, Unknown
  Bacterial polypetide isolated from the Sargasso Sea
IILQARITSSRLKNKVLKKINGKTIIEIMISRLKFSRFYNSIIVAIPNNKKNLHLYEFLKKKGINVQKGSENNVLDRYYQIAKKNKIKNIIRLTSDCPLVDYKIVERLSQSFFKKKLNHITTSSNFAEGLDCEMFDFNTLKKIHKKAKLKSEKEHVTLFIKNNKKIFKTDKIEPKFNQSKYRFTLDESNDFIVIKKIIKKFPQITKNEYISSEKIVNFLEKNKKINQINSNIIRNEGLLKSYKKDGIKILFLSQ

SEQ ID NO: 159091 - protein, 252 aa, Unknown
  Bacterial polypetide isolated from the Sargasso Sea
YFGKKAYLAQSPQLYKEQMTIGLERVFEISSFFRSEKSHTGRHLSEFTSVDIEAAMMDYTDVMDILESIIVDVFKNTSESCKTEQKEIGHEIKVPSSPFERITYTQALKELSSLDIKLEFGEDLQDAHLRNLGEKHAEFFFLTDWPMKLKPFYIHEKDDDPTISRSFDLQYGYLELSSGGRRLHDPEQLKSRLKEQNLDPASFEEHLKTFGWGMPPHSGWGMGLDRLMTVLTAIDNVREVTLYPRDPDRLKP

SEQ ID NO: 159092 - protein, 205 aa, Unknown
  Bacterial polypetide isolated from the Sargasso Sea
MEISRTHLIEDLNPSMEGQDVLFGGWVVDLRKLGKMAFLTVRDVTGMCQVIVKGDSMNLLEGLNRQSVVRILGKVQSSKAKDFDFEISATEIQILAKAEYPLPIDPIGRLESDIDNRLNSRALDMRNQKTASIFKLRSQVLASIRETLIKRKFIEINTPKIIGSASEGGADLFSLDYFGKQGYLAQSPQLYKEQMTIGLERVFEI

SEQ ID NO: 159093 - protein, 136 aa, Unknown
  Bacterial polypetide isolated from the Sargasso Sea
MSDKRKSLGRGLDALLGQSVEAEPKNNKQGLTEIKLEQIGPGPFQPRKQIDEPQLKELAQSIQAQGVIQPIVVRERAVTDSHTGVKFEIIAGERRWRASQIAGLETIPAVVRAIADSEAVAVALIENIQRENLNPL

SEQ ID NO: 159094 - protein, 120 aa, Unknown
  Bacterial polypetide isolated from the Sargasso Sea
MDKGTVIKKYNLSRKQIDLIDNYILKLTKSNQTHNLVGPSTIEIAWDRHINDSLQLSDFITKKNASIIDLGTGAGLPGVILHIFGYSNILLIDSKMKKINFIKEFAHEQNIEIKNYLYKD

SEQ ID NO: 159095 - protein, 58 aa, Unknown
  Bacterial polypetide isolated from the Sargasso Sea
IAFGFDRLIMILSGSSNIRDVIAFPKTTSASSLMDESPSSVSTEQLFDLNINIIDKKK

SEQ ID NO: 159096 - protein, 167 aa, Unknown
  Bacterial polypetide isolated from the Sargasso Sea
MNKYRTHKCNELRKEDVDKKISLSGWINKKRDHGNLLFIDLRDNYGITQCIIDKDNKYFSDLEKMQLETVIKVEGKVVNRSKETINSEIDTGEIEVVIEQHEVLGTCKELPMPIFSDQEYAEEIRLKYRFLDLRRKKIHENIILRSKVISYIRNEMTKLGFLEFQTP

SEQ ID NO: 159097 - protein, 57 aa, Unknown
  Bacterial polypetide isolated from the Sargasso Sea
APGIDRIVMLLAEEPNIREVILFPMTGKAEDIMMGAPSEVDKNQLNELGLKLDTKIK

SEQ ID NO: 159098 - protein, 263 aa, Unknown
  Bacterial polypetide isolated from the Sargasso Sea
DFLGRVDFQVKLNGQRIETGEIEVVMRQVEAVQDALVILVGGGSSGSPAFLVGYAVGADATEASLREACEKALPGYMVPSAFVVLEAWPLNANGKVDRKALPAPEGVSEEVVAPRTAAEQSVADAVAQVLGTASVSVVAQLTRAGLTSLMAVRLSSLLSRRDGAAVTTASILQHGTIAAIAQTMQDDDAGGQMALVRHERSEEGERLPLSHEQEQMWVLYQLDRESGVYNVPHELRLRGTLHMDALVGAVKAAAGRHEVLRMQ

SEQ ID NO: 159099 - protein, 75 aa, Unknown
  Bacterial polypetide isolated from the Sargasso Sea
MRSNGCGDLREQNIDQQVQLCGWVDRRRDHGGVIFIDLRDRSGTVQITVDPDLGADAFAVAEHLRSETVLQVEGK

SEQ ID NO: 159100 - protein, 287 aa, Unknown
  Bacterial polypetide isolated from the Sargasso Sea
TKKYNKKIKELNKHNKLYYSKDKPIISDKEYDELKKKIIELENKYNYLKNKDSPSQTVGFKPSKIFQKRKHMVPMLSLSNIFDKDDLDNFEKKIRNYLDMNSSQTFEYSVEPKIDGISASLTYKDGNLVLGMSRGDGYEGEVITENIKTISEIPKKINSSDFPTQIEIRGEVYIKKNDFIKIKEKFANPRNAASGSLRQKYSSETKKIPLKFIAYTFGLFENNKYNKQSDFLTSLKKWGFETSKFNVVKSNINDLIKYHSEFEKKRYELEYDVDGLVYKINDLKLQQ

SEQ ID NO: 159101 - protein, 95 aa, Unknown
  Bacterial polypetide isolated from the Sargasso Sea
RLNSRALDMRNQKTASIFKLRSQVLASITETLIKRKFIEINTPKIIGSASEGGADLFSLDYFGKQAYLAQSPQLYKEQMTIGLERVFEISSFYRA

SEQ ID NO: 159102 - protein, 53 aa, Unknown
  Bacterial polypetide isolated from the Sargasso Sea
MRNKICEELNNTDIGKLVNLCGWVDRRRDHGGVIFIDLRDHSGFLQITINPDD

SEQ ID NO: 159103 - protein, 166 aa, Unknown
  Bacterial polypetide isolated from the Sargasso Sea
MKKIFFIIISSSIILSSCNAVRDSAGVNRKQIDEYSVIENPPLVIPPNFNLLPPDQMNSKDIIDADSDLAKEILFGLEDIETKTNNNQSLINQILIETEANEVNDNIRNSINEEFANEKSTINDETTFNNEEEIDNAIQETEININKKENEKTAKEKKKKRFSFFN

SEQ ID NO: 159104 - protein, 289 aa, Unknown
  Bacterial polypetide isolated from the Sargasso Sea
SRSLSACEGSLLVVDSSQGVEAQTLANVYQAIEVNHEIVTVLNKIDLPASEPDRIRKQIDEVIGLPGNDAIEISAKTGQGIKEVLSNLVEKLPAPKGDINKTLKAMLVDSWYDPYLGILTLIRVVDGKINKGQKIRFMSTGASYTVEGLGVFTPKIVHVNELGPGEIGFITASVKTVADCKVGDTVTDDKNPVSKMLDGFKPSVPVVFCGLFPTDNANFTDLREALEKLSLNDSSFSYDAETSAALGFGFRCGFLGLLHMEIIRERLAREFSLDLISTAPSVVYNVKKN

SEQ ID NO: 159105 - protein, 161 aa, Unknown
  Bacterial polypetide isolated from the Sargasso Sea
MNKYRTHTCGELTIKEKDKNISLSGWINKKRDHGNLLFLDLRDNYGITQCVIENNHSSFKEIEKLSLETVIKVSGKVLKRSEETINKELKTGEIEVSIISFEILGNTKELPMPVFSDQEYSEEIRLKYRFLDLRRKKIHQNIILRSKVISFIREEMKKFGF

SEQ ID NO: 159106 - protein, 182 aa, Unknown
  Bacterial polypetide isolated from the Sargasso Sea
MNKYRTHTCGELTKSHKEKEISLSGWINKKRDHGNLLFIDLRDNYGITQCVIDKSNEIFKKVEKISLETVIKITGKVIERSDETINENISTGEIEVKINNIDVIGETKELPMPVFSDQEYAEEIRLKYRFLDLRRKKIHNNIILRSKVISFIRNEMQKLGFLEFQTPILTSSSPEGARDFLV

SEQ ID NO: 159107 - protein, 191 aa, Unknown
  Bacterial polypetide isolated from the Sargasso Sea
MKNISYLLSLLLVFSYVSFADEEVKEAPKESEEVAEEAIDEEAEEDKDPTISEFIEEGEFEVIEGMLDIYYETEEDTYYTIVEEENLSKEFIYFYYIISGAQAGGASGGDMGDSSVLEFRKFKDDIALYKKNTVFNYDDSNNISKSTLTNILESFVGRFEVKIEEEGRYLINIDKLFLGEMLVGLTPPKEY

SEQ ID NO: 159108 - protein, 279 aa, Unknown
  Bacterial polypetide isolated from the Sargasso Sea
KLIDYAEQEIVLKSRKGAFQRTLKYDPMKSRLGEIRLRTNKNRDDFIYARDEEGNYIDKVNKSNIDIVHMNKSFRNFYSEETVGNFMLRLEQRANKLLGRLTDNKIQIMKDLPADPSARHRAMLSKLNWISDMEGKFEMMSLLAHPKSAIANLYGGTTNLITDVGFDYWFKSFDEAYLVNDVFANKTYKRFSAKEGKFIDEPIKTINDVHRYFEQFGFLDANIQSELVQMKPPGDTSWKEFSNEVGKILERKFKELPIYTKDKKLNKKNKKLRDEEVRL

SEQ ID NO: 159109 - protein, 411 aa, Unknown
  Bacterial polypetide isolated from the Sargasso Sea
MEISRTHLIEDLSSSMEGQDVLFGGWVVDLRKLGKMAFLTIRDVTGMCQVIVKGDSMNLLEGLNRQSVVRILGKVQSSKAKDFDFEISATEIQVLAKAEYPLPIDPIGRLESDIDNRLNSRALDMRNQKTASIFKLRSQVLASIRETLIKRKFIEINTPKIIGSASEGGADLFSLDYFGKQGYLAQSPQLYKEQMTIGLERVFEISQFYRAEKSHTGRHLSEFTSVDIEAAMMDYTDVMDVLESIVVDVFKNTAENSKTEQKEIGHEIKVPNSPFERVTYIQALEELGGMDIKLEFGEDLQDSHLRSLGEKHPGFFFLTDWPMKLKPFYIHEKDDDPTLSRSFDLQYGYLELSSGGRRLHDPEQLKTRLKEQNLDPTSFEEHLKTFGWGMPPHSGWGLGLDRLMTVLIGID

SEQ ID NO: 159110 - protein, 145 aa, Unknown
  Bacterial polypetide isolated from the Sargasso Sea
MHQYRTHNCNGLRAEDINQEVRLSGWVHRKRDHGGLLFIDLRDHFGLTQLVFDPDSSAFQEAEKVRNESVITINGKVVQRSDDTINKVLPTGKIEVYVDTLEVIGSSDDIPLPVFGEPDYPEEIRLKYRFLDLRRETLHKNIILR

SEQ ID NO: 159111 - protein, 226 aa, Unknown
  Bacterial polypetide isolated from the Sargasso Sea
MDISRTHLIEDLNSSMEGQDVLFGGWVVDLRKLGKMAFLTVRDVTGMCQVIVKGDAMSLLEGLNRQSVVRILGKVQASKAKDFDFEVSAIELQVLAKAEYPLPIDPIGRLESDIDNRLNSRALDMRNQKTASIFKLRSQVLASIRETLIKRKFIEINTPKIIGSASEGGADLFSLDYFGKQAYLAQSPQLYKEQMTIGLERVFEISSFYRAEKSHTGRHLSEFTSE

SEQ ID NO: 159112 - protein, 120 aa, Unknown
  Bacterial polypetide isolated from the Sargasso Sea
MSDKRKSLGKGLDALLGQSVEVESKNNKQGLTEIKLEQIGPGPFQPRKQIDEHQLKELAQSIQAQGVIQPIVVRERAVRDSHTGVKFEIIAGERRWRASQIAGLETIPAVVRAIADSEAV

SEQ ID NO: 159113 - protein, 78 aa, Unknown
  Bacterial polypetide isolated from the Sargasso Sea
MVEKNFSGMIKALSYGAPPHGGMAPGIDRILMLLADEKNIREVTLFPLNQNGQDLLMNAPSEISEEQLKELNIKNLKK

SEQ ID NO: 159114 - protein, 372 aa, Unknown
  Bacterial polypetide isolated from the Sargasso Sea
MNLLEGLNRQSVVRISGKVQSSKAKDFDFEISATEIQILAKAEYPLPIDPIGRLESDIDNRLNSRALDMRNQKTASIFKLRSQVLASIRETLIKRKFIEINTPKIIGSASEGGADLFSLDYFGKQGYLAQSPQLYKEQMTIGLERVFEISSFYRAEKSHTGRHLSEFTSVDIEAAMMDYTDVMDVLESIVVDVFKNTAENSKTEQKEIGYEIKVPNSPFERVTYTQALEELGDMDIKLEFGEDLQDSHLRSLGDKHPGFFFLTDWPMKLKPFYIHEKDDDPTLSRSFDLQYGYLELSSGGRRLHDPEQLRSRLKEQDLDPTSFEEHLKTFGWGMPPHSGWGMGLDRLMTVLIGIDNVREVVLYPRDPDRLKP

SEQ ID NO: 159115 - protein, 90 aa, Unknown
  Bacterial polypetide isolated from the Sargasso Sea
MKSNYCGEITSSNLNEEVTICGWIHRRRDHGGVIFLDVRDIKGICQAVVNPDNQQSFQLAETIRNEFVVQISEIVRSRLEGTVNKNMHTG

SEQ ID NO: 159116 - protein, 325 aa, Unknown
  Bacterial polypetide isolated from the Sargasso Sea
MIGNDLGDLRRSHYSVELSSLQEGTEVVVMGWVLTVRGHGNIVFATIRDKVGNIQIITKSGECDDDIREKISSLKQHSSIAVIGKTRKNEKSPTGIEVVPSELRVFSEVEKIPPFEPYAKSVKNIDTRLEVRALDLRRTVLQKIFLARSLTLRAIRDYLSTKDFVEINTPKMIATATEGGAALFPIFYYNKEAFLAQSPQLYKEQLTMSFEKVFEIAPIFRAEPSRTNRHLSEAISIDFEEAYVDYNDVMDRIEDLVKACITTVQQFVKENPETDFKVPDMPDKIPRYKYSELIEKMQNAGLKTQWGDDLYPKNLQKICLTGFYF

SEQ ID NO: 159117 - protein, 159 aa, Unknown
  Bacterial polypetide isolated from the Sargasso Sea
MYRTNNCGELNSSFVDQEVKLSGWVNKIRTKGFIIWIDLRDRYGVTQLVFDKERTDASVFEAANNLGREFVIEIDGTVIKRKDVNQNISTGEIEVLVSNFKILNTSITPPFTIENQTDGGDELRMKFRYLDLRREPIKENLIFRNKLSLDVRNYLSDNG

SEQ ID NO: 159118 - protein, 201 aa, Unknown
  Bacterial polypetide isolated from the Sargasso Sea
MDKISVIKNYNLSRKQIDLIDNYILKLKKSNQIHNLVGPSTIDVAWDRHINDSLQLSEFILKKNASIIDFGTGAGLPGVILNIFGYSNILLIDSKMKKINFIKEFAFEQNLEIKTICTRVEKIKNQKFDFIICRAFAPLSKLLDYSRFFTKKNTSLLFLKGRSVKKEIHEAKKSFNFEYDLYPSKSEGDGYVLKINKYKKL

SEQ ID NO: 159119 - protein, 376 aa, Unknown
  Bacterial polypetide isolated from the Sargasso Sea
KGLQTELDVVEGMQFDRGFLSPYFITNADKMTAELDNPLVLLCDKKLSNLQSIVPLLESVVQSSRPLLIIAEEVEGEALATLVVNKLRGGLKVVAVKAPGFGDRRKAMLEDIAILTGGQVISEDLGIKLENVKINDLGSCKKIKVDKDNTTVVDGAGKKSDIEARCASIRKQIDESTSDYDKEKLQERLAKLAGGVAVIKVGGATEVEVKERKDRVDDALNSTRAAVEEGVVTGGGCALLYASEVLKSVKVKGDDQKAGVEIIRKALQAPIRQITANAGVDSSVVVGKLLEGKKGSHGYDAQGAEFCDMIAKGIIDPTKVVRTALQDAASISSLLITTEAMIGDKPEDKDSGGAGGGMPPMGGGMPGMGGMGGMGM

SEQ ID NO: 159120 - protein, 144 aa, Unknown
  Bacterial polypetide isolated from the Sargasso Sea
MNIYRSHYCSELNISNLNQEVVLSGWVDTIRDHGNLIFIDLRDNYGITQCVVDAKHKIFDEITKLSNESVITIKGLVLQRSDETVNKNISTGEIEVKIDSYTLLSISEVLPLPVNSDIEYGEEVRLKNRFLDLRRNKLHKNIFY

SEQ ID NO: 159121 - protein, 292 aa, Unknown
  Bacterial polypetide isolated from the Sargasso Sea
MSDKRKSLGRGLDALLGQSVEAEPKNNKQGLTEIKLEQIGPGPFQPRKQIDEPQLKELAQSIQAQGVIQPIVVRERAVTDSHTGVKFEIIAGERRWRASQIAGLETIPAVVRTIADSEAVAVALIENIQRENLNPLEEANAFQRLIIEYEMSHQEVANAVGRARASVSNALRLLDLPGGVQELVNKKELTMGHARALLSIQNKSMQLELANLIVEKGLSVREAENLVRKIVDKKKAIKPKTSSDPDIQRLENDLTNQLGAKVTIKHKKSGAGILSIKYSSTDELEGILSKIK

SEQ ID NO: 159122 - protein, 124 aa, Unknown
  Bacterial polypetide isolated from the Sargasso Sea
MKSHYCGEITSSNLKEEVTICGWIHRRRDHGGVIFLDVRDIKGICQAVVNPDNEKSFKLAESIRNEYVVKIKGDVRKRLEGTINKNMHTGEIEIEVKDLIILSKANTPVFSIDEYQEINEDVRL

SEQ ID NO: 159123 - protein, 75 aa, Unknown
  Bacterial polypetide isolated from the Sargasso Sea
KFSGMINALSYEPPPHGGIAPGIDRIVMLLANEKNIREVTMFPMNQNAQDLMMNAPSAVSDEQLKELNLLIKKKN

SEQ ID NO: 159124 - protein, 270 aa, Unknown
  Bacterial polypetide isolated from the Sargasso Sea
EPKNNKQGLTEIKLEQIGPGPFQPRKQIDEPQLKELAQSIQAQGVIQPIVVRERAVTDSHTGVKFEIIAGERRWRASQIAGLETIPAVVRAIADSEAVAVALIENIQRENLNPLEEANAFQRLIIEYEMSHQEVANAVGRARASVSNALRLLDLPGGVQELVNKKELTMGHARALLSIQNKSMQLELANLIVEKGLSVREAENLVRKIVDKKKAIKSKTSSDPDIQRLENDLTNQLGAKVTIKHKKSGAGTLSIKYTSTDELEGILSKIK

SEQ ID NO: 159125 - protein, 294 aa, Unknown
  Bacterial polypetide isolated from the Sargasso Sea
MKILIAISSKEYSGPTLDVGMNIARALKSSTTIVDVGQKISEFSLKDVSMANEVMESWDMDRPGVDVLEWAYNYLSKNQFIEEQSMKDGFPKNLLIERGSGRAEVLLKGSALENLSLILRNGDIIKELRDEVHNYSYDLTIIGGSGKRDMAHDMIQYIDSSIFVVNNFNKNENYKILLAVDDSPGTAKAVKYGVRVAQAFNIKVNIVTISKDEHFSEPDKKASAKAAKMMRRSGVDAETIFKIGDPAETIIETSGANHIIIMGASSQSPIAKFFMGSKPLNVMSKCGCPILIVK

SEQ ID NO: 159126 - protein, 774 aa, Unknown
  Bacterial polypetide isolated from the Sargasso Sea
MHLKPFKLVLFFFSSILFAQISGTVTDSVSGKPIENVNITNGVIGTTTNSSGNFLINVPIDTELEFSHIAYKSKLMITKEVISVKLVATVIESDQITVRAGLSDESLQNSVTSVHIITDEEIRDSGSDHFQTLTDQIPNVNWSGGTSRPRYFQIRGVGERSHYFGEGPPNFSVGFVIDDMDFSGLGMIGHLYDLNQIEIFRGPQSSVYGANALAGLISIKSKDPIDQFEMEASTSLGSDNLYGINSLINLESIYGLKIRVSGSYNYSDGFRENLSKNVSNTNKREELFSRMKLNFKSNNKLNLLATFIYSELNNGYDTWAPDNNKDFKTYSDDVGQDSQTSYGYSLRVDFNGYYNTTLITSFTNTDLVHSYDSDWGDSLYWAINHNWSPESFPDSYYTYKYFDQNNKSRSNFTHELRSSFGPVLFGIYYKDLNEKDTAIGWLFNGAATDATSDFQFRTMAAYSQFRHKFSSSFNFKANYRIENSQYDYNGTSQGYNEYWEKVFLDSVTFNTNERMIGFRGAFTYVKNLSTSYYTSFSQGYKSGGINQQPYLADSSRPYKPEFIQSLEFGFKRKSDTYRSNFTFFFSRRIDQQVSVSSQQDEGNPNSFLFYTGNAGSGKNSGVEFDYAQDILNSLSFNARIGILNTWVDKFAYKTENGEAYGGDREASMAPKFMGSLGFHFSILNYDIITNTTFKDEYYFSDSHNSKSKPYSLTNISIRKSFNKIDVRFWVRNILDKRYAIRGFYFGLIPPEFENKLWLSYGDPRQFGLTVDYNF

SEQ ID NO: 159127 - protein, 435 aa, Unknown
  Bacterial polypetide isolated from the Sargasso Sea
GVTVAKEIELADKFENMGAQMIKEVANKTNDSAGDGTTTSTVLCQALATEGMKAVAAGLNPMDLKRGMEAATDAIISELQKNSKIVKSDKEVQQVGTIASNGDGEVGGMISEAMQKVGKEGVITVEEAKSLDTELDVVEGMMFDRGYLSPYFVTNADKMKAEMEDCLILLHEKKLASLQPMLPLLESVVQSTKPLLIISEDVEGEALATLVVNKLRGGLKIAAVKAPGFGDRRKAMLEDIAILTGGQVISEDLGIKLETVTMEMLGKAKRVVVDKENSTIVGGAGKKKDIEARCDQIRKQIDETTSDYDKEKLQERLAKLAGGVAVIKVGGASEVEVKEKKDRVEDAMHATRAAVEEGILPGGGTALLYATSVLKNLKVGNDDQRYGVDIVRKALSAPLKQIAQNSGFDGAVIAGKILESKENSHGFDAQSGKFC

SEQ ID NO: 159128 - protein, 138 aa, Unknown
  Bacterial polypetide isolated from the Sargasso Sea
AAGVKAQWGDDLYPKNLQKIGLSGFYFIVDWPMGPKPFYVKVKKDDPKISESFDLMWGDLELSSGSTRIEKKSELEDRMKNKGMKTEAFDYHLNIFDFGVPPHAGCGIGLERLMMALTGTENIRDTTFYPRDVDRLTP

SEQ ID NO: 159129 - protein, 295 aa, Unknown
  Bacterial polypetide isolated from the Sargasso Sea
MIGTELGDLRRTHYSTELNSLNEGTDVVVMGWVVTVRGHGNIVFATIRDKLGNIQVITKSGECEDDIREKLSHLKEHSSIAVVGKTRKNEKSPTGIEVVPSEMRVFSEVEKIPPFEPYAKTVKNIDTRLEVRAIDLRRNVLQKIFLARSVTLRALRDYLSKEDFVEINTPKMIATATEGGAALFPIFYYNKEAFLAQSPQLYKEQLTMSFEKVFEIAPIFRAEPSRTNRHLSEAISIDFEEAYVDYNDVMDRIEELIKSCISTVQNFVKENTDVEFTVPEVPDKIPRYKYAELMK

SEQ ID NO: 159130 - protein, 388 aa, Unknown
  Bacterial polypetide isolated from the Sargasso Sea
VRDVTGMCQVIVKGDAMSLLEGLNRQSVVRILGKVQASKAKDFDFEVSAIELQVLAKAEYPLPIDPIGRLESDIDNRLNSRALDMRNQKTASIFKLRSQVLASIRETLIKRKFIEINTPKIIGSASEGGADLFSLDYFGKQAYLAQSPQLYKEQMTIGLERVFEISSFYRAEKSHTGRHLSEFTSVDIEAAMMDYTDVMDVLESIVVDVFKNTAENSKTEQQDIGHEIKIPDSPFERVSYTQALEELGNLDIKLEFGEDLQDSHLRSLGDKHPGFFFLTDWPMKLKPFYIHEKDDDPTLSRSFDLQYGYLELSSGGRRLHDPEQLKSRLKEQNLDPASFEEHLKTFGWGMPPHSGWGMGLDRLMTVLIGIDNVREVTLYPRDPDRLKP

SEQ ID NO: 159131 - protein, 365 aa, Unknown
  Bacterial polypetide isolated from the Sargasso Sea
HLIEDLNSSMEGQDVLFGGWVVDLRKLGKMAFLTVRDVTGMCQVIVKGDAMSLLEGLNRQSVVRILGKVQASKAKDFDFEISATELQVLAKAEYPLPIDPIGRLESDIDNRLNSRALDMRNQKTASIFKLRSQVLASIRETLIKRKFIEINTPKIIGSASEGGADLFSLDYFGKQGYLAQSPQLYKEQMTIGLERVFEISSFYRAEKSHTGRHLSEFTSVDIEAAMMDYTDVMDVLESIVVDVFKNTAENSKTEQKEIGHEIKIPDSPFERVSYTQALEELGGMDIKLEFGEDLQDSHLRSLEEKHPGFFFLTDWPMKLKPFYIHEKDDDPTLSRSFDLQYGYLELSSGGRRLHNPEQLKTRLKE

SEQ ID NO: 159132 - protein, 417 aa, Unknown
  Bacterial polypetide isolated from the Sargasso Sea
MPTFLCGRQRKVGAPPHRGNANRPLPKQGKAKERNQQHSAEQAKNLNRHNSPLPLSPLHKIVSQNHPNSNNSNKQRSQRIHLRIQTKPNAREHNQRQRRRPRPRQKRRQNQIVNRQSERQQPPRNQSLRNQRQRNEEKHLERRRPKIKRGFFKRRIQLLHTRLHDDGHIGNTQHHVPDPDRENAAPGRPPQPLGHFDEQQQQRNPLNHLGNHQRRIDHSGIKRKPAKPPHAGQNKPGPRTDNHRRKRRQQRHTQRQPRRRNQLVVLQQRRIPARGKPRPHRDQLRFVERIHNQTHDRNVEKQKPDPQGNELQNPVRLHQRLSSIAFACAYWKNAIGTNNNNTIAHVTADAIGQSALSKNSFHITRPIINVLAPPSNSGITYSPTAGMNTSKQPAIMPFFDNGKVICQNARHGFAPRS

SEQ ID NO: 159133 - protein, 240 aa, Unknown
  Bacterial polypetide isolated from the Sargasso Sea
METWDIDRPGVDVLEWAFGYLSKNKFIEERTTSDGFPKNLLIENDSRRAEVLLKGSAVENLSLILRNGDIIKELRDEVDAYEYNLTIIGGSAKRSMSHDMIQYINSSIFVVNNFNKTINYKILLAVDNSPGTKKAVKYGVRVAQAFGIKVQIITVSESENVNELDLKSSESASKMMRRCGVEAETKFEIGKPEEKIIEMAGEDHIIIMGASTQSPIAKFFVGSKPLNVMQNSNCPILIVK

SEQ ID NO: 159134 - protein, 91 aa, Unknown
  Bacterial polypetide isolated from the Sargasso Sea
TSCFFILGINEEEADEKFGFFLEALKYGCPPHGGIAFGIDRIVMLMTGSSSIRDVIAFPKTQTASCLLTDAPSPAGKAQLNELGVSVKKKS

SEQ ID NO: 159135 - protein, 55 aa, Unknown
  Bacterial polypetide isolated from the Sargasso Sea
MQVIQKNDVNNKFSGMINALSYGAPPHGGIAPGIDRIVMLLANEKNIREITMFPM

SEQ ID NO: 159136 - protein, 64 aa, Unknown
  Bacterial polypetide isolated from the Sargasso Sea
MGAPPHGGIAPGIDRIIMLLADEKNIREVTMFPMNQNAQDLMMNAPSQVEEAQLKELSLEIKKK

SEQ ID NO: 159137 - protein, 113 aa, Unknown
  Bacterial polypetide isolated from the Sargasso Sea
TIFVCNGYELSSGAIRNHITEYLFKVFDKVGYTKDMVKKNFSGMIKALSYGAPPHGGMAPGIDRIVMLLAGQENIREVTLFPLNQNAEDLLMEAPSKVSDKQLKELNIKTIKK

SEQ ID NO: 159138 - protein, 195 aa, Unknown
  Bacterial polypetide isolated from the Sargasso Sea
IAEIVVNEEFKVFADPAKDKGSRIVALNVPNGASLSRAQIDNYTKFVAKLGAKGLAYIKVNSKKIDDMQSPILKFLSDEAITNIVDTVKSEAGDLIFFGAGPKDVVNLSMSSLIKELGQDLDLYTSKWAPLWIKDFPMFERNKDGNLTSLHHPFTLPKCDVQELIEDPETAHAYAYDIVLNGYEIGGGSLKGIFK

SEQ ID NO: 159139 - protein, 44 aa, Unknown
  Bacterial polypetide isolated from the Sargasso Sea
LNPGKFYALPQAPQQFKQLIMVSGFDKYFQIAPCFRDEDARADR

SEQ ID NO: 159140 - protein, 46 aa, Unknown
  Bacterial polypetide isolated from the Sargasso Sea
MTGSSSIRDVIAFPKTQTASCLLTDAPSLAGKAQLNELGVSVKKKS

SEQ ID NO: 159141 - protein, 95 aa, Unknown
  Bacterial polypetide isolated from the Sargasso Sea
PELMYKLFEIAGYSKSDVDQKFSGMINALSYGAPPHGGIAPGIDRIVMLLADEKNIREVTMFPMNQNAQDLMMNAPSKVSDEQLKELGINIKKKN

SEQ ID NO: 159142 - protein, 193 aa, Unknown
  Bacterial polypetide isolated from the Sargasso Sea
MYKENEAISFSGIVRQKIANELKMIDNNVFNFCWITDYPMYEYDEKEKKLDFSHNPFSMPQVQMRDFDKTDPLKILAYQYDLVCNGYELSSGAIRNHIPEYLFKVFSKVGYTKEMVEKNFSGMIKALSYGAPPHGGMAPGIDRIVMLLANQKNIREVTLFPLNQNAEDLLMEAPSEASEKQLKELNIKTVKKN

SEQ ID NO: 159143 - protein, 126 aa, Unknown
  Bacterial polypetide isolated from the Sargasso Sea
DFSKPLEIKAYQYDIVCNGVELSSGAIRNHIPELMYKLFSIAGYDKKLVDEKFSGMINALSYGAPPHGGIAPGIDRIIMLLAGEKNIREVTMFPMNQNAQDLMMGAPSEIDEKLLKELNLSVKKNK

SEQ ID NO: 159144 - protein, 102 aa, Unknown
  Bacterial polypetide isolated from the Sargasso Sea
AIINHIPELMYKLFSIAGYSEKEVNEKFSGMINALSYGAPPHGGIAPGIDRIVMLLAGKENIIEVTLFPMNQNAQDLMMQAPCEVDEKQLKELGIKKDIKKN

SEQ ID NO: 159145 - protein, 83 aa, Unknown
  Bacterial polypetide isolated from the Sargasso Sea
YKNEDVDKKFSGMINALSYGAPPHGGIAPGIDRIIMLLANEKNIREVTMFPMNQNAQDLMMNAPSEVNKSLLKELNLEIKKNK

SEQ ID NO: 159146 - protein, 75 aa, Unknown
  Bacterial polypetide isolated from the Sargasso Sea
FGFLVEALTYGASPHGGIAFGFDRLVMILAGTENIRDVIAFPKTTSATSLMDESPNNVSATQLDELGIQIKESKK

SEQ ID NO: 159147 - protein, 137 aa, Unknown
  Bacterial polypetide isolated from the Sargasso Sea
FNTQDPLEIKAWQYDLVCNGIELSSGAIRNHLPEVMYRAFDIAGYGPQVVEEKFPAMINAFKFGAPPHGGIAPGIDRIVMLIANEPNIREVILFPMNGKAEDLMMSSPSSVEDKQLNELHIKKASIQSKNWQKDTKQ

SEQ ID NO: 159148 - protein, 193 aa, Unknown
  Bacterial polypetide isolated from the Sargasso Sea
MNKFRTHTCAELSDKDIGKNIFLSGWIHRKRDHGNLLFIDLRDHYGVTQCVVENNDKSFPILEKMRPESVVKISGKVVKRSVGTENLDLKTGKVEVSIKEVEILSEANELPIPVFGEQDYPEDLRLKFRFLDLRRFEMQKNIILRSKVISFIRNEMLKLGFLEYQTPILTSSSPEGARDFLVPSRLSPGKFYA

SEQ ID NO: 159149 - protein, 121 aa, Unknown
  Bacterial polypetide isolated from the Sargasso Sea
MKILAYQYDLVCNGYELSSGAIRNHIPEYLFKVFSKVGYSKEAVEKNFSGMIKALSYGAPPHGGMAPGIDRIVMLLANQKNIREVTLFPLNQNAEDLLMEAPSEATDKQLKELNIKTVKKI

SEQ ID NO: 159150 - protein, 89 aa, Unknown
  Bacterial polypetide isolated from the Sargasso Sea
FSVAGYNKSQVRIKFSGMLSALSYGAPPHGGIAPGIDRIVMLLANEKNIREVTLFPMNQNAQDLMMKAPSEVSNNQLKELGIKVDNKKN

SEQ ID NO: 159151 - protein, 126 aa, Unknown
  Bacterial polypetide isolated from the Sargasso Sea
LGRDPKDILGLQYDLSCNGNEVLSGAIRNHKLEIMYKAFSIAGYKEKEVEQRFGGMVNAFKYGSPPHGGCAAGIDRIVMLLADESNIREVIMFPMTQRAEDSLMGAPSAISNEQLRELGLKFIPKS

SEQ ID NO: 159152 - protein, 203 aa, Unknown
  Bacterial polypetide isolated from the Sargasso Sea
MKKFRTHKCNELRKEKVGAEVTLSGWINKKRDHGNLLFIDLRDNYGITQCIIDKENSNFKKLEKTQLETVIKIDGKVVERSKESINKDIETGEIEIVIKNFQVLGECKELPLPVFTDQEYAEEIRLKYRFLDLRRKKIHENIILRSKVISFIRNEMNKLGFLEFQTPILTSSSPEGARDFLVPSRLNPGKFYALPQAPQQFKQ

SEQ ID NO: 159153 - protein, 161 aa, Unknown
  Bacterial polypetide isolated from the Sargasso Sea
MSKYRTHTCGELNLNSKDQTVKLSGWINKKRDHGNLLFLDLRDHYGLTQCVIDESKKIFKEIEKLPLETVLQVEGKVLVREKDTINKNLNTGEIEVGIEKYKILARTKELPLPVFSDQEYSEEIRLKYRFLDLRRNKIHNNIILRSKIFHLLDLKCKNMVF

SEQ ID NO: 159154 - protein, 189 aa, Unknown
  Bacterial polypetide isolated from the Sargasso Sea
MHAYRSHHCAALTELDVGKVVRLSGWVHRKRDHGQLVFIDLRDHFGLTQCVVDSSDASFAVVEATRLESVVTITGTVLRRSDDTINTSLPTGHIEVRIEDFAVQSAADTLPLQVNSDEDSGEETRLRYRYLDLRRTRPHHNVILRAKIIQSIRNRMVAQDFTEFQTPILTASSPEGARDFLVPARLHPG

SEQ ID NO: 159155 - protein, 204 aa, Unknown
  Bacterial polypetide isolated from the Sargasso Sea
MVKYRTHNCNELKESDENKDVILAGWINRERDHGNVLFIDLRDHYGVTQCVIEKTNTKLLKEFENLRAESVVKIHGKVIKRDKETINESLVTGKIEISVDALEVLSAANELPMPVFGENDYPEEIRLKYRFLDIRREELHSNIVLRSSIISYIRKLMSEAGFLEMQTPILTASSPEGARDYLVPSRIHPGKFYALPQAPHNLNN

SEQ ID NO: 159156 - protein, 74 aa, Unknown
  Bacterial polypetide isolated from the Sargasso Sea
EQFGFLMNAFEYGAPPHGGLAFGFDRLCAMLGGQDSIRDFIAFPKNNSGRDVMINSPSEINIEQLNELNISLKK

SEQ ID NO: 159157 - protein, 94 aa, Unknown
  Bacterial polypetide isolated from the Sargasso Sea
LMYKLFSIAGYDKKQVEEKFSGMLNALSYGAPPHGGIAPGIDRIVMLLADEKNIREVTLFPMNQNAQDLMMKAPSKIEEKQLKELGLKIDIKKN

SEQ ID NO: 159158 - protein, 194 aa, Unknown
  Bacterial polypetide isolated from the Sargasso Sea
MHKYRTHKCDELRIENVNDQVKLSGWVHRKRDHGQLIFLDLRDHYGLTQVVVDSSNKNFSIFESLPLESVISVLGIVVERSDETINDNLPTGRIEINLSELDIISQSKALPLQVNSDEDYGEETRLKFRYLDLRRSRPHENIVLRSNVIQTIRNKMLQLGFLEFQTPILTASSPEGARDFLVPSRLNKGKFYAC

SEQ ID NO: 159159 - protein, 84 aa, Unknown
  Bacterial polypetide isolated from the Sargasso Sea
MPESLDGWKRTHHNNELRIEDIGKEVLLMGWVAKRRDHGGVIFVDLRDREGLTQIVFRPDIEAEMHAKAETIRNEFVLAVRGKV

SEQ ID NO: 159160 - protein, 244 aa, Unknown
  Bacterial polypetide isolated from the Sargasso Sea
EPIFYELFTEFGKGKTVSKNPFKKITYKNSMLKYGTDKPDLRNPIEISDVTEIMKRDDVKLDIFKKIIKNNGVVRAIPAPNSSSKPRSFFDGYNNWAKEEGAKGLGYILFEKEKGKLRAKGPIGKFFSEEAVAELVKICKLKENDSIFFSSDKIKEAERISGIVRQKLGKDLNLIDSTKFEFCWITDYPMYEYDEKEKKIDFSHNPFSMPQIDLKDFDKTDPLSIIAYQYDLLCNGYEISSGAI

SEQ ID NO: 159161 - protein, 135 aa, Unknown
  Bacterial polypetide isolated from the Sargasso Sea
MRTNFCGELNKKFIGKEVTICGWIHRRRDHGGVIFLDIRDTTGIVQVVIRPETEETFKIAEQVRSEFVLKATGNVEERPEDSENTSLTTGEIEIDCILIEVLNTAETPAFPLDQSSDVGEDVRLKHRTLDLRRPK

SEQ ID NO: 159162 - protein, 195 aa, Unknown
  Bacterial polypetide isolated from the Sargasso Sea
MNKFRTHNCFELTEKDENKKVILSGWLHRKRDHGNLLFIDLRDHFGITQCVIENNNKFFKTLEKIKPESVLQITGTVVKREKGTENLDLSTGKIEINILNLNILSEAKDLPMPVFGEQDYPEDIRLKYRFLDLRREQMHKNIILRSKVISFIRSEMINFGFLEYQTPILTSSSPEGARDFLVPSRLNPGKFYALP

SEQ ID NO: 159163 - protein, 224 aa, Unknown
  Bacterial polypetide isolated from the Sargasso Sea
MNKYRSHNCSELRNTDIGKNVKISGWLHRKRDHGNLLFLDIRDHFGITQCVIENKDKNFKTLERLKPESVILIKGDVVKRTKDTENKDLETGLIEIKIKDFEVLSSANELPMPVFGEQEYPEETRLKYRFIDLRRKEMHHNIQLRSKIISFLRNKMLENNFLEFQTPILTASSPEGARDFLVPSRTHQGKFYALPQAPQQFKQMIMIAGFDRYFQIAPCLETKM

SEQ ID NO: 159164 - protein, 202 aa, Unknown
  Bacterial polypetide isolated from the Sargasso Sea
MNKYRTHNCSELDENNIGKRIKLSGWIHRKRDHGNLLFIDLRDHFGITQCVIENKDKDFKTLEKIKPESVLMVDGLVVKRSKETQNKDLKTGLIEVKIKSIKILSEAKDLPMPVFGEQDYPEDIRLKFRFIDLRRNEMHENIKLRSRVLSFIRSKMIQSNFLEFQTPILTASSPEGARDFLVPSRVHPGKFYALPQAPQQLN

SEQ ID NO: 159165 - protein, 185 aa, Unknown
  Bacterial polypetide isolated from the Sargasso Sea
MNKYRSHNCSELSEKDINKTVRLSGWIHRKRDHGNLLFIDLRDHYGLTQCVIENNNNNFSLLEKAKPETVIQIDGKIVMREKGTENNDLKTGKIEVQIKSVEVLSFAKELPIPVFGEQDYPEEIRLKYRFLDLRREEMHKNIILRSKVISFIRTEMIKLGFLEYQTPILTSSSPEGARDFLVPSR

SEQ ID NO: 159166 - protein, 219 aa, Unknown
  Bacterial polypetide isolated from the Sargasso Sea
MWCSPQAEAQFGFLLSAFEYGTPPHGGLAFGLDRLTAIICGVTSIRDVMAFPKISSGRDVMIDSPSEVATEQLDELKIMLSPSAGPPPETLPSSAASAAPAPAPAPEKKEGGGNRPPKEKKEEKKSKEERKKEREEAEKNKAEKKEEKKEEKPKGEKAKGEKADEKKPKEEKKPDPEAAAKEAAKAAAKLRAKIIKEGGKKGVEIEGASDMGGLDFSAR

SEQ ID NO: 159167 - protein, 106 aa, Unknown
  Bacterial polypetide isolated from the Sargasso Sea
IELSSGAIRNHIPSLMYKLFSIAGYEKKLVDEKFSGMINALKYGAPPHGGIAPGIDRIVMLLANEKNIREVTMFPMNQNAQDLMMNAPSNVTEEQLKELNLNIKKK

SEQ ID NO: 159168 - protein, 198 aa, Unknown
  Bacterial polypetide isolated from the Sargasso Sea
MNKYRTHNCGALNKDFIKKSVLLSGWVHKKRDHGNLLFIDLRDNFGITQCIADKDNKNFTDLEKIPLETVIKIEGTVLQRSSETINNEIPTGEIEIKINSFEILGKTRELPLPVFSDQEYAEEIRLKYRFLDLRRKKIHNNIIFRSKVISFIRKEMEKLGFNEFQTPILTSSSPEGARDFLVPSRLNPGKFYALPQAP

SEQ ID NO: 159169 - protein, 289 aa, Unknown
  Bacterial polypetide isolated from the Sargasso Sea
IKTVYAKSKWQLKEFITITYAEAMEKYGCDRPDLRFGLPMKTITEVVANTPFQVFRNPIENGGIVKAIKVSKEEMGEKRMSKGAIEKLTSLAQSNGLGGLAYIIVNEDDLQSPIIKFLGEDIGEKIIEIMDAKVGDIVFFSAADYKTANKALDSVRQELGSMLSLVPKNVLQPAWVIDFPQFEEKEEGGWTFSHNPFSMPKPEYIEQHMNGENPGEILAQQYDLILNGYEIGGGSVRAHRGDILEATFKIMGYNHEEMLASVGNIYKAFQYGAPPHGGIAWGLDRLLMI

SEQ ID NO: 159170 - protein, 101 aa, Unknown
  Bacterial polypetide isolated from the Sargasso Sea
MEGWRVCAYVCAYVCAYVCAYVCAYVCIWRGPPPPPHGGLACMCICMHMEPPPPPPHAGLACMCICMHMEPPPPPPPHGGLASMCICMHMEPPPPPPHGGL

SEQ ID NO: 159171 - protein, 87 aa, Unknown
  Bacterial polypetide isolated from the Sargasso Sea
RIAGYSKTNVDEKFSGMINALSFGAPPHGGLAPGIDRIVMLLANEKNIREVTMFPMNQNAQDLMMNAPSNVNDEQLKELNLKIKKKN

SEQ ID NO: 159172 - protein, 104 aa, Unknown
  Bacterial polypetide isolated from the Sargasso Sea
SGAIRNHIPELMYKLFSIAGYDKKNVEEKFSGMLNALSYGAPPHGGIAPGIDRIVMLLANEKNIREITLFPMNQNAQDLMMKAPSEVDLKQLKELGIKIDTKKN

SEQ ID NO: 159173 - protein, 98 aa, Unknown
  Bacterial polypetide isolated from the Sargasso Sea
NHIPELMYKLFAVAGYSKKDVDEKFSGMINALSYGAPPHGGIAPGIDRIIMLIANEKNIREVTMFPMNQNAQDLMMNAPSKVNNNQLKELNLSLKINK

SEQ ID NO: 159174 - protein, 207 aa, Unknown
  Bacterial polypetide isolated from the Sargasso Sea
MNKYRSHNCGELTIKDKNKNISLSGWINKKRDHGNLLFLDLRDNYGVTQCVIENSHEKFKELEKLSLETVIKIDGKVLERSKDTINKDLNTGEIEISIISYEVLGKTKELPLPVFSDQEYAEEIRLKYRFLDLRRKKIHQNIILRSKVIAFIRSEMQKLGFLEFQTPILTSSSPEGARDFLVPSRLNPGKFYALPQAPQQFKQLIMV

SEQ ID NO: 159175 - protein, 70 aa, Unknown
  Bacterial polypetide isolated from the Sargasso Sea
LSFGAPPHGGMAPGIDRIVMLLAEKSNIREVTLFPMNQNAQDLLMGAPTKASETQLKELNIKIVEKNKKK

SEQ ID NO: 159176 - protein, 185 aa, Unknown
  Bacterial polypetide isolated from the Sargasso Sea
MNKYRSNNCSELTEKDENKKVILSGWVHRKRDHGNLLFIDLRDHFGLTQCVIENKNKYFSILEKIKPESVILIKGKVVLRASGTENTELMTGKIEINIESVKVLSNAKELPMPVFGEQEYPEEIRLKYRFLDLRRDEMHHNIILRSKVISFIRTEMTKLGFLEFQTPILTSSSPEGARDFLVPSR

SEQ ID NO: 159177 - protein, 208 aa, Unknown
  Bacterial polypetide isolated from the Sargasso Sea
MNKYRDYYLKDINRELVNKKITVSGWVNRSRDHGNLLFIDLRDSSSLLQCVVDNTSKNFNELSKIKNEDVIKIYGQITKRSVETINSNLGSGEVELKIENFEILSQCSKTLPLEVNSDNDYGEEVRLKYRYLDLRRSKMQHNIKLRNNIINFVREFMNNEGFMELATPILTAPSPEGARDYLVPSRIHKGSFYALPQAPQQFKQLYMA

SEQ ID NO: 159178 - protein, 96 aa, Unknown
  Bacterial polypetide isolated from the Sargasso Sea
HKPDLMYKLFSIAGYTKKEVDNKFRGMINALSYGAPPHGGIAPGVDRIVMLLSNEKNIREVTLFPMNQNAQDLMMNSPSEVSEEQLKELNLSLKKK

SEQ ID NO: 159179 - protein, 197 aa, Unknown
  Bacterial polypetide isolated from the Sargasso Sea
MWRITKSHKDKEISLSGWINKKRDHGNLLFMDLRDNYGITQCVIDKSNEIFKKIEKLSLETVVKVLGVVIERSNETINKNIPTGEIEVKIINIDILGATKELPMPVFSDQEYAEEIRLKYRFLDLRRKKIHQNIILRSKIISFIRNEMQKLGFLEFQTPILTSSSPEGARDFLVPSRLNPGKVLWLYLRHHNNLSNL

SEQ ID NO: 159180 - protein, 49 aa, Unknown
  Bacterial polypetide isolated from the Sargasso Sea
MRSDYCGEINDKFIGKEVKVCGWVHRRRDHGGLIFLDLRDVSGIVQLVI

SEQ ID NO: 159181 - protein, 173 aa, Unknown
  Bacterial polypetide isolated from the Sargasso Sea
QGQEPVTVEVPELPFPRIPYCDAIEIVQKGGGEIEWGDDIESHHCDIIAAEYPGFHFLPRWPMSMKPFYIFHNENEKGSTGGQLSRGFDLNYGRDEMTSGGQREHRVDVLEQNLRNMDLDPADFTFYTDGFRYGAPPHAGWGLGVARLLMILTGAGNVREVVLFPRDRSRVTP

SEQ ID NO: 159182 - protein, 51 aa, Unknown
  Bacterial polypetide isolated from the Sargasso Sea
LDRLVMVMSNADSIRDVIAFPKTQSAQCVMTDAPGIVSLNQVSELGIRIKI

SEQ ID NO: 159183 - protein, 170 aa, Unknown
  Bacterial polypetide isolated from the Sargasso Sea
MNKYRTHTCGELTKKFTKKDVILSGWINKKRDHGNLLFVDLRDHYGITQCVIDKENKFFKELEKLQLETVIKVNGKVIERTKETINKDLLTGEIEVAIEKFEIIGKTKELPLPVFSDQEYSEEIRLKYRFLDLRRKQIHNNIILRSKVISFIRKEMEKMDFLEFQTPILT

SEQ ID NO: 159184 - protein, 61 aa, Unknown
  Bacterial polypetide isolated from the Sargasso Sea
MCEDIGASHIGKQVMVSGWVHRRRDHGGVIFIDLRDVSGILQLVFDPENQDLFATAEKIRS

SEQ ID NO: 159185 - protein, 93 aa, Unknown
  Bacterial polypetide isolated from the Sargasso Sea
MRTNYCGELGKDFAGKSVTVCGWVHRRRDHGGVIFLDLRDTTGMVQIVVNPEQADSFTIADNVRSEYVLKVTGLVEERPQDSENLTLATGEIE

SEQ ID NO: 159186 - protein, 99 aa, Unknown
  Bacterial polypetide isolated from the Sargasso Sea
MRTDYCGNIDSTYIGQEVTLCGWVNKRRDLGGVIFIDLRDREGIVQVVFDPDLPDVLSVANTLRGEFCVKLTGKVRARPEGQINKEMRTGEIEILGTGL

SEQ ID NO: 159187 - protein, 147 aa, Unknown
  Bacterial polypetide isolated from the Sargasso Sea
KKEIDFSHNPFSMPQIEMKEFDKIDPLKILAYQYDLVCNGYELSSGAIRNHIPDYLYKVFEKVGYSKKMVEKNFSGMIKALSYGAPPHGGMAPGIDRIVMLLADQKNIREVTLFPLNQNAEDLLMQAPSEATEKQLKELSIKTVKKN

SEQ ID NO: 159188 - protein, 157 aa, Unknown
  Bacterial polypetide isolated from the Sargasso Sea
MNKYRTHNCSELSENEINKNVHLSGWLHRKRDHGNLLFIDLRDHYGITQCVIENKNKFFPVLEKSKPESVLKISGKVVKRSSETENLDLKTGKIEISIMSVKVLSDAKELPLPVFGEQDYPEEVRLKYRFLDLRREEMHKNIILRSKVISFIRSEML

SEQ ID NO: 159189 - protein, 99 aa, Unknown
  Bacterial polypetide isolated from the Sargasso Sea
IRNHIPQLMYKLFSLVGYDKNQVDEKFSGMINALSYGAPPHGGIAPGIDRIVMLLANEKNIREVTMFPMNQNAQDLMMDAPSEVSPDQLKELNLSLKKK

SEQ ID NO: 159190 - protein, 134 aa, Unknown
  Bacterial polypetide isolated from the Sargasso Sea
MRNKICEELNNTDIGKLVNLCGWVDRRRDHGGVIFIDLRDHSGFLQITINPDDGADLFKQAETLRNETVIMVSGIINERPKDSINTNLSTGELELKVKDLQILNQIKNNLPFPVSIHDYENTKEELRLKYRYLD

SEQ ID NO: 159191 - protein, 53 aa, Unknown
  Bacterial polypetide isolated from the Sargasso Sea
DRIVMLLSDTTNIRDVIAFPKTQSASCLLTEAPSVVSDDQLDELNISSTSNKE

SEQ ID NO: 159192 - protein, 114 aa, Unknown
  Bacterial polypetide isolated from the Sargasso Sea
VCNGYELSSGAIRNHIPEYLFKVFKKVGYSKDMVEKNFKGMIKALSYGAPPHGGMAPGIDRIVMLLANEKNIREVTLFPLNQNAQDLLMGAPSEVSQNQLKELNIKLGNKKSNS

SEQ ID NO: 159193 - protein, 135 aa, Unknown
  Bacterial polypetide isolated from the Sargasso Sea
MEVYRTHNCNELTLNDVDKNVTLSGWVHIIRDHGGVLFIDLRDHYGITQVVVDPDSKDFGTAENFRSEWCIQIIGKVKSRDTDLINRNLNTGEIEVFIESAKIITKSYDLPLPVFGELEYPEETRLKYRFLDLRR

SEQ ID NO: 159194 - protein, 61 aa, Unknown
  Bacterial polypetide isolated from the Sargasso Sea
HGGIALGLDRIVMLLTQTENIRDVIAFPKTQSASCLLTDAPNIVDESQLNELHIKKDLNEE

SEQ ID NO: 159195 - protein, 200 aa, Unknown
  Bacterial polypetide isolated from the Sargasso Sea
RTHNCGELNKSNVDQNIILSGWINKKRDHGNLLFIDLRDNYGITQCVIDKKNNYFKELEKIQLESVIKVLGKVIERSKETINQDINSGEIEIKIDTFEVLGTCKELPMPIFSDQEYSEEIRLKYRFLDLRRKKIHENIILRSKIISFIREKMGKLGFLEFQTPILTSSSPEGARDFLVPSRLNKGKFYALPQAPQQFKQL

SEQ ID NO: 159196 - protein, 190 aa, Unknown
  Bacterial polypetide isolated from the Sargasso Sea
KEAEKISGLVRQKLGKDLNLINNKNFEFCWITDYPMYQYDEKEKKIDFSHNPFSMPQTDIKNFDKADPLSILAYQYDLVCNGYEISSGAIRNHLPELMYKVFSKVGYSKEDVNKKFEGMIKALSYGAPPHGGMAPGIDRIVMLLANKSNIREVTLFPMNQNAQDLLMGAPSEVSKNQLIELSLKTIEKKE

SEQ ID NO: 159197 - protein, 272 aa, Unknown
  Bacterial polypetide isolated from the Sargasso Sea
LLNEKFLKIKYEDALINYGTDKPDLRNPLIINDVTNIFKRDDVKFDIFKKLVKKGSIVRCILTKNTIDKPRSFFDNIDKWAKSEGSSGLAYLSLSSENQLSAKGPVGKFFSKDSLEDLMKITNANLGDSIFFACGKKEEVEKLLGIARNKLATDLNIINKDSFAFCWIIDYPMFELDEITNKIKFSHNPFSMPQGDVSKLDFNNPLKIKAFQYDIVCNGIELSSGAIRNHIPSLMYKLFSIAGYEKQFVDDKFSGMINALKYGAPPPWWNCS

SEQ ID NO: 159198 - protein, 100 aa, Unknown
  Bacterial polypetide isolated from the Sargasso Sea
IRNHIPELMYKLFDIAGYSKSDVDQKFSGMINALSYGAPPHGGIAPGIDRIIMLLANEKNIREVTMFPMNQNAQDLMMNAPSNVSENQLKELNLLIKNKK

SEQ ID NO: 159199 - protein, 83 aa, Unknown
  Bacterial polypetide isolated from the Sargasso Sea
ALGFSKEEAQAQFGFLMGAFEYGAPPHGGIAFGFDRLCALFAGQDSIRDFIAFPKNTSGRDVMIDSPSEVSEAQLQELSIKTK

SEQ ID NO: 159200 - protein, 47 aa, Unknown
  Bacterial polypetide isolated from the Sargasso Sea
MNAFRSHNCDELNASNQGDMVRLSGWVHRVRDHGGILFVDLRDHYGF

SEQ ID NO: 159201 - protein, 105 aa, Unknown
  Bacterial polypetide isolated from the Sargasso Sea
SSGAIRNHIPDLMYKLFSIAGYSKEDVDVKFSGMINALSYGAPPHGGIAPGIDRIVMLLANKKNIREVTLFPMNQNAEDLLMQAPSEVDILQLKELGIKVDIKKN

SEQ ID NO: 159202 - protein, 56 aa, Unknown
  Bacterial polypetide isolated from the Sargasso Sea
GLDPEGFNHYLDPFRYGMPPHAGWGLGLDRLSMIFAGAKNVRECVLFPRDRTRMTP

SEQ ID NO: 159203 - protein, 71 aa, Unknown
  Bacterial polypetide isolated from the Sargasso Sea
LNALSYGAPPHGGIAPGVDRIVMLLANEKNIREVTLFPMNQNAQDLMMKAPSEVDAKQLKELGIKTDIKKN

SEQ ID NO: 159204 - protein, 76 aa, Unknown
  Bacterial polypetide isolated from the Sargasso Sea
QKFSGMINALSYGAPPHGGIAPGIDRIVMLLANEKNIREVTMFPMNQNAQDLMMNAPSEVNENQLKELGLSYKTKK

SEQ ID NO: 159205 - protein, 80 aa, Unknown
  Bacterial polypetide isolated from the Sargasso Sea
VEDKFSGMLNALSYGAPPHGGIAPGIDRIVMLLAGEKNIREVTLFPMNQNAQDLMMNAPSEVGADQLKEIGIKTDLKKKN

SEQ ID NO: 159206 - protein, 180 aa, Unknown
  Bacterial polypetide isolated from the Sargasso Sea
MNKYKTHNCSQLRENDINKNVILSGWLHRKRDHGNLLFIDLRDHYGITQCVIENNNSFFPILEKARSESVIKISGKVVNRSKGSENTDLDTGKVEVNIKAVEILSSARELPIPVFGEQDYPEDIRLKYRFLDLRREEMHKNIILRSKVISFIREEMLKLGFLEFQTPILTSSSPEGARDF

SEQ ID NO: 159207 - protein, 79 aa, Unknown
  Bacterial polypetide isolated from the Sargasso Sea
VDEKFSGMINAFNFGAPPHGGIAPGIDRIVMLLADKENIREVTLFPMNQNAQDLMMQAPSEINDKQLKELGLKKEIKKN

SEQ ID NO: 159208 - protein, 64 aa, Unknown
  Bacterial polypetide isolated from the Sargasso Sea
GAPPHGGIAPGIDRIVMLLANEKNIREVTMFPMNQNAQDLMMNAPSEISEDQLKELNLSLKKKS

SEQ ID NO: 159209 - protein, 95 aa, Unknown
  Bacterial polypetide isolated from the Sargasso Sea
PEYLFKVFSKVGYSKEAVEKNFSGMIKALSYGAPPHGGMAPGIDRIVMLLANQKNIREVTLFPLNQNAEDLLMEAPSEATDKQLKELNIKIVKKI

SEQ ID NO: 159210 - protein, 67 aa, Unknown
  Bacterial polypetide isolated from the Sargasso Sea
ALSYGAPPHGGIAPGIDRIVMLLAEEKNIREVTMFPMNQNAQDLMMNAPSEVGENQLKELNISKRKK

SEQ ID NO: 159211 - protein, 71 aa, Unknown
  Bacterial polypetide isolated from the Sargasso Sea
MINALSYGAPPHGGIAPGIDRIVMLLANEKNIREVTMFPMNQNAQDLMMNAPSDVSENQLKELSIKLKSKK

SEQ ID NO: 159212 - protein, 85 aa, Unknown
  Bacterial polypetide isolated from the Sargasso Sea
GYSEKDVNEKFSVMINALSYGAPPHGGIAPGIDRIVMLLADKNNIREVTLFPMNQNAQDLMMSAPSDVEDKQLKELNIKLDIKKN

SEQ ID NO: 159213 - protein, 263 aa, Unknown
  Bacterial polypetide isolated from the Sargasso Sea
ATATEGGAALFPIFYYNKEAFLAQSPQLYKEQLTMSFEKVFEIAPIFRAEPSRTNRHLSEAISIDFEEAYVDYNDVMDRIEDLIKTCVETVQNFVKENENVDFQIPEIPDKIPRYKYSELIEKMQSAGVKAQWGDDLYPKNLQKIGLTGFYFIIDWPMGPKPFYVKVKKDDPKISESFDLMWGDLELSSGSTRIEKKSELENRMKNKGMNVDAFGYHLNVFDFGVPPHAGCGIGLERLMMALTGTENIRDTTFYPRDVDRLTP

SEQ ID NO: 159214 - protein, 155 aa, Unknown
  Bacterial polypetide isolated from the Sargasso Sea
MYHYDEKEKKLDFSHNLFSMPQIDIKDFDKSDPLEILAQQYDLVCNGYELSSGAIRNHIPEYLFKVFSKVGYSKEMVEKNFSGMIKALSYGAPPHGGMAPGIDRIVMLLADQKNIREVTLFPLNQNAEDLLMNAPSEVSEKQLKELSIKTVKKNN

SEQ ID NO: 159215 - protein, 89 aa, Unknown
  Bacterial polypetide isolated from the Sargasso Sea
LFSIAGYDKNQVDEKFSGMINALSYGAPPHGGIAPGIDRIVMLLANEKNIREVTMFPMNQNAQDLMMNAPSEVNPDQLKELNLALKTKK

SEQ ID NO: 159216 - protein, 98 aa, Unknown
  Bacterial polypetide isolated from the Sargasso Sea
LPDLMFKAFEIAGHSKEHVMKNFGGMVNAFKYGVPPHGGIAPGIDRIVMLLAEEKNIREVILFPMNQQAQDLMMNAPADVPSTNLKDLNIQTLEPEED

SEQ ID NO: 159217 - protein, 177 aa, Unknown
  Bacterial polypetide isolated from the Sargasso Sea
MKFSDGILTGGISKFFSDDLHSKITKKLNMDNGDIIFIIGDDIKTTQLSLGALRIAIAKKEEYTKSNDFKPVWITDFPMFEYNQEDKRYHSLQHPFTQPKSNDLEKLKSSPESIPSKQYDLIINGYEVAGGSVRIHNSNMQKVIFDILGIDRKEANERFGFFIDALKYGTPPHGGIA

SEQ ID NO: 159218 - protein, 193 aa, Unknown
  Bacterial polypetide isolated from the Sargasso Sea
MLFQSGKQAESSQYLDTLRRKIYTIPNENTYEFVWIDDFPYFEIENGELQPSHHPFTSPKDTSEFLSNPNDAKALHYDLVLNGIELGSGSQRINDPKLQKEVLSKWGLSESEINDRFGWFIEALSYGSPQHAGFAVGIDRFIAEMMNADSIRDVIPFPKTQSGLDPLTNAPSNLSILELQEYNISIESIENEE

SEQ ID NO: 159219 - protein, 94 aa, Unknown
  Bacterial polypetide isolated from the Sargasso Sea
MGGQLSRGFDLNYGRDEMTSGGQREHRVEVLEQNLRDMDLDPSDFTFYTDGFRYGAPPHAGWGLGVARLLMVLTGAGNVREVVLFPRDRSRVTP

SEQ ID NO: 159220 - protein, 95 aa, Unknown
  Bacterial polypetide isolated from the Sargasso Sea
PELMYKLFNIAGYSKKDVEEKFSGMINALSYGAPPHGGIAPGIDRIVMLLADEKNIREVTMFPMNQNAQDLMMNAPSTISEDQLKELNLTVKKKT

SEQ ID NO: 159221 - protein, 249 aa, Unknown
  Bacterial polypetide isolated from the Sargasso Sea
MGLARFPAPRPSARSGVVVPAVHRRRFTAAVVPPRAVAADADVETANLLPDALQWPARDQTCGTLREQDEGRTVTLCGWVDKQRDMGGIVFADVRDHTGFVQVFSDADTPKEATDALAAMRAEWVVCVTGRVKKRTAPNDKVPTGMVEVAADKVTVLNTVAKSLPFSISGAPEGDDDELREEVRLKNRVLDLRRPQMVRNLRLRAKTIRALRKVLEDTHDFLEVETPILTRSTPEGARDYLVPSRLQPG

SEQ ID NO: 159222 - protein, 71 aa, Unknown
  Bacterial polypetide isolated from the Sargasso Sea
SQFGFLIEALKYGAPPHGGIAFGLDRLAAVLKGKDVIRDFIAFPKNNSGKDLMIDAPSKLTKDQLKDLSQK

SEQ ID NO: 159223 - protein, 205 aa, Unknown
  Bacterial polypetide isolated from the Sargasso Sea
MSKYRTHTCGELNIKNNGENVLLSGWVNKKRDHGNLLFIDLRDNYGITQCVIDNENNLFNKIEKTPLETVIQFEGKVVKREEDTINRQLNTGEIEIKISNFKILGKTKELPLPVFSDQEYSEEIRLKYRFLDLRRNKIHKNINLRSKVISYIRKEMENFGFLEYQTPILTSSSPEGARDFLVPSRLNPGKFYALPQAPQQFKQLI

SEQ ID NO: 159224 - protein, 238 aa, Unknown
  Bacterial polypetide isolated from the Sargasso Sea
RDHETKVQIVTDKPDKFDNVKNEYYVSVNGVLVKRKKENINKEVLFGDIEIELSNLEIISESKTLPFQIEDDIDTDEQIRLKHRYLDIRRSEMNKNIIARSKTFKSIRESMNKLGINELDTPTLIKSTPEGAKDFIVPSRKSPGNFYALPQSPQMYKQLFMLSGLKNYYQIAKCYRDEDSRKDRQPEFTQLDIEISNGNPEIVQKIIESTMKHVLKNVYSIQVKTPFKKMTYDEAMNM

SEQ ID NO: 159225 - protein, 156 aa, Unknown
  Bacterial polypetide isolated from the Sargasso Sea
MRSDYCGEINDKFIGKEVKVCGWVHRRRDHGGLIFLDLRDVSGIVQLVINPEIGESFKKAEQVRSEYVLQAVGKVNDRPDDAENHALTTGSIEIIVDELNVLNAAETPAFPLDNYTEVGEEVRLKNRTLDLRRETMQQNIKTRSKLTNNIRNYLEE

SEQ ID NO: 159226 - protein, 169 aa, Unknown
  Bacterial polypetide isolated from the Sargasso Sea
MNKYRTHNCSELSEKEINKNVCLSGWLHRKRDHGNLLFIDLRDHYGMTQCVIENNNKFFPILEKSKPESVIKIIGKVVKRSSGTENLDLKTGKIEISIESAEILSNAKELPMPVFGEQDYPEDIRLKYRFLDLRRDEMHNNIILRSKVISFIRSEMLKLGFLEYQTPIL

SEQ ID NO: 159227 - protein, 184 aa, Unknown
  Bacterial polypetide isolated from the Sargasso Sea
MNKYRTHNCGELNLKNNDQEVLLSGWINKKRDHGNLIFIDLRDNYGLTQCVIDKKNKQFNELEKTQLETVIRISGKVVKRNSETINKDIETGEIEVTIFSFDVLGTCKELPIPVFTDQEYSEEIRLKYRFLDLRRKKVHENINLRSKVISFIRNEMEKMGFNEFQTPILTSSSPEGARDFLVPK

SEQ ID NO: 159228 - protein, 189 aa, Unknown
  Bacterial polypetide isolated from the Sargasso Sea
NSLSFLRNYIAKENGLIDDNIMKFLWVTDFPLFEKDDENKWQPAHHVFSSPKLEDIKFLDTDPGKVNADLFDLVCNGVELGSGSIRIHDRDLQEKVFDVIGYSSSEVSNLFGHLLDSFEFGVPPHGGMGLGLDRLVAMLAKEDSIREVIAFPKTQTASDLLFGSPDMITDEQLSELSIEIIEEEEKSKK

SEQ ID NO: 159229 - protein, 155 aa, Unknown
  Bacterial polypetide isolated from the Sargasso Sea
MYEYDEKEKKIDFSHNPFSMPQIDIKDFDNADPLKILAYQYDLVCNGYELSSGAIRNHIPEYLFKVFSKVGYPREMVEKNFSGMIKALSYGAPPHGGMAPGIDRIVMLLAGQKNIREVTLFPLNQNAQDLLMNAPSEVSEKQLKELSIKILKKSN

SEQ ID NO: 159230 - protein, 193 aa, Unknown
  Bacterial polypetide isolated from the Sargasso Sea
MKIDDLIKSKVNSEVSDLRGWVSSIRDHGGLVFIELRDSSSKIQIVLDSENVDIDTFKSEYYISVNGTYIKRDKSMINKSQQFGEYEISADSYSIISKSKPLPFQIEDSIDTDENIRLKYRYLDLRREDMKRNILARSNTFKSIRNSMDSLSFLELDTPTLTKSTPEGAKDFFSPSRKQSGSFYALPQSPPDV

SEQ ID NO: 159231 - protein, 243 aa, Unknown
  Bacterial polypetide isolated from the Sargasso Sea
MTRSEIDALDELVKDYGSNGLGWFKIENSTVSGPLSKITTDKENEEILKLGDGMLLFQSGNMEIYQVLDIIRREIFSPVDTYSFAWIYDFPYFEVENGEIQPSHHPFTSPKDTENFIEDPNNATALHYDLVLNGSELGSGSQRINSPDIQRKVLEMWGLSDDDIENRFGWFIEALSYGTPQHAGIALGIDRIIAVMLNVDSIRDVIPFPKTQSGLDPLTNAPTIIDENELEDYNLKYIEVTDE

SEQ ID NO: 159232 - protein, 143 aa, Unknown
  Bacterial polypetide isolated from the Sargasso Sea
MNHYRTHNCSELRAKDVGETVKISGWVHRKRDHGGLLFIDLRDHYGIMQCVTDMESDVFKLVEPLKVESVIKVSGKLVKRSDDTINEKLPTGEIEIQISELEILSTSETLPLQVNSDDDAGEEIRLRYRYLDLRRERLHKNII

SEQ ID NO: 159233 - protein, 56 aa, Unknown
  Bacterial polypetide isolated from the Sargasso Sea
GLDRTVMLMADCESIRDVIAFPKTQTASCLLTTAPASASSKQLHELGIKLSKPKSE

SEQ ID NO: 159234 - protein, 101 aa, Unknown
  Bacterial polypetide isolated from the Sargasso Sea
AIRNHIPELMYKLFSVAGYDKKTVDDKFSGMINALSYGAPPHGGIAPGIDRIIMLLAGEKNIREVTMFPMNQNAEDLMMCAPSEVSNEQLKELNLSIKKNK

SEQ ID NO: 159235 - protein, 99 aa, Unknown
  Bacterial polypetide isolated from the Sargasso Sea
RNHKPDLMYKLFSIAGYNKAEVDEKFSGMINALSYGAPPHGGIAPGIDRIVMLLANEKNIREVTMFPMNQNAQDLMMNAPSEINQDQLKELNLSIKTKN

SEQ ID NO: 159236 - protein, 69 aa, Unknown
  Bacterial polypetide isolated from the Sargasso Sea
MHFSYGAPPHGGIAPGIDRIVMLLANEKNIREVTMFPMNQNAQDLMMNAPSQVSENQLKELNIALKKNK

SEQ ID NO: 159237 - protein, 77 aa, Unknown
  Bacterial polypetide isolated from the Sargasso Sea
MKNFGFLIEALEMGAPPHGGIAFGLDRITMLIIGADSIRETIAFPKNQQAKCLLTNAPSNVSESQLKELDIEITIDE

SEQ ID NO: 159238 - protein, 180 aa, Unknown
  Bacterial polypetide isolated from the Sargasso Sea
MNKFRTHTCGELTKKFTKKNVILSGWINKKRDHGNLLFVDLRDHYGITQCVIDKENKFFKELEKLQLETVIKVNGKVIERSKETINKDLLTGEIEVAIEKFEIIGKTKELPLPVFSDQEYSEEIRLKYRFLDLRRKQIHNNIILRSKVISFIRKEMEKMDFLEFQTPILTSSSPEGARDF

SEQ ID NO: 159239 - protein, 120 aa, Unknown
  Bacterial polypetide isolated from the Sargasso Sea
MNVLAYQYDIVCNGIELSSGAIRNHRPDIMKKAFEIAGYGESEIKSKFSALFDAFHYGVPPHGGCAPGLDRIIMLLSENENIREVIAFPFNQRAQDLMMNAPVKIKDKQLKELNLKKVSD

SEQ ID NO: 159240 - protein, 49 aa, Unknown
  Bacterial polypetide isolated from the Sargasso Sea
MRTEYCGNVTKEHLGKDVSICGWVHRRRDHGGVIFLDIRDLEGICQAVI

SEQ ID NO: 159241 - protein, 167 aa, Unknown
  Bacterial polypetide isolated from the Sargasso Sea
MRTNFCGELNKKFIGKEVTICGWIHRRRDHGGVIFLDIRDTTGIVQIVIRPETKETFKIAEQVRSEFVLKATGNVEERPEDSENTTLTTGEIEIDCSSIEVLNTAETPAFPLDQSSEVGEDVRLKHRTLDLRRPVMQENLRIKSKLTKSIRDYLEKHSFVDIETPIL

SEQ ID NO: 159242 - protein, 253 aa, Unknown
  Bacterial polypetide isolated from the Sargasso Sea
FPIFYYNKEAFLAQSPQLYKEQLTMSFEKVFEIAPIFRAEPSRTNRHLSEAISIDFEEAYVDYNDVMDRIEDLIKTCVETVRNFAKENENIDFQIPEIPDKIPRYKYSELIEKMQATGVKAQWGDDLYPKNLQKIGLTGFYFIIDWPMGPKPFYVKVKKDDPKISESFDLMWGDLELSSGSTRIEKKSELEDRMKNKGMNVDAFGYHLNVFDFGVPPHAGCGIGLERLMMALTGTENIRDTTFYPRDVDRLTP

SEQ ID NO: 159243 - protein, 697 aa, Unknown
  Bacterial polypetide isolated from the Sargasso Sea
MLADAHMPLGNLRLLDAPAQRQMLALSHSAAAPQANERVHQRIAAQAEATPDALAVQAGDASLSYAQLNHRANRLAHRLLALGVGPGQRVGLASRRGPQLIVSLLAVLKSGAAYVPLDPEYPAERLAYMLADSRLDVLLSETGLLADLPLPRGLTRMDFSASGDELTGYPTTNPPNHAAAADLAYVIYTSGSTGQPKGVAIDHAALGQFCDSATLYSRLSAEDRVLQFATFSFDGFVEQCFPPLCAGAALIMRGDELWDAGQLAQEIVEQGVTLADLPAAYWYLLAQECAEHRRSLGKLRQVHVGGEAMSVEGVRAWYAAGLGNVRLVNTYGPTEATVVSSVHECQLADANDAYGVPIGQAIAGRGLYVLDSGFELLATDGVGELCIGAEVGLAQRYFDRPALTAERFLPDPFSAMPGARLYRSGDLARYNPAGALEYVGRIDHQVKIRGLRIEMGEIEASLQALPNVREAAVLAQPSATGVQLVAYVVPAEGQALEAQALAARLRQTLPDYMVPGHWVVLDALPLNHNGKLDRRALPTPDLNQASAAYVAPQSPLQIQLAAIWQAVLQVEQVGLEDHFFERGGHSLLATQVISRVRHDLKLEVPLRALFEQPTLAAFAAACAGVQADTAPVMQAAGREQPLALSFAQERQWFLWQLDPTSAAYHVPSALHLRGELHSAALERAVEALVQRHEPLRT

SEQ ID NO: 159244 - protein, 331 aa, Unknown
  Bacterial polypetide isolated from the Sargasso Sea
TQRLRKMAYFISDQLNINKEKLEIASSVSKSDLASDLVSEFPELQGEMGKYFALNQGFEQDVSNAISEHYLPIGNSSFIPKKPISYSLSILDKLDNLVGFYLINEKPTSSKDPFALRRSAIGLLRTIIENNLVINISDLIDYFIRIYLEQGVKEKNTQSKKELINFLRERMKNILKEKRIRADIIEASISSHNNDNFLELYKKTLIMNKFISKELGKNAVSTYKRAYNILEQERLISKDGPDAVLFKEEEEKELFERINIIRKAFTVKEERKNYEEHLKLLSDTKLSTDKFFEKVKVNDDNNDIKNNRLELLQILCSTFNTFVDFSKLEGS

SEQ ID NO: 159245 - protein, 55 aa, Unknown
  Bacterial polypetide isolated from the Sargasso Sea
MDSKKNNSKKKSQTFQETILNLQKFWSKKGCVILQPYDMEVGAGTFHPATTLKSL

SEQ ID NO: 159246 - protein, 68 aa, Unknown
  Bacterial polypetide isolated from the Sargasso Sea
MGLGRVVLDNAGNIGKSYRRHDEVGTPMCITIDFETLDDNSVTVRDRDTMEQKRIKLDEISDFFVKNL

SEQ ID NO: 159247 - protein, 310 aa, Unknown
  Bacterial polypetide isolated from the Sargasso Sea
NLNKEKIEIAASISKSDLVSGLVGEFPELQGVMGKYFAFSQGFEEDVCRAISEHYLPISISSSVPKKPISSALSIIDKLDTLVGFYLINEKPTSSKDPFALRRAAIGLLRTIIENNLTIKLRDLIDKSIKIYLDQGVKQINNNVSKELIVFFRERMKNIFKEKNIRNDIIEASISSHLSDNFLELYKKTLIMKKFISRDLGKNAVSTYKRASNILDQEKIELKNGPDAVLFQYDEEKELFQRINEIRKAFTLKEDKKNYEEHLKLLSETKLSTDKFFNNVKVNDENKDLKNNRLELLQILCSTFNSFVDF

SEQ ID NO: 159248 - protein, 316 aa, Unknown
  Bacterial polypetide isolated from the Sargasso Sea
FSWDKNKSKNLVKGISDLKKINYFEGLGTYFDKTQRLRKLGSLISDELLISKEKVEVASSICKVDLVSDLVGEFPELQGVMGGHFAKAQGFDNEICLAISEHYLPIGPETKTPKKPYSVTLALSDKIDTLVGFFTINLKPSSSKDPFALRRSAIGLIRLIIENKLEIKLKDLINYSCVLFAEQDLDFDIKTVQQDLFNFFSERLKFYMKEKKVRSDIVECSINSYSADQIYKIYNKAFILNKLIDKNIGQDVIFSYKRASNILSNEISKNKIELENSTDPGLFKNDFEKKLYKKIQEIRKYFTSLGSREDCKKTLE

SEQ ID NO: 159249 - protein, 191 aa, Unknown
  Bacterial polypetide isolated from the Sargasso Sea
MFLFKGLYFHKKERYNFFITFRGAFLAAKNMDELVSLCKRRGFVFQSGEVYGGLQGVYDYGPLGVELKNNLKSSWWSAMVFERDDIEGLDASILSKKELFKYSGHEDTFSDPLVDCKSCKSRWREDLIEDGKCPGCGSSELTEARPFNLMFKTPVGPVQNEESFAYLRPETAQHIFASFKNVKDSTSRQVP

SEQ ID NO: 159250 - protein, 121 aa, Unknown
  Bacterial polypetide isolated from the Sargasso Sea
MTFWAESTPRHLRFAVHFQDIISTLNRFWADQGCLLLQPYDTEKGAGTMSPHTVLRAIGPEPWAVAYPEPCRRPTDGRYGDNPNRAQHYFQFQVLIKPSPDGIQETYLASLEALGIKAADH

SEQ ID NO: 159251 - protein, 42 aa, Unknown
  Bacterial polypetide isolated from the Sargasso Sea
DKGAWLLYRQQQQGQATVSLLPEMVSTSLAKLPIAKPMRWGS

SEQ ID NO: 159252 - protein, 279 aa, Unknown
  Bacterial polypetide isolated from the Sargasso Sea
DIILKKRNINIDINLKLLQEVVDLTDQPNVIVCEFDKKFLNIPKEILILTMQHHQKYFPTFDKKGNITNQFLVVANNKDKKGLIKLGNERVVEARLSDAEFFWQKDKAQNMVKKISDLKLMNYFKGLGNYFDKAQRMRKLGAIISDELLISKEKVELTASISKVDLLSEMVSEFPELQGIMGGYFANAQGFEKEISLAVSEQYLPVGSGTKIPKKPYSIALSLADKIDTLVGFFGVNQKPTSSKDPFALRRLALGIIRIIIENKKDFKIIDLINYSSSL

SEQ ID NO: 159253 - protein, 75 aa, Unknown
  Bacterial polypetide isolated from the Sargasso Sea
MFFQDIIQKLNNFWSEEGCLILQPYDTEKGAGTMNPHTFLRAIGPEPWSVAYAEPCRKATDGRFGENPIELNITF

SEQ ID NO: 159254 - protein, 272 aa, Unknown
  Bacterial polypetide isolated from the Sargasso Sea
EQLADSKQLCSPNNPSLLEEVNNLVEWPNGLLCQFDQAFLKVPQEALFASITQHQKAFPLTDKDGVCQAYFVTFSNLNVKDTSHIIKGNEKVMRARLADAAFFFEVDQKQPLEHFNEALKTIQFQKSLGSMYQRAQRIAHGAAFLAPMLGCDKKRALRAGLLSKADLASDMVGEFPECQGIMGRYYALLSGEDKAVAEAIQEQYLPRFKEDDTAQSALGQCVALAEKLDTLTAMFGIGAKPSGSKDPFALRRGALGIIRTIIQSQQHLSLRQ

SEQ ID NO: 159255 - protein, 129 aa, Unknown
  Bacterial polypetide isolated from the Sargasso Sea
MEDLVSLCKRRGFIFPSNDIYGGMKGLYDFGPMGVELKLNLKSAWWKSIVYERDDVEGLDSTILTSPTVLKYSGHEDTFSDPLVDCKKCKSRWRADQLEDGKCPNCKSTDLTDPRPFNLMFKTAIGPVD

SEQ ID NO: 159256 - protein, 278 aa, Unknown
  Bacterial polypetide isolated from the Sargasso Sea
LIKTGNENVVEARLNDAKFFWNKNKTQNLVKGISNLKKLSYFEGLGSYFEKIQRLRKLGALISDELLISKEKVEIASSICKVDLTSDLVNEFPELQGVMGGHFAKSQGFDNDICLAIREHYLPTGPETKTPKKLYSVTLAISDKLDTLSGFFAINLKPSSSKDPFALRRSTIGLIRLIVENKLEIKLKDIINYSFLLFSEQDVNFDIKLAQQDLYRFISDRLRFYMKEKNIRPDIIECSMSSYNIDQIYKIYNKAFILNKLIDKNIGQDIIFSYKRAS

SEQ ID NO: 159257 - protein, 87 aa, Unknown
  Bacterial polypetide isolated from the Sargasso Sea
IYNFEKSNSSMLLQHFNDAEKECELLLKDKINPLSLPAYHLCIRASHIFNLLDARGVISVSERQAYILRVRNMSRSCCLAYMGKLHE

SEQ ID NO: 159258 - protein, 208 aa, Unknown
  Bacterial polypetide isolated from the Sargasso Sea
MNADENKSKRLVSLMKKRGFIQPAFELYGGVAGLYDYGPLGGRLRRNVISKWINHWISLGNIVEIDSPTITPEPVLKASGHIGAFNDYASECKFCSSIYRSDHLLEEVHNNPDSLDNSSLDEELSKHKIPCPSCKKSGWLPSEPLNLMFSTTIGASKGGRRAYMRPETAQGMFLQYPSIYRHFRGKLPFGAVQVGKGYRNEISPRQGM

SEQ ID NO: 159259 - protein, 76 aa, Unknown
  Bacterial polypetide isolated from the Sargasso Sea
MPAKKKVKKKTNILSFQDIIMSLQKFWGKNGCIILQPYDLEVGAGTFHPATTLRSLGPQPWKAAYVQPSRRPTDGR

SEQ ID NO: 159260 - protein, 250 aa, Unknown
  Bacterial polypetide isolated from the Sargasso Sea
MRLLNSVTYHQKLGSLGSKVERIELIALELDQTLGLNLENIPIAAKLIKNDLLSEMVGEFPDLQGIMGSYYAEHQGYDEDVCDAVKNHYMPVTARDETPKKALSFCLSVADKIDTLVGFWSIGETPTGSKDPYALRRAGNGLIRNIIENKLDFDFAHFIEKILQKSDLLKKQQHSSVREGLVNFMNERFRSYILDNKYDVRICDAISRDDDFVNYYMTLSRIQLLSQFIKTDNGLSLLKALKRINNILDP

SEQ ID NO: 159261 - protein, 60 aa, Unknown
  Bacterial polypetide isolated from the Sargasso Sea
MVDASHTFNLLDSRKAISVTERQQYILRVRSMAQKVARAYLEVREELGFPLLSKTESAST

SEQ ID NO: 159262 - protein, 108 aa, Unknown
  Bacterial polypetide isolated from the Sargasso Sea
MTPWAESTPRHLRFAVYLQDIISTLQRFWADQECLLLQPYDTEKGAGTMSPHTVLRAIGPEPWAVAYPEPCRRPTDGRYGDNPNRAQHYFQFQVLIKPSPDGIQETYL

SEQ ID NO: 159263 - protein, 275 aa, Unknown
  Bacterial polypetide isolated from the Sargasso Sea
MISDELLISKDKVEISASVCKVDLLSDIVGEFPELQGIMGGYFAEFQGFDKDVSLAISEHYLPIGNNSKIPRKPFSIALSLTDKLDTLIGFFGIDQKPTSSKDPFALRRNALSIIRLLLENKKDFKLKDLINYSSKLYQEQGFDLTNRSHHKDLNNFFIERLKNYMKEKDIRPDIIEASLSSYGINNIIKLYNKASTFNKMINKETGKIVILCYKRASNILEHETNNQKLILSNNIDPGLFKNDYEKNLYKKIHELRKYFTSFGEDENYELSLKN

SEQ ID NO: 159264 - protein, 144 aa, Unknown
  Bacterial polypetide isolated from the Sargasso Sea
MEELVSLCKRRGFIFQSSDIYGGVKGLYDFGPMGVELKNNLKQSWWKSMVYERDDIEGIDASILSSPQIFKQSGHEETFTDPLVDCRSCKSRWRSDQLINYTCPNCKSKDLTEPRPFNLMFKTAIGPVDDGSSFAYLRPETCQQ

SEQ ID NO: 159265 - protein, 71 aa, Unknown
  Bacterial polypetide isolated from the Sargasso Sea
MPKKTKKKNKVLSFQNLIFNLQKFWDKQGCIILQPYDLEVGAGTFHPATTLRSLGPKPWKAAYVQPSRRPT

SEQ ID NO: 159266 - protein, 79 aa, Unknown
  Bacterial polypetide isolated from the Sargasso Sea
NLKANLQKLGLGKITYEDTGNIGKGYRRHDEIGTPFCFTVDFQTIEEDSSVTARNRDTMEQERVNIENLPNFLASQLKP

SEQ ID NO: 159267 - protein, 322 aa, Unknown
  Bacterial polypetide isolated from the Sargasso Sea
FWEKISRKILLNRLGKLKSITFYDKIGTIYDKTQRLRRLASFISDEFNINKEKVEIAASISKSDLCSDLVSEFPELQGVMGKYFALTQGFDVDISNAISEHYLPLGLNSDVPKKPISYTISLADKLDSLVSFFFINEKPTSSKDPFALRRSAIGLLRIIIENKLNIKLRDLIDQNIRILEEQNVKRLNQKAEKEVFDFFKERMRNILKEKSIKPDIIEASISSHHGDNFLDLYKKNFFMNKYINKEVGQNTINSYKRAFNIIEKEGLKIEGRPDAVLFRKEEEKGLFDKINEIRKAFTVKEDNKNYENLLFHLSEIKPFTDN

SEQ ID NO: 159268 - protein, 150 aa, Unknown
  Bacterial polypetide isolated from the Sargasso Sea
GVEVAVYQAVRAVNPTSPLDFDQRVQAVQAFRKLPQAAALAAANKRVSNLLSKAEGGVAAQVEAHYFDNPSEFALHAAIQQADQAVQPLAAARQYNEALAKLAGLREPVDAFFEAVLVNAEDARVRANRYALLARLRGLFLGVADISVLG

SEQ ID NO: 159269 - protein, 138 aa, Unknown
  Bacterial polypetide isolated from the Sargasso Sea
MPEEIFDKVVKIAQSRGFVFNASSIYGGLRSSYDYGPLGVLLKNNIARLWWSSINDLDVQIYPVDTAIIQSSEVWKASGHLAEFTDPMVDHKPTGERFRADQVPEDIKKEDLTEPRQFNLMFETNMAQSRMKILLFIK

SEQ ID NO: 159270 - protein, 74 aa, Unknown
  Bacterial polypetide isolated from the Sargasso Sea
MVSKKKNIKKTPLTFQETIFALQKYWSKQGCVIIQPYDLEVGAGTFHPATTLRSLGEKPWKTAYVQPSRRPTDG

SEQ ID NO: 159271 - protein, 305 aa, Unknown
  Bacterial polypetide isolated from the Sargasso Sea
GRPLKSIMALYGGKTLSFCFHHLKSSNKTFIEKDLENKSKIFKDFISYKKFFSKQKIIIDNNERKKYIEDTLIKLSKLKNFKIHIKDQLIEEVTNILESPKILLCSFDNRFLDLPKELIISTIEYHQKFFLLHDQKSKLTNKFFAVANRQDNDDIIKSGYENVVDARLSDAEYFWKINKSRNMIKQVSKLQDINYFKDLGSYLDKVQRLKKLSGLISDELLISKEKIELASTISKVDLLSELVNEFPELQGILGGYYAEFQGFDKDVSQSIKEQYLPSGADTRVPKNNYSITLSISDRIDSLVGF

SEQ ID NO: 159272 - protein, 109 aa, Unknown
  Bacterial polypetide isolated from the Sargasso Sea
RTLLKLKPHLSPIKAAVIPLKRNNSDLVNTANNVKSELQSLGLGRVMVENTGNIGKNYRRHDEIGTPLCVTIDFETLENQTVTVRDRDTMKQEKVSLSEIANYYSQYFK

SEQ ID NO: 159273 - protein, 132 aa, Unknown
  Bacterial polypetide isolated from the Sargasso Sea
AILNEAYHLEKIEDKERVVLKLKPHLSPIKAAIIPLKKNDKKIVVKAKEIKNKLQSLGMGRVLFENSGNIGKNYRRHDEIGTPICITIDFETLEEETVTVRDRDTMSQKRVSISDLEKVFKDLFLNINIFGS

SEQ ID NO: 159274 - protein, 321 aa, Unknown
  Bacterial polypetide isolated from the Sargasso Sea
ISKDKVELSASICKTDLTSDLVREFPELQGIMGGYFSNYQGFDKDVSLAIAEQYLPIGLNSKITKKPFSVALSLTDKIDTLVGFFGIDEKPTSSKDPFALRRTALGIIRTIVENKKDFKVNDLLNNSSILYQDQEHIFINKDLQKELYNFLKDRFKYYLKEKQIRFDIIDAVISSFKLNKIYSSFEKANSLNKIIDSQIGLDITSSYKRASNILDSEMKNNEVEITNTTDPGIFKNDFEKNLFKKINEIKKYYSVIDNDENYEQTLSILAGAKKEVFEFFDNVKVNEENENLRKNRLELINMLCKTFQNFINFQLLKTNNE

SEQ ID NO: 159275 - protein, 153 aa, Unknown
  Bacterial polypetide isolated from the Sargasso Sea
MQAQDFLVELGTEELPPKALKKLAEAFLAGVESGLKDAGLGYAKARYYAAPRRLAVLVEALATQQPDRTTQLDGPPLQAAFDADGNPTKAAEGFCRSVASAWPRSTRAAPNCALYRTFRVSRAPDCCPASSMPHWPHWRFPAHALGCPQDRFV

SEQ ID NO: 159276 - protein, 313 aa, Unknown
  Bacterial polypetide isolated from the Sargasso Sea
YFHHLTSSNSTFIDKEFEENKKSFLEFKNYKSFFKKIDIIIDHNERKKLIEKKFNNILKNKNFKIQDNPKLLNEVVDLTDQPNILLCEFDKKFLNIPKEILIITMQYHQKYFPIFDNKENITNEFLVVSNKKDKKGLIKLGNERVVEARLNDAEFFWKKDKSQNMVKKVTDLKSMNYFKGLGSYFDKAQRMRKLGGMISDELLISKEKVELSASICKVDLLSELVGEFPELQGVMGGYFASAQGFDKDLVLAISEQYLPTGSGSRVPKKPFSIALSLADKIDTLVGFFGLNQKPTSSKDPFALRRLALGITRT

SEQ ID NO: 159277 - protein, 241 aa, Unknown
  Bacterial polypetide isolated from the Sargasso Sea
WVESRVDWWKAQGISENSLELLYVPKEELSHYSKATVDIMYKFPHGLEELEGIANRTDFDLGSHSKNQKDLKITAKVKENKSSNSKLAVQNRETNEWSVPFVIEPSAGVDRGVLAVLNESYKVENLEDGKERTVLSLKPHLSPIKAAVIPLKRNNKELVDLAYKVKNDLQKLRLGRVLVENSGNIGKSYRRHDEVGTPICITIDFQTLEDGTVTIRDRDTMDQERKGMNDLSGLLKTKLLA

SEQ ID NO: 159278 - protein, 285 aa, Unknown
  Bacterial polypetide isolated from the Sargasso Sea
RNFKIYKDYFKNLGIIIDNNQRKDFIENELIKISKRKNIKIEINKKLLQEVTDLVEQPTILSCKFDKKFLDIPQEILIITMQNHQKYFHTFDNKGNITNEFFVVANNKDKKGYIKSGNERVIEARLSDAAFFWNKNKGYNLVKQISKLKTMKYFKGLGSYFDKIQRMRKLGGMISDEFLISKEKIELSSSICKVDLTSDLVGEFPELQGTMGGYFAEAQGFEKDIALAISEHYLPNGLESKVPKKPFSIALSLTDKLDTLVGFFGINEKPTSSKDPFALRRAALE

SEQ ID NO: 159279 - protein, 135 aa, Unknown
  Bacterial polypetide isolated from the Sargasso Sea
MEELVSLCKRRGFIFQSNDIYGGIKGLYDYGPMGVELKNNLKQAWWKSMVYERDDIEGLDASILSAPVVLQQSGHEDTFTDPLVDCKTCKSRFRADQLEKSECPKGGFLSDCKSKNLTEPRAFNLMFKTAIGPVD

SEQ ID NO: 159280 - protein, 71 aa, Unknown
  Bacterial polypetide isolated from the Sargasso Sea
MVSKKKIKKSKFHSFQDTILNLQKYWSKQGCLILQPYDLEVGAGTFHPATTLRSLGDKPWKTAYVQPSRRP

SEQ ID NO: 159281 - protein, 63 aa, Unknown
  Bacterial polypetide isolated from the Sargasso Sea
FLENTGNIGKAYRRHDEVGTPVCITVDFDSLDNGTVTLRDRDTMEQRTVAISELNQLYLDSLK

SEQ ID NO: 159282 - protein, 93 aa, Unknown
  Bacterial polypetide isolated from the Sargasso Sea
VIPLKKNKEELVTLAKEIKSTLQSMGKGRVFLENTGNIGKAYRRHDEVGTPVCITVDFDSLENGTVTLRDRDTMEQRTVAISDLNQLYLDSLK

SEQ ID NO: 159283 - protein, 49 aa, Unknown
  Bacterial polypetide isolated from the Sargasso Sea
DAIGTPICITIDFDTLEDRTVTVRDRDTMEQKRVQVESLEDLLKSLLVK

SEQ ID NO: 159284 - protein, 176 aa, Unknown
  Bacterial polypetide isolated from the Sargasso Sea
MALLSSSVYSVGTESVGVIQRFGKYTGTVDPGLRFKLPFGIDRVTILPVKRQLKMEFGFGTGGANDLYQISREQDREADMVTGDLNAAHVEWVVQYEISDPEQFLFNLREPAATLRDLAESVMREVIGDRTVDEVLTIGRQGIESAAIEKLTDLVQSLEMGLRVQQVQLKNVHPPS

SEQ ID NO: 159285 - protein, 117 aa, Unknown
  Bacterial polypetide isolated from the Sargasso Sea
LDDDKSRTVMAFKPHLAPIKAAILPLKKNNLEIVNKAKNLKAHLQKLGFGKITYEDTGNIGKGYRRHDEIGTPFCFTVDFQTIEEDSSVTARNRDTMEQERVNIENLPTFLASKLNS

SEQ ID NO: 159286 - protein, 230 aa, Unknown
  Bacterial polypetide isolated from the Sargasso Sea
TNIVEKPNIIKCKFDKKFLKIPKEILVTTMEVHQKYFPTFDNKENLTSVFFVVADNNDPKGLIKLGNERVVEARLNDAQFFWDKNKTKNLVKGISDLKNVNYFEGLGTYFDKTQRLRKLGSLISDELLISKEKVEVASSICKVDLVSDLVGEFPELQGVMGGHFAKAQGFDNEICLAISEHYLPIGPETKTPKKPYSVTLALSDKIDTLVGFFTINLKPSSSKDPFALRR

SEQ ID NO: 159287 - protein, 293 aa, Unknown
  Bacterial polypetide isolated from the Sargasso Sea
PPEVISTVMQAHQRYVPLQVPGLEADPLRLTAEAVLRPQFLLVGNGLAPASSLIVRGNERVLGARLADAEFFLDVDRRQSSESRREALDRVTFAEGLGSLLDRSERIERLTGLLLKQLGLDQGVVDAAQRAAHFCKNDLVSQMVGEFPELQGLMGGKYLLEEREPRDVALAVVEHYLPRGAGDALPATPAGAVVALAERLELLLSIFAKGERPTGSSDPYALRRAGNGVVQILWGMAWRLDLMAFLSNAVEEWAALFPAFAVDASQLHNDLCQLMRQRIVSQLEDDGFAPDLV

SEQ ID NO: 159288 - protein, 137 aa, Unknown
  Bacterial polypetide isolated from the Sargasso Sea
GLERLAMYLQDVESIWDLSWNAERNYGDIWLPFEKGQCHFNFEGSDPERLKQLFAIYEAEASDLIEKKLPAPALDFVLKCSHTFNLLEARGVISVTERTATIGRIRTLARKVAETWLAEREALGFPLLEGGTLPSAT

SEQ ID NO: 159289 - protein, 238 aa, Unknown
  Bacterial polypetide isolated from the Sargasso Sea
FDKKYLSIPKEIITITMQHHQRYFPTFDKKEKLTNNFFIVADTFDPKGFVKIGNERVIDARLSDAEFFWNKNKSQNLVKQISKLKNINYFKGLGNYYDKVQRIRKLSSLISDELLISKEKIEIASSICKVDLLSDLVGEFPELQGILGGYFAEAQGFEKEVCTAISEHYLPTGPESTIPKKSYSIALSLSDKLDSLVGFFGLGLKPTSSKDPYALRRSAIGLLKMILENKKELKLRDL

SEQ ID NO: 159290 - protein, 231 aa, Unknown
  Bacterial polypetide isolated from the Sargasso Sea
EFPELQGIMGGYFSEALCFDKDVALSISEQYLPSGSGSKVPKKPFSIALALSDKIDTLVGFFGINQKPSSSKDPFALRRLTLGVIRIIVENKNHIKIRDLIKYSTSLYIDQGFKFENKLLQKELSEFLMDRLKFYMKEENIRNDIIQASINSHNLDQLVVIYEKAKHLDKIISKSNGHEIISSYKRASNILESELKGQNFDHSNTTDPGIFKTDFEKNLFKKINDLRKYFS

SEQ ID NO: 159291 - protein, 277 aa, Unknown
  Bacterial polypetide isolated from the Sargasso Sea
KKISDLKLMNYFKGLGNYFDKAQRMRRLGAIISDELLISKEKVELSASISKVDLLSELVGEFPELQGIMGGYFANVQGFDKELSLAVSEQYLPVGSGTKIPKKPYSIALSLADKIDTLVGFFGVNQKPTSSKDPFALRRLALGIVRIMIENKKDFKIRDLINYSSSLYQDQGFEFENKSLQKELLDFLLERLKYYMKEENIRNDIIQASITSFNLDQSVIIFHKAKNLNKIINKQNGIDIIASYKRASNILERELKKDKIELSNTTDPGIFKTELEK

SEQ ID NO: 159292 - protein, 242 aa, Unknown
  Bacterial polypetide isolated from the Sargasso Sea
TLVGFFGINEIPTGSKDPFALRRVALGVIRTVIENKKDFKIHDLLNYSSSLYQEQGYNFLSNDLNKKLINFLKDRFKFYLKQKEIRHDIIDATISSFKLNKLSSSFEKAKSLNKIINNQVGIDITSCYKRASNILESEMKNKVVEITNSTDSGLFKNDFEKNLFFKINEIKKYYLNIDHDEDYEHSLTLLAGAKKEVFDFFDNVKVSEENENLRKNRLELLNMLCKTFQNFINFQLLKTNNE

SEQ ID NO: 159293 - protein, 232 aa, Unknown
  Bacterial polypetide isolated from the Sargasso Sea
NQKPSSSKDPFALRRAALGVIRLILENRKNIRIKDLINHSLLLYQEQNYNFDNASVQNDLSEFLLERLKYYMKDKAIRSDIINASFNNKSINNINEIFRKSFALNKIINKESGMDIISSYKRASNIIENELKDNKLELADTADPGIFKNDFEKNLFKKIKELKKYFINIDNDENYETTLDNLKTAKPIIFAFFDNIIVNDNDEIIRKNRLELLQMFCRTFENYINFSKIESV

SEQ ID NO: 159294 - protein, 59 aa, Unknown
  Bacterial polypetide isolated from the Sargasso Sea
MVSKKRKKTINKFQTFQDTILNLQKYWSKHGCVILQPYDMEVGAGTFHPATTLRSLGSK

SEQ ID NO: 159295 - protein, 87 aa, Unknown
  Bacterial polypetide isolated from the Sargasso Sea
NKDLVDTAKKIKDSLQKMGLGRIILENTGNIGKSYRKHDEIGTPLCITVDFDTLDDNSVTLRDRDSMDQSRLQVSDLASYIKDLVKK

SEQ ID NO: 159296 - protein, 174 aa, Unknown
  Bacterial polypetide isolated from the Sargasso Sea
MKNTYKLKNLENLVSLAKRRGIIFPSSEIYGGLASVWDYGPIGVEIKRNVKNLWWKSFVTERDDIFGIDASILMHPDVWKASGHLESFSDPLVECSETGKRYREDHIFILEIETKKENKIIAIEASDKDEAEKLVKDKIISIIPLAESENKDNPSPDGGILSEPRNFNLISKLL

SEQ ID NO: 159297 - protein, 69 aa, Unknown
  Bacterial polypetide isolated from the Sargasso Sea
MPKKIKKKNKPLFQSFQDTILNLQKYWSKQGCVIVQPYDMEVGAGTFHPATTLRSLGPKPGKLRMCNHQ

SEQ ID NO: 159298 - protein, 105 aa, Unknown
  Bacterial polypetide isolated from the Sargasso Sea
YDIIFDRSGIKYKDIFLENEKQMSFFNFEYAPKDFLYESFSHFEKNSKILIEKRLPIPAYEQCIKASHSFNLLDSRGLVSVSERQSYILRIRSLVQECCKMVIEK

SEQ ID NO: 159299 - protein, 133 aa, Unknown
  Bacterial polypetide isolated from the Sargasso Sea
LIEDFLAILNEAYKVESLENNKERTVLSLKPHLAPIKIAVIPLKRNENSIVMTSVDLKNDLQRTIEGRVLLENTGNIGKNYRKHDEIGTPACITVDFQTLEDNTVTIRDRDTMDQKRLKIDEVRTFLVQNYKI

SEQ ID NO: 159300 - protein, 167 aa, Unknown
  Bacterial polypetide isolated from the Sargasso Sea
MGKSTLGAAGLAWEVWCDGMEITQFTYFQQMAGFECKPVSVEITYGLERICMFTQQKNNVYDLIWNNENVEYREVFHQAEKEFSAYNFEHANTSNLFKIFDMFESEAKSLIDKKISLPAYDQCLKASHVFNILDARGAISVAQRAEYIGRIREITKSVASIWIDTQI

SEQ ID NO: 159301 - protein, 68 aa, Unknown
  Bacterial polypetide isolated from the Sargasso Sea
MVSKAKKEKKKIQTFQETILNLQKFWSKKGCIILQPYDMEVGAGTFHPATTLRSLGIKPWKAAYVQPS

SEQ ID NO: 159302 - protein, 52 aa, Unknown
  Bacterial polypetide isolated from the Sargasso Sea
NYRRHDEVGTPVCITVDFESLDNHTVTVRDRDSMKQERVSLDKVSEHLKKII

SEQ ID NO: 159303 - protein, 280 aa, Unknown
  Bacterial polypetide isolated from the Sargasso Sea
RQKIILKRFSSVSKSKNYKEQYNQRLLEEVVNIVEDPNVILVNFDKNYLKIPEEIIISTLEKHQRYFPIFDNRERLTNYFFVVANKKDEKKLITEGNKRVVEARLSDAKFFWEKDRSKNLIKQIANLKNITFYEKIGTIYDKTQRIRNLAGLLSDELNINKEKVQVAASISKSDLCSDLVSEYPELQGVMGKYFALAQGFDEDVANSVSEHYLPIGLTSQVPKKPFSYSISIVDKVDTLVGFFLINEKPTSSKDPFALRRSAIGLLRIIIENKLSIKLRE

SEQ ID NO: 159304 - protein, 71 aa, Unknown
  Bacterial polypetide isolated from the Sargasso Sea
MVSKKKKTKKPSFQSFQDAILNLQKYWSKQGCVIIQPYDMEVGAGTFHPATTLRSLGPKPWKVAYVQPSRR

SEQ ID NO: 159305 - protein, 92 aa, Unknown
  Bacterial polypetide isolated from the Sargasso Sea
IPLKKNNEKIVALSQQIKISLQKIGLGRVMLENSGNIGKNYRRHDEIGTPICVTVDFESLDDNTVTVRDRDTMNQKRISLDQLIDYYKNYFN

SEQ ID NO: 159306 - protein, 170 aa, Unknown
  Bacterial polypetide isolated from the Sargasso Sea
MEKVISLSKQRGFVFQSSEIYGGLKSAYDYGPLGVELKRNIMNEWWRSMVHEREDVIGIDASIIMHTNVWHASGHLAGFSDPLVDCLISKERFRADKAPRPVSGDELPIECADKGQAKSYLEAIKKRYNIELKRNGKVLLGMRVIDENNMGFFENDNEKPSATFPYRGYV

SEQ ID NO: 159307 - protein, 264 aa, Unknown
  Bacterial polypetide isolated from the Sargasso Sea
MSKYLLEIGTEELPANFSHSVLEQFKSLIEFELDKKLIKFNNIVVTSTPRRIVLLLEGLVDYAEDKTIIRKGPKASSAFLNGSPTNAALGFANSLGIDVIELEIKNTEKGDFVFGKKIEKGQSTRISLSSIIPKVVKSLQGPRFMKWGAGEIKFSRPIRWITSIYNDDILDFAFDECDPNIQISNKSKSHRLINEVFEVKNPDNFFELLKQNRVLVNRHERKERIESLINEASDLLNLKPDLSKGLLNELTDLVEWPDLIIGKF

SEQ ID NO: 159308 - protein, 59 aa, Unknown
  Bacterial polypetide isolated from the Sargasso Sea
YLGSLQALGIDTQIHDIRFVEDNWGITNARRLGSGLGSLVKRHGSDSVYLLPTGRRLRV

SEQ ID NO: 159309 - protein, 133 aa, Unknown
  Bacterial polypetide isolated from the Sargasso Sea
DKKTTLESRLESLETVLFQKQLGTLKEKSERISALSAFIASQIDANESQAARAGLLAKTDLMSNMVMEFPDVQGVMGKYYALNDDEDAPVAEALYEQYMPRFAGDALPSSGVSASVALADKLDTLVGIFGIGQ

SEQ ID NO: 159310 - protein, 309 aa, Unknown
  Bacterial polypetide isolated from the Sargasso Sea
MVSQMVGEFPELQGLMGGKYLLAEGEPPAVALAVQQHYQPRGADDDLPSSDAGALVALAERLELLLSIFAKGERPTGSSDPYALRRAGNGILQILWERSWRLDLHELLQQASRQWAALLPNFAIDVVQLQADLEEFLRQRLISQLEEQGEAIDLVQAVTAESANQRLLQDPLDAMDRLRLLQQLRLAGELAAVQAVVQRAVRLAEKGDLDADVLSSSGVVDAALFEQPSEDAMLAVVDQLSGIVSQHGPDRYSQLCEALAASASTLSAFFDGESSVMVMADDLAVRRNRLNLLAVLGNQAAILADFAAI

SEQ ID NO: 159311 - protein, 270 aa, Unknown
  Bacterial polypetide isolated from the Sargasso Sea
DIKWARPLRNILVLLDNKLINGKILIGKNEKILFSDTTYGHRFCEKKVKIKDIQSYKNKMRNHFVYVDRKERKKIILEQIKSILYKNNLKLYQDLELLDEVNGLVEFPNAILCKIEKQFMKLPFDVLSTSMKVHQKYFSLLNKSNKTAPYFIVITNTPNLNKKNKTILSGNEKVLKARLSDALFFWEADIKIPFEQWLEDLENVTFFENLGNLKQRSQRISDLAINLKKYFKYKNLSQVKNAGLFSKVDLLSNMVGEFPELQGIMGGYYS

SEQ ID NO: 159312 - protein, 281 aa, Unknown
  Bacterial polypetide isolated from the Sargasso Sea
ADRFLQLPPEVISTVMQAHQRYVPLDVPSVEPDPLRLRADAVLRPEFLLVGNGLSTSADQITRGNERVLGARLADAEFFLAVDRRQPSQERREALARVTFAEGLGSLRDRSERIERLAEQLLNTLNLPEESAAAALRAAHLCKHDLVSQMVGEFPELQGLMGGKYLLEEGESRAVSLAVVEHYLPRGAGDALPGTDAGAVVALAERLELLLSIYAKGERPSGSSDPYALRRAGNGVLLILWERGWRLDLLALLQQAAASWSELFPAFDVNPDALRKDLSLL

SEQ ID NO: 159313 - protein, 276 aa, Unknown
  Bacterial polypetide isolated from the Sargasso Sea
SFLKSNKILLDHVERKTKILKRFEAICRSKNYKENFNTKLLEEVTNIVENPNVLLVDFNKEYLKIPSEIVISTLQGHQRYFPLFDKKDKLTNYFLVVANKVDSKNFIKEGNKRVVEARLSDAKFFWDKDKSKNLIKQIGKLKTITFYDKLGTIYDKTQRLRKLASLISDQLNINKEKIEIAASISKSDLCSDLVGEYPELQGIMGKYFALSQGFEEDVANSISDHYFPTGLASSVPKKTISYSISIVDKLDSLVGFFLIDEKPTSSKDPFALRRSA

SEQ ID NO: 159314 - protein, 295 aa, Unknown
  Bacterial polypetide isolated from the Sargasso Sea
IFHKVRFIISSSSRINKLKDVTFAEGLGSLYERVNRIEWLVKLLTLKLEFDPEDIQKSVKVAHFSKHDLVSNMVDEFPELQGIIGSKYLLHEGESRDVCLGVLEHYKPKGTSDALPSNKLGKAVSLAERFELLISIYAKGERPSGSSDPYALRRAANGILLILWNKDWQLDINKILNDSLIYWQQLFPSLSLDISNLLTELKEFFRQRIISLLEEKDVDFDIIQAVSGDTTSTSKLLDDPTDVYFRTSLLMEMRKNNTLNLLQAVVTRASKLAAKSSISKDIIDPLDFVDKSLLK

SEQ ID NO: 159315 - protein, 112 aa, Unknown
  Bacterial polypetide isolated from the Sargasso Sea
MFFQDIIKNLNNFWSEEGCLIMQPYDTEKGAGTMNPHTFLRAIGPEPWCVAYAEPCRRPTDGRFGDNPNRAQHYFQYQVIIKPSPEGIQEKYLTSLESLGINPRNHDIRFVE

SEQ ID NO: 159316 - protein, 183 aa, Unknown
  Bacterial polypetide isolated from the Sargasso Sea
MAAIVIAGLALASSSVYSVGTESVGVIQRFGKYTGTVDPGLRFKLPFGIDRVTILPVKRQLKMEFGFGTGGANDLYQVSREQDREADMVTGDLNAAHVEWVVQYEISDPEQFLFNLREPAATLRDLAESVMREVIGDRTVDEVLTIGRQGIESAAITKLTDLVQSLEMGLRVQQVQLKNVHPP

SEQ ID NO: 159317 - protein, 253 aa, Unknown
  Bacterial polypetide isolated from the Sargasso Sea
EYFVEPDQDEKQHEYWLKQRLDWWEAQGVPKDKLELYEVPKKELSHYSKRTVDIMYNFPHGLEELEGVANRTDFDLGSHSKNQNELNISSKVRDNKDSNSKLAIKEPHMDNWVVPFVIEPSAGVDRAVLAIMNEAYREEKLEDSSRIVLSLRPHLSPIKAAVIPLKKNNDEMVELAKKIKSQLQELGLGRVILENTGNIGKSYRRHDEIGTPLCVTVDFESLENSDITVRDRDTMKQERIEIKDLNAYFLKYF

SEQ ID NO: 159318 - protein, 284 aa, Unknown
  Bacterial polypetide isolated from the Sargasso Sea
VRGYKDYIDCLKKLFITIDQNQRKSIIKKELIKNSKKNNIDVEINEKLLAEVTDLVEQPNILLCQFNKRFLSMPKEILVITMQHHQKYFHTLDRKGNITNQFFVVANNKDPKGYIKAGNERVVEARLNDAEFFWNKNKNQNLFKQVSKLKSMNYFKGLGTYFDKIQRMRKLGGAISDELLISKDKIEISCSICKTDLLSDLVGEFPELQGVMGGYFAESQGFDKDVSLAIKEHYLPNSLESKVPTRPFSLGLSLTDKLDTLVGFFGVNQKPTSSKDPFALRRAA

SEQ ID NO: 159319 - protein, 205 aa, Unknown
  Bacterial polypetide isolated from the Sargasso Sea
INRDKLRFHEHGSNELAHYAKEAWDIEYEFPFGWSEIEGIHNRTDYDLSRHEEFSGKNLSYFDQPNNDRYLPYIIETSAGLNRMLLTVLADAYWEDDKNNRTVMRISPRLAPVKAVICPLVKKDGLPEKAREVVEILKPHFKVLYDQQGSIGKRYYRQDEAGTPFGITVDHQSIEDNTVTLRDRDSMKQNRISIERILNAIQDSF

SEQ ID NO: 159320 - protein, 287 aa, Unknown
  Bacterial polypetide isolated from the Sargasso Sea
KTQRLRKLGSQISDELLISKEKVEVASSICKVDLVSDLVGEFPELQGVMGGHFAKAQGFDNEICLAISEHYLPIGPETKTPKKPYSVTLALSDKIDTLVGFFTINLKPSSSKDPFALRRSAIGLIRLIIENKLEIKLKDLINYSCVLFAEQDLDFDIKTVQQDLFNFFSERLKFYMKEKKIRPDIIECSLNSYNADQIYRIYNKAFILNKLIDRNIGQDVIFSYKRASNILSDEINKNKIELENSTDPGLFKNDFEKKLYKKIQEIRKYFTSLGSREDCKKTLEVLA

SEQ ID NO: 159321 - protein, 77 aa, Unknown
  Bacterial polypetide isolated from the Sargasso Sea
MPKKNNKIKKSKKFLSFQDIIMNLQKFWGKYGCVILQPYDIEVGAGTFHPATTLRSLGTKPWKAAYVQPSRRPADGR

SEQ ID NO: 159322 - protein, 193 aa, Unknown
  Bacterial polypetide isolated from the Sargasso Sea
MLRAVPQHPRRCPQRYPTPRSGGASPQHQHHWPVRRLGADVADPRVRQPFFPSQTARPVGTNGLARSMGEWGLTPWAESIPRHLRFAVHFQDIISTLQRFWADQGCLLLQPYDTEKGAGTMSPHTVLRAIGPEPWAVAYPEPCRRPTDGRYGDNPNRAQHYFQFQVLIKPSPDGIQETYLASLEALGIKAADH

SEQ ID NO: 159323 - protein, 302 aa, Unknown
  Bacterial polypetide isolated from the Sargasso Sea
LKSDLCSDLVDEFPELQGVMGKYFALSQGFDEDVSNSVSEHYLPTGLTSTLPKKPFSYSISIVDKIDTLVGFFIIDEKPTSSKDPFALRRSAIGLLRIIIENKLIFKLRDLIVYAIRIYEDQGVKIENEKAEQEILIFIKERMRNILKQKNIKIDIIEASISSHAGDNFLDLYKKTILMNKNINKDIGKNAVKSYKRAANILDKENKNILGRPDAVLFRKDEEKQLYEKINEIRKAFTVKESNKDYESLLIRLSHTKVPTDNFFDNVVVNDENQDIKNNRLELLKMFCNTFDNFIDFSKLEG

SEQ ID NO: 159324 - protein, 256 aa, Unknown
  Bacterial polypetide isolated from the Sargasso Sea
PRLPATSTSSPTSSSRIPRTSPRFWRADKLLEDVMEKRIEATTDEALKKEYQIVLNSADGYTQEELMGIFEKYDVRAPLANPKDKGPGHKLTDPVPFNLMFPTPIGPVGHEKGYLRPETAQGIFLNYKYCLEQNGSRMPFGIAQIGKVFRNEIAPRAGLTRQREFQQMEIEWFIKPGEYKHPKWNEVKDIEITLHSAVAQEAGEGPVRMSLEGALREGIIKDNNETLGYMIGRVYEFLVKVGLRESCIRFRQVREV

SEQ ID NO: 159325 - protein, 289 aa, Unknown
  Bacterial polypetide isolated from the Sargasso Sea
SDLVSGLVGEFPELQGVMGKYFAFSQGFEDDVCYAISEHYLPISISSSAPKKPISCALSIIDKLDTLVGFYLINEKPTSSKDPFALRRAAIGLLRTIIENNITIKLRDLIDNSIKIYLEQGVKELNSEVSKDLLVFFRERMKNILKERKIRTDLIEASISSHLNDNFLELYKKTLIMKKFISKDLGKNAVSTYKRASNILEQEKSVSKNGPDAVLFKHEEEKELFERINNIRKAFTLKEEKKNYEEHLKLLSDTKLSTDKFFDNVKVNDENKDLKNNRLELLQILCSTF

SEQ ID NO: 159326 - protein, 203 aa, Unknown
  Bacterial polypetide isolated from the Sargasso Sea
LMYQFPHGIEELEGIANRTDFDLGSHSKNQDDLNIDATTINNSSSNAKLAVQDLKTNQLTVPYVIEPSAGVDRGVLAILNEAFNIEKLEDGKERLVLSFKPHLAPIKAAVIPLKKNNDELVSTAINLKTKLQKMRLGRVVVENTGNIGKNYRKHDEIGTPLCITIDFDTLEKGSVTIRNRDTMAQETIDIENVPSYFRDFFQN

SEQ ID NO: 159327 - protein, 106 aa, Unknown
  Bacterial polypetide isolated from the Sargasso Sea
MPESSLDKIISLCKRRGFIFQSSEIYGGFGAVYDYGPLGVELKNNISQLWWKCMTQHHQNILGLDSGILMHPKIWEASGHVDAFNDPLVDCKQCKARYRADELVED

SEQ ID NO: 159328 - protein, 269 aa, Unknown
  Bacterial polypetide isolated from the Sargasso Sea
FLIVANKKDKKGLIKIGNERVIEARLNDAEFFWKKDKTQNLVKKVSDLRFINFFKGLGTYFDKVQRMRKLGGIISDELLISKEKVELSASICKTDLTSDLVGEFPELQGIMGGYFSAYQGFDKDISQAIGDQYLPIGLDSKVPKKPLSVALSVTDKIDTLVGFFGINEKPTSSKDPFALRRVALGIIRTIVENKIDLKLNDLLVYSVNLFKNQNFNLTNDNLQLELNNFLKDRFKYYLKEKQVRFDIIDSSISSFSANKLFSSLKRQRV

SEQ ID NO: 159329 - protein, 263 aa, Unknown
  Bacterial polypetide isolated from the Sargasso Sea
QFSDEFLDLPVEVLSTVMKSHQRYVPLLLKNKSFSKLDLSSEKNISTTFCVISNGLEESNNNIAKGNEKVLRARFSDAKFFVESDKKVASIERNEKLKSVSYLKGLGNIYQRVERIEEVTKKILKFLNDKSLEEKKVIEAAKYCKNDLCSEIVFEFPELQGIMGGKYLKYEGFSEDVCLAVAEHYLPSFYKDSLPSTKYGAIVSLADKVETLISIFISGKRPSGSSDPYALRRNLNGVIKIIWDYELDLPLDKLFNELIDFWK

SEQ ID NO: 159330 - protein, 280 aa, Unknown
  Bacterial polypetide isolated from the Sargasso Sea
FQNQGIIIDQDKRKKFINKEFLKILNKKKLSIEDNSKLLNEVVNLVDNPNILLCSFDKKFLSIPKEILTLTMQSHQKYFPTFNTRNELSNEFLIVINKKDHKGLIKIGNESVVEARLSDAEFFWNKEKTQNLVKKVSKLKSMNFFKSLGTYYDKVQRMRKLGGTISDELLISKEKVELSASICKTDLTSDLVGEFPELQGIMGGHFSNHQGFDKDISLALTEQYLPIGLDSKVSKKPFSIALSMTDKIDTLVGFFGINEKPTSSKDPFALRRIALGLIRT

SEQ ID NO: 159331 - protein, 221 aa, Unknown
  Bacterial polypetide isolated from the Sargasso Sea
FSALMPNQLGSKDPFALRRAALGVIRIIIDGKLNLPLVMVLEAAAKGYGFASVDPALLPFIHDRLRGYLRHQQMRHDVVAAALANTDGDNIRLMAARATELETFLAGPDGSGLMAGWRRVSSILAAEEKKARRVFAASCDPTLFNDIERALFTPLSAVADNHSGVDVQLSALGALRFPIDVFFDKIVVNDDDPEIRHNRLGLLAMIREKMLAVVDFTKIEG

SEQ ID NO: 159332 - protein, 306 aa, Unknown
  Bacterial polypetide isolated from the Sargasso Sea
KRRVIQSWIDHWSTIPNVVEVDSPTITPESVLVASGHVGEFNDKMSECQSCESTFRTDHLLEGFHDSPETLDAEEMDRIISDNNIKCPSCGLASWNAARPMNLMFETRIGAMGGSRTAYMRPETAQGMFMSYPALNRHFRQRLPFGAIQTGKGYRNEISPRQGMIRLREFNMAELEYFIDPKDPPSVNLDRWTQKVMMVPDTEGPNSGEKMVSFQEAFDSGIVGHPTVAWFLAMTFEFLTKVGIESSKIRFRQHEGNEMAHYAADCWDCELNGEHGWVEVVGIANRTCHDLQSHEEHSGSNLLRGG

SEQ ID NO: 159333 - protein, 124 aa, Unknown
  Bacterial polypetide isolated from the Sargasso Sea
MTAKTMDELVALCKRRGFIFQSNEIYGGLQGLYDYGPLGIELKNNLKQSWWTSMVYDRDDVEGLDASILTHPDVLKYSGHEETFTDPLVDCKSCGLRFREDQIPEQCIGEELTEPRDFNLMFKT

SEQ ID NO: 159334 - protein, 78 aa, Unknown
  Bacterial polypetide isolated from the Sargasso Sea
MVSKNKNKNKKKQKPKFQTFQETILNLQKFWSKQRCIILHPYDMEVGAGTFHPATTLRSLGTQPWKTAYVRPSRRPTD

SEQ ID NO: 159335 - protein, 66 aa, Unknown
  Bacterial polypetide isolated from the Sargasso Sea
HLLSVEPALPLPAYDQCMKASHLFNLLDARGIISVTERQSYIGRVRQLAKGCCEAWVAKTAKSNSS

SEQ ID NO: 159336 - protein, 109 aa, Unknown
  Bacterial polypetide isolated from the Sargasso Sea
AANKRVSNILAKVEGELPTAVKPELLVDAAEKALATQVAALQSELTPLFAAGDYQAALTRLAALREPVDTFFNEVMVMADDEALKANRLALLNNLRNLFLQVADISLLQ

SEQ ID NO: 159337 - protein, 151 aa, Unknown
  Bacterial polypetide isolated from the Sargasso Sea
MSAQDFLVELGTEELPPKALKSLGEAFLAGIEKGLKAAGLNYAASRVYAAPRRLAVLVEQLEEQQADRSMNLDGPPIQAAFDAEGNPTQAALGFARKCGVNIAEIDRSGAKLRFAQHIPGQPAVNLLPTIVQDSLNDLPIPKRMRWAARRD

SEQ ID NO: 159338 - protein, 296 aa, Unknown
  Bacterial polypetide isolated from the Sargasso Sea
GLPNKENDREVDLKGPPLSVAKDENNNWTKAAEGFAKKNNFSLKNLKTKKIEGKDYIFLQHRELGQPVPELIQENAPKWISQLNFPKSMRWGSYRTRYIRPIRWVVSLWNSRVLPIKLEMLVAGNQTRGHRFLSTGYSKIKHASEYEQHLHDLRVIADFDKRRKSIVSQVRKLEKKHNCHVELDEKLLDEVTNLVEWPTVLIGDFENEFLELPNEVLITSMEVHQRYFPVFSSKKKNSSGDKKLLPNFVTVRNGDSKSLDTVRRGNTKVLRARLNDARFFFKEDQKNILDEFNHKS

SEQ ID NO: 159339 - protein, 147 aa, Unknown
  Bacterial polypetide isolated from the Sargasso Sea
MEDLVSLCKRRGFIFQSNEIYGGLQGLYDYGPLGVELKNNLKRAWWKSMIYDRDDIEGIDSSILTNPLVLKYSGHEDTFSDPLLDCRSCKSRWRADHVEDGKCPGCGSEDLTEPRPFNLMFKTNVGPVEDGNSFAYLRPETAQNIFT

SEQ ID NO: 159340 - protein, 174 aa, Unknown
  Bacterial polypetide isolated from the Sargasso Sea
NESFSKLDLSSEKNISTTFCVISNGLEESNNNIAKGNEKVLRARFSDAKFFVESDKKVASIERNEKLKSVSYLKGLGNIFQRVERIEEVTKKILKFINDKSLEEKKIIEDAKYCKNDLCSEIVFEFPELQGIMGGKYLKYEGFNEDVCLAVAEHYLPSFYKDALPSTKYGAIVS

SEQ ID NO: 159341 - protein, 277 aa, Unknown
  Bacterial polypetide isolated from the Sargasso Sea
NLLHVSFSKDYLVIPKEIIISTLEKHQRYFPIFDSRNRLTNYFFVVANKKDEKKLIAQGNKRVVEARLADAKFFWDKDRSKNLIKQIANLKSVTFYEKLGTIYDKTQRLRQLAGSLSDDLNINKEKIQVAASISKSDLCSDLVGEYPELQGVMGKYFALAQGFDKEVANSVSDHYLPIGLTSVLPKKPFSYSISIVDKIDTLVGFFVINEKPTSSKDPFALRRAAVGLLRIIIENKLSFKLRDLIIYSIRLYQEQGVKIINEKTEQDVLEFIKERMR

SEQ ID NO: 159342 - protein, 277 aa, Unknown
  Bacterial polypetide isolated from the Sargasso Sea
LSSEKNISTTFCVISNGLEESNNNIVKGNEKVLRARFSDAKFFVESDKKVASIERNEKLKSVSYLKGLGNIFQRVERIEEVTKKILKFLKDKSLEEKKIIEAAKYCKNDLCSEIVFEFPELQGIMGGKYLKYEGFSEDVCLAVAEHYLPSFYKDALPSTKYGAIVSIADKVETLISIFISGKRPSGSSDPYALRRNLNGVIKIIWDYELDLPLDKLFNELIDFWKIVFPNLNFSRETVFNELNEFLVQRIVSHLEEISLSKELIKAVCSSDELSQKR

SEQ ID NO: 159343 - protein, 308 aa, Unknown
  Bacterial polypetide isolated from the Sargasso Sea
EIIISTLEKHQRYFPIFDNRDKLINYFFVIANKKDEKKFISNGNKRVVEARLSDAKFFWDKDKSKNLIKQIINLKSIIFYEKLGTIYDKTQRLRQLAGYLSDDLNINKEKVQVAASISKSDLCSDLVGEYPELQGIMGKYFALAQGFEEEVANSISDHYLPTGLTSRIPKKPFSYSISIVDKIDTLVGFFVIDEKPTSSKDPFALRRAAIGLLRIIIENKLSFKLRDLISYSIRLYEEQGVDIKNEKTENEVLEFIKERMRNVLKLKNIKTDIIEASISSHAGDNFLDLYAKTILMNKYKNKGIGLNA

SEQ ID NO: 159344 - protein, 61 aa, Unknown
  Bacterial polypetide isolated from the Sargasso Sea
AAPALDWVLKCSHTFNLLEARGVISVTERTATIGRIRTLARQVAESWLAEREALGFPLLKG

SEQ ID NO: 159345 - protein, 157 aa, Unknown
  Bacterial polypetide isolated from the Sargasso Sea
MGWEVWCDGMEITQFTYFQQMAGFECKPVSVEITYGLERICMFTQKEKNVFDLLWNDEGVKYHEVFHQAEKEFSAYNFEHANVETLLKMFEMHEIEAKALVEKKISLPAYDQCLKASHVFNILDSRGAISVAQRAGYIARIRDITKSVASVWLDSQK

SEQ ID NO: 159346 - protein, 86 aa, Unknown
  Bacterial polypetide isolated from the Sargasso Sea
MPTKKKLKSLSFQEIIMNLQKFWGKYGCVILQPYDLEVGAGTFHPATTLRSLGPKSWKAAYVQPSRRPTDERYGENPNRLQHYYQY

SEQ ID NO: 159347 - protein, 273 aa, Unknown
  Bacterial polypetide isolated from the Sargasso Sea
MSKYLLEIGTEELPAKFSHSVLEQFKSLIEFELDKKLIKFEHIVVTSTPRRIVLLLEGLVDYAEDKIIERKGPKANSAYLNGCPTNAALGFANSLDIDVGELEIKNTEKGDFVFGKKIEKGHSTKISLSSIIPKLVKSIQGPRFMKWGAGNIKFSRPIRWIASIYNDEILDFEFDECDPKIKISNKTKSHRLINKVLEVQTPDDFFELLKRNRVIAIRKERKEKIEKLINQASKSLNLKPDLSEGLLNELTDLVEWPDLIIGKFSDEFLDLPV

SEQ ID NO: 159348 - protein, 252 aa, Unknown
  Bacterial polypetide isolated from the Sargasso Sea
MRAPTPTTPVSTAVALADKLETIVGIWGIGLAPTGEKDPFALRRHALGVLRLLLEKQLPLDLVSLLRTAHARFEGVPGVAESTDAILAFFMDRLRGLLRERGYSAGEVDAVLSLNPTRVDDLVARLDAVREFTRLAEAEALAAANKRISNILKKSEGGANGTVQPTLLVEAAEKALHEQLAAVTPHVQSQLEARAYTGALSALAALRAPVDTFFNDVMVNAEDPALRANRLALLSALHQQMNCVADISKLAA

SEQ ID NO: 159349 - protein, 248 aa, Unknown
  Bacterial polypetide isolated from the Sargasso Sea
DEEWHDKWVELRLAWWEAQGVPKEKIKLLDVKGEELAHYSKKTVDLMYEFPHGLEELEGVANRTDFDLGSHSKNQEELEIKAKVAKNSSSNAKLAIQELDSNKWVVPFVIEPSAGVERAFLAILNEAYKEEELNDGKTRVLLSLKPHLAPIKAAVIPLKKNNKDLVDLAYELKNQLQSMKLGRVVVENTGNIGKSYRKHDEIGTPVCITVDFDSLEKNKVTLRDRDDMSQETLDIKEISSFFQQKISS

SEQ ID NO: 159350 - protein, 253 aa, Unknown
  Bacterial polypetide isolated from the Sargasso Sea
MLEIGLEEMPAGMILPAVEQLKKAAEKSLESNQLQSATVLPLSSPRRLALLISELPEKQEDRVEELKGPPASIARDQDGAWSKAALGFAKKNGIEPDSLEVRNFDGRDYLYTAKNVQGASLKDILKQEAPEWIKGLNFPKNMRWGHYKMRFARPIRWLVSLWNQEVIHFSLEMVKAGKHTLGHRFLSPKQSELLHAQDYHSHLHNHFVEADFNIRRNEILSQIKELESKHDCKVEIADDLLEEVTNLVEWPKA

SEQ ID NO: 159351 - protein, 59 aa, Unknown
  Bacterial polypetide isolated from the Sargasso Sea
MVSKKKKNTKLKFHSFQDTILNLQKYWSKYGCVILQPYDMEVGAGTFHPATTLKSLGTK

SEQ ID NO: 159352 - protein, 261 aa, Unknown
  Bacterial polypetide isolated from the Sargasso Sea
YKPKGVSDDLPKTKLGSLISLVDKIDTVVGFFLIDKKPTGSKDPFALRRNGFSIAQILINLKLNMSLHEVIEPSMKEYGCSSHSIKLSLIDFMIDKLKFVLSNLNNRVDVINSVLNTKIVNDISVKVISTRIKSIIRFTKNDDFKIFLTNYKRLNNILKNEKFLNNTASKVNIKFFNTIEEENIYNLTELFSKEIIKKGNCDKSQDTLVNSLIKMNVPISLFFDKVIVNHNDRNVKINRLSLLKNLHSLILKFSVFELIES

SEQ ID NO: 159353 - protein, 99 aa, Unknown
  Bacterial polypetide isolated from the Sargasso Sea
QSCPFRKNNLEIVNKAKNLKATLQKLGLGKITYEDTGNIGKGYRRHDEIGTPFCFTVDFQTIEEDSSVTARNRDTMEQERVNIENLPTYLASKLKPQDK

SEQ ID NO: 159354 - protein, 284 aa, Unknown
  Bacterial polypetide isolated from the Sargasso Sea
KEKVELSASISKVDLLSELVGEFPELQGIMGGYFANVQGFDKELSLAVSEQYLPVGSGTKIPKKPYSIALSLADKIDTLVGFFGVNQKPTSSKDPFALRRLALGIVRIIIENKKDFKIRDLINYSSSLYQDQGFEFENKSLQKELLDFLLERLKYYMKEENIRKDIIQASIISFNLDQSVIIFNKAKNLNKIINKQNGIDIIASYKRASNILESELKKDKIELSNTTDPGIFKTELEKNLFKKINELRKYFSSINNDENFVQTLDNLASIKRKVFDFFDNVIVN

SEQ ID NO: 159355 - protein, 124 aa, Unknown
  Bacterial polypetide isolated from the Sargasso Sea
VYPKVDNVYDLDWDGIEKKEGGKTYGDIFLQQEKEFSVYNFEKSNSSILLQHFNDAEKECELLLKDKINPLSLPAYHHCIRASHIFNLLDARGVISVSERQAYILRVRNMSRSCCLAYMGKLYE

SEQ ID NO: 159356 - protein, 244 aa, Unknown
  Bacterial polypetide isolated from the Sargasso Sea
MKKAILFEIGTEELPATQIKNITKSLYESLSQKLEQNEFYFESKKVFSTPRRLAVIFYNIKDTTTEKELVKKGPKLSDSFKSSGQPTNVGNGFAKSVNQHIEELITIGSGPDARLAAKTKIKSAVLKEQAPSILESCLSQIQNAKGMFWGAGTLKFARPIRWVTIIIDDEVADGHIFNLKISNYSRGHRVLGQNKIKIPSAVQYPELLEKNKVIVDRDRRKKIIIEQIQEIAKTEMCRPLKAEP

SEQ ID NO: 159357 - protein, 48 aa, Unknown
  Bacterial polypetide isolated from the Sargasso Sea
LDARKAISVTERQNYILRIRKMAQNVAELFLEKRKNLNYPLLDKPSEK

SEQ ID NO: 159358 - protein, 58 aa, Unknown
  Bacterial polypetide isolated from the Sargasso Sea
MFSSSRRPTDGRYGDNPNRLQHYYQFQVIIKPSPSNIKKLYLNSLSLIGIDHKNQISD

SEQ ID NO: 159359 - protein, 57 aa, Unknown
  Bacterial polypetide isolated from the Sargasso Sea
MVSKNSKKKAKFQTFQDTILNLQKFWSKQGCIILQPYDMEVGAGTFHPATYPKISWT

SEQ ID NO: 159360 - protein, 160 aa, Unknown
  Bacterial polypetide isolated from the Sargasso Sea
MVSLCKRRGFIFQSSEIYGGLSSVWDYGPVGSELKRNVKNAWWKNMVSDQENIVGIDASILMHPNVWKASGHLENFSDPLVECSVTGKRYREDHIFILELKSNNKNKIVSIEAGDIDEAKKITKEKIISITPLSQSNLEENPSPNGGILSEPRQFNLMFK

SEQ ID NO: 159361 - protein, 233 aa, Unknown
  Bacterial polypetide isolated from the Sargasso Sea
RPGDDDEWHKSWVKSRVQWWKDQGISDKSLELYDVPADELAHYSKATVDIMYKFPHGVEELEGIANRTDFDLGSHSKSQKELNIKAKVLENNESNSKLALQDENNNWFVPFVIEPSAGVDRGVLAILNEAYFVEEIEGKERVVLKLKPHLAPIKAAVMPLKKNDEKIVALAKKVKDELQKLGLGRILFENSGNIGKNYRRHDEVGTPVCITVDFESLDNQTVTVRDRDSMKQE

SEQ ID NO: 159362 - protein, 296 aa, Unknown
  Bacterial polypetide isolated from the Sargasso Sea
DDHNNWTKAAEGFARKNNVSLKNLETKIIGGKDYLFVQKRKLGQPVPELLQESVQQWISQLNFPKNMRWGSYKTRYIRPIRWVVSLWNSKVVPIKLEMLVSGNQTRGHRFLSTGYSKIKHASDYEQHLHDLKVIADFEKRRQSIVTQVRKLEKKHDCHIELDENLLNEVTNLVEWPTVLIGNFEKEFLELPDEVLITSMEVHQRYFPVFSSKKKKNSGEKKLLPNFVTVRNGDKKSLDTVRRGNSKVLRARLSDARFFYQEDQKSTLDEFSKKAEKVVFFQSRGSQHQRVHRITQL

SEQ ID NO: 159363 - protein, 236 aa, Unknown
  Bacterial polypetide isolated from the Sargasso Sea
LADKIDLITNFWAINLKPTGSKDPYALRRASIGVIRIILERGLDVSLLSLVNLGNEDIDLPDLIKFFKERVRVHFIEKGIQNDIISACFAVSGQDFKILDLYERALAISEFVNTELGRDLVQTYKRANNILTLEERKDGVEYSLDPQLQLMKEEPERTLFNHLMVIDNDIERELKEKNFKEGLRKLALLKSSLDPFFANIKINAKNSIIRRNRLCLLNRIREVMHKIANIAHISED

SEQ ID NO: 159364 - protein, 45 aa, Unknown
  Bacterial polypetide isolated from the Sargasso Sea
DARHAISVTERQRYILRVRTLAKACAESYYQAREALRFPLCNKEA

SEQ ID NO: 159365 - protein, 148 aa, Unknown
  Bacterial polypetide isolated from the Sargasso Sea
MPATNIEDLISLCKRRGFIFQSSEIYGGTQGLYDYGPLGVELKNNIKNSWWKSVVYERDDVEGLDAAILTKQSVLMYSGHEETFTDPLVDCKSCGERFRADQVPDYCKKEDLTEPRQFNLMFKTNIGPVDDGKTNAYLRPETAQQIFI

SEQ ID NO: 159366 - protein, 576 aa, Unknown
  Bacterial polypetide isolated from the Sargasso Sea
MSEFFLELFSEEIPSNLQKNLRENLLKSFNEFFLEKSIKFKKNSSYSTPNRLLILFEGIEKKIVLKSEEIKGPNTKSPDAALEGFARSNGVSKKELFIKKTDKGEFYFYKTRSKKLDTHTLLEEAIPQILSRIQWKKSMKWSNYELFWGRPLKSILSIFDKKKLNFKFHHFVSSNSTFVDKEFEEKKKPFSDFKSYKNFFKKMDIVIDHNERKDLIEKKFDIILKKRNIFIDSNPNLLQEVIDLTDQPNVIVCEFDKKFLNIPKEILILTMQHHQKYFPTFDKKGNITNQFLVVANNKDKKGLIKLGNERVVEARLSDAEFFWQKDKAQNMVKKISDLKLMNYFKGLGNYFDKAQRMRKLGAIISDELLISKEKVELSASISKVDLLSELVGEFPELQGIMGGYFANVQGFDKELSLAISEQYLPVGSGTKIPKKPYSIALSLTDKIDTLVGFFGVNQKPTSSKDPFALRRLALAIVRIIIENKKDFKIRDLINYSSSLYQDQGFEFENKSLQKELLDFLLERLKYYMKEETIRNDIIQASISSLNLDQSVIIFYKAKNLNKIINKQNGIDIIASY

SEQ ID NO: 159367 - protein, 438 aa, Unknown
  Bacterial polypetide isolated from the Sargasso Sea
IELSYSDIITFSSPRRLTILIKGVQDKAKTIREEKRGPRESLPEKALSGFLSANNVKKKDLIIRDIKGIKYYFLVKEIEGKENSKVLADISVQLIRDFRWKKSMRWGSSRLRWVRPLKSILALKYSDKKVTEVVNFQINGIKSGGKTVGHRFMSPEPFMVRNFDEYIEALKANFVELDHKKREEKISNQLENLAKNEGLEVVKDEKLIEEVSGLVEWPVALIGNIEKSFLDLPAEILQMVMKTHQKYFSVKDNKTGKIVKYITVANIVSKDNGEKILAGNNRVLNSRLSDASFFWKIDKDRIVKSGFEGFAKDLEFVTFFKGLGTQASRVTRLKKIARRMNKNLYNLSDREINLAAGVCKADLVSSTVNEFPELQGLLGSYFSKMSGYPDNVSWACKDHYRPMGPHDQVPTKPLSVTIALADKIDLLASFWSINKKPT

SEQ ID NO: 159368 - protein, 155 aa, Unknown
  Bacterial polypetide isolated from the Sargasso Sea
EVWCDGMEITQFTYFQKMTGIDCKPISVELTYGLERISMFVQGKKSVYDIDWNNEGVKYGDVYLQSEKEFSAYNFDHANTEYLLKIFEIAEKESQSLLEKKLPLPAYDQCLKASHAFNLLDARGVIGVAERTGYINRIRDLAKGAGSKWLENQEQ

SEQ ID NO: 159369 - protein, 116 aa, Unknown
  Bacterial polypetide isolated from the Sargasso Sea
YHLDWDGLDKNKGGKTYGDIFLQQEKEFSIYNFEKSDSSVLIQHFNDAEKECSFLLEDKINPLPLPAYDHCIKASHIFNLLDARGVISVSERQAYILRVRNMSRSCCLAWMNKSNV

SEQ ID NO: 159370 - protein, 149 aa, Unknown
  Bacterial polypetide isolated from the Sargasso Sea
ITQFTYFQQMAGIECKPISVELTYGLERLCMFTQGKKNVFDLEWNNEGIKYRDVFHEAEKEFSAYNFEFANTESLLKNFGIAESECKSLLEKKLALPAYDQCLKASHIFNLLDARGVIGVAQRTEYISRIRELAKGSGQTWLENQNNNG

SEQ ID NO: 159371 - protein, 552 aa, Unknown
  Bacterial polypetide isolated from the Sargasso Sea
LNWKKSMKWSDSNLIWGRPLRSILAIYNKKLLPFHYGHLRSTETVIIEQDIINKYKKVKNFSEYQSFLKSNEIILDHDERKTKILKRFEAVCKSKNFKESFNNRLLEEVTNIVDNPNILVEEFNKDYLKIPQEIIISTLENQQKYFPLFNKKDELTNNFLIVANKVDKKNLIKKGNKKVVEARLSDAKFFWDKDKSKNLIKQIGKLKTITFYDRLGTIYDKTQRLRKLASVVSDQLNINKEKIEVAASISKSDLCSDLVGEYPELQGTMGKHFALSQGFELDVANSISEHYLPIGLTSSVPKKPISYSISIVDRLDTLVGFFSINEKPTSSKDPFALRRSAIGLLRILVENKLSLKLRDLINYSVTLFRDQGVKIENENTEREILDFFKERMRNILKEKNIKNDIIEASISSHTGDNYLDLLKKSVLMNRYINKDIGKNAIYSYKRASNILDSEKKEIFGKPDAVLFRKDEEKSLFEKINEIRKAFTVEEDDKNYENLLIQLSEIKSYTDNFFDNVVVNDENRDIKNNRLELLKMFCKTFNSFIDFSKLEGA

SEQ ID NO: 159372 - protein, 690 aa, Unknown
  Bacterial polypetide isolated from the Sargasso Sea
MAEFFLELFSEEIPAGLQKNLRNKLLEEFQKFFLEKSIKSKKCFSLSTPNRLIIVFENLDKQIKIPSEKIRGPKTSAPEEALEGFIRSNNIERKDLFKNETEKGEFYFYKTKSKSLKTSDLLIGFIPKLLENYQWKKSMKWGEFDLNWGRPLKSILSVFDRKTLNFKFHHLSSSNSTYIDKDLEEKKKSFTDFRSYEKYFKKQGSLVDQDKRKEFIKREFLKILNKRKLTIKDNPRLFDEVINIVDNPNVLLCSFNKRFLSIPKEILTLTMQSYQKYFPTFDNNGVITNEFLIVSNKKDQKGLIKIGNERVIEARLSDAEFFWNKDKSQNLVKKISELKLMNFFKGLGTYFDKVQRLRKLGGIISDELLISKEKVELSASICKTDLTSDLVGEFPELQGIMGGYFALHQGFDTDISLAITEQYLPIGLDTQISKKPFSVALSVSDKIDTLVGFFGINEKPTSSKDPFALRRTALGIIRTIIENKKNFKVNDLLSYSSSLYQDQGYNLNNQNLQKELHNFLKDRFRYYMKEKKIRLDIIEATISSFSLNNLFSSYEKANRLNNIINNQQGIDIISSYKRASNILDNELKNSEIEMTNTTDPGIFKTDIEKNLYKKINEIKKYYSNINNDENYEQSLTILAGAKKDIFEFFDNVKVNEENETLRKNRLELINMLCKTFQNFINFQLLKINNE

SEQ ID NO: 159373 - protein, 524 aa, Unknown
  Bacterial polypetide isolated from the Sargasso Sea
MSEFFLELFSEEIPAGLQKNLRENLLKSFNDLFEEKFISFKRSSSYSTPNRLVILFEGLQKQTILKSEEIKGPSTKAPDLAIEGFIRSNQILKQNLYEKETEKGKFFFFKTKSKKLYTHELLEEFVPKILNKIQWKKSMRWGDFGLNWGRPLKSILAIFNKKTLIFKFHHIQSSNLTFVDKDFEEKKIKFSDFKKYKNFFKKKKIIIDPVERKKIIEKKFHLLLKKKNIVIDQNPKLLEEVVDLIDQPNVLVCQFDKKFLKIPKEILIITMQYHQKYFPTFDKKGSITNEFLVVSNKKDLKGLIKLGNERVVEARLTDAKFFWQKDKSQNLVKQVSNLKSMNYFKGLGSYFDKVQRMRKLGGMLSDELLISKEKVELSASISKVDLLSELVGEFPELQGIMGGYFSEAQGFDKDVALSISEQYLPSGSGSKVPKKPFSIALALSDKIDTLVGFFGINQKPSSSKDPFALRRLTLGVIRIIVENKNHIKIRDLIKYSASLYIDQGFKFENKLLQKELSEFLMDRL

SEQ ID NO: 159374 - protein, 485 aa, Unknown
  Bacterial polypetide isolated from the Sargasso Sea
MNYESVMKLALERAFYFPSCEVYGDAQAGFWEYGPTGVSVKNKFLELWRRELVRRDRMLEIDGSQIMSKSVFEASGHLGNFADPIIKCKKCGLTFRADKLISEIANVEIPESADLEDFDKMIQEKNIVCTKCKGEFESAKKFNMMFRVGIGPEDEEAYLRPETCQSIFVDFPRLFKTMRGKLPLGIAQVGKSFRNEIAPRQSLLRLREFYQAEIEVFCNPGKLNELEKFSEIENTTLRIQISDDIQVMTCKEAVEKGVIPNKFVAYYLGLLTEFYEKTGIDMEKSRFRKLGEKEKAFYADVAFDFEVNTTIGWLELVACNYRSDYDLSSHAKKSKEKFEVMDNDEKVLPHVFEISMGIDRSLYTILEHSLKEDKENERMVLSIKPYLAPTHVGVLSLVKKDGLSEKTDEIYRLIRTKFDSFLDHSGAIGRRYRRLDEIGAPFAITVDHQTKEDNTVTIRRRDDMAQERVNISELESILAKETAYP

SEQ ID NO: 159375 - protein, 181 aa, Unknown
  Bacterial polypetide isolated from the Sargasso Sea
DLGSHSKKQNELNIKSKVTVNKDSNSKLAVQDDNGDWVVPFVIEPSAGVERGFLAILNEAYTNEKLEDGKTRIVLKLKPHLSPIKAAVIPLKKNNEELVSKAKKIKEDLQIIGLGRIFLENTGNIGKGYRRHDEIGTPVCITVDFESLEDNTVTIRDRDTMNQSRLDINELSEYLKGKIQS

SEQ ID NO: 159376 - protein, 144 aa, Unknown
  Bacterial polypetide isolated from the Sargasso Sea
SQFTYFHKMEGLECKPVSLELTYGLERLATYVQNVDSIYKVIWDKSGMTYGELYLKNEEQFSKYNFELSSENYLFESFNHYEKNSEFLLKNKLPIPAYEFCIKASHSFNLLDAKGLISVSERQAYILRIRSLVQKCCESVLIKL

SEQ ID NO: 159377 - protein, 124 aa, Unknown
  Bacterial polypetide isolated from the Sargasso Sea
MTPWAESTPRHLRFAVHFQDIISTLQRFWADQGCLLLQPYDTEKGAGTMSPHTVLRAIGPEPWAVAYPEPCRRPTDGRYGDNPNRAQHYFQFQVLIKPSPDGIQETYLASLEALGIKAADHDIR

SEQ ID NO: 159378 - protein, 160 aa, Unknown
  Bacterial polypetide isolated from the Sargasso Sea
AGLGWEVWCDGMEITQFTYFQQMAGLECKPVSVELTYGLERICMFTQQKKNVFDLFWNDEGVKYKNVFHQAEKEFSAYNFEHANTDNLFKIFDMVEQESKSLLEKNLSLPAYDQCLKASHVFNILDARGVISVAQRTEYISRIREITKGAGEIWLKSQTK

SEQ ID NO: 159379 - protein, 390 aa, Unknown
  Bacterial polypetide isolated from the Sargasso Sea
MQYHQKYFPTFDKKGSITNEFLVVSNKKDLKGLIKLGNERVVEARLTDAKFFWQKDKSQNLVKQVSNLKSMNYFKGLGSYFDKVQRMRKLGGMISDELLISKEKVELSASISKVDLLSELVGEFPELQGIMGGYFSEAQGFDKDVALSISEQYLPSGSGSEVPKKPFSIALALSDKIDTLVGFFGINQKPTSSKDPFALRRLTLGVIRIIVENKNHIKIRDLINYSASLYIDQGFKFENKLLQKELSEFLMDRLKFYMKEENIRNDIIQASINSHNLDQLVVIFEKAKHLDKIISKSNGHEIISSYKRASNILESELKGQNFDHSNTTDPGIFKTDFEKNLFKKINDLRKYFSSINKDEVYSESLDNLLDAKKVINEFFDNVIVNDVDPG

SEQ ID NO: 159380 - protein, 71 aa, Unknown
  Bacterial polypetide isolated from the Sargasso Sea
MVSKIKKKTLSFQDTIFNLQKYWSKKGCVILQPYDLEVGAGTFHPATTLRSLGPKPWKTAYVQPSRRPTDG

SEQ ID NO: 159381 - protein, 442 aa, Unknown
  Bacterial polypetide isolated from the Sargasso Sea
MGQKKDLLIEIGTEELPPKSLKNLAVSFCQEMSKALKKNELNFKNINWYATPRRLSLLISDLDTAQKDKENQRRGPSISLAYDNNKNPTQATIGFAKSCGTEISKLEVLETENGSWLIFDTILKGKKTDAIIPILIEECLIRLPISKRMRWGNNDIEFVRPIKWIFILFDKKIIECKILGIKSCSSSFGHRFHHPESIKINSPKDYSRILKEKGKVVVSYDERLSIISSQVSSIAKENNGEAIIDSEILNEVTSLVEWPVSFIGNFDSEFLKLPKEVLIAVMQDNQKYFPVIDHKKNLMPLFVCVANIESNSPELIKKGNERVIMPRLSDAFFFFEWDSKYELKKFRNSLKKVIYQKELGTLYDKSQRLVKTISYMTKKLHIEPKLAKSAAELCLCDLLTKMVFEFPKLQGIMGRYYAELCGEKNDVAVAIGEFYHPRYAGR

SEQ ID NO: 159382 - protein, 167 aa, Unknown
  Bacterial polypetide isolated from the Sargasso Sea
FYIKAKVKDNKNSTTKLAIQDLENKEWFIPFVIEPSAGVERGVLAVLNEAYTVDEANKRTLLKLKPHLSPFKAAVIPLKRNNSDLVNTANNVKSELQSLGLGRVMVENTGNIGKNYRRHDEIGTPLCVTIDFETLENQTVTVRDRDTMKQEKVSLSEISNYYSGYFK

SEQ ID NO: 159383 - protein, 159 aa, Unknown
  Bacterial polypetide isolated from the Sargasso Sea
MPATNIEDLIALCKRRGFIFQSSEIYGGTQGLYDYGPLGVELKNNIKNSWWKSVVYERDDVEGLDAAILTKQSVLKYSGHEETFTDPLVDCKSCGERFRADQVPDYCKKEDLTEPRQFNLMFKTNIGPVDDGKTFAYLRPETAQQIFTNFKNVVDSTSR

SEQ ID NO: 159384 - protein, 279 aa, Unknown
  Bacterial polypetide isolated from the Sargasso Sea
REFYQAEIEVFCNPGKLNELEKFSEIENTTIRIQISDDIQVITCKEAVDKGVIPNKFVAYYLGLLTEFYEKTGIDMSKSRFRKLGEKEKAFYADVAFDFEVNTTIGWLELVACNYRTDYDLSSHAKKSKEKFEVMDNDEKVLPHVFEISMGIDRSLYTILEHSLREDKENERMVLSIKPYLAPTHVGVLSLVKKDGLSEKTDEIYRLIRTKFDSFLDHSGAIGRRYRRLDEIGAPFAITVDHQTKEDNTVTIRRRDDMAQSRVNISELESILAKETAYP

SEQ ID NO: 159385 - protein, 156 aa, Unknown
  Bacterial polypetide isolated from the Sargasso Sea
MNLLSSPSIKLPFGIHYSWLIVFALSIVQIFGTSISFSAGIMVAPLTNASLGFGWNVALVGAGIGFYYLTGAIMAPITGYLGDRFGARKMLLCSALLYFVSMNLLGQITEVWHFFIVFGMMLAVTQSLAMVPLMATVSGWFKQKLGIGIGILYAAG

SEQ ID NO: 159386 - protein, 147 aa, Unknown
  Bacterial polypetide isolated from the Sargasso Sea
MEITQFTYFQQMTGIDCKPVPVELTYGLERLCMFVQGKKNVFDIEWNREGVKYKDVFHQSEKEFSAYNFEYADTKILLSNFEHAEKECKSLLDKKLALPAYDQCLKASHIFNLLDARGVIGVAERANYIDRIRELSKGSGKLWLESQ

SEQ ID NO: 159387 - protein, 685 aa, Unknown
  Bacterial polypetide isolated from the Sargasso Sea
MSEFILELYSEEIPPNLQINARNDLETKFKSSLIEENLKFGSLKAFSCPTRLTIFLKDFSEKIKIPSKEIRGPKVGVMEDVINNFLKAHNSSRKDLMEKQNDKGKFYYIKTKSKEVLTSEVLKKIVVNSIASIKWKKSMRWSDTDLLWGRPLRSILAVYNREILAFSYGHLRASDCTVIEKDLDTKVVKVKTVKDYQKLLLNNNIILNHEEREQKIIKKFESFYKVKNFKNLYDLKLLKEVTNIVEDPQVLLIDFDKKYLELPKEIIISTLQNHQRYFPIIDKKDEITNFFLVVTNKKDTNNLIKDGNKRVVEARLADAKFFWDKDKSKNLIKQIAKLKDVKFYEGLGSVYDKTQRLRKLSGMLADEFNLNKEKAEIAASISKSDLCSDLVNEYPDLQGLLGKYFALSQGFEEDVSNAVSDHYLPLGNNSMTSKKPISYIVAIADKIDTLVGFFLINEKPTSSKDPFALRRSAIGLLRTIIDNKLNLKLRNLISYNIKLLEEQGVRKTNENSENEILNFLKERMKNILKDKNIKNDIIEASISSYFSDNYFDLYKKNTLMNKYINKEAGINAISSYKRAFNIVESAKENLLGRPDAVLFRKDEEKHLFEKLNEIRKSFTVNEQDKDYEKLLLSLSEIKIFTDKFFDNVIVNDDNSDIKNNRLELLKMFCNTFNNFINFSKLEGIS

SEQ ID NO: 159388 - protein, 462 aa, Unknown
  Bacterial polypetide isolated from the Sargasso Sea
EFREYFINKSIKSKKSFSLSTPNRVIIVFEGLQKKIKVGSEEIKGPKTSAPVEAIEGFLRSNKIDKKQLIKRDTEKGEFYFFKTPSKTLNTSDLLKDLIPKLLGSYQWKKSMKWGEFNLNWARPLKSILSVFDEKIIDFKFYHLTSSNRTFIDKDYEEKTGVFKNFKSYERFMKIHGTIVDQTKRKQIIQKEFTKILSKKKLFILENLKLFDEVVDLVECPNVLLCDFDKKFLSIPKEILILTMQSHQKYFPTIDKNNQITNQFLLVANKKDQKGLIKLGNQRVVDARLSDAEFFWNKDKTQNLVKKVSELKRINFFKGLGTYFDKVQRMRKLGGMISDELLISKEKVELSASICKTDLTSDLVGEFPELQGIMGGYFSAQQGFDKDICLSITEQYLPIGLDSNVPKKPFSIALSMTDKIDNLVGFFGIDEKPTSSKDPFALRRVALGIIRIIIENKKDLKL

SEQ ID NO: 159389 - protein, 650 aa, Unknown
  Bacterial polypetide isolated from the Sargasso Sea
EDNVKYKELSVYSSPQRLILHIKDLNEKIKLEAKEIKGPKVGSPDKVIQGFLRAKNVSEKDLIEKDTSKGKFYFIKTKSQSIFVEDILIKVIPKAIRSISWKKSMKWSDHDLMWGRPLRSIFAKYNNKKLPFKYEHLESKDEIIIEQDLVTKTRKIKDFKDYLLFLKSNKIIVNHNEREEIILKKIHSFSQSKQYKETLNPKLLEEVVNIVEDPNLLHISFNKDYLEIPKEIIISTLEKHQRYFPIFDSRNRLTNYFFAVANKKDENKLITQGNKRVVEARLADAKFFWDKDRSKNLIKQIANLRSVTFYEKLGTIYDKTQRLRLLAGLLSDDLNINKEKVQVAASISKSDLCSDLVGEYPELQGVMGKYFALEQGFEKDVANSVSDHYLPTGLTSVLPKKPFSYSISIVDKIDTLVGFFVIEEKPTSSKDPFALRRAAIGLLRIIIENKLSFKLRDLISYAIRLYQEQGVKIKNEKTEQQLLEFIKERMRNVLKLKNIKTDIIEASISSHSGDNFLDLYAKTILINKYKNKDVGINAISSYKRASSILDKAGKGYTGRPDAILFRKEEEKILHEKINEIRKAFTVKDDNKNYENLLIKLSDTKESTDNFFDNVVVNDENQNIKNNRLELLKMFCNTFDSFIDFSKLEGL

SEQ ID NO: 159390 - protein, 223 aa, Unknown
  Bacterial polypetide isolated from the Sargasso Sea
MHQQKGKKILIYFFLFLIVGSINNTVLTNIRFDTNKIIQISGLNQNQNTNILESIKELNLKNIFFLNGNEISKIISSNNLVENYEIFKKYPNALDIKIEKTDFLAKINNNGKIFLIGTNGKLSDLKFSDKELPFIFGKPRIDEFIKLTNIIDQSKLSFNQVKNLYFFPSKRWDLELKNNVILKLSKDHTKLSLDQAFEILNDNNFNDIKVVDARIKNQIVLND

SEQ ID NO: 159391 - protein, 335 aa, Unknown
  Bacterial polypetide isolated from the Sargasso Sea
MTQPHQATLLVELLTEELPPKALARLGDAFAEGIAQRLAARDLIEGELSFERYATPRRLAVTIKNVRAVAPEKHVREKVLPVSVALDKDGQPTAPLAKKLAALGFPDFSVNDLERAQDGKAEAFFLRYAAPGATLVEGLQSALNETLAKLPIPKVMTYQRPDGTNVQFVRPVHRLTTLHGDQVVPVTALGIDADDTTLGHRFLSEGLVQIQHADSYADTLLHKGRVVANFADRKETIRTHLLAQADGDQVVMPESLLDEVNSLVEWPVVYACRFEDEFLQVPQECLILTMQTNQKYFALTDANGKLRSRFLIVSNIETKTPGDIVEGNERVVRPR

SEQ ID NO: 159392 - protein, 255 aa, Unknown
  Bacterial polypetide isolated from the Sargasso Sea
PRFSGDALPATATGTVVALADKLETLVGIWGIGLQPTGEKDPFALRRHALGVLRILVEKQLPVDLIELLRTAYAQFAAVPGVADSTQAIYEFSMDRLRGLLRERGYAPGEIDAVLALNPTRLDDIVARLDAVREFAALPEAASLAAANKRISNILKKSEGSVTGGVQVTLLIEAAEKALHAQLEQVAPRVQSQLAARDYTGALTALAALREPVDTFFNDVMVNAEDPALRANRLALLGALHQQMNCVADISRLAA

SEQ ID NO: 159393 - protein, 55 aa, Unknown
  Bacterial polypetide isolated from the Sargasso Sea
GKSYRRHDEVGTPICITVDFETLENQTVTVRDRDTMEQKRLGPEELINYYGQYFE

SEQ ID NO: 159394 - protein, 118 aa, Unknown
  Bacterial polypetide isolated from the Sargasso Sea
KVEKLENVKERTVLSLKSHLSPIKAAVIPLKRNNQDLVNKAVELKKQLQLIGLGRVVLDNAGNIGKSYRRHDEVGTPMCITIDFETLDDNSVTVRDRDTMEQKRIKLDEISDFFVKNL

SEQ ID NO: 159395 - protein, 504 aa, Unknown
  Bacterial polypetide isolated from the Sargasso Sea
KTSKFLSFKTYKEFFKSKGIILDHNKREEFIENQLLKKTKLDRLKLTPNKKLLSEVTNIVEKPNIIKCKFDKKFLKIPKEILVTTMEVHQKYFPTFDNKENLTNVFFVVADNNDPKGLIKLGNERVVEARLNDAQFFWDKNKTKNLVKGISDLKNVNYFEGLGTYFDKTQRLRKLGSLISDELLISKEKVEVASSICKVDLVSDLVGEFPELQGVMGGHFAKAQGFDNEICLAISEHYLPIGPETKTPKKPYSVTLALSDKIDTLVGFFIINLKPSSSKDPFALRRSAIGLIRLIIENKLEIKLKDLINYSCVLFAEQDLDFDIKTVQQDLFNFFSERLKFYMKEKKVRSDIIECSINSYSADQIYKIYNKAFILNKLIDKNIGQDVIFSYKRASNILSNEISKNKIELENSTDPGLFKNDFEKKLYKKIQEIRKYFTSLGSHEDCKKTLEVLADAKTDVSNFFDNVIVNDEDEAIKKNRLELMQLLCKTFNNYLNFSNIESAK

SEQ ID NO: 159396 - protein, 311 aa, Unknown
  Bacterial polypetide isolated from the Sargasso Sea
MNKPLWQPSKKLKDNSLLRDFCKFINFKSSNNFKEIWQWSIDNPDEFWSKFWDYSKIIGDKGSEIIKKDKVFNKAKFFPDSKLNYSENILKKKSDEIAINFLSEKGFEENITWNELYEKVCKFSSYLKKLNLQKGDRVAAYVPNKIETIICFLACAKNGIIWSSCSPDFGAQGVVDRFKQIEPKVLITCDYYYYNGKKINILDKVDQILKEISSIKNVIAYNYNKKEKEDLKNFINFEETLNSNLNENFEKFEFDHPIYILFSSGTTGKPKCITHGTGNVLIEHNKEFMLHCDIRDKEKLFYYTTTGWMMW

SEQ ID NO: 159397 - protein, 70 aa, Unknown
  Bacterial polypetide isolated from the Sargasso Sea
MSRDLLIELGTEELPPKALASLSAALTDEFVRQLDEAGLNHGAVERFAAPRRLALLVRDLDEKQADRDIE

SEQ ID NO: 159398 - protein, 187 aa, Unknown
  Bacterial polypetide isolated from the Sargasso Sea
MSIKHLDKIVSLCKRKGFVFPNSEIYGGLKASYDYGPLGVELKKAISEKWWQAMTNNSNIVGLDSSIMVHPDVWEASGHIANFNDPLTDNKDSKKRYRIDDLLSQQKSKVIDALCEILSIENKNDNNTLDKISHTLLQESDKYSNALESAGVIDPFSGNIGKWTPATQFNLMFQTNSGPSEKSGKSI

SEQ ID NO: 159399 - protein, 64 aa, Unknown
  Bacterial polypetide isolated from the Sargasso Sea
KSIPFGMPKIGKAFRNEITPRNFIFRVREFEQMKLEFFVKKGEDEDWHKYWIEERINWWVPAGS

SEQ ID NO: 159400 - protein, 359 aa, Unknown
  Bacterial polypetide isolated from the Sargasso Sea
QRYVPLLLKNKSFSKLDLSSEKNISTTFCIISNGLEESNNNIVKGNEKVLRARFSDAKFFVESDKKVASIKRNQKLKSVSYLKGFGNIFQRVERIEEVTKKILKFLDDKSLEEKKIIEAAKYCKNDLCSEIVFEFPELQGIMGGKYLKYEGFSEDVCLAVAEHYLPSFYKDALPSTKYGAIVSIADKVETLISIFISGKRPSGSSDPYALRRNLNGVIKIIWDYEFDLPLDKLFNELIDFWKIVFPNLNFSRETIFNDLNEFLVQRIVSHLEEISLSKDLIKAVCSSDELSQKRVLNIVDLKNRIKSIINFNEKDNFVEIQKVITRVSKLANKSDISREVLSTRDYVNTKLFEKDCEFK

SEQ ID NO: 159401 - protein, 431 aa, Unknown
  Bacterial polypetide isolated from the Sargasso Sea
NFDKEYLKFPQEIIISTLEKHQRYFPIFDSRERLTNYFFVVANKKDEKKLITEGNKRVVDARLSDAKFFWEKDRSKNLIKQTANLKAITFYEKIGTIYDKTQRIRNLAGLLSDELNINKEKVQVAASISKSDLCSDLVGEYPELQGVMGKHFALAQGFEEDVANSINEHYLPIGLTSAIPKKPFSYSIAIVDKIDSLVGFFLINEKPTSSKDPFALRRAAIGLLRIIIENKLSIRLRDLINYAIRLYDEQGVEVKNEKTEMEVLDFLKERMRNILKLKNIKIDIIEASISSHTGDNFLDLYKKNLLMNKYINKDVGINAISSYKRASNITDKAEKGIVGRPDAVLFRTEEEKILFEKINEIRKAFTVKESNKDYENLLIRLSETKQFTDNFFDNVVVNDENKDIKNNRLELLKMFCNTFNNFINFSKLEGI

SEQ ID NO: 159402 - protein, 453 aa, Unknown
  Bacterial polypetide isolated from the Sargasso Sea
LLNEVTDIVEKPKIILCSFDKKYLDIPQEIIIITMQQHQRYFPTYDNKGKLTNNFYIVANSVDNKGYIKIGNERVVEARLNDAEFFWKKNKSQNLVKQVSQLKNVNYFKGLGSYFDKVQRIKKLAGLVSDELLISKEKVEIASSICKVDLLSDLVGEFPELQGVLGGYFAQSQGFDKDVCLAIKEHYLPHGNDSNIPKKSYSIALSLSDKLDTLIGFFAIGLKPTSSKDPYALRRLAIGLIKLILENKVKLKLKDLINYSCQLYINQNVGLDLKNVQRDIASFFHDRFKNYMKENGIRQDIIESATLSYNLDSILKIYTKANILNKLISKEIGTDVMFSYKRAFNILINESKNIDLELSGNVDPGLFRNDLEKILYKKIYDIRKDFTNVSKEDDYKGLLSNLASVKKEVIDFFDNVIVNDDDQNIKKNRLELLKMLCKTFDNYLNFSKIENLT

SEQ ID NO: 159403 - protein, 87 aa, Unknown
  Bacterial polypetide isolated from the Sargasso Sea
MVSKKKIKKPKYQSFQDTILNLQKYWSNHGCIILQPYDLEVGAGTFHPATTLRSLGSKPWRTAYVQPSRRPKDGRYGENPNRLQHYY

SEQ ID NO: 159404 - protein, 77 aa, Unknown
  Bacterial polypetide isolated from the Sargasso Sea
MVSKIKKKTLSFQDTIFNLQKYWSKKGCVILQPYDLEVGAGTFHPATTLRSLGSKPWKTAYVQPSRRPTDGRYGDNP

SEQ ID NO: 159405 - protein, 243 aa, Unknown
  Bacterial polypetide isolated from the Sargasso Sea
MINKQDHFKDTISHAKEYGFIFQSSEIYDGLSAVYDYGQNGIILKNNIREYWWKSMVQLNQNIVGLDSAILMHPTTWKASGHVDAFNDPLIDNKDSKKRYRADVLVEDYVSKIELKIHKEIKKASKRFGEKFNQDEFINTNSRVKGYIERKDQILRRLNNSLENDLSDVKALIEELEIACPESGSRRWTDVKQFNLMFGTKLGASTESASDLYLRPETAQGIFVNFLNVQKSSRLKLPFGIAQ

SEQ ID NO: 159406 - protein, 203 aa, Unknown
  Bacterial polypetide isolated from the Sargasso Sea
VDLMYMFPHGLEELEGIANRTDFDLASHSKKQDELNITSNVEKNKHSNSKMAVQDKKGDWIVPYVIEPSAGVERGILAILNEAFVEEDLGDGKTRVVLKLKPHLSPIKAAILPLKKNNEEIVTLSKEVKNSLQKLGLGRVILENTGNIGKGYRRHDEIGTPVCITVDFESIEDSTVTIRDRDSMDQVRVQISELAEIYKNKIK

SEQ ID NO: 159407 - protein, 203 aa, Unknown
  Bacterial polypetide isolated from the Sargasso Sea
SVIIKPSPSNIKKLYLNSLSAIGINHKNHDIRFIEDDWESPTLGAAGLGWEVWCNGMEITQFTYFQQMAGFECKPVSVELTYGLERICMFTQQKQNVYDLIWNNENVEYREVFHQSEKEFSAYNFEYANTNNLFKMFDMFESEAKVLAEKKISLPAYDQCLKASHVFNILDSRGVISVAQRAEYIGRIREITKSAATVWIDSQ

SEQ ID NO: 159408 - protein, 193 aa, Unknown
  Bacterial polypetide isolated from the Sargasso Sea
MAQHTFLVEIGTAELPPKALRSLAEAFADNLKSELTKADLAFGDVEWFASPRRLALKVSELAGEQPSKSVEKRGPAVAQAFDAEGKPTKAAEGWARGNGITVEQAERLVTDKGEWLVHTAKVEGRPAKDLLGELVSQALAKLPIPKMMRWGDKTIQFVRPVFTVTLLLDGDLVPAHILGIDSAPHIRGHRFMG

SEQ ID NO: 159409 - protein, 164 aa, Unknown
  Bacterial polypetide isolated from the Sargasso Sea
TKKNDESTMRLAVQDMEAKKWYVPYVIEPSAGVDRGVLAVLNEAYTVEELGEGKERVVLRLKSHLSPIKAAVIPLKKNKEELVTLAKDIKSNLQSTGKGRVFLENKGNIGKAYRRHDEVGTPVCITVDFDSLDNGTVTLRDRDTMEQRTVAISELNQLYLDSLK

SEQ ID NO: 159410 - protein, 156 aa, Unknown
  Bacterial polypetide isolated from the Sargasso Sea
GWEVWCNGMEITQFTYFQQMAGIECNPISVEITYGLERLCMFIQNKKNVFDLVWNDDGILYRDVFYQSEKEFSEYNFDYANTENLFKIFDMLESEAKSLIEKKISLPAYDQCLKSSHVFNLLDARGVISVAQRAEYIGRIRDLTKEIGKIWIESQK

SEQ ID NO: 159411 - protein, 229 aa, Unknown
  Bacterial polypetide isolated from the Sargasso Sea
YEKWKKNRMEWHLSIGINKNNYRFHDHDKLAHYADAACDIEFNFPFGFKELEGIHSRTDFDLANHEKFSSKQIKYFDPEDESKYIPYVVETSIGLDRMFLAVFSNSLSFESLEDGSQRTVLKIPKILAPNQCAILPLVKKDGLADFAKELKNQLKVKFKLIYDEKDAIGRRYRRQDALGTPFCITVDHQTLDDKTITIRDRDSMKQKRIKVDELENFLSKSFEISNWLR

SEQ ID NO: 159412 - protein, 52 aa, Unknown
  Bacterial polypetide isolated from the Sargasso Sea
YRRHDEIGTPICITVDFETLDENSVTVRDRDSMNQERVASKDLNQFYQKYFH

SEQ ID NO: 159413 - protein, 199 aa, Unknown
  Bacterial polypetide isolated from the Sargasso Sea
MSDEIFKKIISHAKEYGFVFQSSEIYDGLSAVYDYAQNGVLLKNNIKDYWWKSMVQLNDNIVGIDSSIFSHPTTWKASGHVDAFNDPMIDNKDSKKRYRADNLIEDYIQKIEAKINKEKKKQYKRFGENFDEKTFLSTNPKVLKYQNEIDLVNKRFSEALNQDNLDELKNIIEDCGIVCPISGTKNWTDVKQFNLMLKR

SEQ ID NO: 159414 - protein, 136 aa, Unknown
  Bacterial polypetide isolated from the Sargasso Sea
PSAGVDRGVLALLNEAYKEENTDKDNKRILLSLKPHLSPIKAAVIPLKKNNDELVNLSKEIKSNLQKLGLGRVVLENSGNIGKNYRRHDEIGTPICITVDFETLEDKSVTVRDRDTMEQKRINLDGLENYYRDYFN

SEQ ID NO: 159415 - protein, 186 aa, Unknown
  Bacterial polypetide isolated from the Sargasso Sea
RTDFDLGSHTKGQKDLNIDATVAENTQSNTKLAIQDLETKQWVVPYVIEPSAGVDRGFLAILNEAYKVESLENNKERTVLSLKPHLAPIKIAVIPLKRNENSIVMTSVDLKNDLQRTIEGRVLLENTGNIGKNYRKHDEIGTPACITVDFQTLEDNTVTIRDRDTMDQTRLKIDEVRNFLAQNYNI

SEQ ID NO: 159416 - protein, 150 aa, Unknown
  Bacterial polypetide isolated from the Sargasso Sea
LGIQDENGEWFVPYVIEPSAGIERAFLAILNEAYTEESLENGKNRIVLKLKPHLAPIKAAVIPLKKNDMGLVKMATELKNKLQKDIDQRIVLENTGNIGKSYRKHDEIGTPYCITIDFDSLAEGTVTIRDRDTMKQNTIKVESISKHMSF

SEQ ID NO: 159417 - protein, 155 aa, Unknown
  Bacterial polypetide isolated from the Sargasso Sea
WEVWCDGMEITQFTYFQQMAGFQCKPVSVEITYGLERICMFTQQKKNVYDLVWNNNGVDYREVFHQAEKEFSAYNFDHANTENLLKIFDMIEHEAKSLVEKKISLPAYDQCLKASHVFNLLDARGVISVTQRAEYISRIREITKLVAETWIDTQK

SEQ ID NO: 159418 - protein, 284 aa, Unknown
  Bacterial polypetide isolated from the Sargasso Sea
LVENFHPNPDILSPVELDDLLVKHEIPCPTCGSVDWSKARPMNLMFSTRIGAMKGGRSAYMRPETAQGMFMLYPALYRHFRNRLPFGAIQTGKGYRNEISPRQGMIRLREFNMAELEYFIDPDVPIEHDFSTWNKTEFNLVPDPEHGDPVKMTPYQAAQQNIIRHPSVAWFMAKTWDFLVSVGIDPEKIRFRQHEGTEMAHYASDCWDAEIYGSYGWIECVGIAHRGCYDLQAHETATGDKNLRAWRPYDVPKSVDKTVLSGVGSVIGPAFRAKAGAVHEALGK

SEQ ID NO: 159419 - protein, 167 aa, Unknown
  Bacterial polypetide isolated from the Sargasso Sea
GLGWEIWCDGMEISQFTYFQQVGGIEVKPVASEITYGLERLAMFIQKVENVYHLDWDGLDKDKGGKTYGDIFLQQEKEFSIYNFEKSNSSVLIQHFNDAEKECSFLLEDKINPLPLPAYEQCIKASHIFNLLDARGVISVSERQAYILRVRNMSRSCCLAWMDKSNV

SEQ ID NO: 159420 - protein, 234 aa, Unknown
  Bacterial polypetide isolated from the Sargasso Sea
MKKIRGFFLTAKNMEELVSLCKRRGFVFQSGEVYGGLQGVYDYGPLGVELKNNLKNSWWSSMVYERDDIEGLDASILSKQELFKYSGHEETFSDPLVDCRSCKSRWREDLLKDGKCLSCGSTDLTEARAFNLMFRTPMGPVENEESFAYLRPETAQHIFTSFKNVQDSTSRQIPFGIAQIGKAFRNEINPRNFIFRLREFEQMELEYFVRPGEDEAALDYWRDQRLRWWEDLRY

SEQ ID NO: 159421 - protein, 262 aa, Unknown
  Bacterial polypetide isolated from the Sargasso Sea
GRIEKKKQKEILKAKKRFKEDFDEKKFCETSPRVLKYIEEIEKISTQLNDCLKSNNLNGLKDLIISLGITDPISGTKNWTDVRQFNLMFSTDMGSVDSNKNLIYLRPETAQGIFLNFLNVINSSRIRIPFGIAQIGKAFRNEIIARQFIFRMREFEQMEMQFFVSPKSEMEWYKKWKNTRIKWHHILNLGKDRYRFHDHKNLAHYANAACDIEFNFPMGYKELEGIHSRTDFDLKAHQKLSGKKLTYFDQKNNKAFLPYVIE

SEQ ID NO: 159422 - protein, 72 aa, Unknown
  Bacterial polypetide isolated from the Sargasso Sea
MVSKAKKEKKKIQTFQDTILNLQKFWSKKGCIILQPYDMEVGAGTFHPATTLRSLGTKPWKVAYVQPSRRPT

SEQ ID NO: 159423 - protein, 190 aa, Unknown
  Bacterial polypetide isolated from the Sargasso Sea
MDKVVNLCKRRGIIFQSADIYGGFRSTYDYGPIGSLMLRNVKDAWWKTMVQLRHDIVGLDASILSPPAVWEASGHLENFTDPLVDCKECNGRFREDQLEDPSTCPACGAQNSFTEARAFNLMFKTHAGPVEGAGHAVYLRPETAQGMFTNFKLVLETSRKKPPFGIAQVGKSFRNEITPGNFVFRTREFE

SEQ ID NO: 159424 - protein, 256 aa, Unknown
  Bacterial polypetide isolated from the Sargasso Sea
EFFVEKGSDEKWHDFWVKSRVDWWKDQGVSESSLELLHVPKEELSHYSKATVDIMYKFPHGLEELEGVANRTDFDLGSHSKNQKDLKITAKVRENKTSNSKLAVQNRETNEWAVPFVIEPSAGVDRGVLAVLNEAYNVEDLGEDKQRTVLSLKPHLSPIKAAVIPLKKNNEELVNLAYKIKNQLQGLRLGRVLVENSGNIGKSYRRHDEVGTPICITVDFQTLEDGTVTIRDRDTMEQERKDIADLAQLLKEKLLA

SEQ ID NO: 159425 - protein, 287 aa, Unknown
  Bacterial polypetide isolated from the Sargasso Sea
IKISNKTKSHRLINEVLEVQNPDNFFELLKRNRVIAIRKERKEKIESLINQASNSLNLKSDLSEGLLNELTDLVEWPDLIIGKFSNEFLDLPVEVLSTVMKNHQRYVPLLFKNESFSKLDLSSEKNISTTFCVISNGLEESNNNIAKGNEKVLRARFSDAKFFVESDKKVASIERNEKLKSVSYLKGLGNIFQRVERIEEVTKKILKFLNDKSLEEKKIIEAAKYCKNDLCSEIVFEFPELQGIMGGKYLKYEGFSEDVCLAVAEHYLPSFYKDALPLTKYGAIVSI

SEQ ID NO: 159426 - protein, 38 aa, Unknown
  Bacterial polypetide isolated from the Sargasso Sea
DFESLEDKSVTIRDRDSMEQSRMSIQEISSFVIKKLKS

SEQ ID NO: 159427 - protein, 157 aa, Unknown
  Bacterial polypetide isolated from the Sargasso Sea
GLGWEVWCDGMEITQFTYFQQMTGIDCKPVPVELTYGLERLCMFVQGKKNIFDIEWNSEGVKYKDVFHQSEKEFSAYNFEHADTKILLSSFECAEKECKSLLNKKLALPAYDQCLKASHIFNLLDARGVIGVAERANYIDRIRDLAKGSGKLWLENQ

SEQ ID NO: 159428 - protein, 282 aa, Unknown
  Bacterial polypetide isolated from the Sargasso Sea
LSKINFFDKLGSLGDKSKRLQKLVPTICEFIGLDNVNGAVKAAWLAKADLSTMMVNEFPELQGVMGGYYASADGEPPEVCRAISGHYAPLGPTDACPSEPLTITISIADKIDTLVGFFAINEKPTGSKDPFALRRAALGIIRTILENELRIPLKQLISKSLDEYPHLTDSNELLDFINERLKVYLRASGVQPDLIAANFAGGNEDDLYRLILRVKALEELLATDDGANLLIANRRAANIVSIEAKKDKSDFTGIPDPKMFELEEERALFSVLAELEKQVGDL

SEQ ID NO: 159429 - protein, 305 aa, Unknown
  Bacterial polypetide isolated from the Sargasso Sea
WETSGHIQNFSDPLIECKECNARFREDELIVTNGACPNSKCTTTDFEDPREFNMMFKTNIGPIVSDSSEIYLRPETAQGIFVNFENIINTSRKKIPFGVAQIGKAFRNEITTGNFIFRTREFEMMEIEYFVKPDDSEKFYEEWIKNSMNFLLELNINDSNLRIREHEQKDLSHYSKGTSDIEYDFPWGWAELQGIANRGSFDLDAHSESSSKNFSIFEEASKSRYTPHVIEPSIGVDRLLLVTLLDAYTEEKVEGKDEIRTVLKLSPKIAPIKIAILPLSKDQKLSELSKKIQRDLLSKGSLGKM

SEQ ID NO: 159430 - protein, 240 aa, Unknown
  Bacterial polypetide isolated from the Sargasso Sea
ELTDLVEWPDLIIGEFSEEFLDLPVEVLSTVMKSHQKYVPLLTKNNTFSKLDLSSEKNISTNFIVISNGLEESNKNIAKGNEKVLKARFSDAKFFVESDKKVASIQRNEKLKSVSYLKGFGNVFQRVERIEEVTKKILIFLNDKSLNDEKLIEAARYCKNDLCSEIVFEFPELQGIMGGKYLKNEGFSKDVCLAVAEHYLPSFYKDALPSTKYGAIVSIADKIETLISIFISGKRPSGSS

SEQ ID NO: 159431 - protein, 75 aa, Unknown
  Bacterial polypetide isolated from the Sargasso Sea
MTTKHDVKTFQGFILTLQEYWAQQGCAIVQPLDMEVGAGTFHPQTFLRSLGPEPMSSAYVQPSRRPTDGRYGENP

SEQ ID NO: 159432 - protein, 105 aa, Unknown
  Bacterial polypetide isolated from the Sargasso Sea
MVSKKKKTKKPKFQTFQDTILNLQKYWSGQGCVILQPYDVEVGAGTFHPATTLRSLGPKSWKTAYVQPSRRPTDGRYGKNPNRLQHYYQFQVLIKPSPKNIKKLY

SEQ ID NO: 159433 - protein, 102 aa, Unknown
  Bacterial polypetide isolated from the Sargasso Sea
MSENYSFQKIITNLQTFWIDKGCVLLQPYDLEVGAGTFHPATVLRVLGPDPIWKAAYVQPCRRPTDGRYGENPNRLQHYYQFQVIIQPSPEDIQNLYLESLN

SEQ ID NO: 159434 - protein, 120 aa, Unknown
  Bacterial polypetide isolated from the Sargasso Sea
AYDEEDLEGEKRSLLRFKPIISPIQVAVLPLSKNEKLSEVSDEIYKKLQKIYRCQFDNTQSIGKRYRRQDEIGTPICLTIDFDTVEKDQCVTLRHRDTMDQIRIKIEDIEKEIEKLFTTF

SEQ ID NO: 159435 - protein, 170 aa, Unknown
  Bacterial polypetide isolated from the Sargasso Sea
EDDWESPTLGAAGLGWEVWCDGMEITQFTYFQQMTGLECKPIPVEMTYGLERLCMFVQGKKNVFDLDWNNEGVKYKDVFFQAEKEFSAYNFEFANTETLLKNFESTEIECKSLLDKKLSLPAYDQCLKASHIFNLLDARGVIGVAERTGYINRIRELAKGCGALWLSTQI

SEQ ID NO: 159436 - protein, 308 aa, Unknown
  Bacterial polypetide isolated from the Sargasso Sea
LLLELFSEEIPARFQKEAENNLKGLLADAMNKRNMIFDTIAVFSTPRRLVAVVTDLPQTTAAQVEEKRGPRIGSADKAIEGFIKSMKITRDQLFIKSEKRGEFFFARIDKKSEPIAPIISEVVLKLIIDFPWSNSMRWGSESIKWIRPLHSILCILHDENGCEIVPLRIAGMKACNTSCGHRFHSNNKFTVKSFEDYEKKLKKARVILDRNSRKEKIWNEATTLAFIHNMEVVEDKRLLEEITGLVEWPVVLWGEIDSVFFELPSEVLQTSMREHQKFFSVTRKNSKKIQSYISVANIETVDNGHAIS

SEQ ID NO: 159437 - protein, 180 aa, Unknown
  Bacterial polypetide isolated from the Sargasso Sea
SKTTFGDKLTQASVSDEVLDFMLGRFRACYEGEGFGVDVIQAVLARRPTNPADFDRRVKAVAEFRKLDAALALAAANKRVANILAKVTEAIPASINSALLSEEAEQALYKAIVAEQGYQATVSSYAEGLSHLAAMRDVVDQFFDKVMVNADDAAVRLNRQALLQQLRELFLRVADISVLQ

SEQ ID NO: 159438 - protein, 167 aa, Unknown
  Bacterial polypetide isolated from the Sargasso Sea
WESPTLGAAGRGWEVWCDGMEITQFTYFQQMAGMECNPVSVELTYGLERICMFTQGKNNVFELVWNNEGIKYRDIFHQAEKEYSAYNFEFANTEYLLKNFEIAESECKALLEKKLPLPAYDQCLKASHIFNLLDARGVIGVAQRTEYISRIRELAKGSGQSWLESQK

SEQ ID NO: 159439 - protein, 72 aa, Unknown
  Bacterial polypetide isolated from the Sargasso Sea
MTTKHDVKTFQGFILTLQEYWAQQGCAIVQPLDMEVGAGTFHPQTFLRSLGPEPMSSAYVQPSRRPYRRPLR

SEQ ID NO: 159440 - protein, 268 aa, Unknown
  Bacterial polypetide isolated from the Sargasso Sea
MHESTKEANNQYLLEIGLEEMPAGMILPAVEQLKKAAEKSLESNRLQSAKVQPFSSPRRLTLLISELPEKQEDRIEELKGPPASIARDEDGSWSKAALGFAKKNGIEPDSLEVRNFDGRDYLYTAINVQGPSLKDILKQEAPEWIKGLNFPKNMRWGHYKMRFARPVRWLVSIWNEEVLHFSLEMVEAGKQTMGHRFLSPKPNELLHAQDYHSHLHNHFVEADFNNRRNEILSQIRELESKHDCRVKIADDLLEEVTNLVEWPPSDDG

SEQ ID NO: 159441 - protein, 116 aa, Unknown
  Bacterial polypetide isolated from the Sargasso Sea
MGGNTHHPSDFQSLIIKLQQFWADYGCVLLQPYDVEMGAGTFHPATALGALGKTERNIAYVQPCRRPTDGRYGENPNRLQHYYQFQVMLKPSPSNTQELYLNSLYELGIEKDLHDI

SEQ ID NO: 159442 - protein, 164 aa, Unknown
  Bacterial polypetide isolated from the Sargasso Sea
PTLGAAGLGWEVWCDGMEVTQFTYFQQMAGLECNPISVEITYGLERLCMFIQNKKNVFDLAWNDEGILYRDVFYQSEKEFSAYNFDYANTENLFKIFDMMESEAKSLIEKKISLPAYDQCLKSSHVFNLLDARGVISVAQRAEYIARIRDLTKEIGKLWIESQS

SEQ ID NO: 159443 - protein, 281 aa, Unknown
  Bacterial polypetide isolated from the Sargasso Sea
MRWGHYKMRFARPVRWLVSLWNQEVIHFSLEMVEAGKHTLGHRFLSPKRSELLHAQDYHSHLHNHFVDADFNNRRDQILSQIKELESKHDCKVEIEDDLLEEVANLVEWPQAMMGSYDENYLGLPESVLVTSMAVHQRYFPVYSNQTDSGENKLLPQFIAIRNGNEQHLETVCQGNERVLRARLSDARFFFEEDQKKSLQHFQELLERVVFFQKRGSQHERVQRIQDLSLKLGELLKFNEEELQKVRRIAELCKFDLQTQMVYEFPELQGMMGRGILFAER

SEQ ID NO: 159444 - protein, 119 aa, Unknown
  Bacterial polypetide isolated from the Sargasso Sea
KKIENVYDLDWDGIEKNKGGKTYGDIFLQQEKEFSRYNFEKSEISFLFKQFNDAETECKNLLVDKKNALALPAYHQCIKASNIFNLLDARGVISVSERQSYILRVRNMARSSCLAWMGK

SEQ ID NO: 159445 - protein, 202 aa, Unknown
  Bacterial polypetide isolated from the Sargasso Sea
TMEELVSLCKRRGFLFQSNDIYGGIKGLYDYGPMGVEFKNNLKQAWWKSMVYERDDTEGLDASILSSPVVLKHSGHEDTFTDPLVDCRACKSRWRADQLLENNKCPNCKSEDLTEPRPFNLMFKTAIGPVDDGSSFAYLRPETCQQIFTNFKNILHSTSRTVPFGIAQMGKAFRNEITPRNFIFRVREFEQMELEFFVKPGT

SEQ ID NO: 159446 - protein, 103 aa, Unknown
  Bacterial polypetide isolated from the Sargasso Sea
MVSKIKKTLSFQDTIFNLQKFWSKKGCVILQPYDLEVGAGTFHPATTLRSLGPKPWKTAYVQPSRRPTDGRYGDNPNRLQHYYQFQVLIKPSPKEIKKMYLNS

SEQ ID NO: 159447 - protein, 262 aa, Unknown
  Bacterial polypetide isolated from the Sargasso Sea
LKDDPGLLTEVTGLVEWPVVYMGTIDDAFMDVPAEVLITSMKKHQKYFSCLDPDGNLANRFILVANTETTDGGTAVVAGNERVLRARLSDAKFFWNTDCQTPLEDKALALKNRVFHAKLGSVAEKVARMEALAVDLAQYVPGADVDLARRAAQLAKADLSSGMVAEFANLQGIMGRYYALNDGEPEAVAEAIAEHYAPQGPNDTCPTAPVSVCVALADKIDSLVGFFAIDEKPTGSKDPFALRRAALGVIRLILENEIRLPL

SEQ ID NO: 159448 - protein, 240 aa, Unknown
  Bacterial polypetide isolated from the Sargasso Sea
MKPDLSEGLLNELTDLVEWPDLIIGKFSDEFLALPVEVLSTVMKSHQRYVPLLLKNKSFSKLDLSSEKNISTTFCVISNGLEESSNNIAKGNEKVLRARFSDAKFFVESDKKVASIERNEKLKSVSYLKGLGNIFQRVERIEEVTRKILKFLNDKSLEEKKIIEAAKYCKNDLCSEIVFEFPELQGIMGGKYLKNEGFSDDVCLAVAEHYLPSFYKDALPSTKYGAIVSISDKIETLISI

SEQ ID NO: 159449 - protein, 121 aa, Unknown
  Bacterial polypetide isolated from the Sargasso Sea
MPKKNKNDNSKGQTFQEIIMSLQKFWSKYGCVLLQPYDLEVGAGTFHPATTLRSLGPKPWKAAYVQPSRRPTDGRYGENPNRLQHYFQFQVIIKPSPKNIKNVYLKSLSAIGIDVKKHDVR

SEQ ID NO: 159450 - protein, 271 aa, Unknown
  Bacterial polypetide isolated from the Sargasso Sea
TLQFHQRYFTLIDHKDRMINEFVIVVNNQDKKKIIKLGNERVVEARLSDASFFWEKDKSLNLIKQINKLKQVTFYEKLGSIYEKTQRLRKMAYFISDQLDLNKEKVEIAASVSKSDLVSGLVGEFPELQGIMGKHFALNQGFEEDVSSAISEHYLPTNINAPVSKKPISCALSIIDKLDTLVGFYLINEKPTSSKDPFALRRATIGLLRTIIENNLIVKLRDLIDYSTKIYLDQGVNQQNNSVSKDLLVFFRERMKNILREKKIRADVIEA

SEQ ID NO: 159451 - protein, 105 aa, Unknown
  Bacterial polypetide isolated from the Sargasso Sea
MPKKIKKIKKKNKKPKFKSFQDTILNLQQYWSKNGCVILQPYDTEVGAGTFHPATTLRSLGPKSWKAAYVQPSRRPTDGRYGKNPNRLQHYYQFQVIIKPSPKDY

SEQ ID NO: 159452 - protein, 283 aa, Unknown
  Bacterial polypetide isolated from the Sargasso Sea
VIRSTLQTHQRYFTLVDHRDRISNNFIVVANKKDEKKVIKVGNERVVDARLSDASFFWEKDKSLNLIKQINKLKEITFYENLGSLYDKTQRLRKMAYFISDQLDIKKEKIEIAASICKSDLVSGLVGEFPELQGIMGKYFAANQGFEEEVSRAVSEHYLPISISSMVPKKPISYGLSIIDKLDTLVGFFLINEKPTSSKDPFALRRSAIGLLRTIIENNLTVGLRDLIDYLIRFYTEQGVKDVNKNTHLELINFFRDRMKNIFKEKRVRPDIIEASLSSHTND

SEQ ID NO: 159453 - protein, 243 aa, Unknown
  Bacterial polypetide isolated from the Sargasso Sea
MIYGYKKRLEWWSKQGVPTEKIEIYNVPKEELAHYSKKTIDLMYKFPHGLEELEGIANRTDFDLGSHSKQQDEINISSSVKVNKNSNSKMAVQNESGGWFVPYVIEPSAGVERGFLAILNEAYSIETLDDGKDRLVLNLKPHLAPVKAAVIPLKKNNKELVTLAKDIKNDLQKLKLGRVIFENTGNIGKSYRKHDEIGTPICITVDFDSLDDKTVTLRNRDTMKQERMHKDKLSEYLKNLVNN

SEQ ID NO: 159454 - protein, 105 aa, Unknown
  Bacterial polypetide isolated from the Sargasso Sea
MVSKKNKKTQKFQTFQDTIFNLQKFWSKQGCVILQPYDIEVGAGTFHPATTLRSLGSKPWKAAYVQPSRRPTDGRYGDNPNRLQHYYQFQVIVKPSPSNIKKLYL

SEQ ID NO: 159455 - protein, 166 aa, Unknown
  Bacterial polypetide isolated from the Sargasso Sea
KVDKNSDSNAKLAVQDPETKEWLVPYVIEPSAGVERGFLAILNEAFRVEGLEDGKERTVLSLKPHLSPIKAAVIPLKRNNEDLVKTARNLKNTLQNQGLGRVLLENSGNIGKSYRRHDEIGTPVCITIDFESLEDGTATIRDRDTMEQKRLDIESIPEYFKETIDS

SEQ ID NO: 159456 - protein, 183 aa, Unknown
  Bacterial polypetide isolated from the Sargasso Sea
MANKKKKAEQPENKLFQTIIGHAKEYGFVFQSSEIYDGLQAVYDYGSNGVELKNNLKQFWWKSMTQMHENIVGIDSSIFMHPTIWKASGHVDSFNDPMIDNKDSKKRYRADVLIEEKAALYEKEGDKEKADALLKKMGALLEAEDLAGVKQLIEDEEIACPLSGTVNWTDVRQFNLMFSTEMG

SEQ ID NO: 159457 - protein, 96 aa, Unknown
  Bacterial polypetide isolated from the Sargasso Sea
MPKKTKNKKKDPVTFQNLIFNLQKFWGKYGCVILQPYDLEVGAGTFHPATTLRSLGPKPWKAAYVQPSRRPTDGRYGKNPNRLQHYYQYQVIVKPS

SEQ ID NO: 159458 - protein, 297 aa, Unknown
  Bacterial polypetide isolated from the Sargasso Sea
NDALILKGNERVLRARLSDALFFWKADKATHLREYRKKLGDITFYKGLGQVSQKVDRMEALAASIARYIPECSEADAFQAAGLSKSDLVTGMVGEFPELQGVMGSYYASAYDVATSQVVAIRDHYCPQGADDKLPETAEGIALSMADKIDTLVGFFGINVKPTGSKDPFALRRAALGILRMIDERSISLPLDEVLSKAAHLYGFDSFEDDLALFITERLKVRLRDQGISHDVVSAAIIDADIHNLQIQIEKVKAIDKMLDTPAGIKLLEGWRRASNILAAEAKKGNNNADLTQTSIE

SEQ ID NO: 159459 - protein, 178 aa, Unknown
  Bacterial polypetide isolated from the Sargasso Sea
EVWLNGMKVTQFTYFQQVGGLECYPVTGELTYGLERIAMYLQNVESMFDLVWTKTAEDAVTYGDVFLQNEQEMSAYNFEHANTDWLLSAFHEAEVTCQRLLESALPLPAYEQVLKASHTFNLLDARHAISVTERQRYILKVRNLARQVAESYFESRKNAGFPLADEKLRAEVLEGAKG

SEQ ID NO: 159460 - protein, 218 aa, Unknown
  Bacterial polypetide isolated from the Sargasso Sea
SVKKDELSHYSKSTVDILYDFPHGKEELEGIANRSDFDLGSHTKNQKDFNISTKVMENKKSTTKLGVQELENKSWFIPFVIEPSAGLDRGVLAVLNDAYKEEKIDNNNSRIVLALKPHLSPIKAAVIPLKRNNDQLVERAKSIKKILQQIGVGRIILENTGNIGKNYRRHDEIGTPLCITVDFETLESNSVTIRDRDSMQQKRLSTEELKEYFKNYFD

SEQ ID NO: 159461 - protein, 90 aa, Unknown
  Bacterial polypetide isolated from the Sargasso Sea
KKNNSEIVKLAHKIKDSIQSLRIGRIVIENTGNIGKSYRKHDEIGTPICITVDFDSLENEDVTIRDRDTMEQIRQPISKVSEFVKQQINK

SEQ ID NO: 159462 - protein, 139 aa, Unknown
  Bacterial polypetide isolated from the Sargasso Sea
GVDRMFLAIFSSSLKFEKLDDGTERTVLKTPYILSPYKVAFLPLLKKDGLPEYCRKIKDKLKLKFSTVYDEKDAIGRRYRRQDAIGTPFCVTIDHQTIDDDTVTIRDRDCMKQDRIHVNEIHNFLDSSLDINNWLLNSD

SEQ ID NO: 159463 - protein, 158 aa, Unknown
  Bacterial polypetide isolated from the Sargasso Sea
MGWEVWCDGMEVSQFTYFQQVGGIDCDLVPVELTYGLERLAMYVQGVDNVYELDWNGRGEKYGDIFLRSEKEFSSFNFEVADTGMLTNHFSDSETECSILLAQGLTLPAYDHCIKASHIFNVLDARGVISVAERQAYIARVRSMVKGCCELFLEKEAK

SEQ ID NO: 159464 - protein, 167 aa, Unknown
  Bacterial polypetide isolated from the Sargasso Sea
WESPTLGAAGLGWEVWCDGMEVTQFTYFQQMAGMECNPISVEITYGLERLCMFIQSKKNVFDLIWNDEGVLYKDVFHQAEKEFSAYNFEYANTDKLFKIFDMFEEEAKSLIEKKISLPAYDQCLKSSHVFNILDSRGVISVAQRAEYIARIRDLTREIGKIWVETQN

SEQ ID NO: 159465 - protein, 281 aa, Unknown
  Bacterial polypetide isolated from the Sargasso Sea
EQVSRAAHLAKADLVSEMVCEFPELQGVMGQYYARNDGENEAVAAAIAEHYSPLGPSDACPSGPVSVAVALADKIDTLVGFWAIEEKPTGSKDPFALRRAALGVIRLITENGARLRLMPVFNHAHELLIRGRSPSDPAVQATFTFGPDLLSFFADRLKVHLREQGARHDLITAIFALDGEDDLVRLLARVEALASFLETIDGANLLTAYKRAANILRIEEKKDGRRYDHADGIEDKYLRENAESSLYQKLMEIGPAVTSALESERFSDGMGVLASIRLFVD

SEQ ID NO: 159466 - protein, 168 aa, Unknown
  Bacterial polypetide isolated from the Sargasso Sea
MIGKSNLGAAGLGWEVWCDGMEITQFTYFQQMTGIECKPVPVEITYGLERLCMFVQEKNNVFDLDWNNNGVKYKEVFFQAEKEFSAYNFEFANTDSLLKSFENTENECKSLLENKLSLPAYDQCLKASHIFNLLDARGVIGVAERTGYITRIRELAKGCGALWLSSQS

SEQ ID NO: 159467 - protein, 41 aa, Unknown
  Bacterial polypetide isolated from the Sargasso Sea
QTYLKSLSAVGIDIKNHDIRFVEDDWEVQLRGSRIRLGGLV

SEQ ID NO: 159468 - protein, 181 aa, Unknown
  Bacterial polypetide isolated from the Sargasso Sea
ELPPKSLRKLAEAFAANLTQELESLELAHQGVSWYASPRRLGLQVKALEAKQQDKEVEKRGPATKAAFDSEGNPTKAAMGWARGCGIDVSEAQTLETDKGAWLLHIAKVAGQETKTLMADAIAKALSKLPIPKPMRWGANKTQFIRPVHTVTILFGSELLEGEILGKQVSNQLQGHRFHHP

SEQ ID NO: 159469 - protein, 283 aa, Unknown
  Bacterial polypetide isolated from the Sargasso Sea
GRFELDHADNYASALEQQYVLADFEARKDKVRQQLEDAAQSLSLKPDYNEDLLEEIASLVEWPVVLQAGFDKAFLAVPKEALIYTMKDDQKYVPLLDSNGALSNTFLFVTNIESRDASQVISGNEKVIRPRLADAEFFFNSDKKTTLESRLESLETVLFQKQLGTLKEKSERISALSAFIASQIDANESQAARAGLLAKTDLMSNMVMEFPDVQGVMGKYYALNDGEDAPVAEALYEQYMPRFAGDALPSSGVSASVALADKLDTLVGIFGIGQLPKGDKDPF

SEQ ID NO: 159470 - protein, 95 aa, Unknown
  Bacterial polypetide isolated from the Sargasso Sea
MDKNKSFQNIIMKLQSYWMDQGCVLIQPYDTQVGAGTFHPATVLRVLGPDPIWKAAYLQPCRRPTDGRYGENPNRLQHYYQFQVIIQPSPDNIQN

SEQ ID NO: 159471 - protein, 102 aa, Unknown
  Bacterial polypetide isolated from the Sargasso Sea
HLSPIKAAVIPIKKNDSTIVDFSKQIKDKLQKLALGRVVLENTGNIGKSYRKHDEIGTPICITIDFDTLEDGTVTVRDRDSMEQKRVKIDNLDDLLKNLLLK

SEQ ID NO: 159472 - protein, 312 aa, Unknown
  Bacterial polypetide isolated from the Sargasso Sea
ISCSICKLICSQILVGEFPELQGVMGGYFAESQGFDKDVSLAIKEHYLPNSLESKVPTKPFSLGLSLTDKLDTLVGFFGVNQKPTSSKDPFALRRAALGVIRLILENKKHIRIKDLINYSLLLYQEQNYKFDNESVQNGLSEFLLERLKYYMKDKAIRSDIINASFNNKNINNINEIFRKSFALNKIINKESGIDIISSYKRASNIIENELKDNKLELADTADPGIFKNDFEKNLFKKIKELKKYFTNIDNDENYETTLDNLKTAKPIIFDFFDNIIVNDHDENIRKNRLELPFNVCRTFENYINFSKIESA

SEQ ID NO: 159473 - protein, 83 aa, Unknown
  Bacterial polypetide isolated from the Sargasso Sea
MVSKIKKPKQKKQTFQETILNLQKFWSKKGCILLQPYDMEVGAGTFHPATTLRSLGPKPWKAAYVQPSRRPTDGRYGDNPNRL

SEQ ID NO: 159474 - protein, 299 aa, Unknown
  Bacterial polypetide isolated from the Sargasso Sea
RMGQPVPELLQESALKWISQLNFPKNMRWGSYKTRYIRPIRWVVSLWNTKVVPIKLEMLVAGNQTRGHRFLSSGDITIKHASDYEQLLNDLKVIADFEKRRYSIVSQIRKIENKHNCYVELDENLLNEVTNLVEWPTVLIGNFEEEFLELPDEVLITSMEVHQRYFPVFNRKKKNSPGDNKLLPNFITVRNGNSKSLNTVRRGNEKVLRARLSDSRFFYQEDQKSMFDEYNKKAEKVVFFQSRGSQLQRVHRITQISTFISFKLNFSPVQQKHVKRIAELSKFDLGTRMVNEFPRTPKE

SEQ ID NO: 159475 - protein, 314 aa, Unknown
  Bacterial polypetide isolated from the Sargasso Sea
YSGHEDTFSDPMVDCKSCQKRFRADQVPPECKEEDLTEPRQFNLMFKTNVGPIDDGDNFAYLRPETAQQIFTNFKNIIDSTSKTLPFGIAQTGKAFRNEITPRNFIFRVREFEQMELEYFVTPGDDEEAHSSWVQKRLDWWVNQGVPMKSIQLYDVPKDELAHYSKKTIDIMYEFPHGVEELEGIANRTDFDLGSHSKKQSELNINASVTKNKDSNSKLAIKDENGGWVVPFVIEPSAGVERGFLAILNESFTVEKLSDGKERIVLKLKPHLAPIKIAVIPLKKNNAEMVAYAKKIIKKLQALKIGRVVLKIQE

SEQ ID NO: 159476 - protein, 239 aa, Unknown
  Bacterial polypetide isolated from the Sargasso Sea
DENYLKLPKEIIKSTLQSHQRYFTLIDQKDRMRNEFLIVTNNKDDKKLIKIGNERVVEARLSDARFFWEKDRSLNLIKQINKLKKVNFYENLGSIFDKTQRLRKMAYFISDQLNLNKEKVEIAASVSKSDLVSGLVGEFPELQGVMGKYFAISQGFEEEVSRAISDHYLPTNISSPVSKKPVSYALSIIDKLDTLVGFFLINQKPTSSKDPFALRRAAIGLLRTIIENNLVVKLSDLIE

SEQ ID NO: 159477 - protein, 148 aa, Unknown
  Bacterial polypetide isolated from the Sargasso Sea
KKTLHLFHTFIDPSAGVDRGVLAVLNEAFTNEEISNGNSRIVLKLKPHLSPIKAAVIPLKKNNDQIVEKAKNIKNQLQSLGLGRVMLENSGNIGKNYRRHDEIGTPICITVDFETLEDDSVTIRDRDSMNQERVLIKDLNQFYQKYFH

SEQ ID NO: 159478 - protein, 301 aa, Unknown
  Bacterial polypetide isolated from the Sargasso Sea
ESKHDCMVEIADDLLEEVTNLVEWPQAMMGSYDGNFLGLPESVLVTSMAVHQRYFPVYSNQTDSGGNKLLPQFIAIRNGNEQHLETVCQGNERVLRARLSDARFFYDEDQKKPLQYFQELLERVVFFQKRGSQHERVQRIQTLSLKLGELLQFNEEEQQKVRRIAELCKFDLQTQMVYEFPELQGMMGEVYSVLKGEDSQMSRGIREHYFPRTSGDGLPSDQLTLPVALADRMDMLSVAFSLKMIPSGSADPYALRRMAQGVVQIVLGKQLPLGWEELSSLSVQILRDQQDFTNETDILEK

SEQ ID NO: 159479 - protein, 106 aa, Unknown
  Bacterial polypetide isolated from the Sargasso Sea
LKLKPHLSPIKAAVIPLKKNNDQIVEKAKKIKTQLQNLGLGRVMLENSGNIGKNYRRHDEIGTPICVTVDFETLEDDSVTIRDRDSMNQERVLIKDLSQFYQKYFH

SEQ ID NO: 159480 - protein, 110 aa, Unknown
  Bacterial polypetide isolated from the Sargasso Sea
MKFLSFQEIIMNLQKFWGKYGCVILQPYDLEVGAGTFHPATTLRSLGSKPWKAAYVQPSRRPTDGRYGKNPNRLQHYYQYQVIIKPSPDNIKQTYLKSLSAIGINVKNHD

SEQ ID NO: 159481 - protein, 75 aa, Unknown
  Bacterial polypetide isolated from the Sargasso Sea
MVSKKKNKKPNFHSFQDTILNLQKYWSKHGCVILQPYDMEVGAGTFHPATTLRSLGSRPWKAAYVQPSRRPTDGR

SEQ ID NO: 159482 - protein, 198 aa, Unknown
  Bacterial polypetide isolated from the Sargasso Sea
DGVNPEIAGRAARLAKADLVTGLVSEFPELQGIIGGYYAAASGEVTAVSSSITSHYRPQGPTDNLPVTPTAMVVALADKVDTLVGFFGIDAKPTGSKDPFALRRAALGVIRIIVDGKLNLPLAIVLQAAAKGYGFASVDPDLLPFVHDRLRGYLRDQKMRHDVVAAALANTDVDNILQMAARATALTVFLAGPDGSGL

SEQ ID NO: 159483 - protein, 279 aa, Unknown
  Bacterial polypetide isolated from the Sargasso Sea
NIFHAKLGAMAQKVDRITALAGELAPFIPDCDPDKAIRAAHLAKADLVTEMVYEFPELQGTMGRYYALNDGEDSGVADAIADHYSPAGPGDDCPAAPISVAVALADKLDMLVGFFAIDEKPTGSRDPYALRRAALGIIRLVLENKLRLPLREAFRKAYWGYNETVPDFEAVIDGGHKPKVLEQDLLDFFADRLKVHLRGRGVRHDHVEAVFSLGGEDDLVRLLARVDALSDFLGTDDGENLLAAYKRASNIVAIEEKKDGISFDGDVSREKLAQDEERV

SEQ ID NO: 159484 - protein, 174 aa, Unknown
  Bacterial polypetide isolated from the Sargasso Sea
NQNDFDISANVKKNQHSTTKLGVQNLEEKTSFIPYVIEPSAGVDRGVLAILNEAFNNEKIENGNSRVVLKLKPHLAPIKAAVIPLKKNNEQIVKKAKTIKNQLQNLGLGRVMLENTGNIGKNYRRHDEIGTPICITVDFETLEDDSVTIRDRDSMKQQRVFIKDINQFYQKYFY

SEQ ID NO: 159485 - protein, 205 aa, Unknown
  Bacterial polypetide isolated from the Sargasso Sea
KCPACGSSDLTEPRPFNLMFKTTVGPVDDGSNYAYLRPETAQQIFTNFKNILDSTSKTIPFGIAQIGKAFRNEVTPGKFIFRVREFEQMELEFFVEPGKDDEWHKYWVDKRYSWWIDQGISEKRLKKLDVEDADLSHYSKATVDLMYEFPHGLEELEGIANRTDFDLGSHTKNQNDFKISADVMKNNQSTTKLSIQNLESKEWYI

SEQ ID NO: 159486 - protein, 276 aa, Unknown
  Bacterial polypetide isolated from the Sargasso Sea
NEVLEVQNPDDFFDLLKRNRVIAIRKERKETIESLINQASKSLNLKPDLSEGLLNELTDLVEWPDLIIGKFSDEFLDLPVEVLSTVMKSHQRYVPLLLKNKSFSKLDLSSEKNISTTFCVISNGLEESNNNIVKGNEKVLRARFSDAKFFVESDKKVASIKRNQKLKSVSYLKGFGNIFQRVERIEEVTKKILKFLNDKSLEEKKIIEAAKYCKNDLCSEIVFEFPELQGIMGGKYLKYEGFSEDVCLAVAEHYLPSFYKDALPSTKIWCNSFHSR

SEQ ID NO: 159487 - protein, 247 aa, Unknown
  Bacterial polypetide isolated from the Sargasso Sea
GQATFELDHADNYLAALKEQGKVLADFHLRKSIIKADAEAAAAKIGGVADIQEDLLEEVASLVEWPIVLTAHFEEKFLAVPSEALVYTMKGDQKYFPVFDNTGKLLPNFIFVTNIESKDPQQIIAGNEKVVRPRLADAEFFFNTDKKHTLESRLTSLETVVFQKQLGTLKARVERISELAGFIATELNSQGVNTNSADASRAGLLSKTDLMTNMVMEFTDTQGTMGMHYARLDGETDAVAIALEEQY

SEQ ID NO: 159488 - protein, 237 aa, Unknown
  Bacterial polypetide isolated from the Sargasso Sea
KRIEWWVNQGIKKENLKKIEVEKDELAHYSKRTVDINYVFPHGEEELEGVANRTDFDLGSHTKNQNDFKITSEVMKNSSSTTKLAVQDLEEKKWYIPFVIEPSAGVDRGVLALLNEAYREENVDKDNKRILLSLKPHLSPIKAAVIPLKKNNEELVNLSKEIKSNLQKLGLGRVVLENSGNIGKNYRRHDEIGTPICLTTDFETLEDKSVTVRDRDTMKQERVSIENLSEYYKKYFN

SEQ ID NO: 159489 - protein, 268 aa, Unknown
  Bacterial polypetide isolated from the Sargasso Sea
KGYIKSGNERVIEARLSDAAFFWKKNKGYNLVKQISKLKTMKYFKGLGTYFDKIQRMRKLSGMISDELLISKEKIELSSSICKVDLTSDLVGEFPELQGTMGGYFAEAQGFEKDIALAISEHYLPNGLESKVPKKPFSIALSLTDKLDTLVGFFGINEKPTSSKDPFALRRAALGIIRLIIENNKELKLVDLINYSLLLYHEQDFKLENHLAKKELIDFLLDRLKYYMKEKNIRSDIISASLDSFGIDHITTIYKKSFALNKIINKET

SEQ ID NO: 159490 - protein, 173 aa, Unknown
  Bacterial polypetide isolated from the Sargasso Sea
FVEDDWESPTLGAAGLGWEVWCDGMEITQFTYFQKMTGIECKPISVELTYGLERICMFVQGKKNVFDIDWNDNGVKYGDVYLQSEKEFSAYNFDQANTDSLLKNFEIAEQECKNLLDQKLPLPAYDQCLKASHIFNLLDARGVIAVAERTGYINRIRELAKGAGSGWLENQER

SEQ ID NO: 159491 - protein, 193 aa, Unknown
  Bacterial polypetide isolated from the Sargasso Sea
EELEGIANRTDFDLGSHTKNQNEFKIESKVMKNSSSTTKLAVQNLEEKKWYIPYVIEPSAGVDRGVLALLNEAYKEENTDKDNKRILLSLKPHLSPIKAAVIPLKKNNDELVNLSKEIKSNLQKLGLGRVVLENSGNIGKNYRRHDEIGTPICVTVDFETLEDKSVTVRDRDTMEQKRINLDGLENYYRDYFN

SEQ ID NO: 159492 - protein, 123 aa, Unknown
  Bacterial polypetide isolated from the Sargasso Sea
MKHSTSLQNIIMALNEYWNRHGCLLMNPYDVETGAGTMNPMTTLRAVGPEEWNVAYVEPSRRPADGRYGENPNRLYQHLQYQVILKPSPDNVEELYLKSLEELGVDPLQHDIRFVEETGRLRH

SEQ ID NO: 159493 - protein, 278 aa, Unknown
  Bacterial polypetide isolated from the Sargasso Sea
DDQKYVPLLDSDGALSNTFLFVTNIESRDASQVISGNEKVIRPRLADAEFFFNSDKKTTLESRLESLETVLFQKQLGTLKEKSERISALSAFIASQIDANETQAARAGLLAKTDLMSNMVMEFPDVQGVMGKYYALNDGEDAPVAEALYEQYMPRFAGDALPSSGVSASVALADKLDTLVGIFGIGQLPKGDKDPFALRRAAIGVLRIVTELSLPLDLETLVSKAIDVYGDKLTNAETQSQVVDFVLGRFTALLQDQAIAIDVIQAVAARRPTKPADY

SEQ ID NO: 159494 - protein, 317 aa, Unknown
  Bacterial polypetide isolated from the Sargasso Sea
DFEFDECDPNIQISKKSKSHRLVNEVLEVENPDNFFELLKRNRVFAMRNERKEKIESLINQASKSLNMKPDLSEELLNELTDLVEWPDLIIGKFSEDFLDLPVEVLSTVMKSHQRYVPLLLKNNTFSKLDLSSEKNISTSFVVISNGLEESNNNIAKGNEKVLRARFSDAKFFVESDKKVASIERNDKLKSVSYLKGLGNIFQRVERIEEVTKKVLKFLDDKTLEEKKIIEAAKYCKNDLCSEIVFEFPELQGIMGGKYLKYEGFSEDVCLAVAEHYLPSFYKDALPSTKYGAIVSIADKVETLISIFISGKRPSGS

SEQ ID NO: 159495 - protein, 265 aa, Unknown
  Bacterial polypetide isolated from the Sargasso Sea
MGQYYAANDGEPEDVAKALNEQYMPRFAGDDLPTTLTGCAIAIADRLDSLVGLFGINQPPSGTRDPFALRRASLGVLRIIIERELPLDLQTCCEWAEENFTVLTEQNTASTVVDYMLERFRAHYDEQGIGAEVYLAVHARRPTRPLDFDRRVKAVEAFRQLPEAQALAGANKRVSNILTKQGGDSIGETVDASLLQDSAEKALAEQVDQQAAKVLPLFENGDYASALSSLASLRAPVDNFFDEVMVMADDEAVRNNRLALLNRLR

SEQ ID NO: 159496 - protein, 118 aa, Unknown
  Bacterial polypetide isolated from the Sargasso Sea
MNIEKIVSLCKRRGFVFQSSEIYGGFKAVYDYGPLGVALKNNISKIWWKAMTQHHENIVGLDSAIFTHPKIWEASGHVGAFNDPLVDCKQCKARYRVDELSTETDPDWGKMTCPNCGS

SEQ ID NO: 159497 - protein, 86 aa, Unknown
  Bacterial polypetide isolated from the Sargasso Sea
LGEKAKEIYHSLKLDFQCLYEEKDSIGKRYRRNDAIGTPFCITVDHETLEDNKVTLRERDSMNQKRVLIKDLSTIIDQKTNMKTLF

SEQ ID NO: 159498 - protein, 254 aa, Unknown
  Bacterial polypetide isolated from the Sargasso Sea
MMFKTNIGPVDDGKTFAYLRPETAQQIFTNFKNVVDSTSRNVPFGIAQIGKAFRNEITLKSFIFRVREFEQMELEFFVVPGTDEDWHKKWVELRINWWEKQGVSKKSLELYEVPKDELAHYSKATVDIMYKFPHGVEELEGIANRTDFDLGSHSKNQDELSLKSKVSENNESNAKLALKDENNNWMVPFVIEPSAGVDRAILAILNEAYHLEKIEEKERVVLKLKPHLSPIKAAIIPLKKNDEKIVAKAKEIKN

SEQ ID NO: 159499 - protein, 309 aa, Unknown
  Bacterial polypetide isolated from the Sargasso Sea
LESQYVIADFEARKAKTRQQLEDAAAALSLKPDYDEALLEEIASLVEWPVVMQAGFDEGFLAVPKEALIYTMKDDQKYVPLLNANGDLVNTFLFVSNIESSDPIQVISGNEKVIRPRLADAEFFYNSDRKVSLESRLDSLSTVLFQKQLGTLKEKSERISVLSGFIAAQINADEAHATRAGLLAKADLMSNMVMEFPDVQGVMGKYYALNDNEHSDVAQALYEQYMPRFAGDTLPSNGVSASVALADKLDTLVGIFGIGQLPKGDKDPFALRRAAIGVLRIITELSLPLDLTTLVTKSIEVYGEKLSND

SEQ ID NO: 159500 - protein, 206 aa, Unknown
  Bacterial polypetide isolated from the Sargasso Sea
ATVDLMYEFPHGLEELEGIANRTDFDLGSHTKNQNDFKISADVMKNNQSTTKLSIQNLESKEWYIPYVIEPSAGVDRGVFALLNEAYKEEDLENGNKRIVLSLKPHLSPIKAAVIPLKRNNEDLVGKASKIKNELQALGMGRVILENSGNIGKGYRRHDEIGTPICITVDFETIENDTVTIRDRDTMSQKRVSSQDLHLEFKKVFN

SEQ ID NO: 159501 - protein, 198 aa, Unknown
  Bacterial polypetide isolated from the Sargasso Sea
VSSWEEELKGVANRTDFDLGSHTKNQNDFKITSEVMKNSSSTTKLAVQDLEEKNWYIPYVIEPSAGVDRGVLALLNEAYREENVDKDNKRIVLSLKPHLSPIKAAVIPLKKNNEELVNLSKEIKSNLQKLGLGRVVLENSGNIGKNYRRHDEIGTPICLTVDFETLEDKSVTVRDRDTMKQERVSIENLSEYYKKYFN

SEQ ID NO: 159502 - protein, 289 aa, Unknown
  Bacterial polypetide isolated from the Sargasso Sea
GGSMKFSRPIRWIASIYNDEILDFEFDECDPKIKISNKTKSHRLINEVLEVQNPDDFFELLKRNRVIAIRKERKEKIESLINQASKSLNLKPDLSEGLLNELTDLVEWPDLIISKFSNEFLDLPVEVLSTVMKIHQRYVPLLFKNESFSKLDLSSEKNISTTFCVISNGLEESNNNIAKGNEKVLRARFSDAKFFVESDKKVASIERNEKLKSVSYLKGLGNIFQRVERIEEVTKKIIKFLNDKSLEEKKIIEAAKYCKNDLCSEIVFEFPELQGIMGGKYLKYEGFSE

SEQ ID NO: 159503 - protein, 287 aa, Unknown
  Bacterial polypetide isolated from the Sargasso Sea
KIINDTSYLLDKGKLKLVNDKSLLEEVVGLVEYPNVLIGSISKQFMKLPREVLSTTMRVHQKYFSISDKENNLESKFLFVANSLKNKNRDLRVIEGNERVLKARLSDASYFFENDISNTFENWNKKLKNVLFYDGLGSLHDKTIRMANISNIFAKAFGVKSELAKQATLFSKADLVSEMVIEFPELQGIMGGHYAKIKKKSEAVSKAIFEHYKPKGVSDDIPETKLGCLLSIVDKIDTLVGFFSIGKKPTGSKDPFALRRNGFSIVQILINLKINLSFKSVIDPSFK

SEQ ID NO: 159504 - protein, 118 aa, Unknown
  Bacterial polypetide isolated from the Sargasso Sea
MPKKIKKKNKILSFQNLIFSLQKFWDKQGCIILQPYDLEVGAGTFHPATTLRSLGPKPWKAAYVQPSRRPTDGRYGKNPNRLQHYYQYQVIIKPSPKDIKQIYLKSLVAIGIDSKDHD

SEQ ID NO: 159505 - protein, 279 aa, Unknown
  Bacterial polypetide isolated from the Sargasso Sea
EFFVVANNKDKKGYIKSGNERVIEARLSDAAFFWNKNKGYNLVKQISKLKTMKYFKGLGTYFDKIQRMRKLAGMISDEFLISKEKIELSSSICKVDLTSDLVGEFPELQGTMGGYFAEAQGFEKDIALAISEHYLPNGLESKVPKKPFSIALSLTDKLDTLVGFFGINEKPTSSKDPFALRRAALGIIRLIIENNKELKLVDLINYSLLLYHEQDFKLENNLAKKELIDFLLDRLKYYMKEKNIRSDIISASLDSFGIDHITKIYKKSFALNKIINKEA

SEQ ID NO: 159506 - protein, 108 aa, Unknown
  Bacterial polypetide isolated from the Sargasso Sea
MPKKIKKKEKTLITFQDLVFNLQKFWGKYGCVILQPYDIEVGAGTFHPATTLRSLGPKPWKAAYVQPSRRPTDGRYGKNPNRLQHYYQYQVIIKPSPQNIKQIYLKSL

SEQ ID NO: 159507 - protein, 250 aa, Unknown
  Bacterial polypetide isolated from the Sargasso Sea
IFVKPGSDDEWHKYWVDKRIDWWEMQGVSKKNLHPIEVAQSELSHYSKATVDIMYEFPHGKEELEGIANRTDFDLGSHTKNQKDYNISSDVKKNDHSTTKLGVQNLEEKTSYIPYVIEPSAGVDRGLLAILNEAYTIETIEKGNVRTVLKLKPHLSPIKAAVIPLKKNNEEIVAKAKAIKNELQNLGMGRVILENSGNIGKNYRRHDEIGTPICITVDFETLDDDSVTVRDRDSMSQERVLVKDLNQYYQ

SEQ ID NO: 159508 - protein, 247 aa, Unknown
  Bacterial polypetide isolated from the Sargasso Sea
IKHASDYEQHLYNLKVIVDFEKRRQSIVSQVRKLEKKHDCQVQLDETLLNEVTNLVEWPTVLIGNFEKEFLELPDEVLITSMEIHQRYFPVFNIKKKKSFREKKLLPNFVTVRNGDNKSLDTVRRGNAKVLRARLSDARFFYQKDQKSMLDEFRKKAEKVVFFQSRGSQHQRVQRITQLSTFISEKLILSSTQQKHVQRIAELSKFDLETRMVYEFPELQGVMGQNYAHLKNEQDVVCNGIREHYYP

SEQ ID NO: 159509 - protein, 81 aa, Unknown
  Bacterial polypetide isolated from the Sargasso Sea
MVSKKKNNKKKRFQTFQDTILNLQKYWIKQGCIILQPYDIEVGAGTFHPATTLRSLGQKPWKVAYVQPSRRPTDGRYGDNP

SEQ ID NO: 159510 - protein, 100 aa, Unknown
  Bacterial polypetide isolated from the Sargasso Sea
MSENNSFQKIITNLQSFWIDQGCVLLQPYDLEVGAGTFHPATVLRVLGPDPIWKAAYVQPCRRPTDGRYGKNPNRLQHYYQFQVIIQPSPDDIQNLYLES

SEQ ID NO: 159511 - protein, 235 aa, Unknown
  Bacterial polypetide isolated from the Sargasso Sea
AQAKALNGVALMDDALLEEVASLVEWPVVLVGSFEERFLQVPAEPLISTMKDNQKYFPLVDNNGKLLNKFIFVANIASKDPSQIISGNEKVVRPRLSDAQFFFVTDAKTKLVDRLPALSTVLFQQKLGTLLEKSERIAKVAAFIAGKIGADVTHAERAGLLSKTDLMTNMVGEFPEVQGVMGMHYARLDGEPEAVAVALNEQYKPRFAGDSLPSQLEACAVAIADKMDSLVGIFG

SEQ ID NO: 159512 - protein, 268 aa, Unknown
  Bacterial polypetide isolated from the Sargasso Sea
TSMAVHQRYFPVYSNQTDSGGNKLLPQFIAIRNGNEQHLETVCQGNERVLRARLSDARFFYEEDQKKPLQHFQELLERVVFFQKRGSQHERVQRIQTLSLKLGEMLQFNEEELQKVRRIAELCKFDLQTQMVYEFPELQGMMGEVYSALKGEDSQMSRGIREHYFPRTSGDGLPSDQVTLPVALADRMDMLSVAFSLKMIPSGSADPFALRRMAQGVVQIVLGKQLPLGWKELSSLSVQILRDQQEFTNEPDILEKQLVDFLDQRERW

SEQ ID NO: 159513 - protein, 237 aa, Unknown
  Bacterial polypetide isolated from the Sargasso Sea
KRLEWWDKQGVPTENIEIYNVPKEELAHYSKKTIDLMYKFPHGLEELEGIANRTDFDLGSHSKQQDEININSSVKANKHSNSKMAVQNESGGWFVPYVIEPSAGVERGFLAILNEAYSIEKLDDGKDRLVLNLKPHLAPVKAAVIPLKKNNKKLVDLAKDIKNDLQKLRLGRIIFENTGNIGKSYRKHDEIGTPICITVDFDSLDNKTVTLRNRDTMKQERIHKDQLLEYLKNLVNK

SEQ ID NO: 159514 - protein, 180 aa, Unknown
  Bacterial polypetide isolated from the Sargasso Sea
VYGDKLTNKTVVTDVVDFMLGRFRAAYQDEGIGADVVLAVLARRPTRPLDFDRRVKAVSHFRTLDAALALAAANKRVSNILAKVEGELPTAVKPELLVDAAEKALATQVAALQAELAPLFAAGDYQAALTRLAALREPVDTFFNEVMVMADDEALKANRLALLNNLRNLFLQVADISLLQ

SEQ ID NO: 159515 - protein, 439 aa, Unknown
  Bacterial polypetide isolated from the Sargasso Sea
MPAVKQLKSLAEKTCEKHRLNFNDLNTYSSPRRLAIELSGLPDKENDRRVDLKGPPISVAKDDHNNWTKAAEGFARKNNVSLKNLETKTIEGSDYLFVQQRELGQSVPELLQESVQQWISQLSFPKNMRWGSYRTRYIRPIRWVVSLWNSKVVPIKLEMLVAGNQTRGHRFLSTGYSKIKHASDYEKHLHDLKVIADFEKRRQSIVSQVRKLEKKHDCHVELDETLLNEVTNLVEWPTVLIGNFEKEFLELPDEVLITSMEIHQRYFPVFNSKKKKSFGEKKLIPNFVTVRNGDNKSLDTVRRGNAKVLRARLSDARFFYQEDQKSMLDGFTKKAEKVVFFQSRGSQHQRVQRITQLSTFISDKLNLSSTQQKHVQRIAELSKFDLETRMVYEFPELQGVMGQNYAHLKNEQDVVCRGIREHYYPRNAKDSLPGNSETI

SEQ ID NO: 159516 - protein, 359 aa, Unknown
  Bacterial polypetide isolated from the Sargasso Sea
TRYIRPIRWVVSLWNTKVVPIKLEMLVAGNQTRGHRFLSSGNIKIKHASDYEQLLNDLKVIADFDKRRYSIVSQIRNLEKKHNCHVELAENLLNEVTNLVEWPTVLIGNFEKEFLELPDEVLITSMEVHQRYFPVFDRKKKNSSGDNKLLPNFITVRNGNSNSLNTVRRGNEKVLRARLSDSRFFYQEDQKSMLDEYNKKAEKVVFFQSRGSQLQRVHRITQLSTFISFKLNFSQVQQKHVKRIAELSKFDLGTRIVNEFPELQGVMGQNYARLKNEQDIVCNGIREHYYPRNAKDSLPKNQETVPVAIGDKLDLITTAFSLGMLPSGAADPYALRRNAQGVTQLILGLRLPLDLLGIN

SEQ ID NO: 159517 - protein, 350 aa, Unknown
  Bacterial polypetide isolated from the Sargasso Sea
MASNSMEDLVALCKRRGFIFQSDEIYGGQKGLYSFGPMGVELKNNLKQAWWKAMVWQRDDVEGLDASLLTSPNVLKYSGHEDTFTDPLSDCKDCKSRWREDQLTNGICPNCGSKNLTEARPFNLMFKTSIGPVDDGSSFAYLRPETAQQIFTNFKNVLDSTNRAVPFGVAQMGKSFRNEITPGKFIFRVREFEQMELEFFCKPDTDEEWFKYWVQSRIDWWLEQGIKKENLEVFEAPEDDLSHYSKATTDLLYKFPHGFEELEGIANRQDFDLGSHSKNQSEFNIKAKVMENKDSTTKLAVQDLDSKEWYIPFCIEPSAGVERGVFALLNEAYNEEEVEGKTRVVLSLKP

SEQ ID NO: 159518 - protein, 627 aa, Unknown
  Bacterial polypetide isolated from the Sargasso Sea
PAQVLGRVEEKRGPRKDAPEKAIQGFLKNTGLELSQLEVRQEKKGEFYFASIRTEGLKAANIISSVLDKTVRNFPWPKSMRWGESSLKWVRPLHSIICILYDEDGSKVVNIDIEGVSSGDKTFGHRFMGNGDFSVNSFEDYASKLKKEFVILDPSKREEIILQEIENQAFAQGLELVNDHSLLNEVVGLIEWPVVLMGKLEDQFLSLPREVLQTSMREHQKFFSILNPKNNKVVQFATVANSETPDNGSTILAGNQKVLSARLADAKFFWDNDLRVVNSSGLDLWLEKLKQVTFHNKLGSQFERVERITDLSGTIAKKIGCDPNSAKSAASISKADLSSEMVYEFPELQGVMGTYYAIEAGFEENIANACKEHYAPLGPSDKVPNSSVSIVVALADKIDTLTSFWAINEKPTGSKDPFALRRSALGLIRIIIENDIRISLSDILALGNDGADIEDLKYFIHQRMKVFLRDQSLRHDLIDACVSLDKGDDLALSVKKSFALRDFIKTSDGSNLIQGFKRANNILLQAEQNDGVEYSYGADPKFAEEDAERNLFDALDDEEVKIRSALEEENFVEAMNSMANLRTPIDSFFETVQINSDIDFIRRNRLNLLSRICKLCLSVADLTKVEG

SEQ ID NO: 159519 - protein, 562 aa, Unknown
  Bacterial polypetide isolated from the Sargasso Sea
YGLERILMALQGVDHFKDIAYNDRMTYGEMRMQEEYEMSVFNLDEASVETHRERFNMADEEAIRMLEARLPLPAYDNLLKASHAFNVLDARGAVGVTERQKLFASMRKLARETAQLWVARREELGYPLGLAEAPAPAPPVERTGDVPSAPADCVIEIGTEELPPQDVTSTSRQFYDAVDALLKAEGLTHEGISVGATPRRFALTVKALSAGQPNVEERVRGPPLSRAFEEDGVTPGKAALGFCKKNGIDASELEKDGEYVWAVVKKEGRSTVAVLEEALPKIIAGINFSKAMRWITNSDVTFSRPMRWLFAVHGDHHLSFEALGVPSGATTRLLRTRGDVSDTHVAANAAEYHALLAKDAIVAEYEARVSKIWSEAKDAAKSVGGDIPESAREGLLEEVANLVEAPNLVMGDFEETFLALPKEVLVMVMRKHQRYFPVENADGSLKPHFITFANGPCDVGVVKHGNEAVLQARYEDAKFFYESDLKKTLAEFKPELSGITFQQELGNMLDKTSRIEALVEDVAKALGFGADVVGTAATAAGLARADLATSMVMELTALAGTM

SEQ ID NO: 159520 - protein, 231 aa, Unknown
  Bacterial polypetide isolated from the Sargasso Sea
MIKAYSEKRLKKLDVEDADLSHYSKATVDLMYEFPHGLEELEGIANRTDFDLGSHTKNQNDFKISADVMKNNQSTTKLSIQNLESKEWYIPYVIEPSAGVDRGVFALLNEAYKEEDLENGNKRIVLSLKPHLSPIKAAVIPLKRNNEDLVNKASKIKNDLQALGMGRVILENSGNIGKGYRRHDEIGTPICITVDFETIENDTVTIRDRDTMSQKRVSSQDLNLEYKKVFN

SEQ ID NO: 159521 - protein, 76 aa, Unknown
  Bacterial polypetide isolated from the Sargasso Sea
MVSKNKKKQKPKFQTFQETILNLQKFWSKQGCIILQPYDMEVGAGTFHPATTLRSLGTQPWKAAYVQPSRRPTDGR

SEQ ID NO: 159522 - protein, 378 aa, Unknown
  Bacterial polypetide isolated from the Sargasso Sea
SELGLTYESSANFSTPRRLTLVLENVSSKSLSRVEEKRGPRKDAPEKAVQGFLKSVGLELSQLEIRQEKKGEFYFASIRTEGRKAADIVSTVLDKTVRNFPWPKSMRWGEGSLKWVRPLHSIICILYDEDGSKVVNIDIEGISSGDKTFGHRFMGNSDFSVNSFEDYVSKLKKEFVILDPSERAEIILQEIKNQAFAQGLELINDPNLLSEVVGLVEWPVVLMGKLEEQFLSLPPEVLQTSMREHQKFFSILNSKNNKVVQFATVANRETSDNGSTILAGNQKVLSARLADAKFFWDNDLRIVNTSGLDLWLEKLKQVTFHNKLGSQFERVERITSLSGTIAKKIGCDPKLAKNAAYISKSDLSSEMVYEFPELQGVM

SEQ ID NO: 159523 - protein, 193 aa, Unknown
  Bacterial polypetide isolated from the Sargasso Sea
MNNHTMEDLVSLCKRRGFIFQSNEIYGGLQGLYDYGPLGVELKNNLKRAWWKSMIYDRDDIEGIDSSILTNPLVLKYSGHEDTFSDPLLDCRSCKSRWRADHVEDGKCPGCGSEDLTEPRPFNLMFKTNVGPVEDGNSFAYLRPETAQNIFTNFKNVLDSTPHPLPFGIAQMGKAFRNEITPRNFIFRVRELN

SEQ ID NO: 159524 - protein, 88 aa, Unknown
  Bacterial polypetide isolated from the Sargasso Sea
MVSKIKKKTLSFQDTIFNLQKYWSKKGCLILQPYDLEVGAGTFHPATTLRSLGPKPWKTAYVQPSRRPTDGRYGDNPNRLHITINSKF

SEQ ID NO: 159525 - protein, 85 aa, Unknown
  Bacterial polypetide isolated from the Sargasso Sea
MASKKSKKKSKFKSFQDTILNLQKYWSKHGCIILQPYDMEVGAGTFHPATTLRSLGPKPWKAAYVQPSRRPTDGRYGDNPNRLQH

SEQ ID NO: 159526 - protein, 692 aa, Unknown
  Bacterial polypetide isolated from the Sargasso Sea
MATSDLLIEIGTEELPPKALNSLSTAFEDLISDALASQNIAFKKTQRFATPRRLAVIIKQVAENQSDEKLLRVGPAISAAYDESGNATPAALGFAKSCSVELKDLKTITKNGVEKLSYEALEKGKETNTLIPELIGSVLKKLPTPKRMRWGSSKEEFVRPLHWILLLFGKEQLEFRAFGVSSSNFTIGHRFHNNIEIVIDEPTQYEKVLSEVGHIIPNFEKRKDLIRAEVLKQGSLANAIAVIDEELLDEVTSLVEYPIALTGEFDSEFLKVPPEALILAMKSHQKCFHMNDAEGNLLPKFITVSNICSKDPLQVVKGNERVIRPRLADAKFFFETDKQLSLESRLEGLKNLVFQNKLGSIHDKVERVAKISKSIAKSLSINETNCERASLLSKCDLLTDMVREFADLQGIIGCHYAKHDGESEEVSVAIQEHYLPRFSGDDLPTSQVGSVVAIADKLDTIVSLFGINQPPTGSKDPFGLRRSAIGILRIVVEKRLDLNIAKLIDDAIFAQNKNELLPETKELVFQFFLDRFRSWYKDDGIPSSVFESVYALKPQRPLDFHLRVEAVSAFTELPESMGLAIANKRVSNLLSKYEAEGSLPPCNKNLLKLESEISLHSQIESKKLEVAPFLETLDYTKALLCLSSLKSAIDDFFDNVLVNDEDEKLRKNRYSLLYELRELFLMTADISFLDNN

SEQ ID NO: 159527 - protein, 148 aa, Unknown
  Bacterial polypetide isolated from the Sargasso Sea
GEITYGIERLAMYIQGVESIYDIVWTEGADGPITYGDVFKQNEVEMSEFNFDCANVDLLFSYFEDCEEQCNMLIEKNLPLPAYEQVLKASHYFNLLDARKAVSVTERQRFILRVRALARLVAQTYLESRKSLGFPLASDDLRKEYIEN

SEQ ID NO: 159528 - protein, 95 aa, Unknown
  Bacterial polypetide isolated from the Sargasso Sea
VAILPLSKNEKLAPLTKGILDRLKFKFKCQYDDSQSIGRRYRRQDEIGTPFCVTIDFDSLEDDKVTIRERDSMHQSRIPISDLVSVLEDKLEHNW

SEQ ID NO: 159529 - protein, 580 aa, Unknown
  Bacterial polypetide isolated from the Sargasso Sea
MVEVGTEELPPAALRQLSEAFASGLAEALTTAGLVENPTATPFASPRRLAVRISGVARKAADQESERRGPAVSAAYDENGQPTPAATGFARSCGVEVADLQTLSTDKGEWLVHRSVVSGENAKTLIGPGIQQALDKLPIPKRMRWGTGTDEFVRPVHWLVVLHGQQVVPCSVLGVAAGRISRGHRFMGETTVRIASASDYEQRLQEEGAVMPDFAARSAMIEKQVTRLGEKAGGHAVIDAALLETVTALVEKPHAVLGSFDPAFLKVPQEALISSMRGHQKYFHVVDKKGALLPAFITISNIKSRSPARVRTGNERVLNARLADAKFFWESDATQTLAQRAQTLDQVLFHHALGSLADKTRRIERLAGKIARAIGASEADCSRGASLCKADLVSGIVGEFPDLQGTMGRYLAKHDGESAAVARAVEEHYLPRQAGGALPKSVPGQVLALADRLDSLVGLFIAGEEPTGEKDPYGLRRAALGVIRILVEKKLDLDVATLVEEAADGYVVGGLGTGDSAKAQCTTFILERYRSLYVALGFAQDEISAVLEAGARRPLDFDRRLKAVSRFRHHRDAPSLTAAN

SEQ ID NO: 159530 - protein, 208 aa, Unknown
  Bacterial polypetide isolated from the Sargasso Sea
FQRTLDIMYRFPHGLEELEGIANRTDFDLGSHTKNQKDLSLNSSVVENDESTMRLAVQDLEAKEWYVPYVIEPSAGVDRGVLAILNEAYTNEDIGEGKQRVVLKLKPHLSPIKAAVIPLKKNKNELVSMAKEIKQSLQSLGLGRVFLENTGNIGKAYRRHDEVGTPICITVDFDSIENNTVTIRDRDTMEQNRVDISEIKQSYLSVLK

SEQ ID NO: 159531 - protein, 664 aa, Unknown
  Bacterial polypetide isolated from the Sargasso Sea
MSELFIEFFSEEIPPSLQISARNQFQKLLVDKLSEANLKYNNFEIYSTPTRIATCISGLPGKIKILPAEIKGPKVGVPEKVLENFAKSRFVSLSDLYEKKTEKGNFYFVKIKGKEINSEEELIKCILKSLSEISWKKSMKWSDHEMSWGRPLRSILAIFNEKVLKFNYKHLEASNFTLIEENSSINQKKIKSFSEYKKILKSYSIILDHKEREKIISDKISSICKKKSFKVFINQTLLNEVSNLVDKPNVLIAQFDKNYLKLPQEVIRSTLQTHQRYFTLVDHRDRISNEFVVVANKRDEKKLIKIGNERVVDARLSDASFFWEKDKSLNLIKQINKLKEITFYENLGSIYDKTQRLRKMAYFISDQLNLKKEKVEIAASISKTDLVSGLVGEFPELQGIMGKYFASNQGFEEDVSLAVSEHYLPISISSHVPKRPISYGLSIIDKLDTLVGFFLINEKPTSSKDPFALRRSSIGLLRTVIENNLRVSIRDLVDYLIRMYSEQGVKELNQNTHSELLKFFRDRMKNILKEKKIRPDIIEASVSSHLNDDFLELYKKTIVMNKFISKDLGRNAVSTYKRASNILDKEKNISKNGPDAVLFKQDEEKELFNKINDIRKVFAFKESKQNYENHLKLLSETKLSTDKFFENVKVNDDNNDIKNNRLEL

SEQ ID NO: 159532 - protein, 175 aa, Unknown
  Bacterial polypetide isolated from the Sargasso Sea
KKQDNLNIKSNVSRNKDSNSKLAVQEESGEWIVPYVIEPSAGVERGFLAIINEAYNVESLNDGKSRVVLKLKPHLAPIKAAVIPLKKNNEEMVNLSKLVKENLQKIGLGRIIFENTGNIGKSYRKHDEIGTPLCITIDFESLNDKTVTVRDRDSMKQSRVEFDKLSDFLINIIKN

SEQ ID NO: 159533 - protein, 254 aa, Unknown
  Bacterial polypetide isolated from the Sargasso Sea
MVSKTMDDLVSLCKRRGFIFQSNEIYGGLQGLYDYGPLGVELKNNLKQAWWKSIIYDRDDVEGLDASILTGREVLKHSGHEDTFSDPLVDCRSCKNRFRSDQSADGKCPACGSDDLTEPRPFNLMFKTTVGPVDDGSNYAYLRPETAQQIFTNFKNVLDSTNKSIPFGVAQIGKAFRNEVTPGKFIFRVREFEQMELEFFVEPGQDEEWHKYWVESRYNWWIEQGIDKDRIQKLEVDKSDLSHYSKATVDIMYD

SEQ ID NO: 159534 - protein, 176 aa, Unknown
  Bacterial polypetide isolated from the Sargasso Sea
LKNREDLNLTSKVSLNKNSNSKLAVQEDSGDWVVPYVIEPSAGVERSFLAILNEAYTVEDLDGEKNRTVLKLKPHLSPVKAAIMPLKKNNSDLVDIAKKIKNNLQQLGLGRIILENSGNIGKGYRRHDEIGTPICITVDYETLDDETVTIRDRDTMLQSRHKISEISDYLINIIKY

SEQ ID NO: 159535 - protein, 388 aa, Unknown
  Bacterial polypetide isolated from the Sargasso Sea
MSKYLLEIGTEELPAKFSHSVLEQFKSLIEFELDKKLIKFEHIVVTSTPRRIVLLLEGLVDYAEDKIIERKGPKANSAYLNGCPTNAALGFANSLDIDVGELEIKSTEKGDFVFGKKIEKGQSTRISLSSIIPKLVKSLQGPRFMKWGAGNIKFSRPIRWIASIYNDEILDFEFDECDPKIQISNKSKSHRLINEVFEVKHADNFFELLEQNRVLVKRHERKEKIESLINQASKSLNLKPDLSEGLLNELTDLVEWPDLIVGKFSEEFLDLPVEVLSTVMKSHQRYVPLLLKNKSFSKLDLSSEKNISTTFCVISNGLEESNNNIAKGNEKVLRARFSDAKFFVESDKKVASIERNEKLKSVSYLEGLGNLFQRVERIEEVTKKILNF

SEQ ID NO: 159536 - protein, 119 aa, Unknown
  Bacterial polypetide isolated from the Sargasso Sea
MPKKNKKIVKNKKFLSFQDIIMNLQKFWGKYGCVILQPYDLEVGAGTFHPATTLRSLGSKPWKAAYVQPSRRPTDGRYGKNPNRLQHYYQYQVIIKPSPKNIKQTYLKSLSTIGIDVKN

SEQ ID NO: 159537 - protein, 60 aa, Unknown
  Bacterial polypetide isolated from the Sargasso Sea
LHLLEARGVISVTERTATIGRIRNLARKVAEAWLAEREALGFPLLSGVKASETVPVAGAS

SEQ ID NO: 159538 - protein, 519 aa, Unknown
  Bacterial polypetide isolated from the Sargasso Sea
NNITMPHAFLTDAVLEVESFSQYKKSLDTGHVVLKIEDRIAIIAKGAEAIASGLKLSVRQDDQLIKEVAGLVEWPVPLLGQIDKIFMDVPHEILETTMRKNQKYFSLEDPEGKLAPYFIVVANKETPDGGAAIVAGNERVLRSRLADAKFFWERDLTTSLEEKSKKLDSVIFHAELGSVLDKTKRLQTISAFVAEELKFEKEETHRAASLCKADLVTGLVIEFPELQGIIGGYCATNDGERPEVSKAISEHYSPIGPFDICPTQPASMVVSIADKVDNLASFFSINMKPTGSKDPFALRRSALGVIRIILENKLQLDLRKLFVNLLPELWSVDSVDRMSDDILDFFIDRFRVFLLDRGGQHDLISAVLSSQDEVDLVKMSMKLNALTAFLDSSEGRDLLIVFKRANNILRIEQGKDNKVYNNPDKVDKKLLEEASEVELFNKFISISPQIRQALENSNYEKALDILASMRQKIDDFFMEVKVNAGTAKLRQNRLYLLGIICSIFNEIADFSKIEGGKFD

SEQ ID NO: 159539 - protein, 532 aa, Unknown
  Bacterial polypetide isolated from the Sargasso Sea
RSILAIFGKKVLKFNYQHLETSNFTQIEENYSLTQKKINNFSEYNKILKSNSIMLDHREREKFINDKISSICKKKSFKVFIDQTLLTEVTNLVDNPNILVAQFDKSYLKLPPEVIRSTLQTHQRYFTLVDHRDRISNDFIVVANKKDEKKVIKVGNERVVDARLSDASFFWEKDKSLNLIKQINKLKEITFYENLGSLYDKTQRLRKMAYFISDQLDIKKEKLEIAASICKSDLVSGLVGEFPELQGIMGKYFAANQGFEEEVSRAVSEHYLPISISSTVPKKPISYGLSIIDKLDTLVGFFLINEKPTSSKDPFALRRSAIGLLRTIIENNLTVGLRDLIDYLIRFYTEQGVKDVNKNTHLELINFFRDRMKNILKEKRVRPDIIEASLSSHTNDNFLELYKKTLVMNKFISKDLGKNAVSTYKRAYNIIDREKNISKSGPDAVLFKQDEEKELFDKINDIRKAFTYKERKESYENHLKLLSDAKLPTDKFFDNVKVNDENNDIKNNRLELLQRLCSTFNTFIDFSKLEGN

SEQ ID NO: 159540 - protein, 72 aa, Unknown
  Bacterial polypetide isolated from the Sargasso Sea
LQSLGKGRVLLENTGNIGKSYRKHDEVGTPMCITIDFDSLDNNTVTIRDRDSMEQKTIQIQELTTYFSNFFK

SEQ ID NO: 159541 - protein, 188 aa, Unknown
  Bacterial polypetide isolated from the Sargasso Sea
IANRTDFDLGSHTKNQKEFNISSDVKRNEHSTTKLGVQNLEEKTSYIPYVIEPSAGVDRGLLAILNEAYTIETLDDDNTRTLLKLKPHLSPIKAAVIPLKKNNEKIVAKAKAIKNELQNLGMGRVILENSGNIGKNYRRHDEIGTPICITVDFETFDDDSVTVRDRDSMSQERVASKDLNQFYQKYFH

SEQ ID NO: 159542 - protein, 720 aa, Unknown
  Bacterial polypetide isolated from the Sargasso Sea
MSKYLLEIGTEELPAKFSYSVLEQFKSLLEFELDKKLIKCDNIVVTSTPRRIVLLLEGLVDYAEDKIIVRKGPKANSAFLNGSPTNAALGFANSLGIDLGELEIKSTEKGDFIFGKKIEKGQSTRISLSSIIPKVVKSLQGPRFMKWGAGNLKFSRPIRWIVSLYNDEILDFPFDECDPKIQISNKSKSHRLLNEVFEVQHVDDFFELLKQNRVLVKRDERKEKIENLINQTSQSLNLNPDLSEVLLNELIDLVEWPDLIVGKFSEEFLDLPLEVLSTVMKSHQRYVPLLLKNNSFSKLDLSSEKNISTNFFVISNGFEVSNKNIAKGNEKVLRARFSDAKFFVESDKKVASIERNEKLKSVSYLKGFGNIFQRVERIEEVTKKILKFLKDNSLEEKKIIEAAKYCKNDLCSEIVFEFPELQGIMGGKYLKYEGFSEDVCLAVAEHYLPSFYKDALPSTKYGAIVSIADKVETLISIFISGKRPSGSSDPYALRRNLNGVIKIIWDYELDLPLDKLFNELIDFWKMAFPNLNFTRETVFNDINEFLVQRIVSHLEEKLLSKELIKAVCSSDELSQKRVLNIVDLKKRTKSIMNFNERENFVEIQKVITRVSKLAKNSDLSTDVLSARDYVNTKLFEKDCELKVFEFIRELEKRFSEGYCNYLELLNLFEINVNTIEDLFDNEKGVLIMSEDLKIRNNRLNLLSLIRNYSLKIADFTLLNS

SEQ ID NO: 159543 - protein, 389 aa, Unknown
  Bacterial polypetide isolated from the Sargasso Sea
FGHRFMGNGEFLVNSFEDYASKLKKEFVILDPSERAEIILQEIKNQAFAKGLELINDPNLLNEVVGLIEWPVVLMGKLEERFLSLPPEVLQTSMREHQKFFSILNSKNNKVVQFATVANRETSDNGSTILAGNQKVLSARLADAKFFWDNDLRIVYTSGLDFWLEKLKQVTFHNKLGSQFERIERITNLSGAIAKKIGCDPNLAENAASISKSDLSSEMVYEFPELQGVMGTYYAIEAGFEKNIANACKEHYAPLGPSDEVPNSPVSIVVALADKIDTLTSFWSINEKPTGSKDPFALRRSALGLIRIIIENDIRISLSDILALGNDGADIEDLKYFIHQRMKVFLRDQSLRHDLIDACLSLDEGNDLALSVKKSLALTDFIKTSDGAN

SEQ ID NO: 159544 - protein, 162 aa, Unknown
  Bacterial polypetide isolated from the Sargasso Sea
MSIDKIVSLCKRRGFIFQSSDIYGGFRAVYDYGPLGIALKTNISQLWWKSMTQLHENIVGLDSAILMDPKIWEASGHVGAFNDPLVDCKQCKARYRADQLGDIENEKISWNEIQCPKCGTKGNLTEPRQFNLMFKTYVGAVEEDSSATFLRPETAQGIYVNY

SEQ ID NO: 159545 - protein, 32 aa, Unknown
  Bacterial polypetide isolated from the Sargasso Sea
YILRIRTLTKAVAEAYYASREALGFPMCNKNK

SEQ ID NO: 159546 - protein, 167 aa, Unknown
  Bacterial polypetide isolated from the Sargasso Sea
VSETKKNDESTMRLAVQDIEAKKWYVPYVIEPSAGVDRGVLAVLNEAYTVEEFGEGKERVVLKLKSHLAPIKAAVIPLKKNKEELVGLAKEIKSSLQSMGRGRVFLENTGNIGKAYRRHDEVGTPVCITVDFDSLENGTVTLRDRDTMEQHTVAISDLNQLYLDSLK

SEQ ID NO: 159547 - protein, 369 aa, Unknown
  Bacterial polypetide isolated from the Sargasso Sea
ILGNEKVLRSRLQDAKFFWESDRSKTFSSMLEDLKKVSYFEGLGSLYDKSKRIEKISDFISKQINLSNVKPIKRAALLCKVDLLSGMVGEFPELQGIMGGYYSSNEGKDVSDLIRSHYLPKGSSGEVSTNTGVNIISLSDKIDHLVGFFIVGKLPSGSKDPFGLRRSALSIIRVLIEGNILINLDSLIEFTSKQINKKNIDNQKIKSFIIDRYKVLLREKNIKYDVINCLVDNNLTFLSKTNERLVILNNFLDTKEGNELKLLWQRVSNILHIEEKQNKKIEILNAKMQSEYVRDEVNIINAINNIEKTDDYLKMLSQRSSLKDITFEFFENLKINDSDPLIKNRRLSILALLREKLLDIGDLRKLEGS

SEQ ID NO: 159548 - protein, 496 aa, Unknown
  Bacterial polypetide isolated from the Sargasso Sea
KGVSDYFEALTNNLVIADQGQRRELILEQISKIEKKFDISVIKDEKLLEEVSGLVEWPIALCAEFDEKFLNLPDEVLQTSMRSHQKYFSVAEKKTKNLTNKFILISNIQTSDEGNSVILGNQRVLSARLYDAKYFWDRDIDQPLIDNLRLLDSVTYHQKLGSLGSKVERIELIALELDQTLALNLENIPIAAKLIKNDLLSEMVGEFPDLQGIMGSYYAERQGYDEDVCDAIKNHYMPVTPRDETPKKALSFCLSVADKIDTLVGFWSIGETPTGSKDPYALRRAGNGLIRNIIENKLDFDFAHFIEKILQKSDLLKKQQHSSVREGLVNFMNERFRGYILDNKYDVRIYDAISRDDDFVNYYMTLSRIQLLSQFIKTDNGLSLLKALKRINNILDPSLSNNTFGEIDKKIFTSDVENNLYTGIEKLRKKKSKSNDITEIKKYLSDVSILADPINDFFENIIVNDEDKNIRTNRFFLLNSVIDLTSNIFDIGKIEL

SEQ ID NO: 159549 - protein, 312 aa, Unknown
  Bacterial polypetide isolated from the Sargasso Sea
KMGPELLRIKDRHERDFCLGPTHEEVITDIIRDNVKSYKELPLNIYQIQTKFRDEVRPRYGIMRGREFLMKDSYSFNIDEESLQETYLLMRDAYKKVLERIGLEYKISAADSGAIGGDSSEEFHVLAENGEDTIAVSDSSEFAINTELLLKEGEDINSLDGKPSPDGNGTIQIKKGIEVGHIFKLGKLYAESMKANVLNAEGKASTLYMGCYGIGVSRLVAAAIEQNFDDKGIVWPHSIAPFDINIIAIGFDKDRNIATASMKLYDELKNMGYDVLLDDRKDGYGVKMKDSELIGIPLNIIIGKKFLENHEV

SEQ ID NO: 159550 - protein, 301 aa, Unknown
  Bacterial polypetide isolated from the Sargasso Sea
IQWKFRDEIRPRFGLLRGREFLMKDAYSFDLDKESAKISYFKMFTSYMRTFKRLGLNAIPVIADSGPIGGELSHEFSIITNTGETEIYYDSRILEIEDYDFDYSKKDSLENSYNKFTNFYSSTDDKHSEDLFQKIPEEFQNKGKAIEIGHIFSFGYKYSEPMNAFVNNDKGENIPVYMGSYGIGVSRLVSAIIEAYHDDRGILWPISVAPFQVGIINLGKNDEKCKKVSENIYQQLRSNNIDVIYDDRDESAGRKYADMDLIGIPYQIILGPRDLESNKCELKNRLNDQRVSIDLDNIIKE

SEQ ID NO: 159551 - protein, 332 aa, Unknown
  Bacterial polypetide isolated from the Sargasso Sea
MPFGLKVLRKIEQTVREEMDNSGAFEVLMPTIQPSELWQETKRWDDYGDLLLQIRDRHERLFCYGPTHEEVITDILRKSVKSYKQLPVNFYQIQTKFRDEIRPRFGVMRAREFLMKDAYSFHLNQDSLEEEYEKMDQTYEKIFTKLELDFRKVQATSGEIGGSVSHEFHVIAESGEDEIAFCDDENFAANVEMLESGNAPNGGELTYARGIEVGHIFQLGDKYSKAMKLEVLDSNGKNVNPYMGCYGVGISRIVAAAIEQNHDDKGIIWPSAISPFEILIIVLNDKDDSNVMDQAMKIYQELRSDGIEVAIDDRDERAGVKFADADLLGVPT

SEQ ID NO: 159552 - protein, 175 aa, Unknown
  Bacterial polypetide isolated from the Sargasso Sea
MHLSKFFLPTLKDLPSDAKIKSHQVMLKTGMIKQAAAGIYSWLPLGYKVMKKIENIVREEQNFIGAQEMLMPTIQSAEIWKESGRYDDYGEEMLRIKDRQNREMLYGPTNEELITEIFRASIKSYKSLPQILYHIQWKFRDEIRPRFGVMRCREFYMKDAYSFDINESNAKISYN

SEQ ID NO: 159553 - protein, 164 aa, Unknown
  Bacterial polypetide isolated from the Sargasso Sea
MYISKSFIPILKNIPSEAKIKSHQLMLRVGMIKQSSAGIYSWLPLGFKIMKKIEKIVREEQDKIGAQEILMPTIQSSEIWKESGRYEDYGEEMLRIKDRQNREMLYGPTNEELVTDIFRSAIKSYKSLPQLLYHIQWKFRDEIRPRFGIMRCREFYMKDAYSFD

SEQ ID NO: 159554 - protein, 197 aa, Unknown
  Bacterial polypetide isolated from the Sargasso Sea
MFLSKLFLPITKNLPADAKIKSHQLMLRSGMIKQSSAGIYSWLPLGLKVMKKIEQVVREEQNKIGAQELLMPTIQSAEIWKESGRYNDYGEEMLRIKDRQGREMLYGPTNEELITDIFRSSIKSYKSLPQMLYHIQWKFRDEIRPRFGVMRCREFFMKDAYSFDLDDASAKSSYNKMFFSYLKTFKRLGLEAIPMAA

SEQ ID NO: 159555 - protein, 205 aa, Unknown
  Bacterial polypetide isolated from the Sargasso Sea
MYLSKLFIPVTKDLPTEAKIKSHQLMLRTGMIKQSSAGIYSWLPLGFKVMKKIEQIVREEQNLIGAQEMLMPTIQSSDIWKESGRYEDYGEEMLRIKDRQGREMLYGPTNEELITDIFRTSIKSYKSLPQILYHIQWKFRDEIRPRFGVMRCREFYMKDAYSFDLSEEDARKSYNKIFYSYIRTFNRLGLKAIPMAADTGPIGGD

SEQ ID NO: 159556 - protein, 267 aa, Unknown
  Bacterial polypetide isolated from the Sargasso Sea
SINSYKQLPQCFYQIQTKFRDEIRPRFGLMRSREFIMKDGYSFHSSGKDLASFYEKVGNAYENIFKSCGLQTVGVEADSGAIGGASSKEYMVTADSGEDSILFTQSGSYAANIEKAISIPSKPIPLGDDISGWIETPQQKTILEVCKNNNLDPSQIIKVVVFLAKFEGKSEVPVLACIRGDQHINEVKLFNLINKLHSSNLLNLQKIEDTNIIEKNLVNFPLGFIGPDLDNETIKASSNWNKTWTKIIDHSASRLSKFISGGNKVNF

SEQ ID NO: 159557 - protein, 235 aa, Unknown
  Bacterial polypetide isolated from the Sargasso Sea
MKLSNLLFNSLKESPKEAKIISHQLMLRSSMIRQHTSGIYTWLPLGFKVLKNIENIIRYNQDEIGCNEMLMSTIQSSELWKKSGRYADYGKEMLRITDRHDNDLLYGPTNEEVITDLFSDYVNSYKGLPKYLYHIQWKFRDEIRPRFGVMRGREFLMKDAYSFDLTEEAAFETYKKFFRSYLKTFLDLGLQPIPVKAATGAIGGDLSHEFQILANTGESELAYDSKLVDSNLYEK

SEQ ID NO: 159558 - protein, 195 aa, Unknown
  Bacterial polypetide isolated from the Sargasso Sea
PQLHPADLWKKSERWEGYTAGEGIMFNLKDRQGKEFGLAPTHEEVITSIASETINSYKQLPQCFYQIQTKFRDEIRPRFGLMRSREFIMKDGYSFHSSENDLASFYEKVGNAYENIFKSCGLQTVGVEADSGAIGGSSSKEFMVTADAGEDSILFTQSGSYAANIEKAVSLPSQPIPLKDNIAERLETPQQKTIL

SEQ ID NO: 159559 - protein, 278 aa, Unknown
  Bacterial polypetide isolated from the Sargasso Sea
KVMKKIERIVRQEQNKIGAQEILMPTIQSSEIWQESGRYEDYGEEMLRIKDRQNREMLYGPTNEEQVTEIFRSSLKSYKSLPQLLYHIQWKFRDEIRPRFGIMRGREFYMKDAYSFDVSDEEAFYSYNKFFLSYLRTFKRLDLTAIPMAADTGPIGGNLSHEFIILADTGESKIFTDKRIFDLNSNETKLEKNSLQQMRKKYEQYYSVTDEKFNKEEFEKVVSEENRLITKGIEVGHIFYFGDKYSKAMGASVDLPGGKKDFVKMGSYGIGVSRLVGA

SEQ ID NO: 159560 - protein, 181 aa, Unknown
  Bacterial polypetide isolated from the Sargasso Sea
MLLSNSFIPILKNNPSEAKIKSHQLMLRVGMIKQASAGIYSWLPLGFKVMKKIEDIVRQEQNKIGAQEILMPTIQSSEIWKESGRYDDYGEEMLRITDRQNREMLYGPTNEEQVTEIFRSSIKSYKSLPQLMYHIQWKFRDEIRPRFGIMRGREFYMKDAYSFDVSDEEAFYSYNKFFLSY

SEQ ID NO: 159561 - protein, 274 aa, Unknown
  Bacterial polypetide isolated from the Sargasso Sea
MRVTTSFPLGTLRDTPSEAEIISHQLLLKAGYIRRVNSGIYAYMPIMLRVIEKISAIIERELNSIGCTKLLLPQLHPADLWRKSERWEGYTAGEGIMFNLKDRQGKEFGLAPTHEEVITSIASETINSYKQLPQCFYQIQTKFRDEIRPRFGLMRSREFIMKDGYSFHSSENDLASFYEKMGNAYENIFKFCGLQTVGVEADSGAIGGASSKEFMVTADAGEDSILFTQSGSYAANIEKAVSLPSQPIPLRDNIAEWLETPHQKTILDIAIIII

SEQ ID NO: 159562 - protein, 193 aa, Unknown
  Bacterial polypetide isolated from the Sargasso Sea
MYISKSFIPILKNNPSEAKIKSHQLMLRVGMIKQSSAGIYSWLPLGFKVMKKIEKVVREEQNKIGAQEILMPTIQSSEIWKESGRYEDYGEEMLRIKDRQNREMLYGPTNEELVTDIFRSSFKSYKSLPQLLYHIQWKFRDEIRPRFGIMRCREFYMKDAYSFDISDEDALFSYNKFFLSYLKTFKRLDLTAI

SEQ ID NO: 159563 - protein, 127 aa, Unknown
  Bacterial polypetide isolated from the Sargasso Sea
EIFRSSVKSYKSLPQLLYHIQWKFRDEIRPRFGIMRCREFYMKDAYSFDISDEDAFFSYNKFFLSYLRTFKRLDLTAIPMAADTGPIGGNLSHEFIILAETGESKIFTDKRIFDVNSEGTKLEKKSL

SEQ ID NO: 159564 - protein, 236 aa, Unknown
  Bacterial polypetide isolated from the Sargasso Sea
MKLSNLLFNSLKESPKEAKIISHQLMLRSSMIRQHTSGIYTWLPLGFKVLKNIENIIRTNQDEIGCNEMLMSTIQSSELWKKSGRYADYGKEMLRITDRHDNDLLYGPTNEEVITDLFSDYVNSYKGLPKYLYHIQWKFRDEIRPRFGVMRGREFLMKDAYSFDLTEEAAFETYKNFFRCYLKTFLDLGLQPIPVKAATGAIGGDLSHEFQILANTGESELAYDSKLVDSNLYEKS

SEQ ID NO: 159565 - protein, 279 aa, Unknown
  Bacterial polypetide isolated from the Sargasso Sea
NPSEAKIKSHQLMLRVGMIKQASAGIYSWLPLGFKVMKKIEDIVRQEQNKIGAQEILMPTIQSSEIWKESGRYDDYGEEMLRITDRQNREMLYGPTNEEQVTEIFRSSIKSYKSLPQLMYHIQWKFRDEIRPRFGIMRGREFYMKDAYSFDVSDEQAFYSYNKFFLSYLRTFKRLSLTAIPMAADTGPIGGNLSHEFIILADTGESKIFTDKRIFDLDSDDTEIEKVSLESMRKKYEQFYAVTDEKFNKEEFEKIVSKENQLITKGIEVGHIFYFGDKY

SEQ ID NO: 159566 - protein, 269 aa, Unknown
  Bacterial polypetide isolated from the Sargasso Sea
FILQIYGRKSERWEGYTAGEGIMFNLKDRQGKEFGLAPTHEEVITSIASETINSYKQLPQCFYQIQTKFRDEIRPRFGLMRSREFIMKDGYSFHSSENDLASFYEKVGNAYENIFKSCGLQTVEVEADSGAIGGASSKEFMVTADAGEDSILFTQSGSYAANIEKAVSLPSQPIPLKDDIAEWLETPQQKTILELCNNNNLDPSQIIKVVIFLAQFEGKFEVPILACIRGDQHINEVKLFNLINKLHHFNLLNLKKIEDKNNIEKNLID

SEQ ID NO: 159567 - protein, 272 aa, Unknown
  Bacterial polypetide isolated from the Sargasso Sea
IQWKFRDEIRPRFGIMRCREFYMKDAYSFDINDDEALFSYNKFFLSYLKTFKRLDLTAIPMAADTGPIGGNLSHEFIILAETGESKIFTDKRIFDLDSDGTNLEKKSLESLRKKYEKFYSVTDEKFDKEEFEKNVSESNRLKTKGIEVGHIFYFGDKYSKAMGASVDLPGGKKDFVKMGSYGIGVSRLVGAIIEAKYDEKNEVMKWPISVAPYDISIIPMINKNDTSILEKANKINFELEKNNIETIIDDTDENFSSKIKKMNLIGAPISNK

SEQ ID NO: 159568 - protein, 283 aa, Unknown
  Bacterial polypetide isolated from the Sargasso Sea
EAKIKSHQLMLRVGMIKQASAGIYSWLPLGFKVMKKIEDIVRQEQNKIGAQEILMPTIQSSEIWKESGRYDDYGEEMLRITDRQNREMLYGPTNEEQVTEIFRSSIKSYKSLPQLMYHIQWKFRDEIRPRFGIMRGREFYMKDAYSFDVSDEEAFYSYNKFFLSYLRTFKRLTLTAIPMAADTGPIGGNLSHEFIILADTGESKIFTDKRIFDLDSDDTKIEKVSLESMRKKYEQFYAVTDEKFNKEEFEKIVSKENQLITKGIEVGHIFYFGDKYSKPNGCI

SEQ ID NO: 159569 - protein, 333 aa, Unknown
  Bacterial polypetide isolated from the Sargasso Sea
MRAREFLMKDAYSFHLDQDSLEQGYNLMHETYSKAFEKMGLEFRVVDADSGEIGGNRSQEFHVIADSGEDAIAYCDEENYAANIELTPTLKSQAKTVKSKKRKEKKHTPNTKDIASLCKLLKVEPKDTVKTLLLKGEKKPLAVVLRGDHQLNIIKAAKISGISLPVTMADEKEIKKSTGYDFGYIGPIDLGLEIYFDHAVAEMPSLICGANEKDYHFVDANFSDDLGNPDTIDLRNAEVGDPSPNGKGKLSIARGIEVGHIFQLGTKYSQALKATVQDGSGKDVPLSMGCYGIGISRIVAAAIEQNHDESGIIWPENIAPFKVIIIPINIHKS

SEQ ID NO: 159570 - protein, 279 aa, Unknown
  Bacterial polypetide isolated from the Sargasso Sea
MLLSNSFIPILKNNPSEAKIKSHQLMLRVGMIKQASAGIYSWLPLGFKVMKKIEDIVRQEQNKIGAQEILMPTIQSSEIWKESGRYDDYGEEMLRITDRQNREMLYGPTNEEQVTEIFRSSIKSYKSLPQLMYHIQWKFRDEIRPRFGIMRGREFYMKDAYSFDVSDEEAFYSYNKFFLSYLRTFKRLSLTAIPMAADTGPIGGNLSHEFIILADTGESKIFTDKRIFDLDSDDTQLEKTSLESMRKKYEQFYAVTDEKFNKKEFEKIVSKENQLITKR

SEQ ID NO: 159571 - protein, 201 aa, Unknown
  Bacterial polypetide isolated from the Sargasso Sea
MLLSNSFIPILKNNPSEAKIKSHQLMLRVGMIKQASAGIYSWLPLGFKVMKKIEDIVRQEQNKIGAQEILMPTIQSSEIWKESGRYDDYGEEMLRITDRQNREMLYGPTNEEQVTEIFRSSIKSYKSLPQLMYHIQWKFRDEIRPRFGIMRGREFYMKDAYSFDVSDGEAFYSYNKFFLSYLRTFKRLSLTAIPMAADTGP

SEQ ID NO: 159572 - protein, 260 aa, Unknown
  Bacterial polypetide isolated from the Sargasso Sea
MYLSKLFIPITKDLPTEAKVKSHQLMLRAGMIKQSSAGIYSWLPLGYKVMKKIEQIVREEQNSIGAQEMLMPTIQSSEIWKESGRYEDYGEEMLRIKDRQGREMLYGPTNEELVTDIFRSSVKSYKSLPQILYHIQWKFRDEIRPRFGVMRCREFYMKDAYSFDLTDEDAKNSYNKMFYSYIRTFKRLGLKAIPMAADTGPIGGDLSHEFVILAETGESQIYADKKIFDIDLNKYNFSEKSLQKMRDDFSSIYAVTDDKF

SEQ ID NO: 159573 - protein, 326 aa, Unknown
  Bacterial polypetide isolated from the Sargasso Sea
TNEELVTDIFRSSIKSYKSLPQLLYHIQWKFRDEIRPRFGIMRCREFYMKDAYSFDINDEEALFSYNKFFLSYLKTFKRLDLTAIPMAADTGPIGGNLSHEFIILAETGESKIFTDKRIFDLNNNDSKLEKKSLEDLRKKYEKFYSVTDEKFNKEEFEKKVLEENRLITKGIEVGHIFYFGDKYSKSMEASVDLPGGKKDFVKMGSYGIGVSRLVGAIIEAKYDEKNEIMKWPISVAPYDIAIIPMINKNDISALERANNIYLELNKNNIDSIIDDTDENFSSKIKKMNLIGVPYQIIIGKQSEGDLVEFKEVGEESQKLKLKDII

SEQ ID NO: 159574 - protein, 235 aa, Unknown
  Bacterial polypetide isolated from the Sargasso Sea
YKSLPQLLYHIQWKFRDEIRPRFGIMRCREFYMKDAYSFDVSDEDAQFSYNKFFLSYLKTFKKLDLTAIPMAADTGPIGGNLSHEFIILAETGESKIYTDKRIFDLDSQGTKLEKESLNELREKYEKFYSVTDDKFNKEEFEKKVSKDNQLQTKGIEVGHIFYFGDKYSKPMGASVDLPGGKKDFVKMGSYGIGVSRLVGAIIEAKYDEKNEVMKWPISVAPYDISIIPMINKND

SEQ ID NO: 159575 - protein, 294 aa, Unknown
  Bacterial polypetide isolated from the Sargasso Sea
SAGIYSWLPLGFKVMKKIEDIVRQEQNKIGAQEILMPTIQSSEIWKESGRYDDYGEEMLRITDRQNREMLYGPTNEEQVTEIFRSSIKSYKSLPQLMYHIQWKFRDEIRPRFGIMRGREFYMKDAYSFDVSDEEAFYSYNKFFLSYLRTFKRLSLTAIPMAADTGPIGGNLSHEFIILADTGESKIFTDKRIFDLDSDDTEIEKVSLENMRKKYEKFYAVTDEKFNKEEFEKIVSKENQLITKGIEVGHIFYFGDKYSKPMGASVDLPGGKKDFVKMGSYGIGVSRLVGAIIEA

SEQ ID NO: 159576 - protein, 249 aa, Unknown
  Bacterial polypetide isolated from the Sargasso Sea
MQTKLRDEPRPRGGLLRVREFIMKDAYSFDLDKEGLDESYEKQAQAYKNIYDKCGLEVIQIEADSGAIGGKDSHEFVALSEAGEDKVVLCNNCNYSANSEKAIFSKNEYPLENKLKKEEISTPGVKTISELCKFTGVKPYKTIKAMFYNSKNKLICVVIRGDLEVNELKLARIAGDPDIKPANNKLLEEHNIPSGSASPIGKELFVIADDSITKSNNYIAGANKHGYHVKNINIDEDFSANIIQDIAQI

SEQ ID NO: 159577 - protein, 279 aa, Unknown
  Bacterial polypetide isolated from the Sargasso Sea
RDEIRPRYGVMRSREFLMKDSYSFHISEASLEETYLIMRNAYSKIFERVGLDFKIVKADSGAIGGDKSEEFHVLAKNGEDTLAVSNKSDYAVNAELLLEDGQDSKSLVGQKSPDGNGLLEITKGIEVGHIFQLGRLYSENMNATVLDDSGAAKNMYMGCYGIGISRIVAAAIEQNFDDKGIIWPESISPFDLNIITIGADRDKNIEASSRKLYQDLTQKGFEVILDDRDDGFGKKIKDSELIGVPLSIVFGKNFTDNDKVEIIFRDGKKITSAFNEVEE

SEQ ID NO: 159578 - protein, 264 aa, Unknown
  Bacterial polypetide isolated from the Sargasso Sea
MFWSNYFIPTLKDTASEDAQVISNSLMLKSGMIRKNASGIYTWLPLGLRVLNKVENIVREEMNNAGAHEVLMPMVQPKDLWNESKRWDKFGPELLRFKDRHDRDFCLGPTHEEVITDLIKNNVKSYKELPLNIYQIQTKFRDEIRPRYGVMRSREFLMKDSYSFHLSEASLEETYQIMRNAYSKIFERIGLDFKIVKADSGAIGGDKSEEFHVLAENGEDTLAVSDKSDYAVNAELLLEDGQDSKSLVGQKSPDGNGLLEITKG

SEQ ID NO: 159579 - protein, 274 aa, Unknown
  Bacterial polypetide isolated from the Sargasso Sea
IQSAELWRESGRYDDYGLEMLRIKDRHDRDILYGPTNEEMITDIFRSHIKSYRGLPLNLYHIQWKFRDEIRPRFGVMRGREFLMKDAYSFDLDQNSSFTSYNKMFISYLKIFKKLGLTALPMEADTGPIGGDKSHEFIILADTGESKVFCDRKWLNLSLDIDNINYEKDLEQNVSLFTSLYAATDEKHDPTKIDPSNLIETRGIEVGHIFHFGTKYSESMGAKVALPDGSLSPVFMGSYGIGVSRLVGAIIESSHDDAGIIWPETVAPFDLCIV

SEQ ID NO: 159580 - protein, 310 aa, Unknown
  Bacterial polypetide isolated from the Sargasso Sea
MLLSNSFIPILKNNPSEAKIKSHQLMLRVGMIKQASAGIYSWLPLGFKVMKKIEDIVRQEQNKIGAQEILMPTIQSSEIWKESGRYDDYGEEMLRITDRQNRQMLYGPTNEEQVTEIFRSSIKSYKSLPQLLYHIQWKFRDEIRPRFGIMRGREFYMKDAYSFDISDEEAFYSYNKFFLSYLRTFKRLSLTAIPMAADTGPIGGNLSHEFIILADTGESKIFTDKRIFDLNSDETQLEKSSLESMRKKYEQFYAVTDEKFNKEEFEKIVSKENQLITKGIEVGHIFYFGDKYSKPMTTAVDLPGGKRICK

SEQ ID NO: 159581 - protein, 313 aa, Unknown
  Bacterial polypetide isolated from the Sargasso Sea
QTKLGAQEILMPTIQSSEIWKESGRYEDYGEEMLRIKDRQNREMLYGPTNEEQVTEIFRSSLKSYKSLPQLVYHIQWKFRDEIRPRFGIMRGREFYMKDAYSFDVSDDEALYSYNKFYLSDLRTFKRLSLTAIPMAADTGPIGGNLSHEFIILADTGESKIFTDKRIFDLNSNDTELEKNSLQKMRKKYEQYYSVTDEKFNKKDFEKVVSEENRLITKGIEVGHIFYFGDKYSKAMGASVDLPGGKKDFVKMGSYGIGVSRLVGAIIEAKYDDKNEIMKWPLSVAPYEIALIPMINKNDKSALDKAKNINKEL

SEQ ID NO: 159582 - protein, 286 aa, Unknown
  Bacterial polypetide isolated from the Sargasso Sea
MEELITEIFRSSIKSYKSLPQILYHIQWKFRDEIRPRFGVMRCREFYMKDAYSFDADETSAINSYNKMFYSYIRTFNRLGLKAIPMAADTGPIGGDLSHEFIIIAETGESKIYADKNIFEIDLGKYKSDHASLKKLRDNFSNYYAATDEKFDKKIFDEKVKKSNQVITKGIEVGHIFYFGEKYSKPLNCYVDSKDGKKNSVKMGSYGIGVSRLVGAIIEAKFNNDIMKWPKSISPFDVSIIPHISKNNKENVIKAEKVYNDLKKQNIDVLLDDVDENMSNKFKNMT

SEQ ID NO: 159583 - protein, 170 aa, Unknown
  Bacterial polypetide isolated from the Sargasso Sea
MYLSKLFIPITKNIPAEAKIKSHQLMLQTGMIKQSSAGIYSWLPLGFKVMKKIEQIVREEQNFIGAQEMLMPTIQSSEIWKESGRYDDYGEEMLRIKDRQGREMLYGPTNEELITDVFRSSVKSYKSLPQILYHIQWKFRDEIRPRFGVMRCKEFFMKDAYSFDLNDNDA

SEQ ID NO: 159584 - protein, 241 aa, Unknown
  Bacterial polypetide isolated from the Sargasso Sea
MLISKSFIPILKNNPSEAKIKSHQLMLRVGMIKQSSAGIYSWLPLGFKVMKRIEKIVRDEQNKIGAQEILMPTIQSSEIWKESGRYEDYGEEMLRIRDRQNREILYGPTNEELVTDIFRSSIKSYKSLPQLLYHIQWKFRDEIRPRFGIMRCREFYMKDAYSFDINDEEALFSYNKFFLSYLNTFKRLELTAIPMAADTGPIGGSLSHEFIILAETGESKIFTDKRIFDLNSDGTKLEKKS

SEQ ID NO: 159585 - protein, 272 aa, Unknown
  Bacterial polypetide isolated from the Sargasso Sea
EQNKIGAQEILMPTIQSSEIWKESGRYDDYGEEMLRITDRQNREMLYGPTNEEQVTEIFRSSIKSYKSLPQLMYHIQWKFRDEIRPRFGIMRGREFYMKDAYSFDVSDEEAFYSYNKFFLSYLRTFKRLSLTAIPMAADTGPIGGNLSHEFIILADTGESKIFTDKRIFDLDSDDTELEKTSLESMRKKYEQFYAVTDEKFNKDEFEKIVSKENQLITKGIEVGHIFYFGDKYSKPMGASVDLPGGKKDFVKMGSYGIGVSRLVGAIIEAKY

SEQ ID NO: 159586 - protein, 271 aa, Unknown
  Bacterial polypetide isolated from the Sargasso Sea
MLLSNSFIPILKNNPSEAKIKSHQLMLRVGMIKQASAGIYSWLPLGFKVMKKIEDIVRQEQKKIGAQEILMPTIQSSEIWKESGRYDDYGEEMLRITDRQNREMLYGPTNEEQVTEIFRSSIKSYKSLPQLLYHIQWKFRDEIRPRFGIMRGREFYMKDAYSFDVSDEEAFYSYNKFFLSYLRTFKRLSLIAIPMAADTGPIGGNLSHEFIILADTGESKIFTDKRIFDLDSDDTQLEKKSLESMRKKYEQFYAVTDEKFNKEELKKMFLR

SEQ ID NO: 159587 - protein, 245 aa, Unknown
  Bacterial polypetide isolated from the Sargasso Sea
MYLSKLFIPITKDLPTEAKIKSHQLMLRTGMIKQSSAGIYSWLPLGFKVMKKIEQIVREEQNTIGAQEMLMPTIQSSEIWKESGRYDDYGEEMLRIKDRQGREMLYGPTNEELITDVFRSSIKSYKSLPQLLYHIQWKFRDEIRPRFGVMRCKEFYMKDAYSFDLSDEDARISYNKMFFSYLKTFNRLGLKAIPMAADTGPIGGDLSHEFVILAETGESQIYADKKIFEINLDQYKLNDLSLKKM

SEQ ID NO: 159588 - protein, 283 aa, Unknown
  Bacterial polypetide isolated from the Sargasso Sea
IIERELNSIGCTKLLLPQLHPADLWRKSERWEGYTAGEGIMFNLKDRQGKEFGLAPTHEEVITSIASETINSYKQLPQCFYQIQTKFRDEIRPRFGLMRSREFIMKDGYSFHSSENDLASFYEKMGNAYENIFKSCGLQTVGVEADSGAIGGASSKEFMVTADAGEDSILFTQSGSYAANIEKAVSLPSQPIPLRDNIADWLETPHQKTILDICDNNNLDPTQIIKVVIFLAQFEDEFEVPILACIRGDQHVNEVKLFNLINKLHNFNLLNLKKIEDKNTIEK

SEQ ID NO: 159589 - protein, 276 aa, Unknown
  Bacterial polypetide isolated from the Sargasso Sea
SCFYQIQTKFRDEIRPRFGLMRSREFIMKDGYSFHSSENDLASFYEKVGNAYENIFKSCGLQTVGVEADSGAIGGASSKEFMVTADAGEDSILFTQSGSYAANIEKAVSLPSQPIPLKDDIAEWLETPQQKTILEVCDNNNLEPSQIIKVVIFLAQFEGEFEFPILACIRGDQHINEVKLFNLINKLHNFNLLNLKKIEDKNNIEKNLIDFPLGFIGPDLDNKTIKATSNWDKKWIRIIDHSASGLSKFVSGGNKVNFHKVFQEFSFDSKDYLIGD

SEQ ID NO: 159590 - protein, 155 aa, Unknown
  Bacterial polypetide isolated from the Sargasso Sea
MKASLYHYKTLRDTPSDAELISHQLMIKSNMIKPIASGIYTWLPLGTLILKKVENIIRAELSNGGCLEIIMPLVQPKDLWDLSGRSSEYGPELLGFKDRNERDFYLGPTHEEIVTELAKKEVKSHKDLPVTFFQIQNKFRDEIRPRFGVMRAREF

SEQ ID NO: 159591 - protein, 274 aa, Unknown
  Bacterial polypetide isolated from the Sargasso Sea
MYLSKLFIPITKDLPSEAKVKSHQLMLRTGMIKQSSAGIYSWLPLGFKVMKKIEQIVREEQNSIGAQEMLMPTIQSSEIWKESGRYDDYGEEMLRIKDRQGREMLYGPTNEELITDVFRSSVKSYKSLPQLLYHIQWKFRDEIRPRFGVMRCKEFYMKDAYSFDISDMEAKKSYNKMFYSYLKTFERLGLKAIPMAADTGPIGGDLSHEFIILAETGESQIYADKNIFEIDLNKYEANDGSLEVMRDDFNKFYAVTDEKYKKDEFNKIVKKENQ

SEQ ID NO: 159592 - protein, 296 aa, Unknown
  Bacterial polypetide isolated from the Sargasso Sea
DIFRSSIKSYKSLPQLLYHIQWKFRDEIRPRFGIMRCREFYMKDAYSFDINDEEALFSYNKFFLSYLKTFKRLDLTAIPMAADTGPIGGNLSHEFIILAETGESKIFTDKRIFDLSSDGTKLEKKSLEDLRKKYEQFYSVTDEKFNKDEFEKKVSEPNRLKTKGIEVGHIFYFGDKYSKPMGGSVDLPGGKKDFVKMGSYGIGVSRLVGAIIEAKYDEKNEVMKWPISVAPYDVAIIPMINKNDISALEKANKINLEFEMNNIESIIDDTDENLSSKIKKMNLIGAPFQIIIGKQT

SEQ ID NO: 159593 - protein, 161 aa, Unknown
  Bacterial polypetide isolated from the Sargasso Sea
MFNWNRNNMRTSQYMLSTLKETPADAEVISHQLMLRAGMIRKLASGLYTWLPTGLRVLKKVENIVREEMNNAGAIEVSMPVVQPADLWQESGRWEQYGPELLRFVDRGERPFVLGPTHEEVITDLVRNELSSYKQLPLNFFQIQTKFRDEVRPRFGVMRSR

SEQ ID NO: 159594 - protein, 192 aa, Unknown
  Bacterial polypetide isolated from the Sargasso Sea
MLLSNSFIPILKNNPSEAKIKSHQLMLRVGMIKQASAGIYSWLPLGFKVMKKIEEIVRQEQNKIGAQEILMPTIQSSEIWKESGRYDDYGEEMLRITDRQKREMLYGPTNEEQVTEIFRSSIKSYKSLPQLLYHIQWKFRDEIRPRFGIMRGREFYMKDAYSFDVSDEEAFYSYNKFFLSYLRTFKRLSLTA

SEQ ID NO: 159595 - protein, 190 aa, Unknown
  Bacterial polypetide isolated from the Sargasso Sea
MYWSKSFIPTSKENPSGAKIPSHQLLIRAGMIKQESAGIYSWLPLGFKVLKNIESIVREEQEAAGAIEILMPTLQSSDLWIESGRYEGYGEEMLRISDRHDADLIYGPTNEEQITEIFRSYIKSYKNLPLNLFHIQWKFRDEIRPRFGLLRGREFLMKDAYSFDLDKESAKISYFKMFTSYMRTFKRLGL

SEQ ID NO: 159596 - protein, 279 aa, Unknown
  Bacterial polypetide isolated from the Sargasso Sea
SSGIYAYMPIMLRVIENFSSIIQKELNSIGCTKLLLPQLHPADLWKKSERWEGYTAGEGIMFNLKDRQGKEFGLAPTHEEVITSIASEIINSYKQLPQCFYQIQTKFRDEIRPRFGLMRSREFIMKDGYSFHSSGKDLTSFYEKVGNAYENIFKSCGLQTVGVEADSGAIGGASSKEFMVTADAGEDTILFTQSGSYAANIEKAVSLPSEPIPLKDNISGWLETPQQKTIREVCKNNNLDPSQIIKVVIFIAKFESKSEVPILACIRGDQHINEIKLFN

SEQ ID NO: 159597 - protein, 327 aa, Unknown
  Bacterial polypetide isolated from the Sargasso Sea
PQEAEVVSHKLMLRAGMIRKVASGIYTWLPLGLKVLKKVENIVREEMDNSGAQEVFMPMVQPRELWEETKRWEKMGPELLRIKDRHDRDFCLGPTHEEVITDIIRDNVKSYKELPLNIYQIQTKFRDEVRPRYGIMRGREFLMKDSYSFNIDEESLQETYLIMRETYKKVLKRIGLEYKISAADSGAIGGDSSEEFHVLAENGEDTIAISDASEFAINTELLLKDGEDISTLEGKPSPDGNGTIQIKKGIEVGHIFKLGRLYAESMKTNVLNSEGNASTLFMGCYGIGVSRLVAATIEQNHDEKGIIWPHSIAPFDINIISVGHEKN

SEQ ID NO: 159598 - protein, 297 aa, Unknown
  Bacterial polypetide isolated from the Sargasso Sea
VTEIFRSSVKSYKALPQLLYHIQWKFRDEIRPRFGIMRGREFYMKDAYSFDITDDDAFYSYNKFFLSYLRTFKRLSLTAIPMAADTGPIGGNLSHEFVILADTGESKIFTDKRIFELNCDNTKLDKSSLEQMRKMYEQYYAVTDEKFNKDDFEKIVNKENRLITKGIEVGHIFYFGDKYSKSMDAAVDLPLGKKDFVKMGSYGIGVSRLVGAIIEAKYDDKNEIMKWPLSVAPYDIGIIPMINKNDTSALDKANNIYLHLKKNNIDAIIDDTDENFSSKLKKMNLIGAPYHFIIGKK

SEQ ID NO: 159599 - protein, 255 aa, Unknown
  Bacterial polypetide isolated from the Sargasso Sea
YSWLPLGLKVMKKIEQVVREEQNKIGAQELLMPTIQSADIWKESGRYNDYGEEMLRIKDRQGREMLYGPTNEELITDIFRSSIKSYKSLPQMLYHIQWKFRDEIRPRFGVMRCREFFMKDAYSFDLDDSSAKSSYNKMFFSYLKTFKRLGLEAIPMAADTGPIGGDLSHEFIILAETGESKIYTDKSIFEIDLSNYSFNNSSLEKMIKDYSSIYAVTDDKFKKDEFDKKVPKKNQMITKGIEVGHIFYFGDKYSK

SEQ ID NO: 159600 - protein, 271 aa, Unknown
  Bacterial polypetide isolated from the Sargasso Sea
VVQPAELWQETGRFEKMGPELLRIQDRHGRDFVVQPTSEEVITDIARQELKSYKQLPKNFYQIQTKFRDERRPRFGLMRGREFIMKDAYSFDCDQAAAKASYQVMAAAYRRIFDRFGLTYRAVAADSGAIGGDLSEEFQVIAATGEDAIVYCPQSDYAANMEKAEALAPTGPRGAATQALTKTATPGKSTCADVAELLGVPLNTTVKSLVLATDETNEAGEIVKTQVWLLLLRGDHDMNEIKVGKVPGLAGFRFATLGEIEDHFGCKPGYL

SEQ ID NO: 159601 - protein, 235 aa, Unknown
  Bacterial polypetide isolated from the Sargasso Sea
VIEKISLIIDRELNSIGCVKLFLPQLHPADLWKKSERWEGYTAGEGIMFNLKDRQGKEFGLAPTHEEVITSIASETINSYKQLPQCFYQIQTKFRDEIRPRFGLMRSREFIMKDGYSFHASENDLASFYEKVGKAYENIFKSCGLETVGVEADSGAIGGASSKEFMVTADAGEDSILFTQSGSYAANIEKAVSIPSQPIPLKDNISQWLETPRQKTILEVCEKNNLDSTQIIKVV

SEQ ID NO: 159602 - protein, 318 aa, Unknown
  Bacterial polypetide isolated from the Sargasso Sea
GIKDRQGREMLYGPTNEEFLTDIFRTSIKSYKTLPQMLYHIQWKFRDEIRPRFGVMRCREFFMKDAYSFDLSDQDAKKSYNKMFYSYIRTFNRLGLKAIPMAAETGPIGGDLSHEFVILAETGESQIFADKKIFEIDLDKYDFSEKSLQKMREDFSSIYAVTDEKYREEDFNNKVKQANQIKTKGIEVGHIFYFGDKYSKPLNCLIDAQDGKKIAVKMGSYGIGISRLVGATIEANYNKEVMKWPKSISPFDVVIIPSISKNNKENLEKAEKIYKELKKQNIDVLLDDVDENMSNKFKKHDLIGIPYQIIIGSKSAQD

SEQ ID NO: 159603 - protein, 298 aa, Unknown
  Bacterial polypetide isolated from the Sargasso Sea
GNRVRLNIENVVRKHMNLSGAQEILMPALQPIEIWEQSGRAAKMKDVLFRLSDRRGRSLALGPTHEEVVTQLAGKFISSHRDLPLTTYQIQTKFRDEARPRGGLVRVREFTMKDAYSFDLDEDGLSDSYDKMFQAYKNIFSECGVPVVPVDADSGAIGGKGSQEFIFITEMGEDTVVQCSGCEYAANLEKATFLQESSAEAQKSLEEVETPNVATIEDLSEFLSIANSSTAKAVLFMATKFESDEEFPVLAVIRGDFEVNDVKLSNALGGAEVRPMEASEAANVGLVPGYISPSQSCK

SEQ ID NO: 159604 - protein, 250 aa, Unknown
  Bacterial polypetide isolated from the Sargasso Sea
SGAKIPSHQLLIRAGMIKQESAGIYSWLPLGFKVLKNIESIVREEQEAAGAIEVLMPTLQSSDLWIESGRYDGYGEEMLRVSDRHDADLIYGPTNEEQITEIFRSYIKSYKNLPLNLFHIQWKFRDEIRPRFGLLRGREFLMKDAYSFDLDKESAKISYFKMFNSYMKTFKRLGLNAIPVVADSGPIGGELSHEFSIITNTGETEIYYDSRILEIENYNFDYSNKDSLKNSYNNFTNFYSSTDDKYSEDL

SEQ ID NO: 159605 - protein, 177 aa, Unknown
  Bacterial polypetide isolated from the Sargasso Sea
LNSIGCTKLLLPQLHPADLWKKSERWEGYTAGEGIMFNLKDRQGKEFGLAPTHEEVITSIASEIINSYKQLPQCFYQIQTKFRDEIRPRFGLMRSREFIMKDGYSFHSSEKDLASFYEKVGKAYENIFKSCGLETVGVEADSGAIGGASSKEFMVTADAGEDSILFTQSGSYAANIE

SEQ ID NO: 159606 - protein, 308 aa, Unknown
  Bacterial polypetide isolated from the Sargasso Sea
ITKDLPADAKIKSHQLMLRTGMIKQSAAGIYSWLPLGFKVMKKIEKIVREEQNIIGAQEMLMPTIQSAEIWKESGRYEDYGDEMLRIKDRQGREMLYGPTNEELITDIFRSSIKSYKSLPQILYHIQWKFRDEIRPRFGVMRCREFYMKDAYSFDLSDAEAKNSYNKIFYSYIKTFNRLGLKAIPMSADTGPIGGDLSHEFVILAETGESKIYADKKIFDIDLNKYNFSEKSLQKMRDDFSTIYAVTDEKFNEKTFNERVKKENQVTTKGIEVGHIFYFGDKYSKPLNCVIDTKDGKKVTVKMGSYGI

SEQ ID NO: 159607 - protein, 261 aa, Unknown
  Bacterial polypetide isolated from the Sargasso Sea
NSYKQLPLCFYQIQTKFRDEIRPRFGLMRSREFIMKDGYSFHSSENDLASFYEKVGNAYENIFKSCGLQTVGVEADSGAIGGASSKEFMVTADAGEDSILFTQSGSYAANIEKAVSLPSQPIPLKDDISEWLETPQQKTILEVCDNNNLDPSQIIKVVIFLAQFEGEFEVPILACIRGDQHINEVKLFNLINKLHDFNLLNLKKIEDKNNIDKNLVDLPLGFIGPDLDNKTIKATSNWDKKWTRIIDHSVSDLSKFISGGN

SEQ ID NO: 159608 - protein, 288 aa, Unknown
  Bacterial polypetide isolated from the Sargasso Sea
MKKIESIVRQEQDKIGAQEILMPTIQSSEIWKESGRYEDYGEEMLRIKDRQNREMLYGPTNEEQVTEIFRSSFKSYKSLPQLLYHIQWKFRDEIRPRFGIMRGREFYMKDAYSFDITDEDAFFSYNKFFLSYLRTFKRLSLTAIPMAAETGPIGGNLSHEFIILAETGESKIFTDKRIFEVNSDGTELKKDSLQNLRKKYEKFYSVTDEKFNKDEFEKKVSETNRLITKGIEVGHIFYFGDKYSRPMNASVDLPGGKKDFVKMGSYGIGVSRLVGAIIESKYDEKMKS

SEQ ID NO: 159609 - protein, 426 aa, Unknown
  Bacterial polypetide isolated from the Sargasso Sea
MLWSKVFLPTLKDTPQDAEVISHQLMLRAGMIRKVTSGIYNWLPLGLRVLKKIENIVREEMDASGAQEVLMPMVQPKELWEETQRWKKMGPELLRIQDRHERDFCLGPTHEEVITDLVRNNVKSYKELPLNLYQIQTKFRDEVRPRYGVMRGREFLMKDSYSFNINEDSLNESYLLMKETYKKIIERLGLEYKIVKADSGAIGGDASEEFHVLAENGEDTIAVSDSSEFAINSELLLNEGEDINSLQGKPSPDGKGTIEIKKGIEVGHIFQLGKIYADAMKANVLDNEGKSQTLYMGCYGIGISRLVAAAIEQNHDEKGILWPEAIAPYEVNIIAIGFDKDQKIAKAATDFYNELSSMGYEVMLDDRKDGYGIKMKDSELIGVPINVIIGRQYLESNEIELKHRDGLSSIGTVEDITTIFEHYKEK

SEQ ID NO: 159610 - protein, 176 aa, Unknown
  Bacterial polypetide isolated from the Sargasso Sea
MRVTTSFPLGTLRDKPSEAEIISHQLLLKAGYIRRISSGIYAYMPLMLKVIERISAIIEKELNNIGCTKLLLPQLHPADLWKKSERWEGYTAGEGIMFNLKDRQGKEFGLAPTHEEVITSIASETINSYKQLPQCFYQIQTKFRDEIRPRFGLMRSREFIMKDGYSFHSSENDLAS

SEQ ID NO: 159611 - protein, 346 aa, Unknown
  Bacterial polypetide isolated from the Sargasso Sea
MLLSNSFIPILKNNPSEAKIKSHQLMLRAGMIKQASAGIYSWLPLGFKVMKKIEDIVRQEQNKIGAQEILMPTIQSSEIWKESGRYEDYGEEMLRITDRQNREMLYGPTNEEQVTEIFRSSIKSYKSLPQLLYHIQWKFRDEIRPRFGIMRGREFYMKDAYSFDVSDEEAFYSYNKFFLSYLRTFKRLSLIAIPMAADTGPIGGNLSHEFIILADTGESKIFTDKRIFDLNSDDTQLEKASLESMRKKYEQFYSVTDEKFNKEEFEKAVSKENQLITKGIEVGHIFYFGDKYSKPMGASVDLPGGKKDFVKMGSYGIGVSRLVGAIIEAKYDDKNEIMKMAIVCCS

SEQ ID NO: 159612 - protein, 321 aa, Unknown
  Bacterial polypetide isolated from the Sargasso Sea
MRTSQYLLSTMKETPADAEIISHQLMLRAGMVRRLASGLYTWLPSGLRVLRKVENIVREEMNKAGAIEILMPVVQHAELWQESGRWEKMDAELLRFKDRHQRDFVLGPTHEEVVTDLVRKEISSYKQLPINLYQIQTKFRDERRPRFGVMRAREFLMKDAYSFHLSQESLQQTYDAMYQAYCNIFTRLGLDFRPVLADTGAIGGSMSHEFHVLAASGEDAIVFSDGSDYAANIEKAEALPPQGQRPAATQAKTEVATPNAKSIDEVSAFLKLDASAIAKTLLVQLNPELSFDELKALLANADAETIENTWRSKIVALVLRG

SEQ ID NO: 159613 - protein, 440 aa, Unknown
  Bacterial polypetide isolated from the Sargasso Sea
MYWSKSFIPTSKENPSGAKIPSHQLLIRAGMIKQESAGIYSWLPLGFKVLKNIESIVREEQEAAGAVEILMPTLQSSDLWIESGRYEGYGEEMLRISDRHDADLIYGPTNEEQITEIFRSYIKSYKNLPLNLFHIQWKFRDEIRPRFGLLRGREFLMKDAYSFDLDKESAKISYFKMFSSYMRTFKRLGLNAIPVIADSGPIGGELSHEFSIITNTGETEIYYDSRILEIEDYDFDYSKKDSLENSYNKFTNFYSSTDDKHSEDLFQKIPEEFRNKGKAIEIGHIFSFGYKYSEPMNAFVNNDKGENIPVYMGSYGIGVSRLVSAIIEAYHDDRGILWPTSVAPFQVGIINLGKNDEKCKKTSENIYQELRSSNIDVIYDDRDESAGKKYADMDLIGIPYQIILGPRDLESNKCELKNRLNDQRVSIDINNIIKELLKLI

SEQ ID NO: 159614 - protein, 337 aa, Unknown
  Bacterial polypetide isolated from the Sargasso Sea
MLLSNSFIPILKNNPSEAKIKSHQLMLRVGMIKQASAGIYSWLPLGFKVMKKIEQIVREEQNKIGAQEILMPTIQSSDIWKESGRYDDYGEEMLRITDRQKREMLYGPTNEEQVTEIFRSSIKSYKSLPQLMYHIQWKFRDEIRPRFGIMRGREFYMKDAYSFDVSDEEAFFSYNKFFLSYLKTFKRLDLTAIPMAADTGPIGGNLSHEFIILAETGESKIFTDKKIFDLNSDDTQLEKSSLEEMRKKYEQFYAVTDEKFNKDEFEKIVSKENQLITKGIEVGHIFYFGDKYSKPMNASVDLPGGKKDFVKMGSYGIGVSRLVGAIIEAKYDEKNEI

SEQ ID NO: 159615 - protein, 153 aa, Unknown
  Bacterial polypetide isolated from the Sargasso Sea
MRTSQYLLATQKETPADAEVISHQLMLRAGMIRKLASGLYTWLPSGLRVLNKVANIVREEMNKAGAIEVLMPVVQPADLWEESGRWEEYGPELLRIKDRHQRDFVLGPTHEEVITALVRNEISSYKQLPLNLYQIQTKFRDEVRPRFGIMRGR

SEQ ID NO: 159616 - protein, 328 aa, Unknown
  Bacterial polypetide isolated from the Sargasso Sea
MRQSKILIPTLKEDPSDAEVVSHKLMMRAGLVRQLASGLYSWLPLGLRVLRKVENIIRVEMDNAGAQELLMPVVQPSELWVETGRWEKMGAELCRLKDRHEREFCLGPTHEEVITDIFRREVNSYKDLPATYYQIQTKFRDEPRPRFGLMRAREFIMKDGYSFHLDQASFDETYQAIYDCYCVILNRMQLDYRAVIADTGNIGGENSHEFHVLANSGEDVIVYASDGDYAANIEKAESARLEEVSEASTIELAEIHTPGALSIDDVATQLSKPAKEILKTLLVENDGGLTALVLRGDHELNIVKAEKLLGVTAPISFATDEQILKHTG

SEQ ID NO: 159617 - protein, 440 aa, Unknown
  Bacterial polypetide isolated from the Sargasso Sea
MYWSKSFIPTSKENPSGAKIPSHQLLIRAGMIKQESAGIYSWLPMGFKVLKKIEEIVREEQKAAGAIEVLMPTLQSSELWIESGRYDGYGEEMLRISDRHDANLIYGPTNEEQITEIFRTYVKSYKNLPLNLFHIQWKFRDEIRPRFGLLRGREFLMKDAYSFDLDKESAKIAYYKMFLSYMRTFKRLGLNAIPVVADSGPIGGELSHEFSIITNTGETEVYYDGRLLDIEDDNIDYTNEDSLENAYNNFTNFYSSTKDKHVEDLYKKIPLDFQKKGKAIEIGHIFSFGYKYSEPMNAFVTNDFGENVPVYMGSYGIGVSRLVAAIIEAYHDDKGILWPTSIAPFQIGLINLGQNNDECIRASKEIYKELKKNNFDVIYDDRNESAGKKYADMDLIGIPFQIILGPRDLENNKCELKNRFNDQRVSIDISELVKELNKLI

SEQ ID NO: 159618 - protein, 458 aa, Unknown
  Bacterial polypetide isolated from the Sargasso Sea
MRVTTSFPLGTLRDTPSEAEIISHQLLLKAGYIRRVNSGIYAYMPIMLKVIEKISAIIERELNSIGCTKLLLPQLHPADLWKKSERWEGYTAGEGIMFNLKDRQGKEFGLAPTHEEVITSIASETINSYKQLPQCFYQIQTKFRDEIRPRFGLMRSREFIMKDGYSFHSSENDLASFYEKVSNAYENIFKSCGLQTVGVEADSGAIGGASSKEFMVTADAGEDSILFTQSGSYAANIEKAVSIPSQSIPLKDGMSGLIETPQQKTILEVCDNNNLDPSQIIKVVVFLAQFENKFEVPILACIRGDQHINEVKLFNLINKLQNFNLLNLKKIEDKNAIEKNLVNFPLGFIGPDLDNKTIKASSNWDKKWTRIIDHSASSLSKFISGGNKVDFHKVFQEFSFASKDYLIGDIRNAKKGDKVSIYDDEELKEKKGIEIGHIFQLGQKYSEKLNAKFSDKDG

SEQ ID NO: 159619 - protein, 196 aa, Unknown
  Bacterial polypetide isolated from the Sargasso Sea
MRVTTSFPLGTLRDTPSEAEIISHQLLLKAGYIRRVNSGIYAYMPIMLRVIEKISAIIEKELNSIGCTKLLLPQLHPADLWRKSERWEGYTAGEGIMFNLKDRQGKEFGLAPTHEEVITSIASETINSYKQLPQCFYQIQTKFRDEIRPRFGLMRSREFIMKDGYSFHSSEKDLASFYEKVGNAYEIFLNLVDYRQ

SEQ ID NO: 159620 - protein, 306 aa, Unknown
  Bacterial polypetide isolated from the Sargasso Sea
YHIQWKFRDEIRPRFGVMRCREFFMKDAYSFDLSDEDAKKSYNKMFYSYIRTFNRLGLTAIPMAAETGPIGGDLSHEFIILAETGESQIYADKKIFEIDLNKYDFSDKSLQKMREDFSSIYAVTDEKFKEKDFNEKVEKKNQIKTKGIEVGHIFYFSDKYSKPLNCLIDAQDGKKIAVKMGSYGIGISRLVGATIEANYNNDVMKWPKSISPFDVVIIPSITKNNKENLQKAAKIYKELKKQNIDVLLDDVDENMSNKFKKHDLIGVPYQIILGSKSEKDKFEFKELNSKSAMLNLEDIKSQLKKR

SEQ ID NO: 159621 - protein, 425 aa, Unknown
  Bacterial polypetide isolated from the Sargasso Sea
MLFSKLLLPTLKDAPQEAEVVSHKLMLRSGMIRKVASGIYTWLPLGLKVLKKVEDIVREEMDNSGAQEVFMPMVQPRELWEETKRWEKMGPELLRIKDRHDRDFCLGPTHEEIITDIIRDNVKSYRKLPLNIYQIQTKFRDEVRPRYGIMRGREFLMKDSYSFNIDEESLQETYLIMRETYKKVLERIGLKYKISAADSGAIGGDSSEEFHVLAENGEDTIAISDSSEFAINTELLLKDGEDISTLEGKPSPDGNGTIQIRKGIEVGHIFKLGKLYAESMKASVLNSDGNASTLFMGCYGIGVSRLVAAAIEQNHDEKGIIWPHSIAPFDINIISIGYDKNKDIAKASKDLYKELSEMNYSVLLDDRKDGYGVKMKDSELIGIPLNIVIGKKFTENNEVELIGRNGEISSNSIEDIKTILEFFKN

SEQ ID NO: 159622 - protein, 326 aa, Unknown
  Bacterial polypetide isolated from the Sargasso Sea
HERDFCLGPTHEEVITDIIRDNVKSYKELPLNIYQIQTKFRDEVRPRYGIMRGREFLMKDSYSFNIDEESLQETYLAMRETYKKVLERIGLQYKISAADSGSIGGDSSEEFHVLAENGEDTIAISDSSEFAINTELLLKDGEDISSLEGKPSPDGNGTIQIKKGIEVGHIFKLGKLYAESMKANVLNAEGKASTLYMGCYGIGVSRLVAAAIEQNFDDKGIIWPHSIAPFDINIISIGFDKDKKIASASLELYNELSDMGYDVLLDDRKDGYGAKMSDSELIGIPLNIIIGKKYLENKEIELVGRNGDSSINPIDDIKTILDFFKN

SEQ ID NO: 159623 - protein, 442 aa, Unknown
  Bacterial polypetide isolated from the Sargasso Sea
MLLSKSFVPILKNNPSEAKIKSHQLMLRVGMIKQASAGIYSWLPLGFKIMKKIEEIVRQEQNKIGAQEILMPTIQSSEIWKESGRYEDYGEEMLRIKDRQNREMLYGPTNEEQVTEIFRSSLKSYKSLPQLLYHIQWKFRDEIRPRFGIMRGREFYMKDAYSFDVSDEEAFYSYNKFFLSYLRTFKRLALTAIPMAADTGPIGGNLSHEFIILADTGESKIFTDKRIFDLNSNDTELEKNSLQQMRKKYEQYYSVTDEKFNKDEFEKVVSEENRLITKGIEVGHIFYFGDKYSKAMGASVDLPGGKKDFVKMGSYGIGVSRLVGAIIEAKFDDKNEIMKWPLSVAPYDIALVPMINKNDTSALDKAININKELIKNNIDALIDDTDENYSSKIKKMNLIGAPYQIIIGKKSEGDLLEFKEIGEETQNLSLTKIIEIIKKQKN

SEQ ID NO: 159624 - protein, 329 aa, Unknown
  Bacterial polypetide isolated from the Sargasso Sea
MRRSKLFLPTLKENPSEASINSHRLMLRAGMIRQSSSGIYTWLPLGYKVLRKIEKIIRFEQNLISQELLMPTIQDSEIWKKSGRFNDYGKEMLKFKDRHEHELLYGPTNEELITDIFSKNIMSYKSLPLCLYHIQWKFRDEIRPRFGVMRGREFLMKDAYSFDKNKDDAIECYNRMFLNYLRIFDKMELKAIPVAADTGPIGGDLSHEFIILAETGESDVFLDKNILNEKIPNIKYDDPISISKLVNKLTSYYTAADDKHDHDRYLKSVKEENRIKTRGIEVGHLFYFGDKYSRPLGANIANEKGVNIPVEMGSYGIGVSRLVGGIIDA

SEQ ID NO: 159625 - protein, 393 aa, Unknown
  Bacterial polypetide isolated from the Sargasso Sea
VASGDLYIGFPIGLKVLRKVENIVREEMNASGAQEVLMPMVQPKDLWEETQRWEKMGPELLRIQDRHERDFCLGPTHEEVITDLIRNNFKSYKELPLNLYQIQTKFRDEVRPRYGVMRGREFLMKDSYSFNLNEESLNESYLAMKEAYKKILDRLGLKFKIVKADSGAIGGDTSEEFHVLADNGEDTIAVSDSSDFAINTELLLEDGDDLESLQGKPSPDGKGVIEIKKGIEVGHIFQLGKVYTDAMKANVLDNEGKATSLFMGCYGIGVSRLVAAAIEQNNDEKGVIWPEAMTPFEVNIVAIGFDKDKKIAKAATDLYNQLLSMGYEVILDDRKDGYGVKMKDAELIGIPINIIIGKQYLQNNEIELKHRNGQSSIGKIEDITTIFEHYKSS

SEQ ID NO: 159626 - protein, 243 aa, Unknown
  Bacterial polypetide isolated from the Sargasso Sea
MKLSNYPLKTFKDAPSDAELISHQLMLRAGLIKKLASGIFTWMPFGLKVLRKIEQTVRKEMDASGAFEVMMPTIQPSELWQETNRWEDYGDLLLQIHDRHDRLFCYGPTHEEVITDILRKSVKSYKQLPVNFYQIQTKFRDEIRPRFGVMRAREFLMKDAYSFHLNQESLEEEYENMNQTYQSIFKKLELNFRRVEATSGEIGGSVSHEFHVIADSGEDEIAFCDDENFAANVETLEDKNAPN

SEQ ID NO: 159627 - protein, 315 aa, Unknown
  Bacterial polypetide isolated from the Sargasso Sea
MRTSQYLLSTMKETPADAEIISHQLMLRAGMVRRLASGLYTWLPSGLRVLRKVEQIVREEMNKAGAIEVLMPVVQHAELWQESGRWEKMDAELLRFKDRHQRDFVLGPTHEEVITDLVRKEISSYKQLPINLYQIQTKFRDERRPRFGVMRAREFLMKDAYSFHLSQESLQHTYDAMYQAYCNIFTRLGLDFRPVLADTGAIGGSMSHEFHVLAASGEDAIVFSDESDYAANIEKAEALPPQGQRPAATQPKTEVATPNAKSIDEVAAFLKRDAAAIAKTLLVQLNPELSFDEVKALLANADAEVLENTWRSKVV

SEQ ID NO: 159628 - protein, 368 aa, Unknown
  Bacterial polypetide isolated from the Sargasso Sea
MHISKSFIPILKNNPSEAKIKSHQLMLRVGMIKQSSAGIYSWLPLGFKVMKKIERIVREEQNKIGAQEILMPTIQSSEIWKESGRYEDYGEEMLRIKDRQDREMLYGPTNEELVTDIFRSSLKSYKSLPQLLYHIQWKFRDEIRPRFGIMRCREFYMKDAYSFDITDEDALFSYNKFFLSYLKTFKRLDLTAIPMAADTGPIGGNLSHEFIILAETGESKIYADKRIFDLNFEGTKLEVKSLLELRNQYEKFYSVTDDKFKEDEFNEKVLEKNRLKTKGIEVGHIFYFGDKYSKPMDTAVDLPGGKKDYVKMGSYGIGVSRLVGAIIEAKYDEKNENHEWPISVAPYDICDIPMINKMIHLHLIKQTK

SEQ ID NO: 159629 - protein, 370 aa, Unknown
  Bacterial polypetide isolated from the Sargasso Sea
MLVSKLLLPTLKDSPQEAEIVSHQLMLRAGLIRKVASGIYTWLPLGLKVLKKIENIVREEMDLSGAQEVCMPMVLPRELWEETNRWEKMGPELLRIKDRHNRDFCLGPTHEEIITDIIRNNVKSYKELPLNIYQIQTKFRDEVRPRYGIMRGREFLMKDSYSFNIDEESLQETYLTMRETYKKILDRIGLEYKISRADSGSIGGDSSEEFHVLAENGEDIIAISDSSEFAVNSELLLKDGEDISSLEGKPSPDGQGTIQIKKGIEVGHIFKLGKIYAESMKASVLDSNGKASLLYMGCYGIGVSRLVAAAIEQNYDDKGIIWHHSISPFDINIISIGHDKNKEIATASNKLYKDLNEMGYSVLLDDRKDG

SEQ ID NO: 159630 - protein, 570 aa, Unknown
  Bacterial polypetide isolated from the Sargasso Sea
MRVSKYLLSTQKETPANAEVISHQLMLRAGMIRRNASGLYSYLPTGLRVLRKVEAIVREEMNKAGAIEILMPMVQPADLWVETGRWDKFGPELLRFKDRHNRDFVLGPTHEEVITDLIRKEVSSYKQLPLNLYQIQTKFRDEVRPRFGVMRSREFLMKDAYSFHLDVDTMNETYEAMYQAYSNILSRMGLAFRPVLADTGSIGGSMSHEFHVLAQSGEDLIAYSTGSDYAANIEKAESPMPTEARGAATEELRLVDTPNAKTIAELVEQFGLDITKTVKTLIVKGATEEAPLVALIVRGDHELNEIKADKLDLVASPLEFAPEALIRDAIGAGPGSLGPVGLNMPIIIDHSVSVMSDFAAGANQDDKHYFGINWERDLPLAQAADIRNVVEGEPTPDGLGTYAMARGIEVGHIFQLGTNYSKSMNATVLDENGKSQVLLMGCYGVGVSRIVAAAIEQNFDDRGIVWPEAIAPFSVGILPMNMHKSHRVTDIAEQLYKDLSAAGIDVLLDDRKERPGVMFADMELIGIPHTVVIGDRNIDAGVFEYKNRRTGEKQDVPFDQIVDFLKNLQA

SEQ ID NO: 159631 - protein, 378 aa, Unknown
  Bacterial polypetide isolated from the Sargasso Sea
MLFSKLLIPTLKDAPQEAEVISHKLMLRAGMIRKVASGIYTWLPLGLKVLKKIENIVREEMDSSGAQEVFMPMVQPKELWDETKRWEKMGPELLRIKDRHERDFCLGPTHEEVITDIIRDNVKSYKELPLNIYQIQTKFRDEVRPRYGIMRGREFLMKDSYSFNIDEESLQETYLLMRDTYKKVLERIGLEYKISAADSGAIGGDSSEEFHVLAENGEDTIAVSDSSEFAINTELLLKEGEDINSLEGKPSPDGNGTIQIKKGIEVGHIFKLGKLYAESMKANVLNAEGKASTLYMGCYGIGVSRLVAAAIEQNFDDKGIIWPHSIAPFDINIIAIGFDKDKEIASASIKLYEELTDMGYDVLLDDRKGRLWCKNERF

SEQ ID NO: 159632 - protein, 426 aa, Unknown
  Bacterial polypetide isolated from the Sargasso Sea
MLFSKLLIPTLKEAPQEAEIVSHKLMLRAGMIRKVASGIYTWLPLGLKVLKKIENIVREEMDASGAQEVFMPMVQPRELWEETNRWEKMGPELLRIKDRHDRDFCLGPTHEEVITDIIRDNVKSYKELPLNIYQIQTKFRDEVRPRYGIMRGREFLMKDSYSFNNDEESLQETYLLMRETYKKILERIGLDYKISAADSGAIGGDSSEEFHVLAENGEDTIAVSDASEFAINTELLLKDGEDIKSLEGKPSPDGKGIIQIKKGIEVGHIFKLGKLYAESMKANVLNSDGKAQVLCMGCYGIGVSRLVAASIEQNYDEKGIVWPHSIAPFDINIISIGHDKNKDIEKASMKLYKDLTKMNYSVLLDDRKDGYGKKIKDSELIGIPLNIIVGNKYLENEEVELLARNGESSINPVSDLKTILDFFKTK

SEQ ID NO: 159633 - protein, 570 aa, Unknown
  Bacterial polypetide isolated from the Sargasso Sea
MRVSKYLLSTQKETPANAEVISHQLMLRAGMIRRNASGLYSYLPTGLRVLRKVEAIVREEMNKAGAIEILMPMVQPADLWVETGRWDKFGPELLRFKDRHSRDFVLGPTHEEVITDLIRKEVSSYKQLPLNLYQIQTKFRDEVRPRFGVMRSREFLMKDAYSFHLDVDTMNETYEAMYQAYSNILSRMGLAFRPVLADTGSIGGSMSHEFHVLAQSGEDLIAYSTGSDYAANIEKAESPMPTETRGAATEALRLVDTPNAKTIAELVEQFGLDITKTVKTLIVKGATEAAPLVALIVRGDHELNEIKADKLDLVASPLEFAPEALIRDAIGAGPGSLGPVGLNMPIIIDHSVSVMSDFAAGANVDDKHYFGINWERDLPLAQAADIRNVVEGEPTPDGLGTYAMARGIEVGHIFQLGTNYSKSMNATVLDENGKSQVLLMGCYGVGVSRIVAAAIEQNFDDRGIVWPEAIAPFSVGILPMNMHKSHRVTDIAEQLYKDLSAAGIDVLLDDRKERPGVMFADMELIGIPHTVVIGDRNIDAGVFEYKNRRTGEKQDVPFDQIVDFLKNLQA

SEQ ID NO: 159634 - protein, 426 aa, Unknown
  Bacterial polypetide isolated from the Sargasso Sea
MLFSKLLIPTLKDAPQEAEVISHKLMLRAGMIRKVASGIYTWLPLGLKVLKKIENIVREEMDASGAQEVFMPMVQPKELWDETKRWEKMGPELLRIQDRHERDFCLGPTHEEVITDIIRDNVKSYKELPLNIYQIQTKFRDEVRPRYGIMRGREFLMKDSYSFNIDEESLQETYLLMRDTYKKVLERIGLEYKISAADSGAIGGDSSEEFHVLAENGEDTIAVSDSSEFAINTELLLKEGEDINSLEGKPSPDGNGTIQIKKGIEVGHIFKLGKLYAESMKANVLNAEGKASTLHMGCYGIGVSRLVAAAIEQNFDEKGIIWPHSIAPFDINIIAIGFDKDKEIASVSLKLYEELTSMNYDVLLDDRKDGYGAKMKDSELIGIPLNIIIGKKFLENKEIELKGRDGQSSTNSITDIKTILEFFKDK

SEQ ID NO: 159635 - protein, 426 aa, Unknown
  Bacterial polypetide isolated from the Sargasso Sea
MLFTKLLIPTLKDAPQEAEIVSHQLMLRAGMIRKVASGIYTWLPLGLKVLKKIETIVREEMDASGAQEVFMPMVQPRELWEETNRWEKMGPELLRIKDRHERDFCLGPTHEEVITDIIRDNVKSYKELPLNIYQIQTKFRDEVRPRYGIMRGREFLMKDSYSFNIDEESLQETYILMRETYKKVLERIGLEYKISSADSGSIGGDSSEEFHVLAENGEDTIAVSDSSEFAINTELLLKDGEDISSLEGKPSPDGKGTIQIKKGIEVGHIFKLGKLYAESMKANVLNSDGEASTLYMGCYGIGVSRLVAAAIEQNFDDKGIIWPHSIAPFDINIISIGHDKDKEIASASIDLYKELIKMGYSVLLDDRKDGYGTKIKDSELIGIPLNIIVGKNYLENKEVELKGRDGESSTNPITDIKTILDFFKNK

SEQ ID NO: 159636 - protein, 321 aa, Unknown
  Bacterial polypetide isolated from the Sargasso Sea
VREEMNNAGAHEVLMPMVQPKDLWNESKRWDKFGPELLRFKDRHDRDFCLGPTHEEVITDLIKNNVKSYKELPLNIYQIQTKFRDEIRPRYGVMRSREFLMKDSYSFHLSEESLEETYQIMRNAYSKIFERIGLDFKIVKADSGAIGGDKSEEFHVLAENGEDTLAVSDKSDYAVNAELLLENGQDSKSLVGQESPDGNGLLEITKGIEVGHIFQLGKLYSENMNATVLDDSGKAKNMHMGCYGIGISRIVAAAIEQNFDDKGIIWPKSISPFDLNIITIGADKDKTIEASSRKLYKELTQKGVEVVLDDRDDGFGKKIKD

SEQ ID NO: 159637 - protein, 270 aa, Unknown
  Bacterial polypetide isolated from the Sargasso Sea
MPQLHPAELWERSGRWQGYTAGEGIMFHLEDRQGRELGLGPTHEEVITSLAGELLRSYKQLPVNLYQIQTKFRDEIRPRFGLMRGREFIMKDAYSFHADESDLKATYAVMDQAYRRIFERCGLDAVPVDADSGAIGGAASQEFMVTAEAGEDLVLISDDGVYAANQEKAVSLASTAVPLDTTEAALPTGGLLIDTPGQVTIADLCAAQGWHPSQVVKVLLLLAHLEDGTDQPVLVSLRGDQELNDVKLINAISRLSEQGVLDCRPISSEA

SEQ ID NO: 159638 - protein, 295 aa, Unknown
  Bacterial polypetide isolated from the Sargasso Sea
LRFKDRHDRDFCLGPTHEEVITDLIKNNVKSYKELPLNIYQIQTKFRDEIRPRYGVMRSREFLMKDSYSFHLSEESLEETYQIMRNAYSKIFERIGLDFKIVKADSGAIGGDKSEEFHVLAENGEDTLAVSDKSDYAVNAELLLENGQDSKSLVGQESPDGNGLLEITKGIEVGHIFQLGKLYSENMNATVLDDSGKAKNMHMGCYGIGISRIVAAAIEQNFDDKGIIWPKSISPFDLNIITIGADKDKNIEASSRKLYKELTKKGFELILDDRDDGFGKKIKDSELIGVPVSIV

SEQ ID NO: 159639 - protein, 254 aa, Unknown
  Bacterial polypetide isolated from the Sargasso Sea
RDEIRPRFGLMRSREFIMKDAYSFHSSKEDLSSFYEKMEKAYENIFKNCGLDTVGVDADSGAIGGAASKEFMVTADAGEDSILFTESGSYAANIEKAVSLPSEEIPLIMSHEEWIETPNQKSIVDICQNNNLDASQIIKVVIFLAKFEDKSEVPILACIRGDQNINEVKLFNLINKKYISNLIHLKIVEDNAIINKNLTNFPLGFIGPDINDETIKTNSSWDKSWIRIADYSASNLSIFVSGGNKVDFHKVFRA

SEQ ID NO: 159640 - protein, 286 aa, Unknown
  Bacterial polypetide isolated from the Sargasso Sea
KSYKSLPQILYHIQWKFRDEIRPRFGVMRCKEFFMKDAYSFDLTDDDARKSYNKMFFSYLKTFSRLGLKAIPMAADTGPIGGDLSHEFIILAETGESQIFADKRIFEINLDKYDFSDSSLFKMRKDFTDIYAATDEKFDEKKFNKEVDKKNQIKTKGIEVGHIFYFGDKYSKPMNCLIDDKSGKKISVKMGSYGIGVSRLVGAAIEANYSNGIMKWPKPISPFDVVIIPSISKNSKEHLQKAEKIYQDLKKQNIDVLLDDVDENMSNKFKKHDLIGIPFQIIIGSK

SEQ ID NO: 159641 - protein, 304 aa, Unknown
  Bacterial polypetide isolated from the Sargasso Sea
MRASKYPLFTQKNDLSDADIVSHKLMIRGGFIRQQSSGQYTLMPMGIRVLKKIEKIIRRQMENIGCLEVLMPSVQPAELWIQSGRWDNYGPELLRLQDRHKRDYCLGPTFEEVITDLIKKDLNSYKQLPINLFQISSKFRDEIRPRFGLMRAREFIMKDAYSFHLNRECLDETYLKYKSAYKNIFDEIGLEYTIVDADSGNIGGSESHEFHVLADTGEDDLLIDETGKGVNLEIAKSKYDSDDVAKIKETNNLIHKKGIEVGHIFKLGTKYSQSMDLSILDAESKKQTIEMGCYGIGVSRIMSA

SEQ ID NO: 159642 - protein, 284 aa, Unknown
  Bacterial polypetide isolated from the Sargasso Sea
MKASKYPLFTQKNIPSDAEIISHKLMLKAGLARQQSSGQYSFLPVGYRVLKKIENIIREEMDAIGSAEILMPSVQPSELWEESGRWETYGLELLRLKDRHQRDYCLGPTFEEVITDLVRKDLNSYKQLPINMYQISSKFRDEIRPRFGIMRAREFIMKDAYSFHLNQECLDEWYENYKKAYNKIFTRLQLEYTMVDADSGNIGGNKSNEFHVIADTGEDDLLIDQDGIGVNYEIAKTKYNSDDIKKIIKENNLVHKKGIEVGHIFKLGDKYSKSMNLSMPMQDQ

SEQ ID NO: 159643 - protein, 281 aa, Unknown
  Bacterial polypetide isolated from the Sargasso Sea
PMVQPKDLWNESKRWDKFGPELLRFKDRHDRDFCLGPTHEEVITDLIKNNVKSYKELPLNIYQIQTKFRDEIRPRYGVMRSREFLMKDSYSFHLSEESLEETYQIMRDAYSKIFERIGLDFKIVKADSGAIGGDKSEEFHVLAENGEDTLAVSDKSDYAVNAELLLENGQDSKSLVGQESPDGNGLLEITKGIEVGHIFQLGKLYSENMNATVLDDSGKAKNMHMGCYGIGISRIVAAAIEQNFDDKGIIWPKSISPFDLNIITIGADKDKNMKHHPENFI

SEQ ID NO: 159644 - protein, 278 aa, Unknown
  Bacterial polypetide isolated from the Sargasso Sea
EIKSYKNLPITIYQIQPKFRDEIRPRFGVMRAREFIMKDAYSFDIDENSADLSYKKMFEAYNRIFERCGLEFRAVEADSGNIGGSFSHEFMVLAETGEDLIMVCDECDYASNIETTPVVFTQDDLNQKKHEKNSGAGREMPENKIEKVSTPSCITVEEVSDFLKIKINKIVKTMILSTNQGIEAVLIRGDHELSLTKYKKNRDLEFADLATNEEISKINTVKGFSGPVNLDINIFADNELRNMTSYVTGSNEKDFHLLNVNHEKDFKIKGFLDCRQSV

SEQ ID NO: 159645 - protein, 251 aa, Unknown
  Bacterial polypetide isolated from the Sargasso Sea
MNEEIIVYFSKFFVPTTREDPSDADLISHKQMIKSGMIKKTAAGIYNWLPLGLMIMRNVEQIVRKNMDQSGAQEILMPMVQPAELWKESLRYDQYGKELLKFSDRSEREFVLGPTHEEVICEIFRSYPISYKELPINLYQIQTKFRDEIRPRFGVMRAREFLMKDAYSFDISQSGLQKSYEEMRKAYIRIFDDIGLNYRIVSADGGNIGGDKSEEFHIIADSGEDLLALSDESEFAANVEILDYGKDPIEL

SEQ ID NO: 159646 - protein, 275 aa, Unknown
  Bacterial polypetide isolated from the Sargasso Sea
LYTFLPAGLRVLQNIEAIVRQEIDRAGALEVLMPAVQPPEIWKTSGRYEQAHDVLFKVRDSKQREWLLGPTHEEVITTMASTEINSYRQLPLNFYQVQTKFRDEIRPRFGLMRAREFIMKDAYSFDANDETALVSYQKMYDAYVRIFQRCGVQAFPVEADTGVMGGNYSHEFMVPAQTGESEVAYTEDGSYSANLEKAASQGPATTTPTECTGEAETFGTPGVKTIEDLEQNPFNVPAHQQIKTLVYIAEDKPALVLLRGDDTLNEAKLTGALGT

SEQ ID NO: 159647 - protein, 272 aa, Unknown
  Bacterial polypetide isolated from the Sargasso Sea
REFIMKDAYSFHADKNCLDKTYDSYKKAYSNIFKRLGLNFTLVSADSGNIGGDESHEYHVIADTGEDDLLISDSGHGMNVEIAKEKYSLENLDDLIDKTSMKHKKGIEVGHIFKLGQKYTKSMDSKITNENGTMNNIFMGCYGIGVTRIVAAAIEQNHDDSGIIWPTTISPFKCVIIEIDASKNSTVKNQSDILYNILKDKNIDVIVDNRDVGFGIKMKDWELIGIPHFFIIGKNEAEKNIVTHKLRTLPNKNSLQIEDMEMFIEKNILHEV

SEQ ID NO: 159648 - protein, 300 aa, Unknown
  Bacterial polypetide isolated from the Sargasso Sea
KNNPSDAEIISHKLMLKAGLARQQSSGQYSLLPVGYRVLKKIENIIREEMNAIGSAEILMPSVQPSELWEESGRWETYGLELLRLKDRHQRDYCLGPTFEEVITDLVRKDLNSYKQLPINMYQISSKFRDEIRPRFGIMRAREFIMKDAYSFHLNQECLDEWYENYKKAYNKIFTRLQLEYTMVDADSGNIGGSKSNEFHVIADAGEDDLLIDQDGIGVNYEIAKKKYNSDDIKKIIKENNLVHKKGIEVGHIFKLGDKYSKSMNLSIADAESKICNIEMGCYGIGVSRIIAAAIEQNHD

SEQ ID NO: 159649 - protein, 243 aa, Unknown
  Bacterial polypetide isolated from the Sargasso Sea
MKLSNYLIATLKEAPSDAETTSHQLMVRAGMIRKIAAGIYNFLPTGLRVFRKVENIIRDEMNKAGAIEVMMPFVTPADLWQKSGRWDIYGKELLRLNDRAERDFCLGPTHEEVVTDLVDREVKSYKNLPVTIYQIQPKFRDEIRPRFGVMRAREFTMKDAYSFDVDEMQAERSYLNMFDAYKRIFDRCGLTYKAVEADSGNIGGSFSHEFMVLAETGEDLVLSCDSCDFAANVETTSVRVRER

SEQ ID NO: 159650 - protein, 278 aa, Unknown
  Bacterial polypetide isolated from the Sargasso Sea
EREFCLGPTHEEIITDLIRNNVKSYKELPLNIYQIQTKFRDEIRPRYGVMRSREFLMKDSYSFHLTEECLSDTYSIMKNAYKNALDRIGLKYKIVKADSGAIGGDKSEEFHVLAENGEDTLAASDSSDYAVNAELLLEDGQNASMLVGKESPDGKGILEVKKGIEVGHIFQLGKLYSENMNATVLDETGKAKNMFMGCYGIGISRIVAAAIEQNNDEKGIIWPKTIAPFDINLITIGADKDSNIEKTSKKIYHELREKGFEVILDDRDDGLGKKSKMQ

SEQ ID NO: 159651 - protein, 178 aa, Unknown
  Bacterial polypetide isolated from the Sargasso Sea
MRLSQTIIATQRHDPADAEVPSHRLLVRAGYIQKIAAGLYVYSPLMWRTLQKVSAIVREEMNREGSYEILMPILQPKEMWEESGRWARYIADGIMFHLQDKRDASLCLGPTHEEVVTTYVKKAIQSHKQLPVNVFQIQDKFRDEIRPRFGLMRGREFIMKDAYSFDVDEAGLDKSYEG

SEQ ID NO: 159652 - protein, 241 aa, Unknown
  Bacterial polypetide isolated from the Sargasso Sea
KFRDEIRPRFGVMRCKEFYMKDAYSFDLTGEDAKKSYNKMFFSYLKTFRRLGLKAIPMAADTGPIGGDLSHEFVILAETGESQIFADKRIFEIDLNKYDFTDESLSKVRKDFTSFYAVTDEKFSEKKFNEQVDNKNQIKTKGIEVGHIFYFGDKYSKPMNCLIDDKSGKKISVKMGSYGIGVSRLVGAAIEANYNDDVMKWPKPISPFDVVILPSINKNNNENLQKAEKIYKELKKQNVDV

SEQ ID NO: 159653 - protein, 418 aa, Unknown
  Bacterial polypetide isolated from the Sargasso Sea
MKTSSYHYKTLKDSPSDAELISHKLMLRSSMIKLNASGIYTWLPLGLRSLKKVENIVRRNMDEAGAQEMLMPMVQPSDLWEESKRLSEYGPELLRFEDRNDRSFVLGPTHEEIITDIARKTLNSPKDLPANYYQIQTKFRDEIRPRFGVMRSREFLMKDAYSFDIDEKGMKGSYELMRDAYQKIFNEIGFDYRIVSADSGAIGGSTSEEFHVLADSGEDKIIFSEDEFFASNLELFEEKSEQEIIDQLHKKDGKKYSIKRGIEVGHIFQLGDKYSKSLSLSIQTKEGNVNPLMGCYGIGISRIIAASIEQNYDEDGIIFPRSIAPFEAIIIIIGDNKNLLNEAEFIQKDLTKIGIDTIIDDRNDSPGKKFKDADLTGIPFQLIISEKNQKENLLELKIRHERTSLKENKKNILTRLKP

SEQ ID NO: 159654 - protein, 289 aa, Unknown
  Bacterial polypetide isolated from the Sargasso Sea
MRVSRLMLVTLRDVPAEAEIKSHQLLLRGGFIRRVGSGIYAYLPMMWKVLQRITTIIREEMNRAGALETLLPQLHPSELWQRSGRWQGYTAGEGIMFHLEDRQGRELGLGPTHEEVITSLAGELLRSYRQLPVNLYQVQTKFRDEIRPRFGLMRGREFIMKDAYSFHADEADLQATYAVMDRAYKRIFERCGLEAVPVDADSGAIGGAASQEFMVTAEAGEDLLLISDDGAYAANQEKAVSLPDEVTPLSPASLSCLETPGQTSIDSLCSAQGWQPGQLLKVLLLLAVL

SEQ ID NO: 159655 - protein, 418 aa, Unknown
  Bacterial polypetide isolated from the Sargasso Sea
MKASKYPLFTQKNEPSDAEIISHKLMIKAGLVRQQSSGQYNFLPIGLRILKKIENIIRQEMNAIGSAEILMPSIQPRELWHESGRWDDYGPELLRLTDRHDREYCVGPTFEEVITDLIRKELNSYKQLPINLYQISSKFRDEIRPRFGIMRAREFIMKDAYSFHLDTSCLDEWYEIYKEAYNKIFMRLQLEYTMVDADSGNIGGSKSNEFHVIANTGEDDLLIDKDGVGINFEIAKERYKTDNIEKIRNENSLIHKKGIEVGHIFKLGDKYSKSMNLSIADSENNNHYLQMGCYGIGVSRIIAAAIEQNYDTNGIIWPKSISPFDVVIIEIDGDKNEEVRKYSESIYEMLINRDMDVILDDRNAKLGNKLHDWELIGVPQFIIIGRSEAQNNEVTYKKRGAAEKDTLKHDELYNVLKS

SEQ ID NO: 159656 - protein, 426 aa, Unknown
  Bacterial polypetide isolated from the Sargasso Sea
MLFSKLLLPTLKDAPQEAEVVSHKLMLRSGMIRKVASGIYTWLPLGLKVLKKVENIVREEMDNSGAQEVFMPMVQPRKLWEETKRWEKMGPELLRIKDRHDRDFCLGPTHEEVITDIIRDNVKSYRELPLNIYQIQTKFRDEVRPRYGIMRGREFLMKDSYSFNIDEESLQETYLIMRETYKKVLERIGLEYKISAADSGAIGGDSSEEFHVLAENGEDTIAISDSSEFAINTELLLKDGEDISTLEGKPSPDGNGTIQIKKGIEVGHIFKLGKLYAESMKASVLNSDGNASTLFMGCYGIGVSRLVAAAIEQNHDEKGIVWPHSIAPFDINIISIGYDKNKDIAKASTDLYKELSEMNYSVLLDDRKDGYGVKIKDSELIGIPLNIVIGKKFTEDNEVELIGRNGETSTNPITEIKTILDFFKNK

SEQ ID NO: 159657 - protein, 425 aa, Unknown
  Bacterial polypetide isolated from the Sargasso Sea
MKASHLILGTQRENPADAEIISHQLMIRAGLVRQVSSGIYNWLPIGKKVLQKVENIIRKEMNIAGAQEILMPMVQPASLWEESGRIDQYGQELLVFLDRHENKFCLGPTHEEIITDLCKNLLTSYKQLPVTLYQIQTKFRDEIRPRFGVMRSREFLMKDAYSFDLDKESLDQSYSVMKEAYKKIFDSLGLDYRIVKADSGAIGGSDSEEFHVLADSGEDLLAFSDKSEYAINAELLTELQDGQDPYSLEGKPSPDGKGLLKLKKGIEVGHIFKLGRKYSEILNLRIQGENNDIHPEMGCYGIGASRIVAAAIEQNHDEKGIIWPKALTPFEVALVEVNPKKKDEIKEKSSEIYNLLKENDIDVLWDDREKRPGVKFTDMEVTGIPLTIIIGERTLETGEIEIKKRQDEKPQLVSHQNLISTVKTN

SEQ ID NO: 159658 - protein, 429 aa, Unknown
  Bacterial polypetide isolated from the Sargasso Sea
MIEEIIVYFSKFFVPTTKQEPSDAELASHKLMLRSGMIKKTAAGIYNWLPIGLRVLKKVENIVRNSMNAFGAQEILMPMVQPAELWKESERHDEYGKELLKFQDRSERDFVLGPTHEEVICDIFRSYPISYKELPVNLYQIQTKFRDEIRPRFGVMRSREFVMKDAYSFDINEDGLIESYENMKKAYIDAFNKIGLDYRIVKADAGVIGGDVSEEFHIVADSGEDLIAISDSSDFAANVEVLDYSKDPSELNGQKSPDGEGKLQVKRGIEVGHIFQLGKKYSEKMKVSLKNEKGKEQDLYMGCYGIGISRIVAASIEQNHDDKGIIWPYSIAPFHLNIICLDPSKKEILEECESVYNILKKSGHDVLLDDRDIRAGIKFTEHEMLGIPFSIIIGPNNFNKNNYEFTVRKDNVKAELNIDEIKQKLEELK

SEQ ID NO: 159659 - protein, 422 aa, Unknown
  Bacterial polypetide isolated from the Sargasso Sea
MKAKNLFFPTLREDPSEAEVISHKLMIKSGLIRKVASGVYNWLPLGVKILRKVENIVREEMNSFGGQEVLMPMVQPGELWKETERWQKYGKELLVFQDRHEREFCLGPTHEEVITDLLRREVKSHKQLPMTLYQIQTKFRDEIRPRFGVMRSREFLMKDAYSFDLTKENLDLSYKNMKEAYVKIFDRLGLDYRVVKADTGEIGGSDSEEIHVLADTGEDLLVFSNESDFASNVELMLEEGQDPQSLKGKPSPDGKGTLELKKGIEVGHIFKLGTKYSESMNFKIQVENENKFLEMGCYGIGISRIVAAAIEQNNDEKGIIWPEALAPFNVCIIEVNPKNDQKVSNKCEELYKELSNQGFDVLWDNRDQGPGVKFSDMELIGIPNIVTISKKTIENNHFEFRTREEEQGAHLSLNELLTKIKG

SEQ ID NO: 159660 - protein, 421 aa, Unknown
  Bacterial polypetide isolated from the Sargasso Sea
MFWSNYFIPTLKDTASEDAQVISNSLMLKSGMIRKNASGIYTWLPLGLRVLNKVENIVREEMNNAGAHEVLMPMVQPKDLWNESKRWDKFGPELLRFKDRHDRDFCLGPTHEEVITDLIKNNVKSYKELPLNIYQIQTKFRDEIRPRYGVMRSREFLMKDSYSFHLSEESLEETYQIMRNAYSKIFERIGLDFKIVKADSGAIGGDKSEEFHVLAENGEDTLAVSDKSDYAVNAELLLEDGQDSKSLVGQESPDGNGLLEITKGIEVGHIFQLGKLYSENMNATVLDDSGKAKNMHMGCYGIGISRIVAAAIEQNFDDKGIIWPKSISPFDLNIITIGADKDKNIEASSRKLYKELTQKGFEVILDDRDDGFGKKIKDSELIGVPVSIVFGKNFTDHNKVEIIFRNGEKVASALNEVEEII

SEQ ID NO: 159661 - protein, 421 aa, Unknown
  Bacterial polypetide isolated from the Sargasso Sea
MFWSNYFIPTLKDTASEDAQVISNSLMLKSGMIRKNASGIYTWLPLGLRVLNKVENIVREEMNNAGAHEVLMPMVQPKDLWNESKRWDKFGPELLRFKDRHDRDFCLGPTHEEVITDLIKNNVKSYKELPLNIYQIQTKFRDEIRPRYGVMRSREFLMKDSYSFHLSEVSLEETYQIMRNAYSKIFERIGLDFKIVKADSGAIGGDKSEEFHVLAENGEDTLAVSDTSDYAVNAELLLEDGQDSKSLVGQKSPDGNGLLEITKGIEVGHIFQLGKLYSENMNATVLDDSGAAKNMHMGCYGIGISRIVAAAIEQNFDDKGIIWPKSISPFNLNIITIGADNDKNIEASSRKLYEDLTQKGFEVILDDRDDGFGKKIKDSELIGVPLSIVFGKNFTDNNEVEIIFRNGKKVASALNKIEELI

SEQ ID NO: 159662 - protein, 338 aa, Unknown
  Bacterial polypetide isolated from the Sargasso Sea
MIKAGMIRKLSSGQYSWLPIGLRIIKKVEEIIRCELNKIGCSEILMPSVQPAELWKESERWDQYGPELLRFTDRHKRDFCLGPTFEEVITDLIRRDVSSYKQLPINLFQISSKFRDEIRPRFGVMRAREFIMKDAYSFHETNECLNQTFEKYKEAYKNIFNNLMLDFTIVDADSGNIGGNESNEFHVIADTGEDDLLLDREMNGMNIEIAKQKYNEDNIDNLVKKTGLIHKKGIEVGHIFKLGQKYSEKMSAIITTKDSKSVNIFMGCYGIGVTRIVAAAIEQLHDEDGIIWPKSIAPFNSVIIEIDGNKNSSVRNHAQSVYELLNEKILIQSLMIET

SEQ ID NO: 159663 - protein, 428 aa, Unknown
  Bacterial polypetide isolated from the Sargasso Sea
MEIIVYFSKLFVPTVKEDPSDAELISHKLMVRSGMIKKTAAGIYSWLPLGLKVLKKVEEIVRKNLNNFDAEEILMPMVQPAELWKESGRYGEYGKELLKFDDRSNRGFVLGPTHEEIICEIFRSHPKSYKDLPVNLYQIQTKFRDEIRPRFGVMRSREFLMKDAYSFDIDEKGLVKSYGKMKDAYISIFDEIGLDYRIVKADSGNIGGDVSEEFHILADSGEDLIAVSDSSDFAANVEVLNYDKDPSELEGKKSPDGKGKLKIKRGIEVGHIFQLGQKYSQAMNVGVKDMNGNSIHPFMGCYGIGVSRIVAAAIEQNHDDRGIQWPDKITPFGVNIICLDPESDEIMKVCSEIYSILQKSGFDPLLDDRDIRAGIKFKEHELLGIPYSIIIGPNNFKNTKLEFGIRAQNEKIDMKLDDIKKYLGEKYD

SEQ ID NO: 159664 - protein, 380 aa, Unknown
  Bacterial polypetide isolated from the Sargasso Sea
MEVSMPIVQPAELWQESKRWSQMGPELLRIQDRHKRDFCLGPTHEEVITDLVRNDYSSYKQLPAILYQIQTKFRDERRPRFGVMRSREFIMKDAYSFHINQESLDESYKIMHKTYCNIFTRLGLNFRSVAADSGSIGGSISHEFHALADSGEDEIVFSKDGKYAANAELAGGNLRIPNQTEDKKDYQLVDTGTAVTIEEITNLLKVDSNKTVKTLLVHSEDEEGNVSDKLVALLLRGDQELNITKTEKLKGIFSPLKFASSQLIEKQIGASIGSLGPQNLDIYKFADLSVEGLCNFVCGANETGKHFINMNWSDNCSYNEVADIRKVKENDTSLLESSPLEIKRGIEVGHIFQLGTKYSDSMNASVLDKNGKATSIQMGC

SEQ ID NO: 159665 - protein, 425 aa, Unknown
  Bacterial polypetide isolated from the Sargasso Sea
MRVSDFPIFTLKDNPSDAEIVSHKLMIRAGLIRKISSGQYSWLPIGMRVLEKIQQIIRSELNNIGCMEISMPLVQPSELWRESGRWDKYGPELLRFKDRNDRDFCFGPTFEEVVTDLVRKDVSSYKQLPLNFFQITTKFRDEIRPRFGVMRAREFIMKDAYSFHADKSCLDKSYDSYKKAYENIFKRLGLNFTVVSADSGNIGGDESHEYHVIADTGEDDLLISDSGDGMNVEIAKEKYSLENLDELIDKTSMKHKKGIEVGHIFKLGQKYTKSMDTKITYENGTMNNIFMGCYGIGVTRIVAAAIEQNHDDSGIIWPTTISPFKCVIIEIDASKNNSVRNQSDLLYKMLRDKNVDVIVDNRDVGFGIKMKDWELIGIPHFFIVGKNEATKNIVTHKLRTMPNKNSLQIEDMEMFVEKNILHDMK

SEQ ID NO: 159666 - protein, 401 aa, Unknown
  Bacterial polypetide isolated from the Sargasso Sea
MKASQLIFATQREDPSDAEIVSHKLMIRAGLIRQVSAGIYNWLPTGKKVLHKVENIIREEMNNAGAQEILMPMVQPISLWEESGRRNQYGPELLIFQDRHDNDFCLGPTHEEVITDLCKNILTSYKQLPVTLYQIQTKFRDEIRPRFGVMRSREFVMKDAYSFDLNQEGLDLTYKNIREAYLKIFNRFGLDYRLVKADSGAIGGSDSEEFHVLADSGEDLLAFSDKSDYAINAELLVELQEDQDPTSLEGKDSPDGNGKLKLKRGIEAGHIFKLGTKYSESFNLKIQGDKENITPYMGCYGIGASRIVAAAIEQNHDEKGIIWPNSLSPYEVVIVEANPKGKEDIKAKCEDIYNLLLGNGVDVLWEDTDKRPGVKFADMELIGIPVMIIIGDKALKNNQLE

SEQ ID NO: 159667 - protein, 342 aa, Unknown
  Bacterial polypetide isolated from the Sargasso Sea
MPTIQPSELWQETNRWEDYGDLLLQIHDRHDRLFCYGPTHEEVITDILRKSVKSYKQLPVNFYQIQTKFRDEIRPRFGVMRAREFLMKDAYSFHLNQESLEEEYENMNQTYQSIFKKLELNFRRVEATSGEIGGSVSHEFHVIADSGEDEIAFCDDENFAANVETLEDKNAPKGGELTYARGIEVGHIFQLGDKYSKSMKLEVLDSNGKNVNPYMGCYGIGISRIVAAAIEQNHDEKGIIWPKAISPFEILIIVLNDKNDSSVLDQALKIYQELKSDGIDVLIDDRDERAGVKFADADLLGIPKQVIVGKRGIEKNIIEVTSRITGEKRDIKISEVASQLKD

SEQ ID NO: 159668 - protein, 189 aa, Unknown
  Bacterial polypetide isolated from the Sargasso Sea
MLASKTFIPKIKDIPQDAEIISHQLMLRSGMIRKVASGIYNWLPLGLIVLKKIENVVREELNNIGAQEIFMPMVQPKELWDESNRWGKFGPELLRIKDRHDRDFCLGPTHEEVITDLVKNNINSYKSLPLTLYQIQTKFRDEIRPRYGVMRGREFLMKDAYSFHMNAECLNQTYQDFRAAYKKILECLE

SEQ ID NO: 159669 - protein, 600 aa, Unknown
  Bacterial polypetide isolated from the Sargasso Sea
MRVTTSFPLGTLRDTPSEAEIISHQLLLKAGYIRRINSGIYAYMPIMLRVIEKISAIIERELNSIGCTKLLLPQLHPADLWRKSERWEGYTAGEGIMFNLKDRQGKQFGLAPTHEEVITSIASETINSYKQLPQCFYQIQTKFRDEIRPRFGLMRSREFIMKDGYSFHSSENDLASFYEKVGNAYENIFKSCGLETVGVEADSGAIGGASSKEFMVTADAGEDSILFTQSGSYAANIEKAVSLPSRPIPLKDNIAEWLETPHQKTILEVCDKNNLDPSQIIKVVIFLAQYEGEFNVPILACIRGDQHINEVKLFNLINKLHNFNLINLKKIEDKNTIEKNLVDLPLGFIGPDLDNKTIKSSSNWEKKWTRIIDHSASDLSKFISGGNKVNFHKVFQKFSFDSKDYLIGDIRNAKKGDKISNNDDEELKEKKGIEIGHIFQLGQKYSEKLNAKFSDKDGQLKNLWMGCYGIGVTRIAQAAIEQNHDQKGICWPIQICPFEVIIIPTNLKDPIQSDLTEHIYNNFLINKIDVLLDDRNDRAGVKFKDAELIGIPFQIIIGRDSINKEVELLCRTNNTKLKISTDKLLETFISESEIMYNKKS

SEQ ID NO: 159670 - protein, 412 aa, Unknown
  Bacterial polypetide isolated from the Sargasso Sea
MKLSNYPIKTFKDAPSDAELISHQLMLRTGLIKRLASGIFTWMPFGLKVLRKIEQTVREEMDNSGAFEVLMPTIQPSELWQETKRWDDYGDLLLQIRDRHERLFCYGPTHEEVITDILRKSVKSYKQLPVNFYQIQTKFRDEIRPRFGVMRAREFLMKDAYSFHLNQDSLEEEYEKMDQTYEKIFTKLELDFRKVQATSGEIGGSVSHEFHVIAESGEDKIAFCDDENFAANVETLESGNAPNGGELTYARGIEVGHIFQLGDKYSEAMKLEVLDSNGKNVNPYMGCYGIGISRIVAAAIEQNHDDKGIIWPSAISPFEILIIVLNDKDDSNVINQAMKIYQELRSDGIEVAIDDRDERAGVKFADADLLGVPTQVIVGKRGLEQKKLEITSRSTGEKREVKIDEIVNHLKN

SEQ ID NO: 159671 - protein, 343 aa, Unknown
  Bacterial polypetide isolated from the Sargasso Sea
MRTSQYLLATQKETPADAEVISHQLMLRAGMIRKLASGLYTWLPSGLRVLNKVANIVREEMNKAGAIEVLMPVVQPADLWEESGRWEEYGPELLRIKDRHQRDFVLGPTHEEVITALVRNEISSYKQLPLNLYQIQTKFRDEVRPRFGIMRGREFTMKDAYSFHLEDSCLEETYQKMYDAYCAIFSRMDLDFRAVIADSGSIGGNHSHEFHVLAASGEDDIAFSNESDYAANVEMADAVAPEKAVASGAAVETKDAKGKDFNAILKSVEAEASNAVKVVLVKAANEVDSKGEEVVADKWVALVLRADHELNDVKAEKLDGVCSPLVEASFDKQKISRCVTFVC

SEQ ID NO: 159672 - protein, 429 aa, Unknown
  Bacterial polypetide isolated from the Sargasso Sea
MIEEIIVYFSKFFVPTTKQEPSDAELASHKLMIRSGMIKKTAAGIYNWLPIGLRVLKKVENIVRNSMNAFGAQEILMPMVQPAELWKESERHDEYGKELLKFQDRSERDFVLGPTHEEVICDIFRSYPISYKELPINLYQIQTKFRDEIRPRFGVMRSREFVMKDAYSFDINEDGLIESYENMKKAYIDAFNKIGLDYRIVKADAGVIGGDVSEEFHIVADSGEDLIAISDSSDFAANVEVLDYSKDPSELNGQKSPDGVGKLQVKRGIEVGHIFQLGKKYSEKMKVSLKNEKGKEQDLYMGCYGIGISRIVAASIEQNHDDKGIIWPYSIAPFHLNIICLDPSKKEILEECESVYNILKKSGHDVLLDDRDIRAGIKFTEHEMLGIPFSIIIGPNNFNKNNYEFTVRKDNVKSELNIDEIKQKLEELK

SEQ ID NO: 159673 - protein, 539 aa, Unknown
  Bacterial polypetide isolated from the Sargasso Sea
ASGMYAWLPSGLRVLKKIENIVREEMNNAGAIEVSMPVVQPAELWQESGRWDDYGPELCRLTDRHNRPFVLGPTHEEVITSLVRYEVNSYKQLPLNLYQIQTKFRDEVRPRFGVMRGREFLMKDAYSFHIDKASLIETYERMHAAYCAAFTRMGLNFRPVQADTGSIGGTGSHEFQVLAESGEDLIAFSDTSDYAANIEMAEALAPAGERAAATAALTRVATPNVHTIDEVAAFLNVAPTAIAKTLLVLAEEDEHGKQAVIALVLRGDHELNEIKAEKLAGVANPLTFANDEQIKAAAGCDAGSIGPVGFAGRIIADRSAAHLADFVCGANETGFHLTGANWDRDIASYEVADLRNVVEGDPSPCGQGKLLLKRGIEVGHIFQLGTKYSEAMKASVLNEGGKSVTMEMGCYGIGVSRLVAAAIEQNNDQYGIIWPEAIAPFEVAIVPMNMHKSERVAEQAQQFYTELKAAGVDVLFDDRKERPGVMFADMELLGVPHAIVIGDRGLDNGVVEYKCRRTGEKQEVAISEIVALLKAKLGR

SEQ ID NO: 159674 - protein, 428 aa, Unknown
  Bacterial polypetide isolated from the Sargasso Sea
MFWSKIFLPTLKDSPQDAEVISHQLMLRAGMIRKVTSGIYTWLPLGLRVLKKIENIVREEMDASGAQEVLMPMVQPKELWEETKRWEKMGPELLRFQDRHDRDFCLGPTHEEVITDLVRNNVKSYKELPLNLYQIQTKFRDEIRPRYGVMRGREFLMKDSYSFNIDKDSLDESYLLMKETYKKIIERLGLEYKIVKADSGSIGGDASEEFHVLAENGEDTIAVSDSSEFAINTELLLGEGEDINSLQGKPSPDGTGTIEIRKGIEIGHIFQLGEIYADEMNANVLDHEGKSQTLFMGCYGIGVSRLVAASIEQNHDDKGIIWPEVIAPFEVNIIAIGFGKDKMIAQAAIDIYNKLSSMGYEVILDDRNDSFGTKMKDSELIGIPINIIIGKQYTEKNEIELRHRDGHSSIGMVDDIETIFEYFKKEES

SEQ ID NO: 159675 - protein, 252 aa, Unknown
  Bacterial polypetide isolated from the Sargasso Sea
MKASKLIFATQREDPSDAEIVSHKLMIRAGLIRQVSSGIYNWLPTGKKVLHKVENIIREEMNSAGAQEILMPMVQPVSLWEESGRIEQYGKELLVFKDRHDNEFCLGPTHEEVITDLCKNILTSYKQLPITLYQIQTKFRDEIRPRFGVMRSREFVMKDAYSFDLDQESLDLTYENIRAAYLNIFNRFGLDYRLVKADSGAIGGSDSEEFHVLADSGEDLLAFSDKSDYAINAELLIELQEEQDPASLEGPR

SEQ ID NO: 159676 - protein, 36 aa, Unknown
  Bacterial polypetide isolated from the Sargasso Sea
MRLTNTLTRRTEPFTPLTPGKASIYCCGVTVYDLCH

SEQ ID NO: 159677 - protein, 40 aa, Unknown
  Bacterial polypetide isolated from the Sargasso Sea
MDIFLTNNLNNKKEQFIPKDKKNIGMYVCGPTVYDDPHIG

SEQ ID NO: 159678 - protein, 183 aa, Unknown
  Bacterial polypetide isolated from the Sargasso Sea
YSPSVIRFFILQAHYRSVLDFSNEALLASEKGHKKLFESINLLQKLNHSKKTNGFNVNEWKNDCYSAMNDDFNTPILISEIFKVVKYINQVNDGLASIGKEDLKLVKHYSSYFLYDILGLENEFKSEIKYGDKLKETLDILIKIRSEARINKNFQLSDSIRDNLEKIGILLKDDKEGTNFTID

SEQ ID NO: 159679 - protein, 242 aa, Unknown
  Bacterial polypetide isolated from the Sargasso Sea
IAQSEAANGKKLANYWLHNGMVNVNGQKMSKSLKNFKTIRELINSGISPMTLRYFVMTVNYRKPLDFTEEALRSASEAWKNINVALSFMDLTKGTFKSIDKNESIEEEYKEKISFDLSQKKFQFSEALGNDLNTAGAIAIIYDLAKPLKNFLNQFQRVEGFEIDPNEKFFLLENFKTLEKLTEVLGLKKEVLVKESKITEEEISTLINERLKAKKEKDYTKADEIRNLLKEKGIELIDQSKE

SEQ ID NO: 159680 - protein, 37 aa, Unknown
  Bacterial polypetide isolated from the Sargasso Sea
MLIHLHVRIYACGPTVYNYAHIGNARMAVVNDLLVRV

SEQ ID NO: 159681 - protein, 122 aa, Unknown
  Bacterial polypetide isolated from the Sargasso Sea
MNCYKAMNDDFNTPLLIAELFNAIHYSNSVLMGKEKISKKDQNRLLNKTSVFFSEILGLNLLVDNKNLESDKLLGKTLDLLIKIRNKSRANRDFDTSDKIREELNKIGITLNDNEDETTYEY

SEQ ID NO: 159682 - protein, 52 aa, Unknown
  Bacterial polypetide isolated from the Sargasso Sea
MNKLHLTNSLTNKKEIFNPINKENVSLYVCGPTVYDNPHVGNARALVVFDLL

SEQ ID NO: 159683 - protein, 138 aa, Unknown
  Bacterial polypetide isolated from the Sargasso Sea
MSLKLYNSLSSKKEVFKSISDKKVKTYGCGPTVYNDPHIGNFRTFVFYDLLNRVLQLNGYETETAVNITDIDDKIIDRVNQENTSLKEITSKYELSFLELSKSLKILPNNHNPRATEYVEKMIEFISALINQDLAYEM

SEQ ID NO: 159684 - protein, 158 aa, Unknown
  Bacterial polypetide isolated from the Sargasso Sea
MIHLYNSLSKQKEEFIPLDPKHVKFYSCGPTVYNKIHIGNARAFLAADLLSKVLKGIYPKVTYVSNITDIDDKIIEASKHENLPIKDLTKKYFDIYMEDIGLIGINPPDIQPFATDFIDEMIAYIEKLIDLNKAYEANGNVLFRVNSFKIMDVYQVEK

SEQ ID NO: 159685 - protein, 138 aa, Unknown
  Bacterial polypetide isolated from the Sargasso Sea
SLQDLSYETDEHIPSEYSEKFHDAMQDDFNSPSAISVLFEMVKQINILKKEDQLTHANALASELISLSNILGILSENPEEYFTSGINLSDEDIEQAIERRNKARQEKDFELSDKIRDDLLKEGIILEDKGTKTIWKKS

SEQ ID NO: 159686 - protein, 118 aa, Unknown
  Bacterial polypetide isolated from the Sargasso Sea
MTIKFYNSLTNQKEDFVPIREGEVGLYVCGMTVYDNCHLGHARAMMAFDILARYLRYQNYKVNFIRNITDIDDKIIERANENKETIDALTDRTIASMQEDFSMLGLELPQMSLVQLTI

SEQ ID NO: 159687 - protein, 312 aa, Unknown
  Bacterial polypetide isolated from the Sargasso Sea
VTVALVERDHPGLIQDTHHNPLNAGFPNGTIKGEIDIDIDQVIGGAENIGNGWKMLMECLSAGRGVSLPATANASSKTATYGIYHYMKVREQFRMPLASMEAIQEKFMRMMYHTWVIQSSVEMTNDLLDEGHSPAVVSAIMKQQTTERGREVLNDAMDIHAGGAICLGRNNFLEAFYRSAPIGITVEGSNTLTRSLIIFGQGLNKSHPHIFPLLESILNDDISAFKKSFNALVGHSVSLYFRSFTLGKELDQEVVRFAALTNFVALKGGALKREQQLSGDMADMFSNLYLAVKCKYYQKKHNVSEVYTDYVV

SEQ ID NO: 159688 - protein, 119 aa, Unknown
  Bacterial polypetide isolated from the Sargasso Sea
MKIKLYNSNTKSKELFVPIDPKKVTMYVCGPTVYSYPHIGNARGPVIFDVLARLLRREFDLTYIRNITDLDDKIYQAADDEGVHISEVTQRYTRIYQEDMSALGVEKPRFRAIGYRAYS

SEQ ID NO: 159689 - protein, 123 aa, Unknown
  Bacterial polypetide isolated from the Sargasso Sea
VSDFRSTMDDDFNSAGALGVLFGFVTKVNTELDAKANVSATDRDLALGALRSMDRVLGLLEVAQASRVIDADLSSWVERMIEERAEARASRDFARADEIREELSAKNIVLEDSAEGTRWKVVN

SEQ ID NO: 159690 - protein, 179 aa, Unknown
  Bacterial polypetide isolated from the Sargasso Sea
LNENASEVLRFFLISSHYRSPLNYSDEGLKEAKNSLDRLYNSLQELSYETDEHIPTEYSGKFHDAMQDDFNSPLAISVLFEMVKEINILKKEGKLTEAGFLASELVSLSNILGILLDDPKNYFTSGIDLSNQDIEAAIEIRNKARKDKDFELSDKIRDDLLKKGITLEDKGTKTIWKKS

SEQ ID NO: 159691 - protein, 44 aa, Unknown
  Bacterial polypetide isolated from the Sargasso Sea
MNKQLNIFNTLSGQKEKFVPINKSKVGVYVCGPTVYDFSHIGNA

SEQ ID NO: 159692 - protein, 115 aa, Unknown
  Bacterial polypetide isolated from the Sargasso Sea
MIEIYDSFSRKYARLGPAKKINLYVCGITTSDYCHLGHAFSSIVFEVLDRFLSHQKFDVYRVQNFTDVDDKILNKSIEEGTSMKEVAEKYTKAFFEDMDALGIKRASIFPKQQKK

SEQ ID NO: 159693 - protein, 113 aa, Unknown
  Bacterial polypetide isolated from the Sargasso Sea
MTIKFYNSLTNQKEDFVPIREGEVGVYVCGMTVYDNCHLGHARAMMAFDILARYLRYQNYKVNFIRNITDIDDKIIERANENKETIDALTDRTIASMQEDFSMLGLELPQMSL

SEQ ID NO: 159694 - protein, 300 aa, Unknown
  Bacterial polypetide isolated from the Sargasso Sea
EKLMEQGLAYESNGSIYFEINKDPKYGELSNRDIDQMLGGARVDVRKEKRHPGDFALWKRAEPGHLMRWRDPFSGWGYPGWHTECVVMSIRYLGDEFDIHGGGMDLKFPHHECELSQARGLKKPFARKWIHTNMLTINGQKMSKSSGNFVTLPKLFENFDPTVIRYFIAASHYRSVVDFNENVFHSAENSLKRLHQTVKKLRELKPEGVKSSGKKFEEFSKRFCQSMDDDFSTPQALAALFDLNREANNLLSEKNPDPEAIADAEYLFSTLGGDVLGIIPESIQSNQSEQDINEIMAVMG

SEQ ID NO: 159695 - protein, 206 aa, Unknown
  Bacterial polypetide isolated from the Sargasso Sea
GKKFANYWVHNGFVTVEGNKMSKSDGNFVTVNELKDNFQGEAIRLAMISTHYRQPLNWTIANLEESKKTLDKWYSYLESFNEGELDVADNDSDIMEALLDDLNTPKAISILHQKFKNCESGNISLASNFLSAANMLGLLSEKPSEWLTWKQENMNINKAQVELLIAQRNEARVNKNFNKADEIRDELDKMGITLEDKGGETDWKVK

SEQ ID NO: 159696 - protein, 164 aa, Unknown
  Bacterial polypetide isolated from the Sargasso Sea
MEIYLYNTINKKKELFTPIRKGEVHLYTCGPTVYDFSHIGNFRTFIFEDLLKRWLLHIGYKVKHAMNITDVDDKTIKKSMQMNIHLEEVTNKYLSEFMSDINWLNIFPADYFPRATDYIPEMILMINKLIKNNMAYIDIDGSVYFDISSFPKYGQLANINIDDH

SEQ ID NO: 159697 - protein, 56 aa, Unknown
  Bacterial polypetide isolated from the Sargasso Sea
MGKDIFLTNSLGGKKEKFIPKNEKSIGMYVCGPTVYDDPHIGNARPLVVFDILYKI

SEQ ID NO: 159698 - protein, 54 aa, Unknown
  Bacterial polypetide isolated from the Sargasso Sea
MSLQLQNTLSGKKEIFKPVDPSHVRIYACGPTVYNYAHIGNARMAVVNDLLVRV

SEQ ID NO: 159699 - protein, 61 aa, Unknown
  Bacterial polypetide isolated from the Sargasso Sea
MNKDIFLTNSYGGKKEKFQPIDKNNVKMYVCGPTVYDDPHIGNARPLVVFDILFKVLKCKY

SEQ ID NO: 159700 - protein, 156 aa, Unknown
  Bacterial polypetide isolated from the Sargasso Sea
LLAAEKGYNKLNDAINILESFKDFSNKSDFDVKEWVNNCYKAMNDDFNTPILIANIFDAVKFINKVNQEKGNISKEDWEVLFRSINSFVFNVMGLQKSKRNNENSKINDVIDVLLELRNDARKNKNYELSDKIRDMLKNKGISINDSDKDSSFTID

SEQ ID NO: 159701 - protein, 210 aa, Unknown
  Bacterial polypetide isolated from the Sargasso Sea
AQSRCANDSKVFANYWLHNAFITMSNEKMAKSQGNILKIKDFRNNKSGQVLRMALMSAHYRQPLDWNDKLLEECENTISKWYNVYLNIKTKLKISDEILKPLLDDLNTPGYIANLHKLYEKAVKGSDEDKILFISACNFIGLLNENKEDWLKFKKNKVSISENEILIKINQRNEARVNKNYKEADKIRDELLDKGVLIEDKDGKTTWKFK

SEQ ID NO: 159702 - protein, 142 aa, Unknown
  Bacterial polypetide isolated from the Sargasso Sea
MYTALRGVEVDESTDLSYGGYLTRFEAAMNDDLNVPEAFSVLFDVARELNRQKDNVEEAGKLAAVLKGLGAILGILQSDPDTFLKGGEGNDDEAAEIEALIKQRNDARASKDWAAADAARDALNAKGVVLEDGPSGTTWRKA

SEQ ID NO: 159703 - protein, 60 aa, Unknown
  Bacterial polypetide isolated from the Sargasso Sea
MIRNLNFFNTLSNKKEKFFPMNNRKIGMYVCGPTVYDFPHIGNARPLVVFDVLFRLLKSL

SEQ ID NO: 159704 - protein, 56 aa, Unknown
  Bacterial polypetide isolated from the Sargasso Sea
MKSEAPFKIFNSLNGQKEEFNPCDSDHIKIYACGPTVYNYAHIGNARMAVVFDTFV

SEQ ID NO: 159705 - protein, 73 aa, Unknown
  Bacterial polypetide isolated from the Sargasso Sea
MPLQIHNSLSGKKEDFNPVHKGRVSIYVCGPTVYGDSHLGHAKAYISFDIILRYLRYSGLKTFYVQNITDVGH

SEQ ID NO: 159706 - protein, 164 aa, Unknown
  Bacterial polypetide isolated from the Sargasso Sea
MALRLFDTYTREIRPFEPLEPGSPVGLYACGPTVYHYAHIGNLRTYLFVDWLRRGLEVSGYEVNHVMNLTDVGHLTSDADTGADKMEEATRREGIDAWAIAERYTESFREDLTALNVIYPKTWCKATDHIEEQIEFVRDLEAKGFTYRTSDGIYFDSTRLHSYG

SEQ ID NO: 159707 - protein, 73 aa, Unknown
  Bacterial polypetide isolated from the Sargasso Sea
MHFVNIRHPLDQDDGMGLQIYNSLTRKKEVFEPLVPGRVGIYVCGMTVYDYCHLGHARVLVVFDMVVRALRAW

SEQ ID NO: 159708 - protein, 279 aa, Unknown
  Bacterial polypetide isolated from the Sargasso Sea
ETTTSINSLDYIEDYSDFGTLIEEVIEDHLVADSSVDLFLSGGIDSSLLAYITKKKLDKDIRHFSMTFENQSYDEKNLIMRVSDELNLNSKIFTFDNKNINNYVNEAIENMNSLVLDYSFVPTYLLSKKTSQFTKAVISGDGADELFGGYEWYRAVRFFNILPPSLLQIFKKIFNTLLIPSSNGKYMDSFTKLNYFFKYISTDPYIQTIIWQSADKNFSESKVQLISENISQYISNDLSQRDNLRNIDLNIFLYSNVLPKIDTASMKNSLEIRPPFLDE

SEQ ID NO: 159709 - protein, 146 aa, Unknown
  Bacterial polypetide isolated from the Sargasso Sea
ARNVWYTALKDVTPDSAELDWNEAHAQRFQAAMNDDFNTPVAVSVLFELATEVNRTRDPALARQLRLLAQVLGLLGREPRAYLQQAAGAAAQGALEPAAIEAKIAARVAAKQAKDYAAADRIRAELLEAGVALEDKPGGLTEWRRV

SEQ ID NO: 159710 - protein, 184 aa, Unknown
  Bacterial polypetide isolated from the Sargasso Sea
MDITFYNSLTKKLEPFEPIEPPVVKMYTCGPTVYDFAQIGNFRSFLFADVLNRFLTATGYEVRHVMNITDVGHMTDDTVADGSGEDKMAVAGRRLKEAKQSGEIAPDSVEDPDNPFEVARYYTKAFVEDAKRLGMRLGWEYGDNIIHATDHIAEMQTLISQLIDKDHAYVADDGVIYFDVQSFP

SEQ ID NO: 159711 - protein, 164 aa, Unknown
  Bacterial polypetide isolated from the Sargasso Sea
MKLYNTLNRKIEDFKPNDPTEVKVYVCGVTPYSSTHVGHALSYVVFDVLRRYLEYSGFNVHHVQNFTDVDDKIILKAQEEGISEDELTERYIQDFFATMDALNVLRATKYPRATQEIPDIIETINTLISNGYAYAAGSDVFFRVNESTNYGELSNRSTDDMISG

SEQ ID NO: 159712 - protein, 104 aa, Unknown
  Bacterial polypetide isolated from the Sargasso Sea
MVLKIHNTLSGTKEVFKPVDEKHVRVYACGPTVYNFAHIGNARMAVANDLLINVLRTQYNKVTYVSNITDIDDKIIDAAQELNEPINNLTTKYTKIYNEDMGYL

SEQ ID NO: 159713 - protein, 55 aa, Unknown
  Bacterial polypetide isolated from the Sargasso Sea
MDIFLTNNLTKKKEHFIPRDRNNLGMYVCGPTVYDDPHIGNARPLVIFDILYKLL

SEQ ID NO: 159714 - protein, 37 aa, Unknown
  Bacterial polypetide isolated from the Sargasso Sea
MIKIFNTFGKKLENFVPIDKNHVKIYVCGPTVYDRIH

SEQ ID NO: 159715 - protein, 161 aa, Unknown
  Bacterial polypetide isolated from the Sargasso Sea
MLKFYNSLTQKKEDFKPIEKGKVKLYTCGPTVYDYSHIGNFRTFLFEDLLKRVLTAFGYEVYHIMNITDVDDKTIKKANDENKDLKEVALRYTEAFKNDIRSLKINEADLYPNATGHIEEMIKIIKILIDKDFAYVSEDNSVFFKINKYPDYGNLVKISKS

SEQ ID NO: 159716 - protein, 147 aa, Unknown
  Bacterial polypetide isolated from the Sargasso Sea
MLRFYNSLTQKKEDFKPIEKGKVKLYTCGPTVYDYSHIGNFRTFLFEDLLKRVLTAFGYEVYHIMNITDVDDKTIKKANDENKDLKEVALRYTEAFKNDIRSLKINEADLYPNATDHIEEMVKIIKILIEKDFAYISEDNSVFFKIK

SEQ ID NO: 159717 - protein, 171 aa, Unknown
  Bacterial polypetide isolated from the Sargasso Sea
MTQLRLYNSLTNKKEDFLPIDDNHIKVYTCGPTVYNYSHIGNARPPIVSDILVKLLKQLYSKVTYVSNITDIDDKIIQASKEQGIPIKELTSKYEDIYNKNLSDLNIAQPDNQPRATDYIEEMISQIKELVDNGHGYVSDGHVLFSVETFPNYGILSGRDKDQQIAGSRVE

SEQ ID NO: 159718 - protein, 128 aa, Unknown
  Bacterial polypetide isolated from the Sargasso Sea
MNDILLYDSLSNQKKTFEPIDINNIRIYACGPTVYNFAHIGNARMAIVFDSFVRLFRAKYTNVTYVSNITDIDDKIIEAAKELNVSIDELTQKYTKIYNEDMSKLNVLPPDVQPKATEYVKEMVDFIQ

SEQ ID NO: 159719 - protein, 154 aa, Unknown
  Bacterial polypetide isolated from the Sargasso Sea
MSLKLQNTLSGKKEFFKPVNPDHVRIYACGPTVYNFAHIGNARMAVVNDLLVRVLKTQFKQVTYVSNITDIDDKIIEASKETGEDISVITNKYTEIYNNDMSALGVNLPDIQPRATDHIKEMIELIKRLIDENKAYEKEGHVLFHVPSFDNYGI

SEQ ID NO: 159720 - protein, 40 aa, Unknown
  Bacterial polypetide isolated from the Sargasso Sea
MDIFLTNNLTNKKEQFIPKNKSNIGMYVCGPTVYDDSSYW

SEQ ID NO: 159721 - protein, 68 aa, Unknown
  Bacterial polypetide isolated from the Sargasso Sea
MNNEIHIYNSLKNQIELFKPIKEGEIGIYVCGPTVYSSSHMGHARSAIVFDVIVRFLRQVGYRVNYVR

SEQ ID NO: 159722 - protein, 771 aa, Unknown
  Bacterial polypetide isolated from the Sargasso Sea
MNGFIFGFSATLLSAMLWPSLLPINSLPYLCLGALILFKKAPSLSGVLFAMCWLTGFCLVLSRQDLPLSQQPIQVRAEIISLVSQNSDWVSFDIIVDKPNLIFWPRAKLRLTWQSPEAVQVGQVWSFTLMPKTISSVLNQGCYNEQKQLISQHIVGKGRVIHAQLLTTHFSLRNHLISQLSPKLSTFAQGDILLALILGDKQLIPASKWQALRQTGTGHLVAISGLHLSVITAWVYVCTLFLLSRLAAHPSRRNLVIALLLAGGSALFYSYLAGFAVSTQRALVMILLIMLLSLLRRYSSAWDRLLFALFIVLLLDPLACLSAGFWLSFCALAIILYTLASVPRIQPVEGNATFRAKARLAQFWSIQWRLSLVLGLVQAVFFGGLSVHSLWMNMLVVPWFSLIVIPLSMLAFILWWVGTFLGQEWFGLFHLADLTLLPYGKLLELSGDLPAHWHSVSETLLGASLCALLALILWRYLPHHSRYWLWHLPLALLFIPFILVIFPRVTESSSPQWTLHLLDVGQGLAVVIEQDKRALIYDTGAAFGKDFSYSERVIIPFLNSKGLAQVDYIVVSHGDNDHAGGAEVLAKAYPRANWITDVAHLAGMPCVPQQIHWQQLTLNFISPQTAKGGNNASCVLRIDDGAHSLLLSGDIEKETEAVLIEQALKGTELKSQVLIAPHHGSRTSSTPAFIDSVAPELVLFPAGLNNRYGFPKPDVVARYQARDIHYLTTGREGQISVSFAAGRLEVKTYRRDLAPFWYNRLFRFGDLINPE

SEQ ID NO: 159723 - protein, 769 aa, Unknown
  Bacterial polypetide isolated from the Sargasso Sea
MFGFSATLLSAMLWPSLPPITYLPYFCFGALILFKKAPSLSGTLFAMFWLTGFCLVLSRQDLPLSQKPIQVRGEIISLVSQNSDWVSFDIVVDKPNLIFGPTAKLRLTWQSEATLQVGQVWDFTFMPKSISSVLNQGGYNEQKQLISQHIVGKGRVMHARLQAERFSLRHHLITRLAPKLSALTQGDILLALILGDKQLISQTKWQALRQTGTGHLVAISGLHLSVITAWVYACALFFLTRLAPHPSRRNIVIALIFAGVSALFYSYLAGFAVSTQRALVMILLVMLLSLLRRYSSAWDRLLFALFVVLLIDPLACLSAGFWLSFCALAIILYTLESAKFTQSVDSKTTFLAKSRVRVIQFWSIQWRLSLILGLLQAIFFGGVSIHSLWMNMLVVPWFSLIVIPLSMLAFIIWWLGTFLGQSWLGLFNLADLALLPYGKLLELSVDLPVHWHVVSETLLAGGLCTLFALILWRYVPHRRQYWHWHLLIGLLFLPLALSVFQRITASKTTQWTLHLLDVGQGLAVVVEKDDRALIYDTGAAFGDDFSYSDRVVIPFLNTRGLTDIDFIVISHGDNDHAGGAQVLAKAYPQAKWITDVDHLNAQPCLPQQIDWQQLTLRFISPQTQAGGNNASCVLRIDDGQQSLLLSGDIEKETESILIERVQAGFILKSQVLIAPHHGSRTSSTLAFIEKVAPELVLFPAGLNNRYGFPKADVVARYQALQINHLTTGIEGQISVTFEQGRLDVKTYRQDLAPFWYNRLFRFGDLINPE

SEQ ID NO: 159724 - protein, 42 aa, Unknown
  Bacterial polypetide isolated from the Sargasso Sea
MIKIFNTFGKKLENFVPIDKNHVKIYVCGPTVYDRIHIGNAR

SEQ ID NO: 159725 - protein, 40 aa, Unknown
  Bacterial polypetide isolated from the Sargasso Sea
MTLRFFNTLSSSLEPFEPLVPGKASIYCCGVTVYDLCHLG

SEQ ID NO: 159726 - protein, 233 aa, Unknown
  Bacterial polypetide isolated from the Sargasso Sea
KFPHHDCEISQARGLGKPFANYWMHNNMLTIDGQKMSKSTGNFVTLIDAFEQHDPFAVRYFIASSHYRSVVDYSENALKTAGASLKRLHQTVRTLRERKPADQKPSGTWFQEIHQRFESAMDDDFSTPQAFAALFDLNREVNSMLASEDPNPEAMADAESLFSVFGGKVLGIIPEKIESGESDQRLNDVMQVMIDLRNQFREEKNFQGADMIRDRLAEAGIQLKDSREGTNWE

SEQ ID NO: 159727 - protein, 106 aa, Unknown
  Bacterial polypetide isolated from the Sargasso Sea
MAEDIFLTNSLDGKKIKFVPKNEKSIGMYVCGPTVYDDPHIGNARPLVVFDILFKILKKKYGFHSVKYIRNITDIDDKIIKASNEKKISIKDLTLNITESFHDDCK

SEQ ID NO: 159728 - protein, 145 aa, Unknown
  Bacterial polypetide isolated from the Sargasso Sea
MNEIYLYDSLSNKKRKFEPIDQNHVRIYACGPTVYNYAHIGNARMAVVFDSFVRLFRNKYPNVTYVSNITDIDDKIIEAANESNIPINELTKKYTDIYNADMSNLNVFPPDIQPKATEYVVDMVNFIDKLIQNDKAYEKDGHVFF

SEQ ID NO: 159729 - protein, 59 aa, Unknown
  Bacterial polypetide isolated from the Sargasso Sea
MNKQLNIFNTLSGKKEKFIPINTGKVGMYVCGPTVYDFPHIGNARPLVVFDVLFRLLKK

SEQ ID NO: 159730 - protein, 140 aa, Unknown
  Bacterial polypetide isolated from the Sargasso Sea
MNSLKLTNSLTRKKEIFKPNNIKKISLYACGPTVYESPHVGNARTLVVFDVLFRVLKVLYNSNVTYVRNITDVDDKIIEASQNNKEDINEITNRVIKIFHKNCKSLNCLKPTIEPKATEHVKEMIEMTSSLIKKGICLRK

SEQ ID NO: 159731 - protein, 111 aa, Unknown
  Bacterial polypetide isolated from the Sargasso Sea
MKTLKIHNTLGNTLEEFKPIDPLNVRVYACGPTVYNYAHIGNARMAVVNDLLIRFLKTLYPKVTYVSNITDIDDKIIAASQENKVPIKELTEKFTKIYNKDMSILGVKQPD

SEQ ID NO: 159732 - protein, 141 aa, Unknown
  Bacterial polypetide isolated from the Sargasso Sea
MNKDIFLTNSYGGKKEKFQPIDKNNIKMYVCGPTVYDDPHIGNARPLVIFDLLFKVLKCKYGNDKVAYVRNITDIDDKIIQSAKDKKISIKDLTTKITNNFQEDCSYLICEKPSFQPKATENIKEMIEMISILVKKGFAYE

SEQ ID NO: 159733 - protein, 40 aa, Unknown
  Bacterial polypetide isolated from the Sargasso Sea
MDIFLTNNLTNKKEPFVPLNEKKVGMYVCGPTVYDDPHIG

SEQ ID NO: 159734 - protein, 243 aa, Unknown
  Bacterial polypetide isolated from the Sargasso Sea
MRFFNTASGIKEEFSKDSKKLGLYICGPTVYSETHLGHAKSYVSFDILKRWLTYKGYHVTHIQNFTDVSDETAEGALREGVDEFTFTQKYEKEFLDNMALLSNTYASKYTRASEFVGKIAEETKKLLESGEAYQTDQGVFVRINQDDHGKLLRVNLEESLAEGTSDVDSGPKESPHDTLLWGPPLEGGNSWEVDGLPPGRPGWHLECTIMSSSELDLPIDIHWGGIDLIYPHHETEMILAEKI

SEQ ID NO: 159735 - protein, 108 aa, Unknown
  Bacterial polypetide isolated from the Sargasso Sea
MNKDIFLTNSLGNTKEKFIPIDPKKIGMYVCGPTVYDNPHIGNARPLIVFDILFKILKCKYGNNSVSYVRNITDIDDKIISSSIEKNIPIGDLTKNITNIFHEDCKYL

SEQ ID NO: 159736 - protein, 158 aa, Unknown
  Bacterial polypetide isolated from the Sargasso Sea
MNALKIFNTLNSKKEIFIPIDKNHIKIYACGPTVYNFAHIGNARMAVVFDTFVRTLRVIYPKVTYVSNITDIDDKIIEAAKEQNAEITEITEKYTEIYNEDMSMLNVLKPDIQPKATEYIPEMIELIKDLISKEFAYEKDGHVLFHVPSYSMYGELSN

SEQ ID NO: 159737 - protein, 215 aa, Unknown
  Bacterial polypetide isolated from the Sargasso Sea
HENEIAQSVCANESKKFANYWVHNGFITMSNEKMSKSQGNILKINDLKNKINGQVLRLALISSHYKQPLDWNDKLIEECEKTLDKWYSCYVDISKKIYIPENYLEPLFDDLNTPGYLANLHQLFDKAQSGDLKDKHIFIAACNFIGLLNETKEKWLGSRKRKINITEKEILLKIKERDKARNNKEYSLADKIRKELSDKGVLIEDKDGKTIWKVK

SEQ ID NO: 159738 - protein, 157 aa, Unknown
  Bacterial polypetide isolated from the Sargasso Sea
MNKDLYISNSLGGKKEKFIPIDYNKIGMYVCGPTVYDDPHIGNARPLVVFDILYKILKCKFGLKSINYIRNITDIDDKIIQSSIDKKISTKELTNEVTKKFHDDCNYLGCEKPTHEPKATENIPLMIEMINDLIKNGYAYLSNAHVYFEVKKFKDYG

SEQ ID NO: 159739 - protein, 230 aa, Unknown
  Bacterial polypetide isolated from the Sargasso Sea
EFDVHGGGIDLLFPHHENEIAQSRCANDTKIFAKFWMHNAFITMSNEKMAKSQGNILKIKDFRNKISGQVLRLALLSAHYKQPLDWNDKLLDDCQNIINKWYNSYLDIENNSKVSDEILQPLYDDLNTPGYIANLHQLYDKAQKGNDEDKSLFVSACQFVGLLNESKENWLKFKINKALISEKEILQKIQDRNKARENKNYEEADKIRNELLDKGVLIEDKDGKTTWKFK

SEQ ID NO: 159740 - protein, 182 aa, Unknown
  Bacterial polypetide isolated from the Sargasso Sea
MLAIYNSFARKKEPFTPIEPKKIRMYVCGMTVYDFCHVGHARVMVVFDMVSRYLRSIGFDVLYVRNITDIDDKIIERAKKNSEPIADLTNRFIGEMNKDANALGVLPPDLEPKATDHIKEIIEMISELIKKEHAYLAANGDVFFDVDSFKEYGQLSGKNLEELRSGERVEIQKEKDDPLDFV

SEQ ID NO: 159741 - protein, 188 aa, Unknown
  Bacterial polypetide isolated from the Sargasso Sea
MHNGYLKMEGEKMSKSLGNIVTVKELSKDYKGEVIRLALLLTHYRKPINFSKTLLDQAKKILDKLYKVKEEVYHIKDKQEHINDEVIEALNDDLNTSLAITKMLSIQDKKELVDTALFLGFLDADPKEWFSSTAKSKILEKDVLIMIKQRDSYRKNGEFDKADLVRDELLQHGIILKDSNGATEWKYK

SEQ ID NO: 159742 - protein, 224 aa, Unknown
  Bacterial polypetide isolated from the Sargasso Sea
ENEIAQSCSAFKPNSEPENFSKYWFHNGFVTLNGEKMSKSLGNIQLVNDLLKKYNGETIRLSLLSAHYRQPLNWNKDILEQSKKTLSRIKKNFEKIKVKDFKIFDINKNEFYQEFQNSLFDDLNTPKALSIIGKNLNKIKEKNHEDRQKIAQATYEALTLLGLYKESKNDEDFDDTLIKKLINERNEARKLKNFEKADEIRQNLKNKNIEIEDTKDGTVWTKSK

SEQ ID NO: 159743 - protein, 211 aa, Unknown
  Bacterial polypetide isolated from the Sargasso Sea
MSLQLQNTLSGKKEFFKPVNPDHVRIYACGPTVYNFAHIGNARMAVVNDLLVRVLKTQFKQVTYVSNITDIDDKIIEASKETGEDISVITNKYTEIYNNDMSALGVNLPDIQPRATDHIKEMIELIKKLIDENKAYEKEGHVLFHVPSFDNYGILSKRNRDEQIAGSRVEVAPFKKDPADFILWKPSPSPLPGWDSPWGFGRPGWHLQCSV

SEQ ID NO: 159744 - protein, 151 aa, Unknown
  Bacterial polypetide isolated from the Sargasso Sea
MNKDIFLTNSYGGKKEKFQPINEKNIKMYVCGPTVYDDPHIGNARPLVIFDLLFKVLKCKYGNDKVKYIRNITDIDDKIIQSAKDKKITIKDLTTKINKNFQIDCNYLNCEKPSFQPKATENINEMIQMINSLIDKGFAYESKNHIYFEVK

SEQ ID NO: 159745 - protein, 99 aa, Unknown
  Bacterial polypetide isolated from the Sargasso Sea
MIKLNLYNTLQRRLSIFQPIDTQNVRIYACGPTVYDFIHIGNARPLVVFDVLVRLLRKIYPKVTYVRNITDIDDKINKRAIEKKINISQLTNETIKKFS

SEQ ID NO: 159746 - protein, 148 aa, Unknown
  Bacterial polypetide isolated from the Sargasso Sea
MQNLKVYNSLSGKKEVFKSIEKKFVGIYVCGPTVYNKVHLGNCRTFISFDLIYRYFKHLGYKVRYVRNITDVGHLEDDSENAEDRIIKKARTEKIEPMEVVQLYTVDFHKTLSLFNILPPSIEPTATGHIIEQIEIVKSIIKKGYAYE

SEQ ID NO: 159747 - protein, 152 aa, Unknown
  Bacterial polypetide isolated from the Sargasso Sea
MSLQLQNTLSGKKEFFKPVDPKHVRIYACGPTVYNYAHIGNARMAVVNDLLVRVLKTQFKKVTYVSNITDIDDKIIEVSKETGEEINSITSKYTDIYNNDMSALGVKLPDIQPRATDHIKEMIELIQKLIDANKAYEKDGHILFHVPSLKIM

SEQ ID NO: 159748 - protein, 126 aa, Unknown
  Bacterial polypetide isolated from the Sargasso Sea
MAKDIFLTNSLGGKKEKFTPKNEKSIGMYVCGPTVYDDPHIGNARPLVVFDILYKILKNRYGSTSVKYIRNITDIDDKIIKASNDQNISIKDLTSKITENFHKDCNYLKCETPNSEPKATENIKQM

SEQ ID NO: 159749 - protein, 141 aa, Unknown
  Bacterial polypetide isolated from the Sargasso Sea
MKIYLHDTFLGKKVEFIPIDPKRLTMYLCGPTVYNYAHIGNARPAVVFDLLTRVLRLEYKLFFARNITDVDDKINAEASKKNIPIEEITSKYIQAYNEDMSQLGVAMPDIEPRATQNISEMVSMIETLVEKGHAYVSEKHV

SEQ ID NO: 159750 - protein, 159 aa, Unknown
  Bacterial polypetide isolated from the Sargasso Sea
MSKLYIYDSMQNKKVVFEPLDTQNIRVYACGPTVYDYAHIGNARMAVVFDTLIRLLRYLFPKVTYVSNITDIDDKIIERSNLEKVSTESLTNKFSKIYNRDMKMLNVQEPDYQPKATEYIDEMIQAIAKLEKEKYAYFSDGHVMFNVNSFKSYGALSSR

SEQ ID NO: 159751 - protein, 168 aa, Unknown
  Bacterial polypetide isolated from the Sargasso Sea
MLKLSDTLTGEKREFKPNGDVVRIYVCGVTPYSSAHVGHAMSYIVFDVLHRYLEFKEFTVQRVQNFTDIDDKLITRANERGISVEQLSQLHIQEYMEDMSNLNIIPADIYPLATQEIPKIIELIQGLVSSGMAYESNGDVYFRVRKSLDYGKLSHRSLETMRAGARVD

SEQ ID NO: 159752 - protein, 189 aa, Unknown
  Bacterial polypetide isolated from the Sargasso Sea
QSCASVNSDNPEDYAKYWIHNGFVTIDGEKMSKSLNNIILLNDLLKEHDGETIRLALLSSHYRKSLDWNENVIKQSKVLLDKVYDFLVTYDDDPEGEIDESLIENFSNDLDIPKVLTSINELLKNKNSSNPRTIKQSLLFAGSILGVFNKKPSEWNMQIEMSKSEMAEIEKLINERKTLKENKDFIGAD

SEQ ID NO: 159753 - protein, 186 aa, Unknown
  Bacterial polypetide isolated from the Sargasso Sea
MDKDIFLTNSLGNKKEKFNPINSKKIGMYVCGPTVYDNPHIGNARPLVVFDILFKVLKCKYGNNSVDYVRNITDIDDKIIKSSLEKKISIEDLTKKFTKIFHDDCKYLNCEIPSHEPKATENISLMIDMISKLIKNNNAYESNQHVYFDINKFKDYGKLSNKNIDELISGARVEISENKKNPADFV

SEQ ID NO: 159754 - protein, 182 aa, Unknown
  Bacterial polypetide isolated from the Sargasso Sea
MKIKLYNSNNKSKELFVPIDPKKVTMYVCGPTVYSYPHIGNARGPVIFDVLARLLRREFDLTYVRNITDLDDKIYQAADDEGIHISEVTQRYTRIYQEDMSALGVEKPDLEPLATEHIPEMIEMIEGLIIKGHAYENQGHVFFSVETFDDYGFLSNRTEDEQISGTRIKSSEIKNNQRDFVL

SEQ ID NO: 159755 - protein, 117 aa, Unknown
  Bacterial polypetide isolated from the Sargasso Sea
MKTLKIHNTLGNKVEEFNPIDPKHVRVYACGPTVYSYAHIGNARMAVVNDLLVRFLKTIYPKVTYVSNITDIDDKIITVSQENKISIKELTEKYTKIYNEDMSILGVKKPRYTTKGN

SEQ ID NO: 159756 - protein, 164 aa, Unknown
  Bacterial polypetide isolated from the Sargasso Sea
MNKDIFLTNSLGNTKEKFIPINPKKIGMYVCGPTVYDNPHIGNARPLVVFDILFKILKCKYGNNSVSYVRNITDIDDKIISSSIEKNIPIGDLTKNITNIFHQDCNYLNCEVPTNEPKATENISLMIEMINKLIKNKFAYEINNHVYFEVKKFKDYGKLSNKNL

SEQ ID NO: 159757 - protein, 153 aa, Unknown
  Bacterial polypetide isolated from the Sargasso Sea
MSKDIFLTNSYGNKKEKFIPLDPKNIGMYVCGPTVYDDPHIGNARPLVIFDILFKILKLKYKDSSVIYVRNITDVDDKIITSSKEKKISISELTNKITNNFHQDCQYLFCEKPTQEPKATENIELMIKMISDLISKGFAYQKNKHVYFEVKKF

SEQ ID NO: 159758 - protein, 103 aa, Unknown
  Bacterial polypetide isolated from the Sargasso Sea
MNNLYLTNSLTNKKEVFNPINPKKISLYACGPTVYDNPHVGNARALVVFDLLFRILIEIYGKQKVTYVRNITDIDDKIIEASKNKNINILDLTKKITKKFHND

SEQ ID NO: 159759 - protein, 175 aa, Unknown
  Bacterial polypetide isolated from the Sargasso Sea
VIRFFILSSHYRSPLNYSVENLDEAKSSLTRLYTALKEFNNDNISVDQDYATQFNSYMDDDFNTPKAISLLHEIARKINRNEDKTHEDSKRLASTLKKLGSILGLLESKPQGFLKGRSNENKENGDTDYINELIRQRNIARDKKDFEKADEIREQLAELDVTLEDTEDSTDWRRS

SEQ ID NO: 159760 - protein, 93 aa, Unknown
  Bacterial polypetide isolated from the Sargasso Sea
MELIVQYLKIFNTLNSKKETFKPIDSNHVKIYACGPTVYNYAHIGNARMAVVFDTFVRTLKAVYPKVTYVSNITDIDDKIIEAAKEQEVKYLK

SEQ ID NO: 159761 - protein, 114 aa, Unknown
  Bacterial polypetide isolated from the Sargasso Sea
MNLFDTLDNKRKNINFSENKKIKIYVCGITPYSESHIGHAMSAVIFDTLRKYLLANKQNVIYVQNFTDIDDKLIKAAEENNSDINTISTKFINKHLSALNKLNVLKPDYSPKAT

SEQ ID NO: 159762 - protein, 54 aa, Unknown
  Bacterial polypetide isolated from the Sargasso Sea
MKISDTLTNQKKELEYSDKVRIYLCGITVYDQSHIGHARTIIVFDSLRRFLEAN

SEQ ID NO: 159763 - protein, 120 aa, Unknown
  Bacterial polypetide isolated from the Sargasso Sea
MNLHIYNTLTNKKEQFLPHTKNKVSMYVCGPTVYSAPHIGNARAALVGDLFYRLLQKLYEEVTYIRNLTDVDDKIILESEKTGIPINVITKNVTEMYQNEMSKLNMLEPTFEPKVTDNIN

SEQ ID NO: 159764 - protein, 120 aa, Unknown
  Bacterial polypetide isolated from the Sargasso Sea
MGKLKLHNTLGNKVEEFIPIDKNNIRVYACGPTVYNYAHIGNARMAVVNDLLVRFLRTIYPKVTYVSNITDIDDKIIAASEEKNIPIKELTTKFTNIYNEDMSVLGVSLPDIQPKATDHI

SEQ ID NO: 159765 - protein, 73 aa, Unknown
  Bacterial polypetide isolated from the Sargasso Sea
EVKKFKDYGKLSNKKLDELVAGSRIEVSDNKKNSEDFVLWKPSEIDEPSWKSPWGNGRPGWHLECSAMSKKYL

SEQ ID NO: 159766 - protein, 199 aa, Unknown
  Bacterial polypetide isolated from the Sargasso Sea
MSLQLQNTLSGKKELFEPVDPEHVRIYACGPTVYNYAHIGNARMAVVNDLLVRVLKTQFKKVTYVSNITDIDDKIIEASKETGEEIYSITSKYTDIYNNDMSALGVKLPDIQPRATDHIKEMIALIQKLIDANKAYEKDGHVLFHVPSFENYGILSKRNRDEQIAGSRVEVAPFKKDPADFVLWKPSPSPLPGWNSPVG

SEQ ID NO: 159767 - protein, 177 aa, Unknown
  Bacterial polypetide isolated from the Sargasso Sea
MKTLKIHNTLGNKLEEFLPINPSHVRVYACGPTVYNYAHIGNARMAVVNDLLIRFLRTIYPKVTYVSNITDIDDKIIAASQENKIPIKELTEKYTKIYNEDMSILGVKKPDIQPKATDYIKEMIDLIKTLIKNNCAYEKDGHVMFHVPSFKNYGMLSGRNRDEQIIGSRVEVAPYKK

SEQ ID NO: 159768 - protein, 203 aa, Unknown
  Bacterial polypetide isolated from the Sargasso Sea
ANKTEYFANYWLHNGFVTIDKEKMSKSVGNIITINKLKENVNGQVVRLALLSSHYKQPLDWNEKLINESKKTLDRWYSQFEKINPEELNDDVIKPLQEDLNTPEYISKLHSLFEDSVKGNKSSKIQFLSACHQIGLLEDKKSWEEFKKSKSKVDENFINKKIKDRNDARKKGNYELADTLRKELENKGVIIEDKQDKTTWKYE

SEQ ID NO: 159769 - protein, 59 aa, Unknown
  Bacterial polypetide isolated from the Sargasso Sea
MHIYLTNNLTNKKEQFIPRDNKEVGMYVCGPTVYDDPHIGNARPLVIFDILFRLLKSKL

SEQ ID NO: 159770 - protein, 178 aa, Unknown
  Bacterial polypetide isolated from the Sargasso Sea
MSELHLTNSYSRKKEIFKPLNLNKISLYACGPTVYEKPHVGNARALVVFDLLYRILIELYGKSKVTYVRNITDIDDKIIDAAKNKKISIKELTSEITKQFNSDCASLFCINPSFEPKATEHIKEMIYMVENLLKIKAAYKKDNHVYFSVSSFKNYGKLSNKKIDDLKAGARIEISELK

SEQ ID NO: 159771 - protein, 256 aa, Unknown
  Bacterial polypetide isolated from the Sargasso Sea
NEIAQSETANGEPLAKLLMHNGMVNVGGTKMSKSLGNFTTIRALLDDGVSAMTLRLFVLQAHYRKPLDFTKEALDAATTGWKGLNAAIALGHHHAAALCWPDAPALTKGAQTASASQNDGFDSFRERFITAMDDDLNSSGALAVLFDLARPLRGIANRLDRGDQPEQSTDELADLRNRWLLLRELAAVLGLSEEEHPGAEQAGAADDATIQAAIEARKAAKAAKNFAEADRIRDELTAQGIELIDKPGGITEWRRA

SEQ ID NO: 159772 - protein, 120 aa, Unknown
  Bacterial polypetide isolated from the Sargasso Sea
MGKDIFLTNSLNNKKEKFIPKNEKSVGMYVCGPTVYDDPHIGNARPLVVFDILFKILKTKYGYSSVNYIRNITDIDDKIIKASNDQKISIKDLTLKITENFHDDCKYLKCEEPTKEPKAT

SEQ ID NO: 159773 - protein, 159 aa, Unknown
  Bacterial polypetide isolated from the Sargasso Sea
MKIFNTLSGKKEIFEPIEDNKIRMYVCGMTVYDDTHIGHARTFLSFDLIVRYLRSIDYEVQYIRNITDVDDKIIARAEELNISPSELTLDCINSMHNDFQALGMISPDAEPRATENIDSIISLITKLIDKGHAYVGESDVYFSTESFGDYGKLSKRKLE

SEQ ID NO: 159774 - protein, 167 aa, Unknown
  Bacterial polypetide isolated from the Sargasso Sea
MVLISCPYKLVLRLYNTATRKVEDFKPINENKVGIYVCGLTVYNDMHLGHARTYIAFDVIRRWFEHLGYEVNFVQNHTDIDDKIINRANEEEISSKDLANKYIERTTEDLESLQVHHPSHMPKATDYIPEIIEIISDLIAKNHAYVTEPALGALASDVYFDVMSASE

SEQ ID NO: 159775 - protein, 190 aa, Unknown
  Bacterial polypetide isolated from the Sargasso Sea
MSKSLGNFFTIRDVLKTYDAETVRFFIVRAHYRSALNYSDAHLDDARQALKRLYTALSLVTPAQVASIDWTSPYATRFKAAMDEDFGTPEAVAALFDLASEVNKTRSAELAGLLKALGGCLGILQGDPQAFLQSGAAGVDEAEIQAQIAARAAAKAAKNFAEADRIRNHLLAQGIVLKDSAAGTTWEAAQ

SEQ ID NO: 159776 - protein, 244 aa, Unknown
  Bacterial polypetide isolated from the Sargasso Sea
HCGGVDLQFPHHENEIAQSVCATGKSFVKTWLHCEHLLVDGSKMSKSAGNFYTLKNLFSKGYSSKAIRYLLTSSHYRQKVDLTDESLKRAEKSVRRLQEFNRRLSIISEGNHGSIENAEISVLEKFTLSMNNDLNISEGLAVLFDWVRSINKKLDSNKVSLNEAANSLALLHNFDSILCFIDESNLEISPQESALIQEREVARKKKNWLRSDEIRDHFKEKGIDLVDTPSGTILKHLKDVLKSN

SEQ ID NO: 159777 - protein, 155 aa, Unknown
  Bacterial polypetide isolated from the Sargasso Sea
MKIFNTLNRKKETFEPIDSNHIKIYACGPTVYNYAHIGNARMAVVFDAFVRTLKAIYPKVTYVSNITDIDDKIIEAANEQNVEISLITNKYTKIYNEDMARLNVLPPDVQPKATEFIPEMINLIKDLIDKDFAYEKEGHVLFHVPLYLNYGKLSN

SEQ ID NO: 159778 - protein, 135 aa, Unknown
  Bacterial polypetide isolated from the Sargasso Sea
MSLRLHNSLSDQKEDFVPLREGRVTLYVCGPTVYNDSHLGHAKTYVSFDVILRYLKYRGFSTFYVQNITDVGHLMGDADEGEDKMLKRARELELEPMAVAETYTTRHFQAMDRMGVIRPDISPRATGHIPEQWKR

SEQ ID NO: 159779 - protein, 131 aa, Unknown
  Bacterial polypetide isolated from the Sargasso Sea
ADVPETDHDRRFAEAMDDDFNTAGAIAVLHAVANDINHQRREGDEGAAKRSAAVLVRLGAVLGLLQQDPEAFFQADTGSELTAEDIEAMIQARADARKGKDFAEADRIRDELLDKGIILDDSREGTTWRRA

SEQ ID NO: 159780 - protein, 98 aa, Unknown
  Bacterial polypetide isolated from the Sargasso Sea
MAIKLFNTLTKQKETFIPQDSKRITMYVCGPTVYSHPHIGNARAALIPDILYRLLMSHYSDNVVYIRNITDVDDKILKAANETGIKPREISEKFTDIY

SEQ ID NO: 159781 - protein, 138 aa, Unknown
  Bacterial polypetide isolated from the Sargasso Sea
MEPIVQYLKIFNTLNSKKETFKAIDSNHVKIYACGPTVYNYAHIGNARMAVVFDTFVRTLKAMYPKVTYVSNITDIDDKIIEAAKEQEVEISQITDKYTKIYNEDMARLNVLPPDVQTQATEFIPEMINLIEDLISKD

SEQ ID NO: 159782 - protein, 74 aa, Unknown
  Bacterial polypetide isolated from the Sargasso Sea
MLKIFNTFSKNIETFTPINPKCVTMYVCGPTVYNYPHIGNARPAVIFDTLYRVLKEQFPEVVYVRNITDVDDKI

SEQ ID NO: 159783 - protein, 244 aa, Unknown
  Bacterial polypetide isolated from the Sargasso Sea
ADEGEDKMPKRVRELELEPMAVAETYTTRHFQAMDRMGVIRPDICPRATGHIPEQLEAIEKMIEAGLAYEVNGSVYFDVSKDPEYGKLSNRSFEEMQEGARVEVRQEKRNPQDFALWKKAEAGHLMRWRDSYSGWGYPGWHTECAVMSTRYLGDSFDIHGGGMELKFPHHDCEISQAKGLGKPFAKYWMHNNMLTIDGQKMSKSTGNFVTLINAFEQHDPLAVRYFIAASHYRSVVDYSENALK

SEQ ID NO: 159784 - protein, 125 aa, Unknown
  Bacterial polypetide isolated from the Sargasso Sea
MELIVQYLKIFNTLNSKKETFKPIDSNHVKIYACGPTVYNYAHIGNARMAVVFDTFVRTLKAVYPKVTYVSNITDIDDKIIEAAKEQEVEISQITDKYTRIYNEDMARLNVLPPECSTQGYRIYP

SEQ ID NO: 159785 - protein, 126 aa, Unknown
  Bacterial polypetide isolated from the Sargasso Sea
MSLRLHNSLSDQKEDFVPLREGRVTLYVCGPTVYNDSHLGHAKTYVSFDVILRYLKYRGFSTFYVQNITDVGHLMGDADEGEDKMLKRARELELEPMAVAETYTNRHFHAMDPDGGHPTGYLPAGT

SEQ ID NO: 159786 - protein, 100 aa, Unknown
  Bacterial polypetide isolated from the Sargasso Sea
MNEIYIHDSLLNQKRKFEPIDSNNIRMYACGPTVYNYAHIGNARMAIVFDTFARLLRSKYPNVTYVSNITDIDDKIIEAANELNVPINELTEKYTDIYNQ

SEQ ID NO: 159787 - protein, 178 aa, Unknown
  Bacterial polypetide isolated from the Sargasso Sea
MNKDIFLTNNLSNKKEKFVPKDENNIGMYVCGPTVYDDPHIGNARPIVIFDILFKVLKKKFQNVNYVRNITDVDDKIIKSSKEKNISISDLTQTVIKSFNEDCDYLNCEDPSQQPKATEHIDLMIEMISELIKKGFAYENNHHVYFEVKKFDDYGKLSNKKLEDLIAGSRIEVSDNKK

SEQ ID NO: 159788 - protein, 141 aa, Unknown
  Bacterial polypetide isolated from the Sargasso Sea
MNKNLNFFNTLTNKREKFSPINKNKVGMYVCGPTVYDFPHIGNARPLVIFDVLFRLLQTLYGEKKVTYIRNITDIDDKIIDSSKKNNKSISELTESITKTFHDDCSYLNCLKPTFETKATEHIKEMINMVSILLKNKHAYE

SEQ ID NO: 159789 - protein, 130 aa, Unknown
  Bacterial polypetide isolated from the Sargasso Sea
MHETGVSDGEAHAVPNDVSDAVYDDLNTPLALSGLHAAADAAFAAETPEDVAAATGALKAAGELLGLLQQDPEVWFQGDGDAAIDALIAERIAARDAKDFARADEIRDQLAADGIVLEDGPGGTTWRREG

SEQ ID NO: 159790 - protein, 84 aa, Unknown
  Bacterial polypetide isolated from the Sargasso Sea
MLRFYNSLSKIKEDFIPIEKGKVKIYTCGPTVYDYAHIGNFRTFLFEDFLKRTLQSLGYDVFHVMNITDVDDKTIKKSLEEGKE

SEQ ID NO: 159791 - protein, 165 aa, Unknown
  Bacterial polypetide isolated from the Sargasso Sea
MIKIKLHNTLTRKKQTFVPLDENNVRLYLCGPTVYDRAHLGNARNVIMFDVLYRLLIETYGFDSITYVRNFTDIDDKINNKSLESGRPIDAITSETIQWYLEDMAALGNLEPNLMPRATDYIPQMISYIELLIKGGFAYPAEGHVLFSVSNYKNYGRLSGRSVED

SEQ ID NO: 159792 - protein, 74 aa, Unknown
  Bacterial polypetide isolated from the Sargasso Sea
MNKDIFLTNSLGNKKEKFVPINKNKIGMYVCGPTVYDDPHIGNARPLVVFDILFRVLKCKFGDKQVNYVRNITD

SEQ ID NO: 159793 - protein, 126 aa, Unknown
  Bacterial polypetide isolated from the Sargasso Sea
MKKDIFLSNSLGNKKERFIPINEKNIGMYVCGPTVYDHPHIGNARPLVVFDILYKILKCKFGENKVTYIRNITDIDDKIIEASLEKKISINDLTKKITNIFHEDCKYLNCEIPTHEPKATENILLM

SEQ ID NO: 159794 - protein, 67 aa, Unknown
  Bacterial polypetide isolated from the Sargasso Sea
MRFTNSLTSRTEAFDPLEPGKATIYCCGVTVYDLCHLGHARSYINWDVLRRYLIWRGYDVTYVQNYT

SEQ ID NO: 159795 - protein, 175 aa, Unknown
  Bacterial polypetide isolated from the Sargasso Sea
MNKDIFLTNSYGGLKEKFQPIDPKSIKMYVCGPTVYDEPHIGNARPLVVFDILFKVLKCKYGDDKVNYVRNITDIDDKIIQSAKLNKVSISELTKKITKNFHNDCKYLNCDKPNFEPKATENIQLMIDMVSNLIKKGFAYESNNHVYFEVKKFIDYGKLSNKKIEDLIKGSRVEV

SEQ ID NO: 159796 - protein, 158 aa, Unknown
  Bacterial polypetide isolated from the Sargasso Sea
MDYHLFNTLSGKKEILKPGDPKHVKIYACGPTVYNYAHIGNARMAVVFDTFVRTLRFIFPKVTYVSNITDIDDKIIEAAVEQNVEISVITKKFTKIYNEDMAKLNVLAPDVQPKATEYIPEMIDLIKELIEKDFAYEKDGHVLFHVPTYENYGKLSNR

SEQ ID NO: 159797 - protein, 151 aa, Unknown
  Bacterial polypetide isolated from the Sargasso Sea
MFSLKLHNTLGNIKEEFIPINKKHIKIYACGPTVYNYAHIGNARMAVVCDLLVRILKTLYPKVTYVSNITDIDDKIINASLEKKIPIEKLTKKFEKIYNEDMSALGVSKPDIQPRATEHINEMIHLIETLIKNNSAYVKDYHVLFDVLSYP

SEQ ID NO: 159798 - protein, 169 aa, Unknown
  Bacterial polypetide isolated from the Sargasso Sea
MNLKISNTLSKKKELFKPINSKNITMYACGPTVYDDPHVGNARSLVVFDLLFRTLKKIYGDKNVTYVRNITDIDDKIIDIAKEKNLPIKKITEEVTNQFHNACKDLNCLEPTVEPKATGHVDGMIKMTSSLIEKGFAYINEGHVYFSIASFKNYGKLSNKNLEELKAGS

SEQ ID NO: 159799 - protein, 162 aa, Unknown
  Bacterial polypetide isolated from the Sargasso Sea
MNNLQLTNSLTNKKEIFNPINKDKVSLYACGPTVYDNPHVGNARALVVFDLLFRILIELYGEKKVTYVRNITDIDDKIIEAAKRKKIDISDLTKSVTEKFHKDCKILFCLNPTKEPKATDHVEGMINMTKELIEKNAAYEKEGHVFFAVTSFKKYGKLSNKN

SEQ ID NO: 159800 - protein, 165 aa, Unknown
  Bacterial polypetide isolated from the Sargasso Sea
MHNLSVFNSLTGKKEKFTTFHKDLVHMYVCGPTVYSNVHLGNCRTFISFDIIYRYLLHLGYKVKYVRNITDVGHLENDSDDGEDPIIKKAKKENIEPMEVVQKYTIDFRENLRKLNTFPPSIEPTATGHILEQIELIEKIIKNGFGYIRNGSVYFDVLKFNKILH

SEQ ID NO: 159801 - protein, 180 aa, Unknown
  Bacterial polypetide isolated from the Sargasso Sea
MNKELYISNSLGNKKEKFIPIDTNNIRIYVCGPTVYDDPHIGNARPLVVFDILYKVLKCKFGLKNVNYVRNITDIDDKIIQSSLDKKISTQELTEKITKNFHDDCVYLGCEKPTHEPKATENIPLMIDMINKLLENGYAYLNNNHVYFEVKKFKDYGKLSNKNLNDLIAGSRVEISENKK

SEQ ID NO: 159802 - protein, 214 aa, Unknown
  Bacterial polypetide isolated from the Sargasso Sea
ENEIAQSCCANETEVFANYWVHNGFITQSNEKMSKSQGNILKISSFKENVNGQALRLALISAHYRQPLDWNDKLLEESQKTIDKWYKSYIELDKPKLISDDDLYPLYDDLNTPKYIANLHKLYEKSQSGNVEDKKEFVSACNFVGLLNETKEEWNNFKKNKSTLSSDLIEIKIKQRNKARDDKNYELADKIRNELLEKGVQIEDKDGKTSWKFK

SEQ ID NO: 159803 - protein, 74 aa, Unknown
  Bacterial polypetide isolated from the Sargasso Sea
MTLRVYDTRSRSKRVFKPLVEGQVGIYACGITPYSPSHIGHARQAIAFDIIVRWLRKSGFKVNYISNFTDIDDK

SEQ ID NO: 159804 - protein, 138 aa, Unknown
  Bacterial polypetide isolated from the Sargasso Sea
MLAIYNSFARKKEPFTPIEPKKIRMYVCGMTVYDFCHVGHARVMVVFDMVSRYLRSIDFDVLYVRNITDIDDKIIERAKKNSEQITDLTNRFIEEMNKDANALGVLPPDLEPKATDHIKEIIEMISELIKKEHAYLAA

SEQ ID NO: 159805 - protein, 88 aa, Unknown
  Bacterial polypetide isolated from the Sargasso Sea
MGKDIFLTNSLDNKKNKFIPKNEKSVGMYVCGPTVYDDPHIGNARPLVVFDILFKILKKKYGSNSVNYIRNITDIDDKIIKASNDKKI

SEQ ID NO: 159806 - protein, 190 aa, Unknown
  Bacterial polypetide isolated from the Sargasso Sea
MLILGSNGFLNLANEKMSKSLGNVVYIDDLLKEFKGNEIRLALLSTHYRQPIPWSLNLLKQAASVARKISRFTSSHTTKSKFFPGSNIGKAILDDLNTPKALAIMQSLITNPKKFDINQEISTFRYIFEGSKQDLSLSKEDQDKINQLIKLRLKARENGDYQTADKIRDELNKMNVSIKDKNGKTEWEIL

SEQ ID NO: 159807 - protein, 242 aa, Unknown
  Bacterial polypetide isolated from the Sargasso Sea
ECSAMSKKFLGDQFDVHGGGIDLLFPHHENEIAQSRCANDTKIFAKFWMHNAFITMSNEKMAKSQGNILKIKDFRNKISGQVLRLALLSAHYKQPLDWNDKLLDDCQNTINKWYNSYLDIKNNSKVSDEILQPLYDDLNTPGYIANLHQLYDKAQKGNDEDKSLFVSACQFVGLLNESKENWLKFKISKALISEKEILQKIQERNKARENKNYEEADKIRKELLDKGILIEDKDGKTTWKFK

SEQ ID NO: 159808 - protein, 191 aa, Unknown
  Bacterial polypetide isolated from the Sargasso Sea
MSISNQNLKFYNSLTSSKEIFKPINKSKIGMYVCGPTVYNTVHLGNCRTFISFDLIYRYLKHIGYDVRYVRNITDVGHLEENSDDDKILKRAKIENLEPMEIVQKYSNEFHEIMEKFSLVKPSIEPTASGHIPEQIEMIEEIISNGYAYEKNGSVYFDLNNFSNDFDYGKLSKRNLDDVINESRKLENVSD

SEQ ID NO: 159809 - protein, 184 aa, Unknown
  Bacterial polypetide isolated from the Sargasso Sea
MPLQIHNSLSGKKEDFNPVHEGQASLYVCGPTVYGDSHLGHAKAYVSFDIILRYLRYIGLKTFYVQNITDVGHLMGDSDDGEDKLLKRARELEQEPMAVAEYFSRRHFEAMDKLAVIRPDISPRATGHITEQLEAIETLIEQGLAYESNGSVYFEIKKDPKYGELSNRDIDQMLGGARVDVRKE

SEQ ID NO: 159810 - protein, 110 aa, Unknown
  Bacterial polypetide isolated from the Sargasso Sea
MTIKFYNSLTNQKEDFVPIREGEVGMYVCGMTVYDNCHLGHARAMMAFDIVARYLRYQGYKVNFIRNITDIDDKIIERAYENKEKIEDLTARTIASMQEDFLKLGLEPPN

SEQ ID NO: 159811 - protein, 138 aa, Unknown
  Bacterial polypetide isolated from the Sargasso Sea
MLRFYNSLSKMKEDFIPIEKGKVKIYTCGPTVYDYAHIGNFRTFLFEDFLKRTLQSLGYDVFHVMNITDVDDKTIKKSLEEGKELHEITEYYKSVFIEDLEILKILPPNEFPAATDHIDQMINIIQILIDKGHAYTTD

SEQ ID NO: 159812 - protein, 237 aa, Unknown
  Bacterial polypetide isolated from the Sargasso Sea
QKNILGDRFDIHGGGRDLLFPHHDNEIAQSCCANGTETLSNYWVHNGFITQSNEKMSKSQGNILKIRDFKENVNGQVLRLALMSAHYRQPLDWNDKLLEESQKTIDKWYKGYIELDKTKLISDDDLYPLYDDLNTPRYIANLHKLYEKSQSDNLEDKKVFVSACNFVGLLTETKDEWNNFKKNKSTLNKELVETKIKERNKARDDKNYELADKIRNELLEKGVQIEDKDGKTSWKFK

SEQ ID NO: 159813 - protein, 178 aa, Unknown
  Bacterial polypetide isolated from the Sargasso Sea
MEIRLYNSKSKKKEIFHPVNDENVTMYVCGPTVYGAHHIGNARPAVIFDVLAKLLRNKYKSVTYARNITDIDDKIINAALEQNLEISEITKRSTNQYHSDMKILNVEEPNKEPYATQFISEMILFIEDLIEKDNAYVSEGHVLFDIDSYKLYGDLSSRDPKDMIAGLRVEVQDYKKIL

SEQ ID NO: 159814 - protein, 198 aa, Unknown
  Bacterial polypetide isolated from the Sargasso Sea
MARRCPRAWANFFTIREVLEKYHPEVVRYLLVSSHYRSPINYSEESLKEAKGALERFYNGLKGLPEAAPAGGEAFVERFGAAMDDDFNSPEACAVLFEMIREVNRLRESDVQAAAGLAAQLKQLASVLGVLQLEPEAFLQAGAAGKVDAAEVDALIAARLQARAEKNWAESDRIRDQLTAMGVVLEDGKGGTTWRLAE

SEQ ID NO: 159815 - protein, 236 aa, Unknown
  Bacterial polypetide isolated from the Sargasso Sea
GADLIFPHHENEIAQTCAAHNNTHDLKSFAKYWFHNGFVNVEGEKMSKSIGNIHLVNELNKEFKGEVLRLTLISAHYRQPLNWTKNIIKQNSTMLNRFYRNLKDLENIDAYKDNNQIEDSVIEGLYDDLNTPKVIAELNVLSNQLSSANNKMKSRIKYNLLEVGKIIGILQNSPDTWLGYGKSAILNETIIERLIKERNEARGNKNFDLADQIRDELKEKGVEIEDTTKGTIWKSV

SEQ ID NO: 159816 - protein, 98 aa, Unknown
  Bacterial polypetide isolated from the Sargasso Sea
MIKIKLHNTLTRKKQTFVPLDENDVRLYLCGPTVYDRAHLGNARNVIMFDVLYRLLIETYGIDNINYVRNFTDIDDKINNKSLESGRPINDITSETIN

SEQ ID NO: 159817 - protein, 121 aa, Unknown
  Bacterial polypetide isolated from the Sargasso Sea
MNKDIYLTNSFGSKKEKFVPINKNKIGMYVCGPTVYDNPHIGNARPLIVFDILYKLLKCKFGEKNVIYVRNITDIDDKIIKSSIEKKISTNKLTEDITKIFHKDCNYLICEKQLTNLRLPK

SEQ ID NO: 159818 - protein, 85 aa, Unknown
  Bacterial polypetide isolated from the Sargasso Sea
MNLYIYNTLTNKKEQFVPHNHGEVNMYVCGPTVYSEPHIGNARAALIGDLFYRILSELFDNVTYIRNLTDVDDKIIIESDKLGVD

SEQ ID NO: 159819 - protein, 179 aa, Unknown
  Bacterial polypetide isolated from the Sargasso Sea
MNKDLFLTNSLGNKKEKFVPINKNKIGMYVCGPTVYDDPHIGNARPLVVFDILYKVLKCKYGNKTISYIRNITDVDDKIIQSSHEKKISIEDLTKKITANYHSDCDYLKCEKPNKEPKATENILLMVEMIEELIEKKFAYINNKHVYFEVKKFKDYGKLSNKNLEELIAGSRVEISENK

SEQ ID NO: 159820 - protein, 119 aa, Unknown
  Bacterial polypetide isolated from the Sargasso Sea
MSLRLHNSLSDQKEDFVPLREGRVTLYVCGPTVYNDSHLGHAKTYVSFDVILRYLKYRGFSTFYVQNITDVGHLMGDADEGEDKMLKRARELELEPMAVAETYTTRHFQAMDRMGVIRP

SEQ ID NO: 159821 - protein, 102 aa, Unknown
  Bacterial polypetide isolated from the Sargasso Sea
MTQLRLYNSLTNQKENFIPIDPSHVRLYTCGPTVYNYAHIGNARPPIVSDILVRLLRHLYKKVTYVSNITDIDDKIINASKEQNRPISEITKKYEKIYNENL

SEQ ID NO: 159822 - protein, 213 aa, Unknown
  Bacterial polypetide isolated from the Sargasso Sea
CASVNSDNPEDYAKYWIHNGFVTIDGEKMSKSLNNIILLNDLLKEHDGETIRLALLSSHYRKSLDWNENVIKQSKVLLDKVYDFLVTYDDDPEGEIDESLIENFSNDLDIPKVLTSINELLKNKNSSNPRTIKQSLLFAGSILGVFNKKPSEWNMQIEMSKSEMAEIEKLINERKTLKENKDFIGADAIRDSLLEKGIELIDSEDGTSWKSKH

SEQ ID NO: 159823 - protein, 188 aa, Unknown
  Bacterial polypetide isolated from the Sargasso Sea
MKINLYNSSTKSKELFVPIDPKKVTMYVCGPTVYSFPHIGNARGPVIFDVLANLLRREYQLVYVRNITDLDDKIYQAAEEEGVQISEITQRYTKIYQEDMNALGVRDPDIEPLATDHIAEMIEMIQGLIDKSHAYENQGHVFFSIDTFDDYGFLSNRSEVEQISGTRIKPSEIKKNQKDFVLWKPSTG

SEQ ID NO: 159824 - protein, 141 aa, Unknown
  Bacterial polypetide isolated from the Sargasso Sea
MTDIHFHNTKSGKKEKFEPIDPEHIKIYVCGPTVYNFVHIGNGRPAVVFDVLVRLLRLVYPKVTYVRNVTDIDDKINNAAIENNESIQVLADRFTDAYEEDMLTLGVEPPDVTPRATHHIKEIISMITVLVEKGFAYENEG

SEQ ID NO: 159825 - protein, 141 aa, Unknown
  Bacterial polypetide isolated from the Sargasso Sea
MNNLHLTNSLTNKKEIFNPINKDKVSLYACGPTVYDNPHVGNARALVVFDLLFRILIELYGKKKVTYVRNITDIDDKIIEASKIKKINISDLTKSVTEKFHSDCKILFCLNPTKEPRATDHVEGMINMTKKLIKKNAAYEK

SEQ ID NO: 159826 - protein, 151 aa, Unknown
  Bacterial polypetide isolated from the Sargasso Sea
MFLYNSLTRKKEKLSKDKIKMYVCGVTVYDRPHLGHALSTVTFDVLHRFLEYSGYDVKRVQNFTDVDDKIINKSKELNISAQEVAEKYIDSFFEDMDALGVRRADVHPRATEDMKEIIELISSLIDNKAAYSSNGSVYFDVSYSSDYGKLS

SEQ ID NO: 159827 - protein, 109 aa, Unknown
  Bacterial polypetide isolated from the Sargasso Sea
MEPIVQYLKIFNTLNSKKETFKAIDSNHVKIYACGPTVYNYAHIGNARMAVVFDTFVRTLKAMYPKVTYVSNITDIDDKIIEAAKEQEVEISQITDKYTKIYNEDRQDL

SEQ ID NO: 159828 - protein, 193 aa, Unknown
  Bacterial polypetide isolated from the Sargasso Sea
MSSEQPFQLFNTLSGNKERLEAIDPKHLKIYACGPTVYNYAHIGNARMAVVFDTLVRTLRVIYPKVTYVSNITDIDDKIIEAAMEQNVEITSITEKYTKIYNDDMLKLNVLAPDIQPKATEYIPEMIELIVELIEKDFAYEKEGHVLFHVPTYQNYGKLSKRNRDEQIAGSRVEVAPFKKDPADFVLWKPSTK

SEQ ID NO: 159829 - protein, 62 aa, Unknown
  Bacterial polypetide isolated from the Sargasso Sea
MSRKKELFVPRDPTGKRVQMYVCGVTVYDYSHIGHARVYVAFDVLYRQLMRLGYDVTYCRNF

SEQ ID NO: 159830 - protein, 130 aa, Unknown
  Bacterial polypetide isolated from the Sargasso Sea
MSLRLHNSLNDQKEDFVPLREGRVTLYVCGPTVYNDSHLGHAKTYVSFDVILRYLKYRGFSTFYVQNITDVGHLMGDADEGEDKMLKRARELELEPMAVAETYTNRHFQVMDRMGVIRPDICPRATGHIP

SEQ ID NO: 159831 - protein, 160 aa, Unknown
  Bacterial polypetide isolated from the Sargasso Sea
MIRTRFAPSPTGWLHIGGARTALYAWLFAKRNSGEFYIRIDDTDTTRSTREYCESIINSLSILGIQSDMELLYQSSRFDKYIDSIEKLLSANMAYYDKVEVNEKTKDTNLEIQYENKLNRDGHVIRFRNPEKKSIIINDIIHGSITFENKSFHDVVILRS

SEQ ID NO: 159832 - protein, 73 aa, Unknown
  Bacterial polypetide isolated from the Sargasso Sea
MKCRFAPSPTGKIHIGNARSAILNWIFCQKNQGEFVLRIDDTDANRSSKEFETSIKDDLKWLGLNWSYTFYQS

SEQ ID NO: 159833 - protein, 267 aa, Unknown
  Bacterial polypetide isolated from the Sargasso Sea
DHISNTPRQIHIQNALGYPELEYAHLPLVLGPDKKRLSKRHAATSLEEYREAGYLDTAIINTLSRLGWSKGDDEVFYLDDLINNFNLSEVQKAGAIFDITKLDWLNSQHLANLSLQDFKSHLKPFLEDISIDINNHDNVELLIESMRTSENTLKGIAESLRPYYEEVSDYNEKAIEKFLDQEGKAILIELKGLLSNINDWKEDSIDKVLKEYQQENNCPVPKVNQPIRIALTGSTKSPSMGLTLSFFSKDESLKRIDNLLSKSCINQ

SEQ ID NO: 159834 - protein, 174 aa, Unknown
  Bacterial polypetide isolated from the Sargasso Sea
MKIITRFAPSPTGHLHVGGARTALFAWLQAKAADGKFLLRFEDTDQERSSSEFITSINDSLAWLGIEPDEPPIFQSKNLKNHKKIAFELLESGNAYSCDCSQERLEEVRKAQIAKKLKPKYDGLNRDKNLSHEEGNVIRFKMPQTGTTSFQDEILGNISVENKELDDFIILRSD

SEQ ID NO: 159835 - protein, 50 aa, Unknown
  Bacterial polypetide isolated from the Sargasso Sea
MKKVATRFAPSPTGPLHIGGVRTALFNWLYSKNQKGNFYLRVEDTDKERS

SEQ ID NO: 159836 - protein, 48 aa, Unknown
  Bacterial polypetide isolated from the Sargasso Sea
MIAVTRFAPSPTGHLHLGHAYSALFAKAQGTRFLVRMEDIDAGRCRPE

SEQ ID NO: 159837 - protein, 261 aa, Unknown
  Bacterial polypetide isolated from the Sargasso Sea
KIEKLKKDGRLYPCFETAEELSLKKKSLLSSGKPPIYDRSSLELTKSKINENINLGLKPHWRFKLEDNIINWKDLIKDEVRFDPKYLSDPILIREDGSLLYHLPSVIDDIEEEITHIIRGEDHITNTAFHIQIYKALNSQSPKFAHHPFLTDQKGKGFGKRIGSLSIENLKDEGYEEVSILNYLINIGSSEDIKPEKKVDFIIQNFDIKNISNSSAKFSDSILRSLNSDILKTYNFEEINSKIKISNNRVDLKKLWIFSQN

SEQ ID NO: 159838 - protein, 264 aa, Unknown
  Bacterial polypetide isolated from the Sargasso Sea
LYHLPSVIDDIEEDITHIIRGEDHIVNTAYHIQIFEALESNVPIFAHHPFLVDDQGKGFSKRMGSLSISSFKDQGFENIVLLNYFLFIGSSSNIVPMKDLKEVINKFDINNVSKSSAKFSKETLLSLNENTLKLFSFDEIKNKLINLQTNLQKESFWRFVKNNITYIHEVSIWEKVIKTINNYKDFNIDKNFLDIAANELPNDPYDYNTWDIWTTKIKDKTGIKGKDLFMPLRLILTGKSHGPELKYFIPLFDKKGILQKLGKI

SEQ ID NO: 159839 - protein, 34 aa, Unknown
  Bacterial polypetide isolated from the Sargasso Sea
MSKVATRFAPSPTGPLHIGGVRTALFNWLYSKNK

SEQ ID NO: 159840 - protein, 55 aa, Unknown
  Bacterial polypetide isolated from the Sargasso Sea
MKCRFAPSPTGKIHIGNARSAILNWVFCKQNNGEFILRIDDTDLTRSLKEFERKY

SEQ ID NO: 159841 - protein, 33 aa, Unknown
  Bacterial polypetide isolated from the Sargasso Sea
MDNSSVKVRFALSPTGELHLGGARTALFNWLFA

SEQ ID NO: 159842 - protein, 120 aa, Unknown
  Bacterial polypetide isolated from the Sargasso Sea
MSHRVHEILLVASPYDGFILEEDGGLTEQIMTEYIGMNFNYAPRVTRASTATDSMSYLAKDKFDLVIVMLRIEDTDPISLGKSIKKTFPHMPVILLAFDETEIKQLSQKLSPSFNRSCFH

SEQ ID NO: 159843 - protein, 85 aa, Unknown
  Bacterial polypetide isolated from the Sargasso Sea
MTGIKVRFAPSPTGRLHVGNLRTALVNYLFARKMGGEFMLRIDDTDTERSTAAFETDIRADLEWMSMVWDCEDRQSSRFARYDDA

SEQ ID NO: 159844 - protein, 249 aa, Unknown
  Bacterial polypetide isolated from the Sargasso Sea
DEVKACLGAGFGSLGPVGAPVRVVVDHTAAQMPSFVCGANEDGYHVKGATWRRDVPDAEFADIREIVSGDPSPCGEGALEIRRGIEVGHIFQLGTKYSESMNASVLDEQGRSQPMVMGCYGIGITRIVAAAIEQNHDDNGIIWPSAMAPFDVAIVPLGMDKSEVVREATEQLYAACADAGVSVLLDDRSERPGVKFAEMELLGMPLRVTVGERSLAEGHLELTQRRGGETEMVSPADIIGRLQRLLAGG

SEQ ID NO: 159845 - protein, 258 aa, Unknown
  Bacterial polypetide isolated from the Sargasso Sea
TFSSAVDDVIYNITNVIRGDDHTSNTAVQMKIINALDENKISFAHHALLKASTGDKLSKRDNVISIDSFRKDNIEPISILSLLATIGTSNSIELKSGIKQIIEEFKLETISTSPGRIEIDVLKALNKKQVQKFDYEEIQSRLTEIDENVDKKFWDTIKGNLETVEEISSWTDIVFNSKPAESDDKDYIKLALELMPEEPWDDDTWTTWTNAIKEKTGRKGKELFLPLRVAFTGLTHGPEMKLLIQLIGRDKIVERIQT

SEQ ID NO: 159846 - protein, 209 aa, Unknown
  Bacterial polypetide isolated from the Sargasso Sea
MFNYLCLLGWSPGDDIELFDSDFAISKFDLNKVLPNSATFDEKKLLWLNGQYIRSSSPDKFEEESLQNIENQLSRELFHEEKDRLLRIFPSVQERIETMNDLFGQVKFLIDEPFVIDKEDWESVNSKEAQKYLDAIRNKFIALDDFNLNIIEDTMRATLEELDIKTKVGFQSTRVAVTGTKISPPLFESIFALGKETSIARLAESIEKL

SEQ ID NO: 159847 - protein, 175 aa, Unknown
  Bacterial polypetide isolated from the Sargasso Sea
MIKVRFAPSPTGYLHIGNFRTALVNFLFAKSKNGHFMLRIDDTDDERSSKEYEDAIKEDLTWMNINWDSVERQSSRLLSYNEALETLLEKKRAYPCFETAEELSLKRKSQLSSGKPPIYDRSALKLSDSDIADLKSKGKKPHYRFLLNREDVNWIDLVKGESKYNMSNLSDPVIL

SEQ ID NO: 159848 - protein, 302 aa, Unknown
  Bacterial polypetide isolated from the Sargasso Sea
RMTIYNLKIEQLKKDERLYPCFETAEELSLKKKSLLSAGKPPIYDRSSLLLTAEDIDEKIKSGQKPHWRFKLNDLIIEWNDLIKGKVKFDPKNLSDPILIREDGSLLYHLPSVIDDIEEGITHIIRGEDHISNTAFHIQIFQAIEGSIPEFAHHPFLTDQHGKGFGKRLGSLSIENLKAEGYEDVSIINYLINIGSSEDIKPETIKDKILENFDIKNISTSSAKFSEVVLKSLNADILKNYKFEQVSKRINFISSDIDLEKLWIFSHNNIFFIKDIIFWSKIIREIFDINEFDIPQDFFKLQ

SEQ ID NO: 159849 - protein, 52 aa, Unknown
  Bacterial polypetide isolated from the Sargasso Sea
MKKVATRFAPSPTGPLHIGGVRTALFNWLYSKNQKGDFYLRVEDTDKERSKE

SEQ ID NO: 159850 - protein, 139 aa, Unknown
  Bacterial polypetide isolated from the Sargasso Sea
MIVTRFAPSPTGPLHLGHVYSLLYSYNYSKVNRGKFLLRIEDIDFTRCKKKYVKEIIDDINWLKIPFIKTKNQSLRRKYYTQALNKLKSMDLVYPCWLSRKEALDALSAPHNNTLEKTNVLLSEKAIIKRQTIGITPAE

SEQ ID NO: 159851 - protein, 189 aa, Unknown
  Bacterial polypetide isolated from the Sargasso Sea
SLDILKKTNALLEGHFVLSSGLHSTKYIQCAKLLSYPHLAEKICKSLANKIKNKFKKFDVILSPAIGGIIIGYEIGRILKKETIFCERVKGKFILRRGFKIRKGSKVLIMEDVITTGKSSMECVKLIKKSKSKVIGFASIIDRSSRKTLKIKKTIISHLKINVPTYKKNNLPKKLKLIPISTPGSRFLK

SEQ ID NO: 159852 - protein, 86 aa, Unknown
  Bacterial polypetide isolated from the Sargasso Sea
MKKVATRFAPSPTGPLHIGGIRTALFNWLYSKNQKGDFYLRVEDTDKERSKNEYKKQIIQSLKWIGINYDGEEYIQSKKINDHIKV

SEQ ID NO: 159853 - protein, 88 aa, Unknown
  Bacterial polypetide isolated from the Sargasso Sea
MVKTRFAPSPSGYLHIGGVRTALYAWLFARNQGGKFLLRIEDTDIERSSEESKLSILEGMKWLGLEHDEEIIHQSERFEVYKDRADEL

SEQ ID NO: 159854 - protein, 237 aa, Unknown
  Bacterial polypetide isolated from the Sargasso Sea
MIKSIVGFILRILPRPFLQLISKPIFKLISIFYRGKNVECPICNSRFSKFFPYGRDSRDNALCTNCLSLERHRLLYIYLFEKSDLLKKVINVLHIAPEECFIKIFKNHNKIIYTTADLESPLAEIKMDIHDMPFEDNMYDFILCNHVLEHVQDDIKALSEIKRVLKKGGKGIVQVPFYKPIPKYTIEDKNIKSKKDREKYYGQSDHVRKYGEDYKQRLESTGLKVEIINPSDFLSKS

SEQ ID NO: 159855 - protein, 215 aa, Unknown
  Bacterial polypetide isolated from the Sargasso Sea
MEVVTRFAPSPTGNLHLGHAYSALIAEREARLNNGKFLLRIEDIDVERCNSAFEKSILEDLSWLKLKWPEPVRKQSNHMADYTKGLEKLHNLGLLYRCTLTRKELAEAMSAPHENDAAKINQSSPRNTLRYISTRENERRLEKGAPYAIRLRMEAAASLAGKLKWFDTKHGEQSAEPETFGDIVLARKDIATSYHLSVTIDDAVQGVTRVTRGDD

SEQ ID NO: 159856 - protein, 44 aa, Unknown
  Bacterial polypetide isolated from the Sargasso Sea
MKKVATRFAPSPTGPLHIGGVRTALFNWLYSKNHKGDFYLRVED

SEQ ID NO: 159857 - protein, 212 aa, Unknown
  Bacterial polypetide isolated from the Sargasso Sea
MLRFAPSPTGYLHIGNARVATLNYIYSQNTNKDFFLRIDDTDKERSSEKYTEAIIEDLSWLGIKFSKIVKQSEREKSYREIFELLKKKELIYPCFESPEELSLKRKILLKQGKPPIYDRESLKLKKDQVKSFISSGKLPHWRLKLDNDPISWNDEIFGNVKFDNLSISDPVLFRSDELPLFTITSVVDDIEFNVTNILRGEDHLTNTAAQIK

SEQ ID NO: 159858 - protein, 44 aa, Unknown
  Bacterial polypetide isolated from the Sargasso Sea
MEKRLRLAPSPTGLFHIGTARTALFNWLYAKKIGGKFLIRIEDT

SEQ ID NO: 159859 - protein, 85 aa, Unknown
  Bacterial polypetide isolated from the Sargasso Sea
MFYFEKDGVPLYTFSSAVDDVDYNITNVIRGDDHTSNTAVQIEIINALDENKISFAHHALLKASTGDKLSKRDNVISIDSFRKDN

SEQ ID NO: 159860 - protein, 302 aa, Unknown
  Bacterial polypetide isolated from the Sargasso Sea
KKAHWRFLLDKKKICWNDKIIGNVSIDLESLSDPVFVKEDGQFLYTLASVCDDVDFCITHVIRGSDHLTNTATQIQLIQDLGFDVPIYGHHSLLIDSSGDNLSKRLGSLSIREIRNSGIEPIALINLMSALGSSKSPKLLHSLDEIFEFFDISLFGSAPTKFDLKLLNSMSAKFLRATPYYLIKNELTNIGVPNNAQKNFWEAIKENLNSRDEISKLWDLCTNGISPIIDKQDLEFVRTALETLPEAPYNKDSWKIWTSEVSDKTGRKGKSLFLPLRKALTGNSEGPDMGKLLPFLSKIPKI

SEQ ID NO: 159861 - protein, 231 aa, Unknown
  Bacterial polypetide isolated from the Sargasso Sea
EDGTKLSKRHGAVNILDLKDKGYLKEAIINNLILLGWSNNNEKSEAIELDEIIKNFEISNLSKSSSIFSFNKLDFFNNFYLRKENGIKQFMNFCESDVELNKLLQKDNTKMKNIFNVHKKDIKKLSDLNDLIKVYFDENYKINKKEKLTSEFDSFFKEFLNLIAEIVDWNRDNIQNVINDFLKNNKIKFPVLGKPVRFLLINSYQGPSISDILVILGKKDTIDRLNQYRDN

SEQ ID NO: 159862 - protein, 258 aa, Unknown
  Bacterial polypetide isolated from the Sargasso Sea
IYSSLGFSIPNFAHLPMILGSDKKRLSKRHGAAGIEDFKKEGYSIDALLNYIAMLGWNPGTEEELFTLENLISKFDLNKIQKKGAVYDEKKLHWVAGQHMMLKSEKSLLNEIRTDDPSWQKHSKETYIFSVLKLMKIRVHTLNELKDSCTYFFSDPTDFDRDAAIKRWKDKSVNKLIVSYIRRLEKLTNWSLDELDLSLRDTAQEMAVSAAKLIHPVRLAVSGQSYGPGLFELIQLLGKMTTIRRLKKALDIFPLRDD

SEQ ID NO: 159863 - protein, 311 aa, Unknown
  Bacterial polypetide isolated from the Sargasso Sea
AIRAEVEMVFPSLPPTTDIRITSDQSEEIEAMVSSLENNIISGLILIVGVLFFFLGAGTSAFVAISIPASMSLSFMVLKAMGVSMNMIVLFSLILALGMLVDNAIVVVENIYRYIEEGWDRLTAAKKATGEVALPIIAATATTLAAFAPLLFWPGEVGEFMGYLPRTLIITLTSSLFVALVIIPTLCGMFMRLDGRPRSPLTPTARRTLLGGVALILLGTARANPLTAAMLTATVFAVWFLHRFVLRAAGRSFQESLLPRTMDRYERGLRWSLNNRARLIGSTVALFIATFVTYLATPLGSGLEYFPEDMP

SEQ ID NO: 159864 - protein, 147 aa, Unknown
  Bacterial polypetide isolated from the Sargasso Sea
MEDRDAVRKYALQNAIEYSGKGQSGSVLGRVLAEREQLRTRVKSLLSLVEKEVTRANSIAREDGIEGVRKELESLAPEALDRERHKKNEGLRDLPGNTSEVILRFAPNPNGPLSIGHSRGVAINSLYADKYQGKIVLRFDDTDTKVK

SEQ ID NO: 159865 - protein, 199 aa, Unknown
  Bacterial polypetide isolated from the Sargasso Sea
MKTDPFEIKINNSFNNLMSNRVHEILLVASPYDAFILEEDGGLTEQIMTEYIGMNFNYAPRVTRASTASDSMSYLAKDKFDLVIVMLRIEDTDPISLGKSIKKTYPYMPVILLAFDETEIKQLSQKLSPSSIDRVFIWSGDASVFPAIIKYVEDRKNAEQDIVKGDVRAIILIEDSPRMYSLILPKIYREIIYLTKNLK

SEQ ID NO: 159866 - protein, 62 aa, Unknown
  Bacterial polypetide isolated from the Sargasso Sea
VLPTEPFDEFTWSKWTEEVKQLTGRKGKQLFMPLRLALTGKERGPDMAKVLPLLQNIKAKQI

SEQ ID NO: 159867 - protein, 256 aa, Unknown
  Bacterial polypetide isolated from the Sargasso Sea
MHIERFAPSPTGKLHLGHAFSAILVALSARKNKGHFILRIEDLDFNRCLRRYEESILYDLEWLGIRWKKHPIRQSERFHLYNDAINKLWEMGVLYKCECTREQIVKAQKKLSEFVYPGICKKKKILHDNYSLRLDITKALEMVNDSSLSFFGKKEIDQKFELNSIQPEAMIKKYGDVVISRRDIRTSYHIAVVVDDHFQKITQITRGFDLYESTFCHVLLQKLLKFHTPNYFHHKILYDKDGKKLAKRTQSTTLNI

SEQ ID NO: 159868 - protein, 158 aa, Unknown
  Bacterial polypetide isolated from the Sargasso Sea
AAGLGWEVQCNGMEISQFTYFQQVGGIECKPVSLEITYGLERLATYVQNIDNIYDIKWDKNGTTYGDIFLRNEKEQSDYNFNHASSDYLFSTFNDYEKTTKSLIDKKLVIPAYEQCIKASHCFNLLDSRGLISAKERQAFILRIRTLVYNCCSLLNDE

SEQ ID NO: 159869 - protein, 184 aa, Unknown
  Bacterial polypetide isolated from the Sargasso Sea
MEKIEPFFTNELKQKIFRKNGWRTRFAPSPTGFLHIGHAFAALIGWQIANQNPEKFLLRIDDLDFTRCSGEYVNQLISDLKWLDINWTANELYQTQRLSHYSRALKYLVDKDLIYPCYLSRSELTEFLSPPIEGISKQPNTRHSLSSQVIAKRQQKGIKPVLRLDMKKAIQKVGTISWCSIDGT

SEQ ID NO: 159870 - protein, 296 aa, Unknown
  Bacterial polypetide isolated from the Sargasso Sea
RLVQAGRAYACYETPDELSLKRKSQLSAGRPPVYDRAGLKLTNEDKAKLEAEGRQPHWRFLLNDEEVSWHDIVRGDVAYNMTSLSDPVLMREDGRVIYTLASVVDDIDHGITHIIRGEDHVTNSAAQIQLFEALGSAAPIMGHVALLAGADGGGLSKRLGSLSIGALRQDGIEPVAIASLLARIGTADPVIPQRHMTTVIEGFDLGKFGRATAKFDPSELARLNSQIIQELEFVDVESRLADIGVTSGAEFWLAVRGNLGTVDEARVWWDICTQPITPVIEAPAVTNAAVALLPTS

SEQ ID NO: 159871 - protein, 43 aa, Unknown
  Bacterial polypetide isolated from the Sargasso Sea
MTFICRFAPSPTGPLHIGGVRTALFNWLMAKKNKGKFYLRIED

SEQ ID NO: 159872 - protein, 80 aa, Unknown
  Bacterial polypetide isolated from the Sargasso Sea
DDVLRAAEAALAGLDEWTTEVIERALRAALIEERGLKPKVAFGPVRLAITGRRVSPPLFESMELLGADRSLSRIRSLHAS

SEQ ID NO: 159873 - protein, 75 aa, Unknown
  Bacterial polypetide isolated from the Sargasso Sea
MIKTRFAPSPTGWLHIGGVRTALFSWLFAKSQGGEFIIRIDDTDTSRSTQEFCDSIISALNTLGLKSDKDLIFQS

SEQ ID NO: 159874 - protein, 82 aa, Unknown
  Bacterial polypetide isolated from the Sargasso Sea
MEIAKKKLSKRDLDKNKQSKSSIGQAFKMSTELVSAVAVGTIIGFILDKTFGTKPWLILIFFFVGVAAGIINVVKSAKKMQK

SEQ ID NO: 159875 - protein, 51 aa, Unknown
  Bacterial polypetide isolated from the Sargasso Sea
WTSKISEKTKRTGKNLYMPLRLALTGLEKGPELRYLMPLLNKDLIKKKLGF

SEQ ID NO: 159876 - protein, 29 aa, Unknown
  Bacterial polypetide isolated from the Sargasso Sea
MKKVATRFAPSPTGPLHIGGVRTALFNWL

SEQ ID NO: 159877 - protein, 208 aa, Unknown
  Bacterial polypetide isolated from the Sargasso Sea
AAQGHARERHAALPYPGTCRHGLHGRTGRSWRFNVTDFKPKQPIALVGHAHSATYSIADGVLQWYDRRLGRQQQQVATAVGDFVLRRADGLWAYQLAVVVDDADQGITDVVRGEDLSDNTPRQILLQQALGLPTPRYLHTPLVCGENGEKLSKQNGARALDLDNPLLALSHAALALGLPAVANLHNICIADALAQWVAAWRRNYNGPP

SEQ ID NO: 159878 - protein, 290 aa, Unknown
  Bacterial polypetide isolated from the Sargasso Sea
IFRVPQKFRNLSSEKEKALIEEGKSFTVRLKVPKGETEFNDLVYGSIKVQNKDLDDFIIARSDGSPTYNFVVAVDDADMKISHVVRGDDHLANTPKQILVYRALGLDVPIFAHLPMILGSDKKRLSKRHAATNVQEYKEKGFTSKVILNYLSLLGWNPDSDKEIFDENELINSFQFNQVQKKSAVFDEKKLLWISQQHLSQMSVRDLMNEIYALNPSWGDGLEWDYLKEVVKLIKDRSKTIAEITSMSEIFFTDKLEYDSDLLIKIYNDKSIAIIKDFKSALTSIQDCRG

SEQ ID NO: 159879 - protein, 34 aa, Unknown
  Bacterial polypetide isolated from the Sargasso Sea
MSAVRTRFAPSPTGYLHIGGVRTALFCWLYARPS

SEQ ID NO: 159880 - protein, 65 aa, Unknown
  Bacterial polypetide isolated from the Sargasso Sea
INRCKELLPPLPRDKTSWRIWTDHIKIETNRSGKSLFLPLRLALTGKPDGPDMNKLFPLLQKIKI

SEQ ID NO: 159881 - protein, 209 aa, Unknown
  Bacterial polypetide isolated from the Sargasso Sea
MIKTRFAPSPTGWLHIGGVRTALYAWLFAKRNAGEFYIRIDDTDTSRSSKEYCESIINSLNTLGIQSDAELLYQSSRFDVYIDVIEKLLSDDMAYYDKVEINEKTKDTNLEIQYENKLNRDGYVIRFRNPNKSTIVINDIIHGSITFENKSFHDVVILRSNGVPTYNLTSVVDDIYMKISHIIRGDDHLSNTPVQANLFEALEADIPSF

SEQ ID NO: 159882 - protein, 78 aa, Unknown
  Bacterial polypetide isolated from the Sargasso Sea
MKKVATRFAPSPTGPLHIGGVRTALFNWLYSKNQKGNFYLRVEDTDKERSKDEYKDQIVKSLKWIGINYDGEEYIQSK

SEQ ID NO: 159883 - protein, 148 aa, Unknown
  Bacterial polypetide isolated from the Sargasso Sea
MNSLSRFAPSPTGLIHIGNARSAVLNWAYINNKKGNFILRIDDTDIERSKKEYEEKIKRDLSWLGISWNKSFNQSDRKKIYDQSIEKLKKDNRLYPCFESQEELSLKKKSQLTSGKPPIYDRSSLNLTEIEIKNLLQSGKKPHWEIQT

SEQ ID NO: 159884 - protein, 35 aa, Unknown
  Bacterial polypetide isolated from the Sargasso Sea
KYFLRIEDTDKERSKDEFKKQIISSLSWLGIEHDG

SEQ ID NO: 159885 - protein, 256 aa, Unknown
  Bacterial polypetide isolated from the Sargasso Sea
MNYRGRIAPTPTGYLHLGHARTFWIAHERCKAANGTLLYRNEDLDVDRCKEEYQKAAIEDCRWLGIEWEGDTINQSARIDYYQKAFKKLHLAGHLYPCICSRKDIQEASAAPHGEDGETIYPGTCRNSDTSTINQHANWRFRIPEGRKIEFEDGFLGSQSFTCGVDFGDFPIWQKNGMPSYQLAVVVDDADMKITEVVRGADLLVSTARQLLLYEALGLTPPSYYHCELMCDGNGKRLAKRHDSLSLQTLRRKGKT

SEQ ID NO: 159886 - protein, 319 aa, Unknown
  Bacterial polypetide isolated from the Sargasso Sea
ERNSIYESFYDKLLEQDLIYPCFTSDEELKIIRRNQMAAGEPPRYTGIWANASQEDIEKELEKGTQPVYRFRLPKDRTIAFQDLVKGEQSFHTSDLDDFIVRKKDLSPTFMFANAIDDSLMGVNVVLRGDDHLSNTPRQIALLEALNLQIPEFIHVALFTGDDGAPLSKRNGSLSVKELKEIGYFPQAVINYLSRVGHVIPDNELRDLEGLSTVFDVDNISTSPSRIDHDQLTFWQKNVIESKSIEELSSWLESHLKNLPKDIDQESFVELIKDNIIFPNDAVEYLDNLFVNSLSSIKEVEDLIKQSGSDFFKLAEKIV

SEQ ID NO: 159887 - protein, 195 aa, Unknown
  Bacterial polypetide isolated from the Sargasso Sea
MFVTRFAPSPTGLLHLGHAYSALLSYEMAVKRKGLFKLRIENIDFTRCKKVYEDRIYEDLYWLGINWEEDVIIQSDRIQLYESYLKFLNDKGFIYGCRCSRSDIKNALSALSLPENTLNTFIYPGTCKEKKLNIWGNNVRIDIDKIKNYFGNIVLSFKEIGFGPNGETGLQSFNINWLKKKFGDFVIARKDIRTS

SEQ ID NO: 159888 - protein, 294 aa, Unknown
  Bacterial polypetide isolated from the Sargasso Sea
MKNCSLYLELKQKVDLIKKLSKRDDVGSLINACDAGREGELIYHQVISYLKIKKPSKRLWLQSMTKDGISKAFTSIKPDSAFKGLKDSALARTHADWVIGMNGTRAITGWSSKAYNVGFNKQVVGRVKTPTLALVVKRDIEIEDFISQEYFQIIAKFKTDSGEYEATYFDPEFNNKNFDDEDKRIKKSDRIFDLEIAKSIVSLCKNKRGNITENKKERKEYSEALFDLTSLQREANSRFGFRAQQTLQITQGLYQPRSGEGYITYPRTDSRRLPDDYPNQVLEILNKFKASKYS

SEQ ID NO: 159889 - protein, 129 aa, Unknown
  Bacterial polypetide isolated from the Sargasso Sea
RKEYIFSIKEDLIWLGINFENYYLQSKRIKMYYEISEKLKKSGKLYACYETSEELELKRKILLKSGKPPIYDRGALNLTKKQIKEYESEGRKPHWRLLLDENIIEWNDLIHKSMKFENLSISDPVLIRS

SEQ ID NO: 159890 - protein, 39 aa, Unknown
  Bacterial polypetide isolated from the Sargasso Sea
MLKTRFAPSPTGNLHLGGARTALINYIVSKKSASSKFYL

SEQ ID NO: 159891 - protein, 326 aa, Unknown
  Bacterial polypetide isolated from the Sargasso Sea
MKLGSISDNSRDGCPVLVDRCLRYMIPVNNVINNWQLAIENWSAVSPKLEKIYEKLDKGLAEGASPYDRSKLAAPFPRAYQWLDGSAYVTHVELLRKARGVELPANFWVDPLMYQGGSDHFLGPCETIKIKDINWGVDFEGELAVVVDDVPLGISENKAEQHIKLIMLVNDISLRNLIPDELNKGFGFVHGKPPSAFGPLAITPDTIGQSWKDGKVHLPLLIKLNGKEVGFANAGVDMTFSFPELVAHAAKTRPLRAGTIIGSGTISNSDQQHGYSCIAEIRMIETINEGAPHTPFLQYGDKISMEMLDSDGQSIFGSLEQTVEKC

SEQ ID NO: 159892 - protein, 334 aa, Unknown
  Bacterial polypetide isolated from the Sargasso Sea
MNKLRFAPSPTGNLHVGNFRTALINYLLAKKLSGHFMLRIDDTDNERSNLIYEEQIKKDLIWAGMNWDSEVKQSQRINKYTEVLDLLISKQLVYPCFEDPEELNLKRKAQLSSGKPPIYDRKSLNLTDKEIEEKISNGKKPHYRFFLKSEKIIWNDLIRGECVLDTSSVSDPIVVREDGRFIYTLASVIDDSDFKITHIIRGEDHVTNSAVQIQIFKALNSQIPQMGHLSLMTDIDGGGLSKRIGSLSIDELKKQNIEPQALTSYLAKIGSSQNVELHNSINQLVNEFDINSFNKAPTKFDHEFLKNFNIKFFQFINFNKIKERITENKAYSQK

SEQ ID NO: 159893 - protein, 145 aa, Unknown
  Bacterial polypetide isolated from the Sargasso Sea
MIQSSDIKKLSKRDFVVASKIRPNKETFESLMFAFNVCRHVNSNAIVLAAGNSTVGIGSGQPSRIDSCEIAIKKMNKFQRLSDKQEICAASDAFFPFVDGIEKLVQSGVSAVIQPSGSVRDKEIIKFANKAGIVLIFSKTRHFKH

SEQ ID NO: 159894 - protein, 112 aa, Unknown
  Bacterial polypetide isolated from the Sargasso Sea
KRIAGVDFGDFVVWRRDNLAAYELAVVVDDHHMEIGEVVRGKDLLTSTARQLLLYEALGWEPPQFFHTNLIVGPDSKRLAKRTNGLMIRELRRKGFSPETVLSGSVDGTFWK

SEQ ID NO: 159895 - protein, 789 aa, Unknown
  Bacterial polypetide isolated from the Sargasso Sea
MVDDAPIPDIKSTRIDTFHVPMILVEFPDANATYSPEQFDLIMNQEGYTHLNYENTGSFRDFYQEISYGQFLPIAEVSEWFTAPYEHDHYSYNNGYAVVRQLVRAMVDSLEASGFDWSGYDNDGDGYVDALNLVHQGPGAEEGDYSNIWSHKSSLGNLAVTYDGVTINSYNMNPETQLGTICSIGVLAHEFGHALGLPDLYDTDYSSSGSGKLALMASGTWGTSGTSPWYPATMVGWCKNELGWVDIVEITDDQGGVSIEQTYSSNTIFRVNHSQVEEEYWLIENRQNIGSDTLMPSSGLTIWHINDDIAQSGGWAPNNNEPYYGVGLEQADGMFALENGGPSDGNDVFPGNTDNREFSHSSSPNTTSLYGEPSMLRIDNISDPGEFMTFDVQYNEIILATASIEDGSGSAYNQGSISIGLDNEMALGEFEFELDFNPSFVEITGVTPTERTSYDSVIIENSTVTLINPTISPGTGTILNLQLFNNVGIEADVVVSYDLCLGYTTDGSEVGITIQDVADYHIQAVEQFYNIQNGTGAVGGGASYIASLINTVPIALTVFQLSNDPEILTPSAEPYEDLNENGEYDDGEPFTDWNQNGQWSPVVEPISLSEDWEIDVTVSGTDITVGISNWAEPLEPAPHELFRVNCFVSDEAELNDITTVNTNVLLVLDAWGNSGVPFVNGDGTVTIDQILSNDISENQPTVYSLDKVYPNPFNPITTIEFSVPENNNDKVRLRVFDIGGRMVENLTNKQYASGVYKLNWDASKLGSGIYFLEFKVGSLRDIRKLSLLK

SEQ ID NO: 159896 - protein, 839 aa, Unknown
  Bacterial polypetide isolated from the Sargasso Sea
MNFNYAPRVTRASTATDSMSYLAKDKFDLVIVMLRIEDTDPISLGKSIKKTYSHMPVILLAFDETEIKQLSQKLSPSAIDRVFIWSGDASVFPAIIKYVEDRKNAEQDIVKGDVRAIILIEDSPRMYSVLLPMIYREIIYLTKNLMNKTLNSTYKSLHLRGRLKVLLTPNYETAVHFSEKYGDNIIGIISDVKFLNKGKKDSHAGMKLAKAIREKHPSMPIILQSTEKDNYRLAKLIGADFLHKNSNTLLQDLRNFMILNFGFGDFIFKDKKGNEIQKATNIEELIKAVETVPIESIIYHGKSNHFSNWLAARSEFSLATKLRKINVNQFKEKEKIRQSIIEQINSPNTKLRFGEVIDYSISGGKASKFYRMCGGSLGGKARGLAFAKDMIKQSGLSHRFSNVRIKIPNTAIIGTDEFDRFMKDNKLWEDALKAQNDKEIVKLFLDGRLSMDLILKLESFLKECSYPIAVRSSSLLEDSQYQPLSGAYSTFMLANNQSSIKDRIKELTNAIKLVFASIFYKESRSHFAQSAHRTEEEKMAVMMMEIAGQKYSSGRFYPSFSGVLKSINFYPVSYMKRDEGVAYLSLGFGKTIVDGGKCLGISPKYPAIKPQFSTIKSTLTNSQSNFYSLNLKSDSPNLFNDLRSDNLSQAELDGSLKWVGGVVTSEDNILRNSLSYKGTRVVNFSPVLEWKILPLCDILNELLFLGKKALGCPVEIEFAVNIFQKKNKPSEFYLLQIKPMVLTTTKIISFDKIKKEEIFAQSHITLGNGTTDNIKNLLYLRPNKYDPSQSKTIAKEIEKFNKSINIEGKYILAGPGRWGSADPWLGVPLSWQQISNAKF

SEQ ID NO: 159897 - protein, 46 aa, Unknown
  Bacterial polypetide isolated from the Sargasso Sea
MTKKVITRFAPSPTGHLHLGGARTALFAWLFSKSNKGKCLLRIEIQ

SEQ ID NO: 159898 - protein, 79 aa, Unknown
  Bacterial polypetide isolated from the Sargasso Sea
MKKVATRFAPSPTGPLHIGGVRTALFNWLYSKNQNGKFYLRVEDTDKERSKEEYKNQIIKSLKWIGINYDEKEYIQSNK

SEQ ID NO: 159899 - protein, 87 aa, Unknown
  Bacterial polypetide isolated from the Sargasso Sea
MKCRFAPSPTGLLHVGNVRSALLNWAYAKKNNGEFILRIDDTDESRSTKEFENKIKENLTWLGVQWNKTFNQSDRIDNYNFKIEQLK

SEQ ID NO: 159900 - protein, 243 aa, Unknown
  Bacterial polypetide isolated from the Sargasso Sea
VIRGDDHTSNTAVQVEIINALDQNKITFAHHALLKASSGDKLSKRDNVISISSFREANMEPISILSLLATIGTSNSIELKDNIDQIKSEFKLSTISTSPGRIEIDVLNALNKKQVQKYNFSEIEERLEKIDEKIDQKFWETIRGNLNVVEDIKQWTDIVFNSETIKPSDKDYIKIAMELIPDDPWNDETWGLWTSAIKEKTGRKGKELFLPLREAFTGLNHGPEMKLLIQLLGREKIIERVEL

SEQ ID NO: 159901 - protein, 260 aa, Unknown
  Bacterial polypetide isolated from the Sargasso Sea
MIVTNIKAEKQTSYIGRFAPSPTGPLHFGSLVAALASYLDAKFNKGLWLVRIEDLDPPREQSGATSLILDQLLSLGLEWDNDVLFQSTRLNAYQSALHKMSQKSLTYRCDCTRASIKERSSIYDGYCRTRNRAPKHSFAIRIKTSNRKIGFQDEIRGDFKQDIGKEVGDFIVLRKDKLFAYHLAVVVDDEYQKISHVVRGGDLLSSTPRQIYLQQLLDFKTPRYAHIPIAVNDQDVKLSKQNFSPGIEIENASYLLFQAL

SEQ ID NO: 159902 - protein, 395 aa, Unknown
  Bacterial polypetide isolated from the Sargasso Sea
GFMDGEASVPTLWAVANGHYIRDNADQFRTMYGMNKLNLQRSFDIDATTLSLYLQSKFETEVAGRVLNGEIGARYTGIDTDSMFWQESAPGAVQPSTAGESKTRKILPSLSARYQLTDDVQARVAYTETLRYPGFGDLNPLIIYNEDVTGIGYGTAGGGNPDLKPTESQNYDFSLEWYFADASSLYGTVFRRDIDGFVVGFRRSVTAPKSATDPTPYKFVLTQPYNASNGELSGAEIGLVWFPDYLPQALDGFGVQASYTRLSSQQTTPDTNSEGEITGYRDTDLFGVSDSSYSIVLAYDKNDLNMRLSYAWRKGFLANYEAALFANPLEMRRKDEASMDFQLSYKLTEQFELTLDGTNLTNELYQSYYGNDATTGNFGTALYSRTFALGVRYSM

SEQ ID NO: 159903 - protein, 57 aa, Unknown
  Bacterial polypetide isolated from the Sargasso Sea
MVKTRFAPSPSGYLHIGGVRTALYAWLYARNQGGKFLLRIEDTDIERSSEESKLSIL

SEQ ID NO: 159904 - protein, 388 aa, Unknown
  Bacterial polypetide isolated from the Sargasso Sea
MFFKQILNFDFSKLDYLLISLFILLSFIGLIVLTTASVHLSDSLYGNPTHILNKQLFHLSLGLVFFITIFLIPLTFWEQFDRLLLTFGIFLLMLVFIPGVGVEVNGANRWIRLFGFSLQPSEIMKFLSILYISAYCVRRIEKVQNDLLSFIRPSILLVSIISLILIQPDLGTSAVIFASALGVLFVAGVPKRQFVLVFLIGLIGIALLIIYVPWRWERIISFVDPWSAPEKQGYQLTVSLMSIGRGDWFGVGLGQSLMKMGYLPEAHTDFIFSILIEELGLLTGILIVAMLFGISFRIFFIGRQSLQRKNHFGFFFCFGAAILIGLHIFINVGVAVGILPTKGLTLPLFSAGGTNLLIMFSIIGLILRIDYENKISMPIASIKKRVNF

SEQ ID NO: 159905 - protein, 919 aa, Unknown
  Bacterial polypetide isolated from the Sargasso Sea
VISQWKDISGNENHAKKVWGNVAFNSTSGLKSLVFDGDDSFKLTQLPSQMGIQNSDYEIFMVIRNQDSDPGFVFAGGLESYEIHTTIGSDKDGIRFIPADSTVGGDDYVDLSVSNMVYEKTSILNARVNDDEGFIQINGENSGDTVTNARSDDNSILHIGFRSGGTFTYKGHISEILVFNKKLTNFTRNKVNHYLSEKWNLKSTVDSDDDDLVDASDNYPVGLISEPRPVSFKISFTDLAGNSGVSIDNTSSGNIIGIDTSIPVLTSVKVSSNNLDNTSLAKADDNVTLTVQSSETLQALELVKSDGSRESLVATDDSKTSWQYSRMVQAGESGVFGFQLEYSDLVGNQGTVITTSTDGSIVTLDTIAPDLTSYGVKVNDVSSFTAKSGDTLKVEFSTTETIRTPLVRIGGEDATVTGSGSSWIAEKQLGSSSTEGQVTVEMIITDASGNQRTLSNHQSTDPLASYSFIGNANDNSSHNNHLTVHGATLTSDRFGMSDSAYRFDGNDDYLTGGDVNDLGTETVTFSAWFKTSMQGWGSGNKILNKGLTSSGNYAGYHFRLGSDNHLQLGINEGNNDWSDWVGIRSINIVNDGYWHHAVGVIDRGTSNIKLYLDGELQGEANISAVGSLDTQIPFSIGNLDRGSYGEETEYFNGLIDDVRIESEALSAATVMMRSNTVRLDRTLPTLTDVSIVSDNDHNRALAKVGDVIALTFEVSEEVDSLNAYINSSPAAITGSGTTWTARKTMDHHTDPEGQVTFSVNFSDQSGNQGDSVTSTSDNSSVRFDKTSPTAALSYSAPGPYRQGETVTITADYNESMLTTSTPRFKVILEDGTQVSEKMNWVSGMDNRSSFDLQMRPGNGIAEVKLDDAMDLAGNEVIADPTEGGQFELDNIPPSAFISFQDGTGSPYPGPYRQGGDNVT

SEQ ID NO: 159906 - protein, 272 aa, Unknown
  Bacterial polypetide isolated from the Sargasso Sea
LHTLWYEAMGWEAPQFAHLSLILKPEGKGKLSKRDGDKFGFPVFPLNFTDPVTGNVSKGYRESGYLPEAFINMVALLGWSPADDKEILSLDEMAKEFDLNKVHKAGARFSKEKAEWFNHQYIQKTSDEALLNILKNSNLHLTLSDEKLLKVIKLMKERATFPKDIYESGKFFFEAPTSYDEKASKKAWNDETSAILGELSSSLQEADFNAENLKQIVHDFAENRGLGMGKVMMPLRLSLVGELKGPDVPDIMELLGKEETTSRINNAINNFK

SEQ ID NO: 159907 - protein, 139 aa, Unknown
  Bacterial polypetide isolated from the Sargasso Sea
MTERTRFAPSPTGHLHIGGARTALFSWLFAKSKGGQFLLRFEDTDTERSKDEFKDSILKSLEWLNLNPDEEPVHQSRNLERHKFLALSLFEKGAAYYCDCSIEELEELRATQIKNKQKPMYDGRSREKNLDTKEKCSRY

SEQ ID NO: 159908 - protein, 142 aa, Unknown
  Bacterial polypetide isolated from the Sargasso Sea
MIITRFAPSPTGNFHMGSLRTAIYNYLYAKKNKGKFLLRIEDTDKERSNKIYEDEILKIFDIFNLQYENLIYQSKNLSVHQEYLEKLISTDFAYQSDDGPYKFRIIKNNEFFKYDDLILGEVKIPSNTIEDFSIARSDKTPT

SEQ ID NO: 159909 - protein, 155 aa, Unknown
  Bacterial polypetide isolated from the Sargasso Sea
MSDNQVRVRFAPSPTGPLHMGGVRTALYNYLFAKKNKGKFIIRIEDTDQTRFVDGAQDYILDSLKWCGIFPDEGPGIGGDFGPYVQSKRKDRYKEYADLLIENGNAYYAFDSSEDLEKMRSQAKKMGMPNWQYNGVSRSSMKNSLTLPKDEVDRL

SEQ ID NO: 159910 - protein, 238 aa, Unknown
  Bacterial polypetide isolated from the Sargasso Sea
AHIPLIHSEKGKKLSKRDNASTINDYIKIGIIPEALRNYLLRLGWSYKDKEIFNLKESIDLFDFQGIGKSPSKLDMSRILSINETYLKMTEDKTLFNFLKEYVSNFKEPIDKAKETILMKSMKFLKNKAKTLEDIWENAQYIIKEKIVINSEDIKLIDDLSKKIIRDFITEYEKISSLTREALEPVIKSLIEKHKTNFKGVGQPLRIALVGSKFGPGLYDVILSLDKEEVLKRLKLII

SEQ ID NO: 159911 - protein, 267 aa, Unknown
  Bacterial polypetide isolated from the Sargasso Sea
NRKWRDKRESDAPKDIKPVIRFKSKIDGSTVLKDLVQGDVQIENNTIEDFIILRNDGTPTYNLSAAVDDKEMKVSHIIRGDDHKINTFKQMQIYMAMKWELPSFAHIPLIHTTEGKKLSKRDKASTLDDYSKIGIMPEALRNYLLRLGWSFKDKEIFTLDESIKHFNLEGIGKSPSKLDFSRILSMNEHYIKNMDENNLYDQLDEYCNVYKKKIEINKKDKIKKSLPFLKNKAKTLEDIYNNSKYILFDEVKFDENDLKLIDENAKK

SEQ ID NO: 159912 - protein, 222 aa, Unknown
  Bacterial polypetide isolated from the Sargasso Sea
MKCRFAPSPTGKIHIGNARSAILNWIYCKKNNGEFVLRIDDTDSIRSSKEFELSIKNDLEWIGLNWDYSFNQSTRNTIYNKKIQILKDKKRLYPCFETEEELALKKKALLSSGKPPIYDRSSLSLTAQDIEQKIKSGAKPYWRFKLEDETINWHDIIKGDVSFDSKNLSDPVLIRADGTLLYHLPSVIDDIEEQITHIIRGEDHIANTAYHIQIFKALEASI

SEQ ID NO: 159913 - protein, 185 aa, Unknown
  Bacterial polypetide isolated from the Sargasso Sea
MKKVATRFAPSPTGALHIGGVRTALFNWLYSKNHNGKFYLRVEDTDKERSKNEYKDQIIQSLKWIGINYDGEEYIQSEKVDDHIKVVNELIKNGHAYKCYCSSEEIEEQKKKARQKKIPYIYNRKWRDKSENDTPKDIKPVIRFKSKIDGTSVLKDLVQGDVEIENNTIEDFIILRNDGTPTYNL

SEQ ID NO: 159914 - protein, 292 aa, Unknown
  Bacterial polypetide isolated from the Sargasso Sea
QISGNSIINDLVQGKVNIANSIIEDFIILRQDGSPTYQLSATVDDHLMKISHVIRGDDHKINTFKQKQIYESMKWDLPNFAHIPLIHSEKGSKLSKRDMASTIGDYIKKGILSDALRNYLLRLGWAHKDKEIFTLEESIQLFDLSGVGKSPSKLDLTRILSLNEYYIKHMDEEKLFELFKGFAEKFREKIDPSKENSLLKSMNFLKNKAKTLDDIYCNSEYILKDNIKISPEDSRLLDSTSKNIIKDFLIKFEKVSKITKENLEKAVNELITKHKTNFKGVGQPLRIALVGS

SEQ ID NO: 159915 - protein, 28 aa, Unknown
  Bacterial polypetide isolated from the Sargasso Sea
MNVVTRFAPSPTGFLHIGGARTALFNWL

SEQ ID NO: 159916 - protein, 273 aa, Unknown
  Bacterial polypetide isolated from the Sargasso Sea
AGEKSVVRMKVLQTGECVFEDRLRGSISIGYDQIDMQVILKADGMPTYHLAVVVDDHLMGITHILRGEEWLNSVPKHKLLFEYFGWNMPELTHLPLLRNEDKSKLSKRKNPTSLNYYKDMGVLPEALLNFLGLMGWSMPDEREIFDIQDLIEAFDLDRITTSGPVFDQTKLKWLNGLYLRKLDDSDYQLKFVRWLESLGGIERLLPLVKDRVETFSELAPITNYLIGNRAELSLADFNGLRVEIDLTKKILHHLLAALDAQIEWDKDSLLETC

SEQ ID NO: 159917 - protein, 64 aa, Unknown
  Bacterial polypetide isolated from the Sargasso Sea
MTGYITRFAPSPTGNLHIGSARTALINFIFKSQHLDSKLYLRIEDTDKKRSTEEYKYNIISSLR

SEQ ID NO: 159918 - protein, 207 aa, Unknown
  Bacterial polypetide isolated from the Sargasso Sea
MEKRLRLAPSPTGLFHIGTARTALFNWLYAQKIGGKFLIRIEDTDFLRSKSEYTKNILEGLNWLGLKWDEEPVKQSERISIHKSYIKKLLECGAAYRCFTSEDEISELREEQKKKGLPPKHDNRHRSLSKEEIETFISQGRTSVIRFKIDEKIDIKWVDQIRGEIKWQGKDLGGDLVLSRRAQGYEIGDPLYNLAVVVDDNFMNITH

SEQ ID NO: 159919 - protein, 145 aa, Unknown
  Bacterial polypetide isolated from the Sargasso Sea
MTRYITRFAPSPTGNLHIGSARTALINYIFQAQHPDSKLYLRIEDTDRIRSTEEFKENIISGLKWLGIKWDNDPQIQSSNINRHLEIAKNLLKNKKAYKCICTEDQLTERRKKINSGEISSKKICISCERNNEVQSLEKGICYKN

SEQ ID NO: 159920 - protein, 73 aa, Unknown
  Bacterial polypetide isolated from the Sargasso Sea
MSKVATRFAPSPTGALHIGGVRTALFNWLYSRNQKGTFHLRIEDTDKERSKEEHKIQIIKSLNWLGINHDGEE

SEQ ID NO: 159921 - protein, 167 aa, Unknown
  Bacterial polypetide isolated from the Sargasso Sea
MTKKVITRFAPSPTGHLHLGGARTALFAWLFSKSNKGKCLLRIEDTDKDRSKEEYTNSILKSFSWMGIEFDEEPVYQSKNISLHLKAIEKLIEEGHAYYCHCSQERLDKLRKDQQKAGEKPKYDGKCRELNLEKSDSSVVRFKNSREGAVTFNDLVRGEITFSIMNR

SEQ ID NO: 159922 - protein, 153 aa, Unknown
  Bacterial polypetide isolated from the Sargasso Sea
MSKVATRFAPSPTGPLHIGGVRTALFNWLYSKKQNGKFYLRVEDTDKERSKDEYKDQIIQSLKWIGINYDGEEYIQSEKVKYHIKIANELLKNGHAYKCYCSSEEIEEQKKRARQKKIPYIYDRKWRDKKESDAPEDIKPVIRFKSKIDGTSV

SEQ ID NO: 159923 - protein, 309 aa, Unknown
  Bacterial polypetide isolated from the Sargasso Sea
LRRDAQRPGAALGKKPMYDGRSRDLGLKKSENTVLRLATPLEGETIVNDLIRGEIIFSNSELDDLILLRSDGTPTYHFCNVVDDYDQGVTTVIRGEDHISNTPRQIHIQKALDYPELEYAHLPLVLGEDKKRLSKRHAATSLNAYKEMGFTKETIINALALLGWSTENEIFLMNELIESFKLQNVQKASAVFDLKRFNWISSQQLAKLDDEAFFDVIKPFMKAEGINEDSTNYKKILLAMRTSKTNLKDIAHATRPFFFELDGYDEKGVNKFLNESLETLNFAYKLLSKIPEWNETELDIALINVRDYF

SEQ ID NO: 159924 - protein, 198 aa, Unknown
  Bacterial polypetide isolated from the Sargasso Sea
MTNIITRFAPSPTGKLHVGSARTALLNFIVSQQDSSSKFYLRIEDTDKLRSKPEYIQNIFNGLNWLGIRWEEDIQIQSKQISRHKEVANILLEKNYAYKCVCSEEKLNKRRDLIKKNKDISKKICTECKNDSDIQKLNKGFVVRIKLPDEGELRLKDKIQGEIVVKNKELDDFILLRRDQTPTYMLSVVVDDNDIGVI

SEQ ID NO: 159925 - protein, 198 aa, Unknown
  Bacterial polypetide isolated from the Sargasso Sea
MVITRFAPSPTGFLHIGNVRAALMNYLLAKKSNGIFILRIDDTDQERSKQEYVDAIKTDLDWLGLEWDRIEYQSSRLDLYNSASDKLRSIDLLYECFETPSELDLKRKKQLNMGKPPVYDRAALALSDQEKSKLRSDRGDGHWRFKLDQTRIEWNDGILKDLSIDAASVSDPVLIRADGQYLYTLASVGDDIDMGIQT

SEQ ID NO: 159926 - protein, 251 aa, Unknown
  Bacterial polypetide isolated from the Sargasso Sea
MIKTRFAPSPTGWLHIGGVRTALYSWLYARKNNGKFYLRIDDTDTTRSTEEYKNSIIFALNQLGLNYDDEITYQSNRFNHYVDKIEQLLNDDMAYYDKVEINEKTKETDLSVQFENRLNKKGHVIRFRNQKENSITINDSVHGDIIFDPKVFFDVVILRSSGVPTYNLTSVVDDIDLGITHLIRGDDHLSNLPVQVNLFESFKAKVPSFSHLPMIHGVDGKRLSKRHGAVDINHFLNEGYRVDAILNYLAK

SEQ ID NO: 159927 - protein, 88 aa, Unknown
  Bacterial polypetide isolated from the Sargasso Sea
MSKVATRFAPSPTGPLHIGGVRTALFNWLYSKNKKGKFFLRIEDTDKERSKEEFKLQIIKSLKWIGIEHDGNEYIQSKKIQDHVNVAN

SEQ ID NO: 159928 - protein, 293 aa, Unknown
  Bacterial polypetide isolated from the Sargasso Sea
ILNWIFCKQNKGEFLLRIDDTDQTRSSKEFENGIKEDLKWLGIDWDYTFNQSSRKDIYKEKINILKNNKRLYPCFETEEELALKKKSLLSSGKPPIYDRSSLKLSQEEIEQKIKSGKRPHWRFKLENDKINWKDLIKGNVSFDTKNLSDPVLIREDETLLYHLPSVIDDINEKITHIIRGEDHIANTAYHIQIFRALETDVPIFAHHPFLTDDQGKGFSKRMNSLSIENFKIDGFENISLINYFLFIGSSSDIYPMKDIEEIINKFDINKVSKSSAKFSKDSLVSLNRDTIKL

SEQ ID NO: 159929 - protein, 64 aa, Unknown
  Bacterial polypetide isolated from the Sargasso Sea
MSFNCRFAPSPTGPLHIGGVRTALFNWLLAKKNKGKYFLRIEDTDKERSKEEFKKQIITSLAWL

SEQ ID NO: 159930 - protein, 184 aa, Unknown
  Bacterial polypetide isolated from the Sargasso Sea
MSFNCRFAPSPTGPLHIGGVRTALFNWLLAKKNKGKYFLRIEDTDKERSKDEFKKQIISSLSWLGIEHDGEEYIQSKNINKHVAVAEELVKKGFAYECYCSEKEINEQKEKCKKQGIPYVYNRKWRDAKDLKIPEDVKPVIRFKSKISGNTIIKDLVQGERNISNSTIEDFVILRKDKSPTYQL

SEQ ID NO: 159931 - protein, 221 aa, Unknown
  Bacterial polypetide isolated from the Sargasso Sea
LPSVVDDIDMNITHIIRGEDHITNSGIQIEIFNALNSNIPLFGHNSLLVSENGEPFSKRNAAASIEQLKEKDIDPNAVNSLNASIGSSVDIEAFESLDLLADKFEISSLSKSPARYSNNQLDKLNSQLISNYDFEKISLLLKDKNDFLNAEFWDCIKQNISTLSEVNDWIKILNEPIEGDFNLEENYLTIAQDLLPNEPWDSKTWDEWISRLKEKTQKKGK

SEQ ID NO: 159932 - protein, 187 aa, Unknown
  Bacterial polypetide isolated from the Sargasso Sea
MNNSVTRFAPSPSGLLHVGNVRTALLNFLVSKKNNGKFILRIDDTDQERSKDKYIDSIKEDLSWLGLNYDECYQQSNRIELYDKAFDILKTKDLIYPCFETPDELDKKRKRLITRRMPPVYDRAALKLKQDEIKSLLDSGKKPYWRFKLSSKKVKFKDLIRGDVSVDLAAQSDPVIKREDGNYLYNL

SEQ ID NO: 159933 - protein, 75 aa, Unknown
  Bacterial polypetide isolated from the Sargasso Sea
MSQVVTRIAPSPTGFMHIGTARTALFNWLYARGRNGKFYIRIEDTDRKRSTAEANEVIINGLKWLGLDYDGDIVS

SEQ ID NO: 159934 - protein, 94 aa, Unknown
  Bacterial polypetide isolated from the Sargasso Sea
MKKVATRFAPSPTGPLHIGGIRTALFNWLYSKNKNGSFYLRIEDTDKERSKNEYKEQIIKSLKWIGVENDGDEYIQSKKIDNHINIANELLKNG

SEQ ID NO: 159935 - protein, 275 aa, Unknown
  Bacterial polypetide isolated from the Sargasso Sea
LNDIEDFVILRSDNSPTYHLASTVDDIDYEITLVARGEDILPSTPKHILLMNALDSEHPEFCHLPLLFGPDGKKLSKRHGDTSVSAYKDKGILPESLFNYMCLLGWSPGSDLEIFDTELAIEKFDLKNVLPNPAIFDTKKLLWMNGQYIRDTKDEIFKELFINSIQESIARDLFDEELNRIEKIIKAVQERLETMNDISEQVMFLLDEPFKINSDDWKNVNSEDGQQYMKNVRNKFISASNFELNDIEEIMREELKVLDIKHKIGFQITRVAVTG

SEQ ID NO: 159936 - protein, 156 aa, Unknown
  Bacterial polypetide isolated from the Sargasso Sea
MSFNCRFAPSPTGPLHIGGVRTALFNWLLARKNKGKFFLRIEDTDKERSKDEFKIQIINSLKWLSIDYDGNEYVQSKNISKHVSVAEELVKKGFAYECYCSEAEINEQKEKCKKQGIPYVYNRKWRDSKDLKIPKDIKPVIRFKSKISGNSAISDL

SEQ ID NO: 159937 - protein, 259 aa, Unknown
  Bacterial polypetide isolated from the Sargasso Sea
NSIIEDFVILRQDGSPTYQLSATVDDNAMKVSHVIRGDDHKINTFKQKQIYEAMKWSIPEFAHIPLIHSEKGSKLSKRDKSSTIDDYVKIGILPEALRNYLLRLGWAYKDKEIFTLDESIQLFDLKGVGKSPSKLDMSRILSLNEHYIKNMDEKILFNFLKKYAQNFKKAINSSKEDSIIKSINFLKNKAKTLDDIYQNSQYILNDEVKIASEDIKLLDTNAKKITVEFLEEFKKMKAVNKEILEKLINNLISKHKTNF

SEQ ID NO: 159938 - protein, 104 aa, Unknown
  Bacterial polypetide isolated from the Sargasso Sea
MTFLTRFAPSPTGYLHVGNIRTALFNFLLSKKNGGKFLLRIDDTDLERSKQIYEDEIKRDLEWLGIEWDLYEKQSNRFERYIDVFENLKTEHKIYPCYETKSGA

SEQ ID NO: 159939 - protein, 174 aa, Unknown
  Bacterial polypetide isolated from the Sargasso Sea
MKKVATRFAPSPTGPLHIGGVRTALFNWLYSKNKSGKFYLRIEDTDKERSKEEHKIQIINSLEWMGIKHDGEEYIQSKMIAEHVAIAKRLLENGNAYKCFCSAEEIEEQKKKAKQKKIPYVYNRKWRDISEDQTPKDIKPVIRFKSKIEGTSLLKDLVQGDVEIENNTIEDFVI

SEQ ID NO: 159940 - protein, 61 aa, Unknown
  Bacterial polypetide isolated from the Sargasso Sea
MKKVATRFAPSPTGPLHIGGVRTALFNWLYSKNKSGKFYLRIEDTDKERSKEEHKVQIINS

SEQ ID NO: 159941 - protein, 181 aa, Unknown
  Bacterial polypetide isolated from the Sargasso Sea
MSSIKVRFAPSPTGRLHVGNLRTAIVNYLFARKNDGSFMLRIDDTDDERSSAEFETAIREDLSWMGMDWDYEDRQSARLGRYDETLAQLVQAGRAYACYETPDELSLKRKAQLSAGRPPIYDRAGLKLTDEDKAKLEADGRRPHWRFLLNDAEVSWHDMVRGDVACHMSSLSDPVVMREDG

SEQ ID NO: 159942 - protein, 224 aa, Unknown
  Bacterial polypetide isolated from the Sargasso Sea
MSSVKVRFAPSPTGRLHVGNLRTALVNYLFTRKNGGVFMLRIDDTDEERSSNEFETAIREDLGWMGMGWDCEDRQSARLDRYDEALTQLIQAGRAYACYETSDELSLKRKAQLSAGRPPVYDRAGLKLTDEEKAKLEADGRRPHWRFLLNDVEVSWHDIVRGDVAYHMSSLSDPVLIREDGRVIYSLASVVDDIDHGITHIIRGEDHVTNSAAQIQLFEALGSA

SEQ ID NO: 159943 - protein, 80 aa, Unknown
  Bacterial polypetide isolated from the Sargasso Sea
PWRDRTDRPDAAFVVRMKMPDDGVMTIEDAVQGSVTVQHAKLDDMVILRADGSPTYMLAVVVDDHDMGVSHVIRGDDHLN

SEQ ID NO: 159944 - protein, 238 aa, Unknown
  Bacterial polypetide isolated from the Sargasso Sea
IRVEDTDRERSKKEYEEDIISGLEWLGISPDKTPIRQSERSDMYQKAAEKLIDSGNAYWCDCSPEDLEEMREQQAAAGKKPMYDGRSRNLGLERSDKTVLRLTTPLEGETIVNDLIRGEITFNNSELDDLILLRSDGTPTYHFCNVVDDFDQGVTTVIRGEDHISNTPRQIHIQKALGYPDLEYAHLPLVLGEDKKRLSKRHAATSLNAYKEMGFTKETIINALALLGWSTENEIFSI

SEQ ID NO: 159945 - protein, 260 aa, Unknown
  Bacterial polypetide isolated from the Sargasso Sea
KGAENKLTSMLEWSGIEIDEGPQHGGIHGPYRQSERLDIYAQYIKLLLDEGNAYRCFCTSERLEKLRNEQRNKGNTSRYDGFCRNLSKSEASRRTASGENYVVRMKIPKVPETMVLNDLIRGIVSIETSQSEDQVIVKSDGFPTYHLAVVIDDYLMKITHVVRGEEWIPSFPKHLLLYRYFGWDPPQFAHLPLILNPDRSKLSKRQGDVAVEDFMNNGFLPESLVNFVAMLGWSPGEDKELFTLPELIKEFSFERVNKSG

SEQ ID NO: 159946 - protein, 171 aa, Unknown
  Bacterial polypetide isolated from the Sargasso Sea
MIITRFAPSPTGNFHMGSLRTAIYNFLFAKKNKGKFLLRIEDTDKERSKKIYEEEILKIFNTFKLQYDNLSYQSKNLGIHQEYLEKLMSNDMAYRSKDGPYKFRVNRDNEFFEYDDLILGKIKVPSNTIEDFSVARSDKSPTFILSNLVDDNLENVTNVIRGNDHTTNSIK

SEQ ID NO: 159947 - protein, 64 aa, Unknown
  Bacterial polypetide isolated from the Sargasso Sea
MKPRLRFAPSPTGQLHLGGARTALSNYLYAKKNGGQFLVRIEDTDIERSKKEHIDQICNSLQWL

SEQ ID NO: 159948 - protein, 157 aa, Unknown
  Bacterial polypetide isolated from the Sargasso Sea
MNNSVTRFAPSPSGLLHVGNVRTALLNFLVSKKNNGKFILRIDDTDQERSKDKYIDSIKEDLSWLGLNYDECYQQSNRIELYDKAFDILKTKDLIYPCFETPDELDKKRKRLITRRMPPVYDRAALKLKQDEIKSLLDSGKKPYWRFKLSSKKVKFK

SEQ ID NO: 159949 - protein, 38 aa, Unknown
  Bacterial polypetide isolated from the Sargasso Sea
MEIRTRFAPSPTGDLHLGGARTALFNYLFAKSMKGKFL

SEQ ID NO: 159950 - protein, 249 aa, Unknown
  Bacterial polypetide isolated from the Sargasso Sea
YEALQWEKPLFAHIPLIHTLEGKKLSKRDNASTIDDYEKIGIMPDALRNYLMRLGWSYKDKEIFSLEESIKYFNLEGIGKSPSKLDMSRILSMNEYYIKNKSNDDLFQSFEEYCKNFKENINNEKLNIIKKSLTFLKNKAKTLEDIYNNSKFIINDEIIIEKAEMSLLTENAKNIIKSFMKKVNEIEVFNKETLEPIINNLISENQTNFKGVGQPLRIILTGSKFGPGIYDIIISLGKKRVLDRLSKVG

SEQ ID NO: 159951 - protein, 295 aa, Unknown
  Bacterial polypetide isolated from the Sargasso Sea
NTIIKDLVQGDINISNSIIEDFVILRQDGSPTYQLSATVDDHSMKISHVIRGDDHKINTFKQKQIYEAMKWDIPLFAHIPLIHSEKGSKLSKRDKSSTINDYVKIGILPDALRNYLLRLGWAYKDKEIFSLDESIKLFDLKGVGKSPSKLDMSRILSLNEHYIKNIDEKILFDFLKSYAQKYKKTIDPYKEDVVIKCLNFLKNKAKTLDDIYQNSQYILSKEITISPEDLKLLDANSKKIIGDFLNEFKNIKNPNKENLEKLVNSLITKYKTNFKGVGQPLRIALVGFRFGPGIY

SEQ ID NO: 159952 - protein, 335 aa, Unknown
  Bacterial polypetide isolated from the Sargasso Sea
RQKQVKRTGLKDLPNAIHGNVVLRFAPNPNGPLTLGHARGVTINSEYAKIYDGKVVLRFDDTDSKVKPPLKDAYHWIEEDYEWLTGKKPDVIVRASERMDVYMDYAVRMLKDNFGYVCTCPAEVFKELRDNSEECPCRNKETKENLSDWEKMEEGVLEEGMAVVRVKTEMNLPNPALRDWPALRIQHTSHPMVGEKYKVWPLLDFQSAIEDYEQGVTHIIRGKDLMDSTRKQTLLYNHFGWDYPETLYWGRVKIHEFGRFSTSGMRKEIENKNYSGWDDPRLPTLRALRRRGFDSEAMKDFWIDLGLTQKDISVSLKTIESFNSSKIDSNCERRV

SEQ ID NO: 159953 - protein, 80 aa, Unknown
  Bacterial polypetide isolated from the Sargasso Sea
MKKVATRFAPSPTGPLHIGGVRTALFNWLYSKNKSGKFYLRIEDTDKERSKEEHKIQIINSLEWMGIEYDGRGVYSIKND

SEQ ID NO: 159954 - protein, 58 aa, Unknown
  Bacterial polypetide isolated from the Sargasso Sea
MNKEKVLTRFAPSPTGKLHIGNIRSAILNWAYAKKNNGKFILRIDDTDAERSKEEFIV

SEQ ID NO: 159955 - protein, 56 aa, Unknown
  Bacterial polypetide isolated from the Sargasso Sea
MSQVVTRIAPSPTGFMHIGTARTALFNWLYARGRNGKFYIRIEDTDRKRSTAEANE

SEQ ID NO: 159956 - protein, 223 aa, Unknown
  Bacterial polypetide isolated from the Sargasso Sea
VGTQAYRDLGYLPTHLINYLALLGWNPGTEDEVFNFQFLIDNFSLENVNKKAAVFDNKKLDWLSGQHIMRSESADLLDSIRSIKPDWEVDGLSDQYFYSIISHLKGRSKTLLDIINQSEYFFKDPIKYDQNAVAKCWNKDTSELLKSFTEKVLAYLDWEDESIETCINDFSEKKCVSKGKLIQPLRVSLCGSLTGPSMADLMKLLGKETCIRRINNLLNILSK

SEQ ID NO: 159957 - protein, 144 aa, Unknown
  Bacterial polypetide isolated from the Sargasso Sea
MSKVATRFAPSPTGPLHIGGVRTALFNWLYSKNQNGKFFLRVEDTDKERSKDKYKNQIIQSLKWIGINYDGEEYIQSKKIDDHIKVANELLKNGHAYKCYCSSEEIEEQKKRSKQKKIPYIYDRKWRDKKESDAPKDIKPSYKI

SEQ ID NO: 159958 - protein, 241 aa, Unknown
  Bacterial polypetide isolated from the Sargasso Sea
QGDVTVANLELDDFILLRKDQSPTYMLSVVVDDHDLGVNYIIRGDDHFINTFRQYYIYKFMNWDIPQYAHIPLIHGEDGTKLSKRHGAVNILDLKKDGYLKEAIINNLILLGWSNNQEKSETIELEEIIENFEISNLSKSSCIFSFDKLDFFNNFYLRKENGIEKFINFCESDVELNKYLQKDETKMKNIFNVYKKDIKKLSDFNDTIKVYFDENYKINKTEKLTSEFDSFLNEFLNLVAE

SEQ ID NO: 159959 - protein, 208 aa, Unknown
  Bacterial polypetide isolated from the Sargasso Sea
MEKRLRLAPSPTGLFHIGTARTALFNWLYAQKVGGKFLIRIEDTDFLRSKSEYTENILEGLKWLGLKWDEEPIKQSDRISIHKSYIKKLLDCGAAYRCFTTEDEISELREEQKKKGLPPKHDNRHRNLSKEEIETYISQGRTSVIRFKIDEKIQITWVDQIRGEIKWQGKDLGGDLVLSRRSKDYEIGDPLYNLAVVVDDNFMNITHV

SEQ ID NO: 159960 - protein, 133 aa, Unknown
  Bacterial polypetide isolated from the Sargasso Sea
SLPEVVTLLAERCNTLVEMAAQSRYLFEEYEAIDEAAAKKHLRGVAAEPLILAKTKLAALDSWTTEALHELIEATAAELGQGMGKVGMPLRVAVTGLGQSPGIDAVMALVGKERVLARIDRALAYIEARMAAE

SEQ ID NO: 159961 - protein, 239 aa, Unknown
  Bacterial polypetide isolated from the Sargasso Sea
SYFSNNGEDGSKLSKRHGAINIIDLKKKGYLPEAIINNLILLGWSPKNQQNEIISLQEIINKFDIKEISKSSSIFSFDKLNFFNNYYLRLEKNLNYFIDYCKKNDELNLYLNEDQNKMLRLFEIYKKDLNYYEEILKYTKIYYDENYEINQDHEEFDIIFENNFSIFLDGLSNLENWSKYEIEEFVKNFLKQKNIKFPIFAKPLRFILTNYYQGPSISDIFYILGKKNTLRRLNQYIKD

SEQ ID NO: 159962 - protein, 49 aa, Unknown
  Bacterial polypetide isolated from the Sargasso Sea
MSKVATRFAPSPTGALHIGGVRTALFNWLYSKNQKGTFHLRIEDTDKER

SEQ ID NO: 159963 - protein, 62 aa, Unknown
  Bacterial polypetide isolated from the Sargasso Sea
MSSVATRFAPSPTGPLHIGGIRTALFNWLFSKNNKGKFYLRIEDTDKERSKDEYKNQIIQSL

SEQ ID NO: 159964 - protein, 301 aa, Unknown
  Bacterial polypetide isolated from the Sargasso Sea
LYSLYSLLRNMAGEFLLRVEDTDQERSKAEYTDAIIEGLHWLGLIFDGSPTFQSQRSELYKQEIDRLLSDGKAYRCSCSPERLDALRKEQESKGLKPMYDGLCRDKGITDENTVVRLKTPTEGSTIVDDAVYGKIEFLNKELDDLIIQRSNGTPTYHLCNVVDDNAQGVTHIIRGEDHLPNTPRQIQIIKALGYDGFNYAHLPLVLGEDKKRLSKRHAATDLMAYKKLGYLPDAILNMLARLGWSKTEKDIFSMDFLMENLELEDIQRSGAVFDIERLNFINQNHISELSDKKLLEEIKPF

SEQ ID NO: 159965 - protein, 291 aa, Unknown
  Bacterial polypetide isolated from the Sargasso Sea
TDKKRSKQEFVQNIYNGLKWLGIEWEKNIQIQSKQISRHKEIANKLLEKNLAYKCICSEDKLQQKREQIKKNKNLSKKICTGCKKDAQIQNLSADFVVRISLPDEGELVINDKIQGEVRVKNNELDDFILLRKDQTPTYMLSVVVDDNDLGVNLIIRGDDHLNNAFRQYYIYKYLNWNIPEYAHIPLVHGEDGAKLSKRHGAVDVLDFKTKGYLKEAIINNIILLGWSPGNKNEIISIKEIINLFKINKLSKSSSIFSYKKLNFFYNYYLRNDTGFKKFESFCKDNEDLRT

SEQ ID NO: 159966 - protein, 162 aa, Unknown
  Bacterial polypetide isolated from the Sargasso Sea
MAKVITRFAPSPTGTLHIGGVRTALFNYVYAKQNNGQFLIRIEDTDRERSTKEFEENILSNLNSIGLKPDQEPINQSERNSIYIAAADKLIDSKKAYWCDCSPETLEQMRAEQTAAGKKPMYDGRSRNLGLERSENTVLRLATPNEGEIIVNDLIRGEIKFN

SEQ ID NO: 159967 - protein, 284 aa, Unknown
  Bacterial polypetide isolated from the Sargasso Sea
GIRFKSKIDGSTILKDLVQGDIEIENNTIEDFVILRNDGSPTYNLSASVDDHQMNISHIIRGDDHKINTFKQMQIYLAMKWELPSFAHIPLIHTTEGKKLSKRDKASTLDDYSKIGIMPEALRNYLLRLGWSFKDKEIFTENESIQHFNLEGIGKSPSKLDMSRILSMNEHYIKNMDENKLFNQLTKYCEIYKEKIPSEKEDKIKTSLVFLKNKAKTLEDIYKNSKYIIYNKITINKDDIKLLDDNAKNIVSEFSNSISNIEKLNKENLEPIINHLIKKNNTNF

SEQ ID NO: 159968 - protein, 135 aa, Unknown
  Bacterial polypetide isolated from the Sargasso Sea
MKKVATRFAPSPTGPLHIGGVRTALFNWLYSKNQKGDFYLRVEDTDKERSKDEYKDQIVKSLKWIGINYDGEEYIQSKKVENHIQVANELLKNGNAYKCYCSSEEIEEQKKRARQKKIPYIYDRKWRDKKEADAP

SEQ ID NO: 159969 - protein, 247 aa, Unknown
  Bacterial polypetide isolated from the Sargasso Sea
EAMGWEVPNFAHIPLIHSEQGKKLSKRDNASTLEDYIKIGVISDALRNYLLRLGWSYKDKEIFTKQESIDLFDLSGVGKSPSKLDMNRIYSINETYIKSIDQKDLFNFFREYVSKYKKPLNQSKETILLKSMGFLKNKAKTLEDIWNNAQYIIKDKIEINADDKKLIDDLSKKIITEFINEYEKLSSLSRENLEPLIKSLIDKHKTNFKGVGQPLRIALVGSRFGPGLYDVILSLDKAEVLKRLKQI

SEQ ID NO: 159970 - protein, 254 aa, Unknown
  Bacterial polypetide isolated from the Sargasso Sea
MAGKEILKDVIQGQVEVNNTEIDDFVLVRKDNTPTYMLSVVVDDHDLGVNFIIRGDDHLNNYFRQKFIYQHMDWKIPQYAHIPLIHGEDGTKLSKRHGAVNLIDLKNAGYLPSAIINNLILLGWSPKNQDNEIIELTNIISQFKIKSLSKSASIFSYKKLDFFNNYFLRLDSNTKLFEEFCKSNKILREYFALDKEKLIKVFNVYKKDISKYIEIINIAAIYFSKNFRKYSDEKFQDDFNNIYIKFLELIININ

SEQ ID NO: 159971 - protein, 278 aa, Unknown
  Bacterial polypetide isolated from the Sargasso Sea
QITDALSWLGLNWDEDIVLQSKNKSRHQEMVEKMLDNGTAYRCFLQKEELDNLRLASEQKKEVFRVPQTYRDLSENKVQELLNQGKSFTIRLKVPKGETEFTDLVYGTIKVQNKDLDDFIIARSDGSPTYNFVVAVDDSDMNISHVVRGDDHLANTPKQILVYRALGLNEPIFAHLPMILGSDKKRLSKRHAATNVQEYKDKGFTATVILNYLSLLGWNPDSDKEIFSNNELIESFQFDQVQKKSAVFDEKKLLWISQQHLTEMSVRDAMNEIYKLNP

SEQ ID NO: 159972 - protein, 228 aa, Unknown
  Bacterial polypetide isolated from the Sargasso Sea
MKVRTRFAPSPTGPVHIGNIRVAIYNWLFARNHNGSFLLRVEDTDHVRSTPEAIQILLDTLNWLNISVDEEPLYQSTRIKDHLNVAEGLIQKGFAYRSKKGDAENGECILFRMSDKAISFTDSIKGDLSKGADLIEDFVIVRSNGTPVFHLANVLDDIEQGITHVIRGDDHVENTYKHIALYQAMGAKVPIFAHLPMITNSNGKPYSKRDGDAFVGDFRKNGFLSDAL

SEQ ID NO: 159973 - protein, 36 aa, Unknown
  Bacterial polypetide isolated from the Sargasso Sea
MGKSSVRVRFAPSPTGELHLGGARTALFNWLFAKNQ

SEQ ID NO: 159974 - protein, 248 aa, Unknown
  Bacterial polypetide isolated from the Sargasso Sea
MNWNLPAFAHIPLIHTIEGKKLSKRDNASTLDDYSKIGIMPDALRNYLLRLGWSYEDKEIFTLEESIKLFNLEGIGKSPSKLDMSRILSMNEHYIKSIDENELYQQLVSYCEKYKEKIKSEKEAKIKPSLSFLKNKAKTLEDIYNNAKFIIHDEVKFNDEDLKLIDEKAKIIITEFKNKILAIDEFKKETLEPVVNELIKSHGTNFKGVGQPLRVALTGSKFGPGLYDIIISLGKEEVQKRLNSQIII

SEQ ID NO: 159975 - protein, 175 aa, Unknown
  Bacterial polypetide isolated from the Sargasso Sea
LFAKNTKGKFLLRIEDTDKARSTKDSINKILDGLKWLDLKWDGEIIYQSKKQKRHSEIANELLDKGLAYKCFCSEDDLNKMREDAKILKKPFRYNRMWRDKNPNDAPKGVNPVIRIKAPTKNETVINDIIQGTIKVSNEEMDDFIIMRSDGTPTYMLSVVVDDHDMNVTHIVRET

SEQ ID NO: 159976 - protein, 30 aa, Unknown
  Bacterial polypetide isolated from the Sargasso Sea
MDVVTRFAPSPTGILHIGSARTALFNWLYA

SEQ ID NO: 159977 - protein, 233 aa, Unknown
  Bacterial polypetide isolated from the Sargasso Sea
RDLIKTNKDISKKICTECKNDTDIQNLSEGFVIRIKLPDNGELLIKDKIQGDVIVKNKELDDFIILRKDQTPTYMLSVVVDDNDLGVNFIIRGDDHLNNTFRQYYIYKFLNWLIPEYAHIPLIHGEDGSKLSKRHGAVDVLEFKRNGYLKEAIINNLILLGWSPKNRNEIIDIKEITNFFEIKKQSKSSSIFNYKKLNFFNNYYIRNDDGFEKFKDFCMNNEKLKILIMHHED

SEQ ID NO: 159978 - protein, 146 aa, Unknown
  Bacterial polypetide isolated from the Sargasso Sea
MTPIITRFAPSPTGNLHIGSARTALINYIVSRQNSSSKFYLRIEDTDKKRSKVEFTNNILNSLKWLGIRWENEIQIQSDRINRHQEIAHELLNKKFAYKCACSQEELNTRRELIKSKNKLSKKICINCKNNEEVQELSEGFVIRIK

SEQ ID NO: 159979 - protein, 163 aa, Unknown
  Bacterial polypetide isolated from the Sargasso Sea
MNSIITRFAPSPTGNLHIGSIRTALLNYIVVQQAKKNLPNSKFYLRIEDTDKQRSNEEYTKDILEGLNWLNINYDEKPLIQSSNIKRHQQIAKKLLANKKAFKCICSSETLDRKREFNKKNKIINKKLCTTCENDNEIQSKQNNYTVRIKVPNDGKNHFNDIF

SEQ ID NO: 159980 - protein, 32 aa, Unknown
  Bacterial polypetide isolated from the Sargasso Sea
MTFLTRFAPSPTGYLHVGNIRTALFNFLLSKK

SEQ ID NO: 159981 - protein, 79 aa, Unknown
  Bacterial polypetide isolated from the Sargasso Sea
MKKVATRFAPSPTGPLHIGGVRTALFNWLYSKNKNGNFYLRIEDTDKERSKEEYKNQIIKSLQWIGINHDGTEYIQSQK

SEQ ID NO: 159982 - protein, 308 aa, Unknown
  Bacterial polypetide isolated from the Sargasso Sea
PPIYDRSSLNLSEEEINQKIKSGQRPHWRFKLETKEINWKDLIKGNVSFDPKNLSDPVLIRNDETLLYHLPSVIDDIQEKITHIIRGEDHIANTAYHIQIFEALESAIPTFAHHPFLIDEQGKGFSKRMGSLSIENFKNEGFENITLLNYFLFIGSSSNIEPINDLTKIIKKFDISNISKSSAKFSKESLVSLNQDTLKLFSFNQIKDKLSHLSNNLQEETFWNFVKNNITYFHEVSIWEKVITSINNYKDFNIDKNFVDIAANELPNDPYDANTWDTWTSKIKDKTGFKGKDLFMPLRLILTGKSHG

SEQ ID NO: 159983 - protein, 48 aa, Unknown
  Bacterial polypetide isolated from the Sargasso Sea
MNIRVRFAPSPTGSLHLGVVRTAIFNYLFSKRNGGKLVLRIEDTDQER

SEQ ID NO: 159984 - protein, 126 aa, Unknown
  Bacterial polypetide isolated from the Sargasso Sea
MIITRFAPSPTGNFHMGSLRTAIYNFLFARKNKGKFLLRIEDTDKERSKKIYEEEILKIFNIFKLQYDNLSYQSKNLSIHQEYLEKLMSNDMAYRSKDGPYKFRVNRDNEFFEFDDLILGKIKVPS

SEQ ID NO: 159985 - protein, 33 aa, Unknown
  Bacterial polypetide isolated from the Sargasso Sea
MLKVATRFAPSPTGALHIGGLRTALFNWLYSKN

SEQ ID NO: 159986 - protein, 244 aa, Unknown
  Bacterial polypetide isolated from the Sargasso Sea
FLNWNKPLYAHIPLIHGSDGSKLSKRHGAMNLIDYRDMGYTSQAMFSYLMQLGWTSYENEDDYKFKKAADLFSLDKINKSPAKFDKKKLNNINSKYLKKIDVNKIYELLIERFELVLNINQERRLKSLLPDLLKRIEVYIDLKNDFEWIIEDNFICRDEEKLKQLKENKVMINEIGDLLTKCEWNKECIENTLKKYIKKKSLKFKDVGPILRIALTGKTNSPELVSIIYELGCTISLNRLKYSY

SEQ ID NO: 159987 - protein, 105 aa, Unknown
  Bacterial polypetide isolated from the Sargasso Sea
VLFNWLYSKNQNGNFFLRIEDTDKERSKEEYRKQIINSLEWIGIIFDGEEYVQSKKIDDHIKVAHELLKKGNAYKCYCSSEEIEEQKKRGKQKKIPYIYDRKVER

SEQ ID NO: 159988 - protein, 63 aa, Unknown
  Bacterial polypetide isolated from the Sargasso Sea
MSKVATRFAPSPTGPLHIGGVRTALFNWLFAKNKGGNFLLRIEDTDKERSKKEYQNQIIQSLK

SEQ ID NO: 159989 - protein, 83 aa, Unknown
  Bacterial polypetide isolated from the Sargasso Sea
MSKVATRFAPSPTGALHIGGVRTALFNWLYSKNQKGTFHLRIEDTDKERSKDEHKVQIIKSLKWLGIEHDGEEYIQSTKVKDH

SEQ ID NO: 159990 - protein, 283 aa, Unknown
  Bacterial polypetide isolated from the Sargasso Sea
WRDIPVNKHPKNSSFCIRIKSPNSGFSEISDEIQGNVKVNCHEIDDYIIIRSDGTPTFLLSSAVDDYDMSISHIIRGDDHLTNSFRQKILFDFFDYKPIFAHISLIHNERNEKLSKRDNASSILEFKDKGYLPEAINNYLLRMGWSHGDKEFFSIQEAEKLFTLSKIGKSPSKYDIKKLDFLNNYYLKNYDDKCLVEMIKQRNDVELLFNSFDKKKILLLLNLFKERALNLNSLVDDLINICIEKKKFSNDDNIIIENFVKNKEIIVKNFDNIEIWDIQKMKI

SEQ ID NO: 159991 - protein, 229 aa, Unknown
  Bacterial polypetide isolated from the Sargasso Sea
DGTKLSKRHGAVNLIDLKNDGYLPSAIINNLILLGWSPKNQDNEIIELPEIISQFDIKSLSKSASIFSYKKLDYFNNYFLRIETNAKLFEEYCKSNKKLTEYLELDKEKLFKVFKVYKKDISKYIEILSIAEIYFSKSFSKYSDEKFLDDFNNIYNEFLELIININKWEYDIINLEIKEFIKKNNIKFPVLGKPVRYLLTNDYNGASITDIFMILGKTESIERLKRYKI

SEQ ID NO: 159992 - protein, 260 aa, Unknown
  Bacterial polypetide isolated from the Sargasso Sea
ILQSNNNNRHQEMVNKMLENGTAYRCFLQKDELDKLREESDKKKVIFRVPQTYRTLSSIEQKKLIDEGKSFTVRIKVPDGETEFNDMVYGSIKVQNKDLDDFIIARSDGSPTYNFVVAVDDADMNISHVIRGDDHLANTPKQILVYKALGLNTPTFAHLPMILGSDKKRLSKRHAATNVQEYKDKGFTPKVILNYLSLLGWNPDSEKEIFDQNELINSFQFKQVQKKSAVFDEKKLLWISQQHLSEMSVRDLMNEIYTLN

SEQ ID NO: 159993 - protein, 314 aa, Unknown
  Bacterial polypetide isolated from the Sargasso Sea
MISTDLAYQSDDGPYKFRVNRDNEFFKYDDLILGEVKIPSNTIEDFSIARSDKTPTFILSNLIDDDFENVTNVIRGNDHTINTVKQKMLSNALNFKEIHYAHIPLIHDIQGKKLSKRDNITNVEDYLNDGYLAASIFNFIIKLGNNFNDLEYLNIDEAIINFNLSKTVLSPAKFDIEKLNFINQYYLKELSFSDFNKYLEKDIKNQVSSFKLEPIYKDILERCHKYTEINLEVVKLYDFFKKNLVLEIDKNEKDLIKKIHTIINNLHDNDNTVSILEKNGLPLKKIGKIIRKITVNFETKIPIEKFLYSLVLKI

SEQ ID NO: 159994 - protein, 72 aa, Unknown
  Bacterial polypetide isolated from the Sargasso Sea
MTKVATRFAPSPTGPLHIGGVRTALFNWLYSKNNLGRFYLRIEDTDKERSKDEYKNQILKSLKWMGIEHDGK

SEQ ID NO: 159995 - protein, 77 aa, Unknown
  Bacterial polypetide isolated from the Sargasso Sea
MSKVATRFAPSPTGPLHIGGIRTALFNWLYSKNQKGSFYLRIEDTDQERSKDEYKDQIIKSLKWIGIQYDGSEYIQS

SEQ ID NO: 159996 - protein, 92 aa, Unknown
  Bacterial polypetide isolated from the Sargasso Sea
MKKVATRFAPSPTGPLHIGGVRTALFNWLYSKNKNGSFYLRIEDTDKERSKDEYKNQIVKSLKWIGIENDGEEYVQSKKIDDHINIANELLK

SEQ ID NO: 159997 - protein, 268 aa, Unknown
  Bacterial polypetide isolated from the Sargasso Sea
SHVIRGDDHKINTFKQKQIYEVMKWNIPEFAHIPLIHSEKGSKLSKRDKSSTIDDYVKIGILPDALRNYLLRLGWAYKDKEIFTLDESIQLFDLKGVGKSPSKLDISRILSLNEHYIKNIDEKILFGFLKNYAQKYKNAINSSKEEAIIKSLNFLKNKAKTLDDIYQNSQYILNNEVKITQEDVKLLDVNSKKIISEFLVEFKNIKTPNKENLEKLVNSLISKHKTNFKGVGQPLRIALVGSRFGPGIYNIILSLTKDEVVKRISKIN

SEQ ID NO: 159998 - protein, 240 aa, Unknown
  Bacterial polypetide isolated from the Sargasso Sea
MIVERSTKAYEKNILDTLSSIGLSPDKKPINQSERNDIYIKAAEQIIASGDAYWCDCSEEDLEEMRNQQMADGKKPMYDGRSRDLGLERSSNTVLRLATPEDGEIVMHDMIRGEIRFNNAELDDLILLRSDGTPTYHLCNVVDDFEQGVTTVIRGEDHISNTPRQIHIQNALGYPALEYAHLPLVLGPDKKRLSKRHAATSLEEYKDMGYLDSAILNSLARLGWSGGDKEVFYMDDLIKD

SEQ ID NO: 159999 - protein, 200 aa, Unknown
  Bacterial polypetide isolated from the Sargasso Sea
QNLIYSALNWAIPVYAHIPLIHGEDGKKLSKRNAATSLIEYKKMGYPAAAMRNYLARVGWSHGDDEFFTDEQAKTWFNLQSIGKSPWRFDFKKLSNISKLHIANTDNAALLHELTGYLKAMGQPAFSQAQLNSLLKSLDFTKNAVKSFSELIEKNRFILQERPISLEPDIEERIKDLPLNVLKILTPQLQNVRWERNYLE

SEQ ID NO: 160000 - protein, 109 aa, Unknown
  Bacterial polypetide isolated from the Sargasso Sea
MSKVATRFAPSPTGPLHIGGVRTALFNWLYSKNQNGKFYLRVEDTDKERSKEEYKDQIKQSLKWIGINYDGEEYIQSEKMEYHIKIANELLKNGHAYKCYCSSEEIEEQ

SEQ ID NO: 160001 - protein, 261 aa, Unknown
  Bacterial polypetide isolated from the Sargasso Sea
MIITRFAPSPTGLLHIGNLRTAIFNFLATRKEGGKFILRLDDTDSSRSKKEFVDQVKEDLNWLGIFWDQEFSQSDHIKRYDSIKKELMEMGRVYECFETPAELDLKRKKLLSMGRPPVYDRASLQLSEKEKEKLRSEKPSYWRFKLNSEVVEWRDSILGNQSINPSSVSDPVLVKADGQYLYTLASVVDDIDYGVTDIIRGSDHVTNTAVQIQIFKALSKPVPNFGHHSLLIDLDGKALSKRDGSLNLKTLKNSGIEPMAI

SEQ ID NO: 160002 - protein, 262 aa, Unknown
  Bacterial polypetide isolated from the Sargasso Sea
IKPVIRFKSKIDGSSVLKDLVQGDVQIDNNTIEDFIILRNDGSPTYNLSAAVDDNQMKVSHIIRGDDHKINTFKQIQIYLAMKWELPSFAHIPLIHTTEGKKLSKRDKASTLDDYSKIGIMPEALRNYLLRLGWSYKDKEIFTLDESINHFNLEGIGKSPSKLDISRILSMNEHYIKNMDENDLYKRFNEYCGEYKEKIETSKEDKIKKSLIFLKNKAKTLEDIYNNSKYIIFDEVIFNENDLKLIDEKSKKIISDFKAENI

SEQ ID NO: 160003 - protein, 250 aa, Unknown
  Bacterial polypetide isolated from the Sargasso Sea
QNINRHLAIANNLLNKKNAYKCVCSEDELANRRKKINLGEINSKKICITCEKNKEVQSLESGFVIRIRIPTDGSEILDDVIQGRVEVKNNEIDDFVLVRKDNTPTYMLSVVVDDHDLGVNYIIRGDDHLNNYFRQKFIYKHMNWETPKYAHIPLIHGEDGTKLSKRHGAINLTDLKNKGYLPNAIINNLILLGWSPKNHNDEIIQFQDIISKFQIDSLSKSASIFSYRKLDYFNNYYLRLESNLNLFEEY

SEQ ID NO: 160004 - protein, 64 aa, Unknown
  Bacterial polypetide isolated from the Sargasso Sea
MKKVATRFAPSPTGPLHIGGVRTALFNWLYSKNKSGSFYLRIEDTDKERSKNEYKYQIIKSLKW

SEQ ID NO: 160005 - protein, 74 aa, Unknown
  Bacterial polypetide isolated from the Sargasso Sea
MSKVATRFAPSPTGPLHIGGVRTALFNWLFSKNQKGNFHLRIEDTDKERSKDEYKDQIIKSLKWIGVEYDGSEY

SEQ ID NO: 160006 - protein, 94 aa, Unknown
  Bacterial polypetide isolated from the Sargasso Sea
MKEIVTRFAPSPTGTLHIGGVRTALFNYVYAKQNNGKFLIRIEDTDTERSTKEFEKNILDNLISIGLQPDEDPINQSERNDIYLKAAEKIIQSG

SEQ ID NO: 160007 - protein, 144 aa, Unknown
  Bacterial polypetide isolated from the Sargasso Sea
MKKVATRFAPSPTGPLHIGGVRTALFNWLYSKNKSGKFYLRIEDTDKERSKEEHKIQIINSLKWMGIEHDGEAYIQSKMIGEHVTIAKRLLENGNAYKCFCSAEEIEEQKKRAKQKKIPYVYNRKWRDISEDQAPRNIKPSYKI

SEQ ID NO: 160008 - protein, 89 aa, Unknown
  Bacterial polypetide isolated from the Sargasso Sea
MEKRLRLAPSPTGLFHIGTARTALFNWLYAQKIGGKFLIRIEDTDFLRSKSEYTKNILEGLKWLGLKWDEEPIKQSDRISIHKSYIKKL

SEQ ID NO: 160009 - protein, 154 aa, Unknown
  Bacterial polypetide isolated from the Sargasso Sea
MEKRLRLAPSPTGLFHIGTARTALFNWLYAQKIGGKFLIRIEDTDFLRSKSEYTENILEGLKWLGLKWDEEPIKQSDRISTHKSYIKKLLECGAAYRCFTTEDEISELRNEQKKKGLPPKHDNRHRSLSKKEIETFIAQGRTFSIRFKIDENIE

SEQ ID NO: 160010 - protein, 104 aa, Unknown
  Bacterial polypetide isolated from the Sargasso Sea
RGEDHISNTPRQIHIQKALGYPDLEYAHLPLVLGEDKKRLSKRHAATSLNAYKEMGFTKETIINTLALLGWSTENEIFSIDELIESFKLENVQKAAAVPPSKKI

SEQ ID NO: 160011 - protein, 29 aa, Unknown
  Bacterial polypetide isolated from the Sargasso Sea
MKVTRFAPSPTGNLHIGGVRTALFNYVFS

SEQ ID NO: 160012 - protein, 107 aa, Unknown
  Bacterial polypetide isolated from the Sargasso Sea
MPERSWVSSVCDGALSGEIRRSRDAAGCPTTTSQIVPRGFVESVRGEWRRRGSFPRSHSSRPGISKIIRASTIVDEEEIVRVRFAPSPTGTLHIGGARTALFNWLKV

SEQ ID NO: 160013 - protein, 164 aa, Unknown
  Bacterial polypetide isolated from the Sargasso Sea
MEKRLRLAPSPTGLFHIGTARTALFNWLYAKKIGGKFLIRIEDTDFLRSKSEYTENILKGLKWLGLKWDEEPIRQSDRISIHKSYIKKLLESGAAYRCFTTEDEISELRENQKKKGSPPKHDNRHRNLSKEEIETFISQGRTSVIRFKIDENIQIKWVDQIRGE

SEQ ID NO: 160014 - protein, 87 aa, Unknown
  Bacterial polypetide isolated from the Sargasso Sea
MKKVITRFAPSPTGTLHIGGVRTALFNYVYAKQNDGLFLIRIEDTDRERSNKEYEKDILDNLSSIGLSPDQKPINQSERNEIYTKAA

SEQ ID NO: 160015 - protein, 155 aa, Unknown
  Bacterial polypetide isolated from the Sargasso Sea
ISELREKQKNKGLPPKHDNRHRNLSKEEIETFISQGKTSVRRFKISEKIEIKWLDQIRGEIKWQGKDLGGDLVLSRRAKGYEIGEPLYNLAVVVEDNFMNITHVVRGEDHISNTAKQKLIYKALNFNLPTFSHTPLILNSEGKKLSKRDCVTSID

SEQ ID NO: 160016 - protein, 244 aa, Unknown
  Bacterial polypetide isolated from the Sargasso Sea
GWEVPNFAHIPLIHSEQGKKLSKRDNASTLEDYIKIGVISDALRNYLLRLGWSYKDKEIFTKQESIDLFDLSGVGKSPSKLDMNRIYSINETYIKTIDEKDLFNFFKEYVSKYKKPIDQVKENILLKSMGFLKNKAKTLEDIWNNAQYIINDKIEIGADDKKLIDDLSKKVIKDFTSEYEKLSALSREALEPIIKSLIDKHKTNFKGVGQPIRIALVGSRFGPGIYDVILSLDKSEVIKRLKQI

SEQ ID NO: 160017 - protein, 144 aa, Unknown
  Bacterial polypetide isolated from the Sargasso Sea
MKKVITRFAPSPTGTLHIGGVRTALFNYVYAKQKDGLFLIRIEDTDRERSTKEYEKDILDNLSSIGLSPDQKPINQSERSEIYIKAAEKIIESGNAYWCDCTPEELDKMRNEQTAAGIKPMYDGRSRNIGLEPSEKTVLRLATP

SEQ ID NO: 160018 - protein, 161 aa, Unknown
  Bacterial polypetide isolated from the Sargasso Sea
MSFNCRFAPSPTGPLHIGGVRTALFNWLLAKKNRGKYFLRIEDTDKERSKDEFKKQIISSLAWLGIEHESEEYIQSKNISKHVAVAEDLIKKGFAYACYCSEEEINEQKEKCKKQGIPYVYNRKWRDAKDLKIPKDVKPVIRFKSKISGNTIIKDLVKEKE

SEQ ID NO: 160019 - protein, 130 aa, Unknown
  Bacterial polypetide isolated from the Sargasso Sea
MTRYITRFAPSPTGNLHIGSARTALINYIFKSQYPDSKLYLRIEDTDKIRSTEEFKENIINGLKWLGIEWDNEPQIQSLNINRHLEVAHNLLKNKKAYKCICSEDQLTIRRKKINTGEISSKKICISCED

SEQ ID NO: 160020 - protein, 87 aa, Unknown
  Bacterial polypetide isolated from the Sargasso Sea
MSKVATRFAPSPTGALHIGGVRTALFNWLYSKNQKGTFHLRIEDTDKERSKEEYKIQIINSLKWLGIEHDSEEYIQSRKIDDHVKIA

SEQ ID NO: 160021 - protein, 273 aa, Unknown
  Bacterial polypetide isolated from the Sargasso Sea
KEKCKKQGIPYVYNRKWRDAKDLQIPKGAKPVIRFKSKISGNTVIKDLVQGDINISNSIIEDFVILRQDGSPTYQLSATVDDHSMKVSHVIRGDDHKINTFKQKQIYEAMKWDIPQFAHIPLIHSEKGSKLSKRDKSSTIDDYVKIGILPDALRNYLLRLGWSYKDKEIFSLDESIKLFDLKGVGKSPSKLDISRILSLNEHYIKNIDEKILFEFLKNYTQKYKKAINSSKEETIIKSMNFLKNKAKTLDDIYQNAQYILKDEIKIGPEDIKL

SEQ ID NO: 160022 - protein, 281 aa, Unknown
  Bacterial polypetide isolated from the Sargasso Sea
YDGRSRNLGIERSSNTVLRLATPEDGEIVMHDMIRGEIRFNNAELDDLILLRSDGTPTYHLCNVVDDFEQGVTTVIRGEDHISNTPRQIHIQNALGYPALEYAHLPLVLGPDKKRLSKRHAATSLEEYKDMGYLDSAILNSLARLGWSGGDKEVFYMDDLIKGFDIKDVQKAGAIFDITKLDWLNSQHLANLSLEGFKEHIKPFAHKINIDINDHPNTDLLIASMRTFENTLSDIAKALSPYFMDVVEYDKNAINKFLSNGSKILEDIHELLKTVADWNEE

SEQ ID NO: 160023 - protein, 41 aa, Unknown
  Bacterial polypetide isolated from the Sargasso Sea
MTTITRFAPSPTGLLHLGNIRTALINWLYAKNSGGKFILRN

SEQ ID NO: 160024 - protein, 236 aa, Unknown
  Bacterial polypetide isolated from the Sargasso Sea
HIPLIHSDKGKKLSKRDNASTLEDYIKIGIIADALRNYLLRLGWSYKDKEIFTKQESIDLFDLNGVGKSPSKLDLSRIHSINETYIKSINEKDLFNFLKEYVSKYKKPINQSKEAVLLKSMTFLKNKAKTLEDIWNNSQYIINDKVEIEPEDKKLIDDLSKKIIKEFIAEYEKINSLSRETLEPVIKSLIDKHKTNFKGVGQPLRIALVGSRFGPGLYDVILSLDKAEVIKRLSKI

SEQ ID NO: 160025 - protein, 51 aa, Unknown
  Bacterial polypetide isolated from the Sargasso Sea
MSKVATRFAPSPTGPLHIGGVRTALFNWLYTKNHKGSFFLRIEDTDKERSK

SEQ ID NO: 160026 - protein, 199 aa, Unknown
  Bacterial polypetide isolated from the Sargasso Sea
LLFIPIDGKKLSKRDNASTLEDYSKIGILPESLRNYLLRLGWSYKDKEIFNLDESIKLFNLEGIGKSPSKLDMSRILSMNEYYIKNSEESILYERLKEYCEKYKDKIKEEKENTIKKSLTFLKNKAKTLEDIFNNSKYILNDKVIFNDNDKALINNEARKIIHLFKEKISELEIFDRESLEQIVNGLIELNNTKFQRVL

SEQ ID NO: 160027 - protein, 234 aa, Unknown
  Bacterial polypetide isolated from the Sargasso Sea
MKIGRFAPSPTGPLHMGSLITALASYLDIKSKRGLWLIRIDDLDPPRIVPGSTQLILESLFAHGLVSDRAVIYQSENLRNYESHLANLLPHIYSCECSRKVLARHKIYPGTCRDKVLSTDDFALRIKVPNTLISFNDKIRGKITTNLQQEVGDFVVVRRDKLFSYNLATACDDGDQGITHVLRGEDLLSATNLQIFLMNMLKLKAPEYSHIPVLCNVNGHKLSKQTGAPPIKDS

SEQ ID NO: 160028 - protein, 281 aa, Unknown
  Bacterial polypetide isolated from the Sargasso Sea
LANVVDDHLMGITHVLRGEEWINSAPKHKLLYQYFGWDMPELCHLPLLRNPDKSKLSKRKNPTSINFYERMGFLPEAVTNYLGRMGWSMPDEREKFTLDEMIENFDIQRVSLGGPVFDVEKLRWLNGQWIRDELSDEQFMERMHQWWFNRDDLQALVPHIKGRAEVFSDVAPMAQFMFSGMLNLKPEDFAHNKLEEAQVKRVLQFTLWKLEAQRHWSKETIFADIKALAKAMDLKMGDFMFSIFVAIAGTPNSWSVMDSMALLGPDMTRARLRTALDVIGG

SEQ ID NO: 160029 - protein, 234 aa, Unknown
  Bacterial polypetide isolated from the Sargasso Sea
HIPLIHGSDGAKLSKRHGALGVDAYREMGFLPDAMINYLLRLGWSHGDNEFFTRERAIELFSLDNIGKSPARFDLEKLRGVNAHYLQQLDNSAIYDLIAPHIAPTSAFAKYRLITLLPLFQERAKTYIEIVSQLGYLLHDGAPEMTEEAGALLSVEAKKHLLKLATNLSGASWEKESLNRIIQKFLEDHRLKMRDVGLPLRAAITGIKQSPSIVDIMAVLGEAETLARLRVACK

SEQ ID NO: 160030 - protein, 102 aa, Unknown
  Bacterial polypetide isolated from the Sargasso Sea
MTKVTRFAPSPTGALHIGGVRTALFNYVYAKQNKGSFLIRIEDTDAERSTKEYEENILKGLSDIGIDSDEPPVRQSERSELYRLAAEKIIESGNAYWCDCSK

SEQ ID NO: 160031 - protein, 104 aa, Unknown
  Bacterial polypetide isolated from the Sargasso Sea
MKTITRFAPSPTGLLHLGGVRTALFNFLHAKSNGGKFKIRIEDTDQTRNSKESVKSILNGLDWLGLKYDGEVIYQSKKIKEHKKIINQLIDNNSAYKCFHTDGE

SEQ ID NO: 160032 - protein, 388 aa, Unknown
  Bacterial polypetide isolated from the Sargasso Sea
MTAIKVRFAPSPTGRLHVGNLRTALVNYLFARKMGGQFMLRIDDTDTERSTAAFEADIRADLEWMNMSWDCEDRQSLRLARYDEALSLLVESGRAYACYETQEELSLKRKAQLSAGRPPVYDRAGLKLSAEEKEKFEIHGRRPHWRFLLHDTEVAWCDLVRGEVSYHMSSLSDPVLMREDGRVIYTMASVVDDVDHGITHILRGEDHVTNSAAQIQLFEALGAKAPTMGHMALLAGADGEGLSKRLGSLSIGGLRTKGFEPIAIASLLSRIGTADPVQMQTDMASIIDSFNISRFGRATAKFDLAELENINGQIIQDMPFDMVKNQLAASGVGGGALFWETVRGNITVVREAKIWWDICTCEILPIIESKEVTKAAAVLLPEGPVDAS

SEQ ID NO: 160033 - protein, 184 aa, Unknown
  Bacterial polypetide isolated from the Sargasso Sea
MAPSPTGTLHLGTARTALFNWLFAKKEGGTFLLRIEDTDIERSREEYINNIYDGLQWLGINWDESPTIQSERVNEHKQIIKTLVDKGFAYKCYASEAELDEMRETQKRNGLAPKYDNRHRNLTPEQESEYIKLGRDPVIRFKISDEKLISWNDLIRGKMTWSGKDLGGDMVIARRAPANSIGDP

SEQ ID NO: 160034 - protein, 82 aa, Unknown
  Bacterial polypetide isolated from the Sargasso Sea
MHIGGVRTALFNWLYSKNKGGKFYLRIEDTDKERSKEEFKKQIINSLKWIGINYEDSEYIQSDKINVHINVANELLKKGLAY

SEQ ID NO: 160035 - protein, 408 aa, Unknown
  Bacterial polypetide isolated from the Sargasso Sea
ITDALSWLGLDWDEDIVLQSNNKSRHEEMVAKMLDNGTAYRCFLQKEELDKLRLASEQKKEVFRVPQTYRDLSEDEVKELLNQGKSFTVRLKVPEGETEFTDLVYGTIKVQNKDLDDFIIARSDGSPTYNFVVAIDDSDMNISHVVRGDDHLANTPKQILVYRALGLDEPIFAHLPMILGSDKKRLSKRHAATNVQEYKDKGFTATAILNYLSLLGWNPDSDKEIFNQEELIESFQFDQVQKKSAVFDEKKLLWISQQHLTDMSVRDAMNEIYKLNPDWGDGLDWNYLKEIVKLIKDRSKTITEIAEMSGLFFQESLDYDQDLISETFNEEVIAILNDFKSALENCDTWNRSEIELIFDNLIAQHDVKIGKVMKPIRVALTGITFGPGIFDLILLLGKDICLKRVRKL

SEQ ID NO: 160036 - protein, 561 aa, Unknown
  Bacterial polypetide isolated from the Sargasso Sea
MEDRDAVRKYALQNAIEYSGKGQSGSVLGRVLAEREQLRTRVKSLLSLVEKEVTRANSIAREDGIEGVRKELESLAPGALDRERHKKNEGLRDLPGNTSEVILRFAPNPNGPLSIGHSRGVAINSLYADKYQGKIVLRFDDTDTKVKPPMVDAYAWIEEEFEWMSGKTADVVIRASERMPIYLQHAEKMLIGGFGYVCKCTAEDFSEFRVSKTECPCRDKSVQQNMDDWGKMNSGEIDEGGAVVRVKTAMDLPNPALRDWPALRIQHSPHPIVGDTYKVWPLLDFQSAIEDHLQGVSHIIRGKDLMDSTRKQTILYEHFGWDYPEPLYWGRVKIHEFGGFSTSGMSSSIDSGKFSGWDDPRLPTLRAMRRRGFDPRSLAELWEEVGLTQKDISISLKTLESFNSRIIDGDCERRVFVSNPKSLDLSAENIPSRVMMARHPDGEIEGFREWEVGMTVSIQDSDFVEGKLRLKDFADIIISGSSATIESVDRSDDRKIVHWIPEKLSLEAILSVPDGEEISEVKGVLEDFELTEGEVYQLERVGFARFEGIQEGIARLLWLHN

SEQ ID NO: 160037 - protein, 218 aa, Unknown
  Bacterial polypetide isolated from the Sargasso Sea
MKKVATRFAPSPTGALHIGGVRTALFNWLYSKNHNGKFYLRVEDTDKERSKDEFRDQIIQSLKWIGINYDGEEYIQSKKVDDHIKVANELLKNGNAYKCYCSSEEIEEQKKRARQKKIAYIYDRKWRDKKESDAPKDIKPVIRFKSKIDGTSILKDLVQGDVEIDNNTIEDFIILRNDGTPTYNLSASVDDHQMNMTHVIRGDDQKINTFKQIQIYQA

SEQ ID NO: 160038 - protein, 285 aa, Unknown
  Bacterial polypetide isolated from the Sargasso Sea
TYHLCNVVDDFEQGVTTVIRGEDHISNTPRQIHIQNALRYPALEYAHLPLVLGPDKKRLSKRHAATSLEEYKDMGYLDSAILNSLARLGWSGGDKEVFYMEDLIKDFNIKDVQKAGAIFDITKLDWLNAQHLANLSLEEFKEHIKPFAKKINIDINDHPNTDLLIASMRTFENTLSDIAKALRPYFMDVVEYDKNAINKFLSNGTKILEDIHELLKTITDWNEEEIDVMLKEYQASNSLKVPEVNQPIRIALTGSTMSPSLGLTLSLFDKEESLKRIEKLINFLN

SEQ ID NO: 160039 - protein, 455 aa, Unknown
  Bacterial polypetide isolated from the Sargasso Sea
IKEKRIGLPDLKNATQGDVVLRFAPNPNGPLSFGHSRGIVINSEYAKRYEGKWILRFDDTDTVRKPPLHSAYKSIQEEVEWLTGKPADKIVIASDRIETYYKYASELISKGGAYICTLSAEEFREFRQTKSNSPDRNRSPEENLKLWEKMLNGDFKPGEAVVRIKTDMTLPNPALRDWPALRIQDTENNPHPRKNIKSKYKVWPLLDFQSGVEDHLQGVTHIIRGKDLMDSTRKQTLLYEYFGWKYPETVYWGRVKIHEFGGFSTSGMRNDIEQGKYSDWDDPRLPTLASMQRRGFSSEALRNFWIELALTQKDISASMATIYSHNVKVIDETSPRLFFVKNPLRFELRDGDEKIPSEFKTQIHPEDESLGYRIWKLPLKNNTIYIESDDFELAKKNNNKIRLKDFADIQIKDEIASIISLNPTEKLPIIHWLNSENSHGCTLEITNENEIELIK

SEQ ID NO: 160040 - protein, 260 aa, Unknown
  Bacterial polypetide isolated from the Sargasso Sea
MIITRFAPSPTGHLHLGNMRSCFLNWAYSKKNNGKFILRYDDTDQERSKDEYVKSIASDLDWLKIKYDETFYQSKRIERYNELFDQLISLKFVYPCFESSEDLDIKKKLQLKAGKPPIYDRSSLNLSKEEIEKKIINGNQPYWRFKLSQTKIKWNDLVKGETEVDLASQSDPVLRRADGSYLYHFPSVVDDIDMKISHIIRGEDHLTNSAIHLELFKCLNSDLPSLGHNPLMLNEDGTKLSKRNLDSISLKQFRRQWIYS

SEQ ID NO: 160041 - protein, 278 aa, Unknown
  Bacterial polypetide isolated from the Sargasso Sea
MVRGEEWLSSLPVHYLLYEFFGWKPPKFYHLPLILKTSGAGKLSKRDADEQGHPIFAVKWEDSNGFKEHGFIPEGLNNYLALLGWSNKEEKERYTMEELVESFSYEEINKSGARFDFKKALWINHLHLKDLESKRILDLSEQTKKLLVEKYSESEAIEVIELVKERLNTTKDIDKELSVFIKQPKEIDVSAIEKINREVIFSVLNFCKFNSELVNSPFELKNELMKFGAENDISFGNIMKTLRLSLVGSLSGPDLFKIIDFIGPEETLQRIENLINKI

SEQ ID NO: 160042 - protein, 226 aa, Unknown
  Bacterial polypetide isolated from the Sargasso Sea
MTLIKVRFAPSPTGRLHVGNLRTALVNYLFARKMGGQFMLRIDDTDAERSTDAFETDIRADLEWMGMGWDCEDRQSLRLARYDEALAILVESGRAYACYETQEELSLKRKAQLSSGRPPVYDRAGLKLSKTEKEKFEREGRHPHWRFLLNDVEVNWHDLVRGDVAYHMASLSDPVLMREDGRVIYTMASVVDDIDHGITHILRGEDHVTNSAAQIQLLKRWRKSSN

SEQ ID NO: 160043 - protein, 214 aa, Unknown
  Bacterial polypetide isolated from the Sargasso Sea
MNSLSRFAPSPTGLIHIGNARSAVLNWAYINNKKGNFILRIDDTDLERSKKEYEEKIKRDLNWLGISWNKSFNQSDRKKIYDQSIEKLKKDNRLYPCFESQEELSLKKKSQLTSGNPPIYDRSSLHLTEIEIKNLLQSGKKPHWRFKLENKTIEWNDLIKGKVSFESKNLSDPVLIREDETLLYHLPSVIDDIEEGVSEIIRGEDHISNTAFHI

SEQ ID NO: 160044 - protein, 100 aa, Unknown
  Bacterial polypetide isolated from the Sargasso Sea
MKKVATRFAPSPTGPLHIGGVRTALFNWLYSKNNDGSFYLRIEDTDKERSKDEYKQQIINSLKWIGVKNDGDEYIQSKKKDDHIKVANELLKNGHAYKCF

SEQ ID NO: 160045 - protein, 222 aa, Unknown
  Bacterial polypetide isolated from the Sargasso Sea
MNVLHYKEQGFSSEALLNYLVRLGWSKGDQEIFSIEEMIDGFDLSGINKSSAKFDLEKLQWVNQQHLLNTNDDQLRQMIKDESQIAEGLSDEVILSFINAYKNRAEKITDLVTSCDQLFSKDIKYDEAAAKKFMTSDILSPLEDIATSLRGCDWNQESISVALKSVCEKHEIGFGKIGQPIRIAVTGGTQSPSIDQTLILLDQETVIDRIETAIAYIKEKSD

SEQ ID NO: 160046 - protein, 67 aa, Unknown
  Bacterial polypetide isolated from the Sargasso Sea
MKAIVTRFAPSPTGTLHIGGVRTALFNYVYAKQNNGKFLIRIEDTDTERSTKEYEKNILDNLRSIGL

SEQ ID NO: 160047 - protein, 68 aa, Unknown
  Bacterial polypetide isolated from the Sargasso Sea
MKKVATRFAPSPTGPLHIGGVRTALFNWLYSKNQKGDFYLRIEDTDKERSKDEYKKQIIQSLKWIGIT

SEQ ID NO: 160048 - protein, 132 aa, Unknown
  Bacterial polypetide isolated from the Sargasso Sea
MKITRFAPSPTGTLHIGGVRTALFNYIFSRQHNGLFLIRIEDTDQERSKKEFEVDILQGLQWLGIEADQEPVRQSERSELYREAAEKLINSGSAYWCNCTPEELDEMRKAQSAAEKKPMYDGRSRNLGLARS

SEQ ID NO: 160049 - protein, 45 aa, Unknown
  Bacterial polypetide isolated from the Sargasso Sea
MVRVRLAPSPTGTLHIGTARTAVFNRLYARRQQGSFLLRIEDTDK

SEQ ID NO: 160050 - protein, 40 aa, Unknown
  Bacterial polypetide isolated from the Sargasso Sea
MSEVKTRFAPSPTGTLHIGGARTALFNWLYAMNKNGKFYL

SEQ ID NO: 160051 - protein, 229 aa, Unknown
  Bacterial polypetide isolated from the Sargasso Sea
MVKTRFAPSPSGYLHIGGVRTALYAWLFARNQGGKFLLRIEDTDVERSTEESKLSILEGLKWLCLNHDEEIIHQSERFEIYKEKANELIADGKAYESEGAIRFKSDRSSNVIISDHVFGNVEVNVDELDDFIIMRSNGAPTYHFAVVIDDYESGITHVMRGDDHLKNTARHIQLMEAFNYPIPDFVHLPMILGSDGSRLSKRHGAMNVLHYKEQGFSPEALLNYWSDLV

SEQ ID NO: 160052 - protein, 110 aa, Unknown
  Bacterial polypetide isolated from the Sargasso Sea
MKAIVTRFAPSPTGTLHIGGVRTALFNYVYAKQNNGKFLIRIEDTDTERSTKEYEKNILDNLTSIGLKPDEDPINQSERNEIYLKAAEKIFQSGNAYWCDCSQEELDEMR

SEQ ID NO: 160053 - protein, 238 aa, Unknown
  Bacterial polypetide isolated from the Sargasso Sea
NEERAKLSKRHGAIAVEEFRDRGYLPQSLLNFIALLGWNPGDDREVLSLEEMVDEFRFERVSKSGAVFDREKLNWMNQQYLLKLPEEEYFRMIDDVIQKGDYHDQDSGKIRQAAEILKTRLVTLSDLNNKLGLFFEENPEIKDLQAIEVLKEDNSKMVLKEFLQQAENLDQLTSENLGQLVKSVQKTTGIKGRGLWMPLRYAITREVSGPELPAMLDFFGGEKCLHLIRQTLENPSLN

SEQ ID NO: 160054 - protein, 121 aa, Unknown
  Bacterial polypetide isolated from the Sargasso Sea
MSFNCRFAPSPTGPLHIGGVRTALFNWLLAKKNKGKYFLRIEDTDKERSKEEFKKQIISSLAWLGIEHDGKEYIQSKNISKHITIAEELLKKGFAYNCYCTEDEINEQKEKCKKQGIPLCL

SEQ ID NO: 160055 - protein, 291 aa, Unknown
  Bacterial polypetide isolated from the Sargasso Sea
MITTRFAPSPTGNLHLGNLRSCFLNWIYAKKNNGKFILRYDDTDQERSKEEFILSIASDLKWLNIDHDETYFQSKRVDRYNQIFDQLISKKLVYPCFESNEDLEIKKKLQLKAGKPPIYDREALNLTKEEIEKQILSGSRPYWRFKLSQNKVQWTDLVKGKTEVDLSSQSDPVLRRADGSYLYHFPSVVDDIDMKITHIIRGEDHLSNSAVHVEIFQSLDAQVPSFGHNPLMLNEDGTKLSKRNVDSISIKKFKEEGYSTESILSYLYSVGLNADYSFKEISKKEYVDFDL

SEQ ID NO: 160056 - protein, 262 aa, Unknown
  Bacterial polypetide isolated from the Sargasso Sea
MISKLIPFKQIQIYEALGWDIPQFAHIPLIHTLDGKKLSKRDNASTLEDYSKIGILPESLRNYLLRLGWSYKDKEIFNLDESIKLFNLEGIGKSPSKLDMSRILSMNEYYIKNSEENILYKKLKEYCEIYKDKIKEEKENTIKSSLIFLKNKAKTLEDIFNNSKYILNDKVIFNDNDKELINDEAKKIIHLFKEKISELEVFDRENLEKIVNALIKLNNTNFKGVGQPLRIMLTGSKFGPGIYDIILSLGKKEVIKRLGNIG

SEQ ID NO: 160057 - protein, 342 aa, Unknown
  Bacterial polypetide isolated from the Sargasso Sea
MYDGRSRNLRLERSNKTVLRLATPEDGEIVVNDLIRGKIKFNNNELDDLILLRSDGSPTYHLCNVVDDYEQKVTTVIRGEDHISNTPRQIHIQNALGYPELEYAHLPLVLGTDKKRLSKRNAATSLEEYRDKGYLDSAILNTLARLGWSQGENDVFYMNELIKEFNIKDVQKAGAIFDITKLDWLNSQHLANLSIESFKEQLQPFLQQLDIDIEDHENSNKLIEAMRTCDNTFSGIAKSLIPYYKDIIEYDEKAIEKFINDKNILIELRDLLDKIDNWSQEVIDSVLKEYQLKNELSVPAVNQPIRISLTGSTKSPGLGLTLSIFTKNRAIERINKLLDKLS

SEQ ID NO: 160058 - protein, 148 aa, Unknown
  Bacterial polypetide isolated from the Sargasso Sea
MNNSVTRFAPSPSGLLHVGNVRTALLNFLVSKKSNGKFILRIDDTDQERSKDKYIDSIKEDLSWLGLNYDECYQQSNRIKLYDKAFDILKAKDLIYPCFETPDELDKKRKRLITRRMPPVYDRAALKLKQDEIKSLLDSGKKPYWRFK

SEQ ID NO: 160059 - protein, 442 aa, Unknown
  Bacterial polypetide isolated from the Sargasso Sea
MIKLRFAPSPTGNLHVGNFRTALINFLYAKKHNGHFLLRLDDTDTERSKLKFEESIKEDLTWANINWDSEAKQSNRIERYNDVLKIFIEKEFVYPCYETAEELSLKRKSQLSSGKPPVYDRSSLNLSDFEKEEFCSKGLKPHYRFFLNHETIFWNDLIRGECKYNLSNVSDPILVREDGRFIYTLASVIDDIDLNITHIIRGEDHVTNSAAQLQIFDAMEAARPSMGHLPLMTDSKGEGLSKRIGSLSIKDLKKEEIESISLNSYLSSIGSSKNTELKKGINNIIEDFDISHFSRAPTKFNFDELNNINKKLIQQLDYTTFKSKFRDEDQVLDEKCWNIIKKNITSFKEVKEWNEIIFGQVSDNEIDEDVREVFLKTLPDEQFDEKTWVNWSQKIRENLELKNNEIFKLMRKVLTSRMFGPEMSELILILGREKIIERLKSK

SEQ ID NO: 160060 - protein, 248 aa, Unknown
  Bacterial polypetide isolated from the Sargasso Sea
MGWEVPNFAYIPLIHTIEGKKLSKRDNASTLDDYSKIGIMPDALRNYLLRLGWSYQDKEIFNLNESIKYFNLEGIGKSPSKLDMSRILSMNEHYIKTIDEQELFKSLVEYCEIYKEKIKPEKEEKIKNSLSFLKNKAKTLEDIFNNAKYIILDKINFNPDNLKLIDDKAERIIQEFKVEISSLDILNREKLEPIVNNLIKKHETNFKGIGQPLRVILTGSKFGPGLYDILISLGKEEVDKRLGNKITR

SEQ ID NO: 160061 - protein, 32 aa, Unknown
  Bacterial polypetide isolated from the Sargasso Sea
MIERARFAPSPTGPLHIGGIRTALFNYLIAKK

SEQ ID NO: 160062 - protein, 293 aa, Unknown
  Bacterial polypetide isolated from the Sargasso Sea
MPVPDHLLLELERGQRWRADGTYRGRYAPSPTGALHLGNLQTALLSWLQARQAGGVWLLRIDDLDTPRNRPGAVEAIQADLHWLGLDWDGEPILQSRRRGLYASWLSWLRRRGALFPCRCSRRELAGLARYPGTCRDGSAGWGWRDRRLPSWRLRVPIRDPDGSGDVVVRRADGFIAYQLATVIDELALGITDVVRGEDLREALPAQRSVYRALQQQPPRFHHGPLRCDAEGRKLSKREASSGLMALRELDLDAPAVVGLLASGLGYGPPGARLSAIELLEDLTQKGIRAGRS

SEQ ID NO: 160063 - protein, 174 aa, Unknown
  Bacterial polypetide isolated from the Sargasso Sea
MTGYITRFAPSPTGNLHIGSARTALINFIFKSQHPDSKLFLRIEDTDKKRSTEEFKNNIISSLKWLGIKWDDEPQIQSLNINRHLSIANNLLNNNNAYKCICTEDELINRRKKINIGEVNSKKICNSCEKNKEIQSLESGFVIRIKIPTDGSEILEDVIQGKIEVKNNEIDDFV

SEQ ID NO: 160064 - protein, 228 aa, Unknown
  Bacterial polypetide isolated from the Sargasso Sea
GKKLSKRDNASTLDDYSKIGIMPNALRNYLLRLGWSYKDKEIFDLDESIKYFNLEGIGKSPSKLDIDRIYSMNEHYIKNIDENDLFNFLITYCETFQEKINNLAQKKIKNSLHFLKNKAKTLEDIYMNSKFLINDKIQIEKEDKKLLDETAIKIIKLFCDDINKLSDFTRETLEPIINNLIKNNNTNFKGVGQPLRICLTGSKFGPGIYDILCALGKEEVSKRLSQIR

SEQ ID NO: 160065 - protein, 53 aa, Unknown
  Bacterial polypetide isolated from the Sargasso Sea
MTNSSDTLAVAIDDKPRDFIREIITVDTDSGRYNEIVTRFPPEPNGYLHIGHC

SEQ ID NO: 160066 - protein, 82 aa, Unknown
  Bacterial polypetide isolated from the Sargasso Sea
DRLFAVPEPGREDDTLAALNPQSLEVLTGAMVEPGLREAEPEQVFQFEREGYFVADRYDHTPENPVFNLTIGLRDTWSASNA

SEQ ID NO: 160067 - protein, 271 aa, Unknown
  Bacterial polypetide isolated from the Sargasso Sea
AIEGVTHSLCTLEFSDNRALYDWYLTQLPLDAPPPYQTEFARLELTYTVTSKRQLKKLVDDGVVDGWDDPRLPTLRALRRRGYPAKAIREFCAFIGVARTNARHDIELLESFVRTELNLSASRRMAVLDPLKLKITNWPTDSAGEPLSDVRSLVNNPENDSEGSRDVSFSGELWIEQEDFKMDPPPKYFRLAPGREVRLRGGYLVTCTDVVCDEEGVPIEVHCEYDPDTAGGAAPDGRKVKATIHWVDAANAIDGSVAMYERLFKTQLPGS

SEQ ID NO: 160068 - protein, 108 aa, Unknown
  Bacterial polypetide isolated from the Sargasso Sea
KVKGTIHWVSAAHALESEVRLYNPLFENPKDGNAEDYLDKLNSDSLEILKGCFVEPLLSLATSDSPVQFERTGYFNLDRCSNEGCLVFNRTVSLRDSWAKENLKKNPS

SEQ ID NO: 160069 - protein, 181 aa, Unknown
  Bacterial polypetide isolated from the Sargasso Sea
KKEMGSREMPFGKNILIEKDDFMESPEEDFYRLSPGAEVRLRYAYIIKCEEIIKDEDGEIIELICSYDPDTKSGVGTSKKKVKSAIHWVSADHSITGKVSLFETLYSDPSPDSDSQLNPNSKLEIDEAQFEQSLSNAKIGGRFQFERSGYFILDEIKDEKLSFNRIVTLKDTWAKIQKKKK

SEQ ID NO: 160070 - protein, 161 aa, Unknown
  Bacterial polypetide isolated from the Sargasso Sea
MDKGKNFIEQIIDEDLSSGFDNSKLQFRFPPEPNGFLHIGHVKAIVLNFELAKKYKAKINLRFDDTNPENEDQIYIDAIKQDISWLGYKWDKECYASDYFDTLHDWAVELIKKDKAYIDSQTSSEIAAQKGTPTEPGKESPFRNRPVEESLDIFSKMKNGD

SEQ ID NO: 160071 - protein, 74 aa, Unknown
  Bacterial polypetide isolated from the Sargasso Sea
MKKAKNFIEHIIDEDLRNGFDKSKLRFRFPPEPNGYLHIGHVKAIVLNFELAKEYSAKINLRFDDTNPEKEEQK

SEQ ID NO: 160072 - protein, 202 aa, Unknown
  Bacterial polypetide isolated from the Sargasso Sea
PEDKSEQLDIPNHPNDPTMGERKVPFSKIIYIEKDDFMEEPSKKFFRLAPGKEVRLRYAYYIICNKVVKDDSDNILELHCSYDPDSKGGDSPDGRKVKGTLHWVSAEHAFKTEVRLYDRLFDDPKPDSNKHENGWKDFLNSDSIKVVKNAFLEPSLKSANKEDFFQFERIGYFCVDSKDSDAGKPIFNRTVSLRDSWAKKQK

SEQ ID NO: 160073 - protein, 174 aa, Unknown
  Bacterial polypetide isolated from the Sargasso Sea
MDKGKNFIEQIIDEDLSSGFDSSKLQFRFPPEPNGFLHIGHVKAIVLNFELAKKYKAKINLRFDDTNPENEDQIYIDAIKQDISWLGYKWDKECYASDYFDTLHNWAVELIKKDKAYIDSQTSNEIAAQKGTPTEPGKESPFRNRPVEESLDIFSKMKNGDFEQGKHVLRAKIS

SEQ ID NO: 160074 - protein, 93 aa, Unknown
  Bacterial polypetide isolated from the Sargasso Sea
MKKHKNFIEHIIDQDLRNGFDKNLLKFRFPPEPNGYLHIGHVKAIVLNFELAKEYGAKINLRFDDTNPEKEEQKYKDAIKENINWLGYNWDEE

SEQ ID NO: 160075 - protein, 58 aa, Unknown
  Bacterial polypetide isolated from the Sargasso Sea
NPNSLEVVNGLVEASLVNAPAEKAYQFEREGYFCADNKDSSAEHLVFNLTVALRDSFE

SEQ ID NO: 160076 - protein, 265 aa, Unknown
  Bacterial polypetide isolated from the Sargasso Sea
PNFGDYQDAMIEGEPWMYHSHISFYLNCGLLLPLECVKAAEKAYQQGKAPLNAVEGFIRQIIGWREYVRGIYWLEMPEYAKKNFFNAKQNLPDFYWTADTKMNCLHQCVLETRKNAYAHHIQRLMVLGNFALIAGIDPVQVNEWFLIVYADAYEWVELPNVSGMTLFADGGHLASKPYAAGGSYINKMSDYCKNCNYKVTKKNGEDACPFNYLYWDFLIRNRNKLESNHRIGMMYKMYERMGDDKKQAISNDSQHFLKSIYDKKS

SEQ ID NO: 160077 - protein, 53 aa, Unknown
  Bacterial polypetide isolated from the Sargasso Sea
MTEIKDTVDEEQQDFIREQIRADLASGKVDKVITRFPPEPNGYLHIGHVKSIC

SEQ ID NO: 160078 - protein, 46 aa, Unknown
  Bacterial polypetide isolated from the Sargasso Sea
INQDVFQFERLGYFYPDPVDSHTEAMVFNRTVTLRDTWARLEQEQN

SEQ ID NO: 160079 - protein, 103 aa, Unknown
  Bacterial polypetide isolated from the Sargasso Sea
KKKVKSAIHWVSADHSIKGKVSLFETLYSDPSPDSDSPLNPNSKLEIDEAQFEQSLSSAKIGGRFQFERSGYFILDEIEDEKLSFNRIVTLKDTWAKIQKKKK

SEQ ID NO: 160080 - protein, 236 aa, Unknown
  Bacterial polypetide isolated from the Sargasso Sea
AKRDNVMDVAKLESSLRSDLNQRSLRRMAVLNPLKVVITNYPEDKEELVTAKNNPEDDSTGTRELPFSRELYIEKDDFLEDPPKKFFRLSPGNEVRFKFAYYITCNDVIKDDDGNIVELHCSYDKETKGGRSSDGRKVKGTIHWVSAKHCFPAEVRLYDRLFSSISPDSETDYLDSINTDSLEILTNCLVEPDLQQLSTDIPVQFERIGYFFKDSDSNRNSLIFNRTVALRDNWSK

SEQ ID NO: 160081 - protein, 222 aa, Unknown
  Bacterial polypetide isolated from the Sargasso Sea
MNKSSNRVMGVLDPLKVVITNYPEGETESLDAINNPENPNAGSRIIPFSKEIYIEKNDFMEDPPRKFFRLGPGREVRLRYAYFITCTDVIKDSDGNVVELHCTYDPSTKSGSAPDGRKVKGTIHWVSAKDAVDAEVRLYDRLFKKSDPDQGGNFLDALNSDSCMVQNAKLEPCLNDPGLQTYQFERLGYFKKDEKLSVSKNVFIRVVSLRDSWARLMKQGMT

SEQ ID NO: 160082 - protein, 82 aa, Unknown
  Bacterial polypetide isolated from the Sargasso Sea
DFPDGSDDELPTLLNPDSRHVVRGVVESVLAYATVDDRFQFEREGYFCVDEVDSKASLPVFNRIVGLRDSWARIEQKGAQSQ

SEQ ID NO: 160083 - protein, 192 aa, Unknown
  Bacterial polypetide isolated from the Sargasso Sea
MDKGKNFIEQIIDEDLSSGFDSSKLQFRFPPEPNGFLHIGHVKAIVLNFELAKKYKAKINLRFDDTNPENEDQIYIDAIKQDISWLGYKWDKECYASDYFDTLHDWAVDLIKKNKAYIDSQTSSEIAAQKGTPTEPGTESPFRNRPIEESLDIFSKMKNGDFEQGKHVLRAKISMTSSNMLMRDPVIYRALD

SEQ ID NO: 160084 - protein, 317 aa, Unknown
  Bacterial polypetide isolated from the Sargasso Sea
DYIEQVSHSLCTLEFKPHRDLYDWFLDLVVEPKKIRPKQREFARLNLSHTITSKRKLLSLVEKGFVSGWDDPRMPTISGLRRRGYTPDALKKFVTTAGVAKRENIIEMSLLEFCAREDLNKKCNRLMVVQAPLKLTISNYPEDQVEQLPLVNNPENDDSGQRMVAFSKQVYIERTDFLEDPPKKYFRLSPGNEVRLKGAYIIKAERTVKDSNGNIIEIICTYDPKSKSGSGSAESQRKVKGTLHWVSCASNTPVEIREYDRLFEHPSPGDFSVEDLSKAINNDSITVFHGFGEKGLTKSKASESFQFQRKGYYIKRY

SEQ ID NO: 160085 - protein, 307 aa, Unknown
  Bacterial polypetide isolated from the Sargasso Sea
RDRSMKENLVLFEKMKNGEVKEGAMTLRAKIDMAHSNMHMRDPLMYRIINERHHRTGSDWVIYPIYDFAHGVSDAIEGITHSICTLEFEVHRPLYEWFNNKINTPAKPQQIEMARLNISNAVTSKRKVKKLIDEGVVFGWDDPRLTTLAGIRRRGIPAQAIRNLAEGIGVSKRNSITEMSRVDYYTRQVLNKTANRVMAVLDPLKVTITNFDEGKVEMCEAKNNPEDESAGTREMPISRTLYIERSDFMEDAPKKFFRLTNGKEVRFKHGYYITCNEVLKDAQGNITELLCTYDPTTKGGWSDDGRK

SEQ ID NO: 160086 - protein, 227 aa, Unknown
  Bacterial polypetide isolated from the Sargasso Sea
SILRSDLNKNSQRRMAVLNPIKVIITNYDKNKTEHLQAINNPEDERAGKRELPFSRELFIEADDFMEDPPKKYFRLSPKNEVRLKFAYFITCHEVVKNSKGEIIEIHCTYDKNSKGGKSPDGRKVRGTIHWVSASHAIDASIKLYDRLFKSPNPESSENFLDDLNDSSLITINNCKLEPSLLEVKNDEIFQFERIGYFIKDKISNKSDLVFNRTVSLRDTWAKLKKQ

SEQ ID NO: 160087 - protein, 77 aa, Unknown
  Bacterial polypetide isolated from the Sargasso Sea
MGKRASRKPFMSKKDKYRGKDFIRQMIHHDIDSGVNDGRLATRFPPEPNGYLHIGHALSICINFGIAEEFDAPCYLR

SEQ ID NO: 160088 - protein, 234 aa, Unknown
  Bacterial polypetide isolated from the Sargasso Sea
EDGYVSGWDDPRMLTLSGLRRRGYPASAVRLFCERIGISKSENNIDMNVLEDCAREVLDKTAIRLMCVLKPLKVVITNYPENKTEDFQPARHPKKPEMGTRKVPFSREIYIDQEDFREDPPTNYFRLAPGKEVRLRYAYVIRCDEVIYDAKGKVSELHCTYDPATRSGKKAEGRKVKGIIHWVSAKDSIQVEVRLYDRLFAKPIPGSDDPEGKFLNDINQNSIEVLSDCRVETG

SEQ ID NO: 160089 - protein, 172 aa, Unknown
  Bacterial polypetide isolated from the Sargasso Sea
DREDFREEANKKFKRLVLGDRVRLRYGYVVRATDVVRDDQGEIVEVRCTYDPDTLGKNPENAEGQGKMRGVIHWVSADKALPCEVRLYDRLFSVANPNKELEEGQTFLSHINPDSLTVLENCLVEPGLRGALAETRYQFEREGYFCVDQDSTENRLVFNQTVGLRESWPKEA

SEQ ID NO: 160090 - protein, 181 aa, Unknown
  Bacterial polypetide isolated from the Sargasso Sea
MAVLRPLKVVIENYPEGQIETIQAASHPSDESMGTRELAFGRELYIDVADFREEANKQYKRLVMGKEVRLRNAYVIKAERCDKDSEGNITTVYCSYDADTLGKNPADGRKVKGVIHWVEATTAKPAEFRLYQRLFTDPNPAAAETVDEVLNPNSLEVVNGLVEASLVNAPAEKAYQFEREG

SEQ ID NO: 160091 - protein, 119 aa, Unknown
  Bacterial polypetide isolated from the Sargasso Sea
RSGAKPEGRKIKEIIHWVSAKDSIQVEVRLYDRLFTKPIPGNDDSEGNFLNDINQNSIEVLSKCQLETRIMTSVNQKVFQFERIGYFYLDPEDSLPEALVFNRTVTLRDTWARLEQEQN

SEQ ID NO: 160092 - protein, 26 aa, Unknown
  Bacterial polypetide isolated from the Sargasso Sea
REYRGTLKEPGKNSPYRDTPVEENLQ

SEQ ID NO: 160093 - protein, 125 aa, Unknown
  Bacterial polypetide isolated from the Sargasso Sea
MPATDFIRNIIRDDLSSGKHQRLVTRFPPEPNGHLHIGHAKSIQLNFGTAEEFRGICFMRFDDTNPLKEEDEYVEGILQDVRWMGYDWAERLTYASDYFEQLYEFAEELIKKGKAYVESQSAEEI

SEQ ID NO: 160094 - protein, 182 aa, Unknown
  Bacterial polypetide isolated from the Sargasso Sea
CREIYIESDDFREDPPRKFRRLSPGSEVRLRYGYIIKCEEVIKDQSGEVIELRCSYDPETRSGSEQAQRKVKGTIHWVSARHAIQRELRLYDRLFIAPNPDQGTDDFKRHLNPDSLEILKNSMLEPILEAAKPAERFQFERQGYFTIDTEFPDCSVFSRTVTLRDSWAKIERQAAIEESRQA

SEQ ID NO: 160095 - protein, 301 aa, Unknown
  Bacterial polypetide isolated from the Sargasso Sea
SLKIIGLLYNWFIDKLNIYPSRQIEFARLNISGTMMSKRQLSELVLSNMVNGWDDPRMPTISGMRRRGYPSEAILDFCKRTSITKRTNLVDLSLLEHCVRENLNKSAYRVMAVLDPIKVVIKNYSNDSLEEIDALNNPEDPAMGSRKVPFSREIYIEREDFAEIPPPKFHRLTIGKEVRLRYAYIVKCVDVIKDEKGEIIEIHCEYDENSHGGKPADGRKVKGTIHWVSALKSSRAEIRIYDKLISEQQFDEENSDNMELNPNSIKVLKNCPIEISLENASEGIHYQFERSGYYILDSQRY

SEQ ID NO: 160096 - protein, 139 aa, Unknown
  Bacterial polypetide isolated from the Sargasso Sea
MNENQTPAPPPSHFIRKIIEADLQSGKHQQVVTRFPPEPNGFLHIGHAKSIFLNFGMPRDYGGHCFMRFDDTNPVKEDATYSQAILEDVRWLGFDWGNRLTHASDYFEQLYEFACVLIRRGKAYVDSLSAEKIGNTEAP

SEQ ID NO: 160097 - protein, 296 aa, Unknown
  Bacterial polypetide isolated from the Sargasso Sea
NYTVVSKRKLKRLVDDGFVDGWDDPRMPTISGLRRRGYTPESIRNFSEGIGVTKRDTIVDVAKLENSLRDDLNKRASRVMAVLDPLKVVITNYPDNKLEYVDAINNPEDERAGKRKITFSKEIYIERNDFMEEPPKKFFRLSPGQEVRLKFAYYITCNEVKKDEKGKIIELRCTYDPVTKGGRSEDGRKVRGTLHWVSAEENIKAKIRLYDRLFNSEHPEKNGDFIENINEESLEIIDNAILENSFNSEVSDFPYQFERIGYFKIDSKDSSSEKLVFNRAVSLRDSWARYNKKVSQ

SEQ ID NO: 160098 - protein, 298 aa, Unknown
  Bacterial polypetide isolated from the Sargasso Sea
MAFALTSKRKLHALIENGVVDGWDDPRLVTISGMRRRGYPPNAILDFCERIGITKKDNYIEMGVLENSVREELGDTTQRRMGVLDPLKVTIQNFENDKVEVLEAQNHPQIPEFGMRKISFTKELYIEKGDFREDAPRKFHRLKPGGEVRLRYAYIIKCEEVVKDSSGNIKELICSYDPDTKSGTGKSDKKVKGTIHWVSAKDSFDAEIRLYDRLFKEHNPAASDDLERTINPDSLKTVQAKLEDSLGVEDAPPSFQLERTGYFCLDTKLSNGKKRIYNRIVTLRDSWAKIEKAAMSQG

SEQ ID NO: 160099 - protein, 290 aa, Unknown
  Bacterial polypetide isolated from the Sargasso Sea
VSKRLLTILVEQGVVGNWDDPRMPTLSGMRRRGYPPEALVDFCTRIGVTRNQQNVELSVLDNCVREALDPGTPRAFAVTRPLKIVIENYPEDEEEELEALNHPGDESLGTRSLPFCRELYIEQEDFLEDPPKKFFRLAPGREVRLRYAYLVTCTEVIKDSSGEIIEVRCTYDPETRGGNAPDGRKVKGTIHWVSARHSAQAEVRLYEPLFVDPEPHVSTEDDLQNALNETSLTTLDNVQVEPSLADAAPGSIFQFERLGYFCVDRDSTDAKKVFNRTVALRDSWAKTKSK

SEQ ID NO: 160100 - protein, 69 aa, Unknown
  Bacterial polypetide isolated from the Sargasso Sea
MVQGSDHLGNEQKVVTRFPPEPNGYLHIGHAKSICLNFGIAKANNGECHLRLDDTNPVTEDIKYISSHC

SEQ ID NO: 160101 - protein, 301 aa, Unknown
  Bacterial polypetide isolated from the Sargasso Sea
REFARLNLSHTITSKRKLLALVEKGFVSGWDDPRMPTISGLRRRGYTPEALKKFVTTAGVAKRENIIEMSLLEFCAREDLNKKCNRLMVVQDPLKITISNYPNQQAEELELINNPENPDSGSRLVPFSKEVYIEQTDFLEAPPKKYFRLSPGNEVRLKGAYIIKAQEVIKNAKGKISEIICSYDPNSKSGSGTPESQRKVKGTLHWVCCSSNTPVEIREYDRLFEHPSPGDFSEEDLAQAINKDSVKVFNGYGEKELSKSSISESFQFQRKGYYIKDTDSKKNKHVFNKTVSLRDNWKKKN

SEQ ID NO: 160102 - protein, 254 aa, Unknown
  Bacterial polypetide isolated from the Sargasso Sea
LFCQRIGISKSENNIDMSILEDCAREVLDKTAPRIMCVLNPLKVIITNYPDDKAENFQPARHPKNPEMGTRKVPFSREIYIDHDDFREDPPPNYFRLAPGKEVRLRYAYVIRCDEVIYDERGGVSELHCTYDQATRSGAKPEGRKVKGIIHWVSAKDSVQVEVRLYDRLFAKPIPGSDDPEGNFLNDINRDSIEILSKCQIESETITSTNQEVFQFERLGYFYPDPVDSHAEAMVFNRTVTLRDTWAILEQEQN

SEQ ID NO: 160103 - protein, 272 aa, Unknown
  Bacterial polypetide isolated from the Sargasso Sea
HVSGWDDPRMPTISGLRKRGYPASAIREFCNRVGITKKDKTIEMSLLESTVREELDSSCNRVMAILNPLKVTIKNYPEGETEMLDARNHPKDKEMGSRQLPFNQNILIEKDDFMENPNEDFFRLSPGAEVRLRYAYIIRCDEVIKDESGEIVELICSYDPETKSGTGTSNKKVKSAIHWVSSDHAVSGNVNLFETLYNDPNPNSESPINQNSMVEIHNPAFEKSIVDADVGTRFQFERNGYFILNEVEDERLSFNRIVTLKDTWAKIQKKMG

SEQ ID NO: 160104 - protein, 69 aa, Unknown
  Bacterial polypetide isolated from the Sargasso Sea
MNKNQTPAPTPSHFISKIIEADLESGKHQQVVTRFPPEPNGFLHIGHAKSIFLNFGMPQYYGGHCFIAF

SEQ ID NO: 160105 - protein, 306 aa, Unknown
  Bacterial polypetide isolated from the Sargasso Sea
IRPKQREFARLNLSHTITSKRKLLSLVEKGYVSGWDDPRMPTISGLRRRGYTPEALKKFVTTAGVAKRENIIEMSLLEFCIREDLNKKCNRLMVVQDPLKITISNYPNQQAEELELINNPENPDSGSRLVPFSKEVYIEQTDFLEDPPKKYFRLSPGNEVRLKGAYIIKAQEVIKNAKGKISEIICSYDPNSKSGSGTPESQRKVKGTLHWVCCSSNTPVEIREYDRLFEHPSPGDFFKEDLAQAINKDSVRVFNGYGEKELSKSSISEPFQFQRKGYYIKDTDSKKDKHVFNKTVSLRDNWKKKN

SEQ ID NO: 160106 - protein, 304 aa, Unknown
  Bacterial polypetide isolated from the Sargasso Sea
MLHAEKEFLVYESERFLFKDVVAKAAQVGNALIAEGITKGDRVAICMQNNPEFIFAYMGIVGIGAVCVPLNSWWVPDEVIYSLNHSEAKLLFGDKKRLQGLEDLKNLKKIVTSYTPDDNFTSFNDFIKDHSTDWPDIEIARDDHATIYYTSGSTGRPKGVLSSQRGIISSMFSWACISTVLSQREARLGKDSSPLASSESCILLCVPLFHATGSHVAFLLSILVGRKVVMMKKWDAGEAIRLIHDEKITDITGVPTQTWELLNHPDKDNYDLSSLKTLGGGGGPRPAEHVKLLDDNFEGSQVLD

SEQ ID NO: 160107 - protein, 237 aa, Unknown
  Bacterial polypetide isolated from the Sargasso Sea
YFASDVAYHKDKLDRGFDEIINIWGSDHHGYIKRVEASLEGLGYDKNKLSVKLVQFANLIKGGSPVKMSTRSGEFYSLEDLLSDVGSDVARFYYLSKQTDQHLDFDLDLAVSSKKENMYYYIQYAHARICSLEKKAGLKDFLAEDISEDHVDICSNLIHEISKYPNVLEKTCNNLSPHLLIFYLKDLASIFHNFYNDNKILDKSESEKLTILAVTHAIKEVIADSLNLLGVKALEEM

SEQ ID NO: 160108 - protein, 276 aa, Unknown
  Bacterial polypetide isolated from the Sargasso Sea
ILFKSKNFGDDEDRVVKKHDGQWTYFMPDIAYHLNKYERGFVRMINIFGADHSGYIARMKAAVKAVTNEKANLEIKTCQLVRLSRGGKPIKMSKRAGSFITLKEIVNEVGKDAVRFMMVSRKNDAQLDFDFEVFKNENNDNPIFYIQYANARISSLIRNSKEKLGRDIKDNDLINADLAFLQNENEKKIIFQIANFPKVIEQSVTFMEPHRLSYYLRDLASSFHQYWNLKIDNKRIHILDKSEIDLSLARVALLFAVSITIQTGLGLLGIEAIEEL

SEQ ID NO: 160109 - protein, 297 aa, Unknown
  Bacterial polypetide isolated from the Sargasso Sea
SDIVKKNLIKKSIKKLRKKNIVEEGYLEPPKGEENLNWKKTKKLIFKSTLFGDDTNRSLQKDDGTWTYFANDLAYHTNKISRKFDYLINVLGADHTGYIKRITSAVKAVSNDRVKLICKVCQLVKLYKNGQPFKMSKRLGDFISVDDLLKEVNKDSIRFMMLNRGNDVELDFDFNKFLEKNKDNPVFYVQYCYARINSLFRSLNLNLNKEIKIDKNNFKLNDYDLRLMRKIIEWPKVLDIASKKLEPHRVTFYLYDLATIFHSYWSEGNKNDKYKFIINGKINKKISFKIFQLLSII

SEQ ID NO: 160110 - protein, 296 aa, Unknown
  Bacterial polypetide isolated from the Sargasso Sea
KDLKNLGITHDNFFSETEIVNKDLVTKAIKILKEKRFVEEGFLQPPKGETNDNWKKMKRLIFKSTLFGDDADRALQKNDGSWTYFANDVAYHMDKVSRNYENLVNVLGADHTGYIKRINAAVSALSDKKVKLNCVVCQLVKLFKNGSPFKMSKRAGEFISAQDLLNEVEKDQIRFMMLSRSNDVELDFDFDKVKQKTKDNPVFYVQYAYARISSIIRSLNINLFEKINLNEDEFNLNSIEEKIIRKIFEWPKIIESSSKKFDLHKIPFYLYELSTLFHSYWSKGNDSKEYKFIEND

SEQ ID NO: 160111 - protein, 299 aa, Unknown
  Bacterial polypetide isolated from the Sargasso Sea
SMEQALLLIKKNLNSMGINHDNFVSEKSIVLNNEVESVIDFLEKNNFIYKGKIKAPAGEDNKDWVEREQLLFKSTDFGDDKDRALQKSDGTWTYFASDVAYHKNKVDRKFDYLINILGADHAGYIKRITSSVEALSGKKDKLICKISQLVKLIKNKKPFKMSKRKGDYITVDDLIEEVGKDATRFIMLNRSSDVELDFDFDAVKEKSKDNPLYYVQYCYARISSVFRHINKDLNSNIELNDFNFEYSNDEIKILKKLSEWPKCIDSASTKLEPHRIPVYLYDLASEFHSYWNLGKQFQK

SEQ ID NO: 160112 - protein, 178 aa, Unknown
  Bacterial polypetide isolated from the Sargasso Sea
MRNSKELNIEKNFNYDGIIIEIPPVEYNFDLSTNIAMILAKKTKKNPKIIAEKIKSYLFADCKDFKKIEIAGPGFLNIKLTDSSLQKTILKIYKNKISYGSKRTKKKYNIEFVSANPTGPMHVGHCRGAIFGDVLANLLKFNGNSVTKEYYINDYGSQIENFVKSVFLRLREIKYKRK

SEQ ID NO: 160113 - protein, 178 aa, Unknown
  Bacterial polypetide isolated from the Sargasso Sea
AGEIKKSPLEIAKNIQKNLLENNLDNIKEVTVTPPGFINFIIDPSFYQNKIKSIIKDGENFGKDNIGKGKSANVEFVSANPTGPLTIGHGRNAVLGDTVSNILEWHGYQVTREYYYNDAGKQMRMLGKSVSSRYFELLNKASDFPEQGYQGEYIIDIAKRVLDKFGKELGEDDERFLT

SEQ ID NO: 160114 - protein, 225 aa, Unknown
  Bacterial polypetide isolated from the Sargasso Sea
CSWGQIILGYIKRIKAAVSALSEKKIELNCKVCQLVKLYKNGKPFKMSKRAGDFISVKDLLSEVDKDSIRFMMLNRSNDVEIDFDFEKVKEKTKDNPVFYVQYAYARINSLLRSLDISFVKKIEFNEIDFNLNEIEGKIIRKVFEWPKIIESASRKFDLHKIPFYLYELSTLFHAYWSKGNEDKKYKFIENRKIKRKEILAIINLVAIVIKNGMNILDVSLPKKM

SEQ ID NO: 160115 - protein, 63 aa, Unknown
  Bacterial polypetide isolated from the Sargasso Sea
REPHHLTHYLRELAGQFHTYYNAHKVLIEDTALRDARVSLYLAVRQVIANGLDLLGVSAPEEM

SEQ ID NO: 160116 - protein, 239 aa, Unknown
  Bacterial polypetide isolated from the Sargasso Sea
SITNPGFINFKLSKSFYQSIINEVLLNNKFGSNRSYDGKTANVEFVSANPTGPLTIGHGRNGVIGDIISNILDWNGYSVTREYYFNNAGRQMRILGESVKARYLELIGKPVSFPSGGYKGAYIKDIASKILKEKGNKLSDRDDNIFKTTAETLMFNDIKKTLSDLKINFDKYSNEKDYYDNGSIDRMLDEFKQMGYIYDKDGATWFNFSKLGHEQDKVYIKKTGEPTYRVPDTAYHRDK

SEQ ID NO: 160117 - protein, 288 aa, Unknown
  Bacterial polypetide isolated from the Sargasso Sea
DFLKIANNLISSKIIDENINLKNISIDFNSKSKQGDVSSNIFIFLRKYLFDKNYKLDKKIEEELLKLIYIDNLSIGKSGFINIFFKKEFIIKKINEILKFNEDYGKNNNGENKKINIEFISANPTGPLHIAHIRGAVFGDVLANILSSSGYKVTREYYVNDAGSQIKILGESLFKRYQNLNGINTKILENEYPGEYLIDFAKEIFLKDKDKWINKEKNKTNDYFKKYAINKIINNIKDDLKKIDINFDIFTFESDIVKKNYIEDVFKILEQKKLLYEGYLKQPKGDDN

SEQ ID NO: 160118 - protein, 213 aa, Unknown
  Bacterial polypetide isolated from the Sargasso Sea
MAKLEIKENVLVEQSANSDFGDFSSNIAMVLSKILRKNPLEIAEMIQSELTIDKKIISDNSVTQPGFLNFRVAKSFYQKTVTEIIVSADTYGRTETGKGKNANVEFVSANPTGPLTVGHGRQAVLGDTIANILEWHNYDVTREYYYNDAGRQMRILGKSVAARYFDQLGQEGDFPEDGYEGDYIKTIAKEILERHGDGLSLEDKIFRTYAEES

SEQ ID NO: 160119 - protein, 166 aa, Unknown
  Bacterial polypetide isolated from the Sargasso Sea
MSEAERLDIAEAVGLGAIKYADLSQNRTTDYVFSFDKMLELKGNTAAYMQYAVARVDGIFSKGGIDREQVRDKAFFKCTDKRERALAVKLLRFGEVLEDVESDYRPNLLTSWLFEVACAYSSFYDALPVLKASGEQKSTRLTLCDLTGRSLRLGLELLGIQVPKRM

SEQ ID NO: 160120 - protein, 134 aa, Unknown
  Bacterial polypetide isolated from the Sargasso Sea
PNSQISTLVNKLKEDDNAYEKDGALWLNTDVSGDDKHRVLIRDDGRATYFASDVAYHKNKVDRKFDTLINIWGADHHGYIKRIEASIEALGSKKEKLVVKLVQFANLFKDGKKVKMSTRSGEFFTLKDLINDIG

SEQ ID NO: 160121 - protein, 237 aa, Unknown
  Bacterial polypetide isolated from the Sargasso Sea
MNQHTAPGQMFETKDVVNENGVTFKEYINLPDSLRGYLDFALAHAEKECLVYEDERYTYKEVFEKSAQTGNALIKAGIKKGDRVAICMQNNPEFVYSYFGIVGIGAVCVPLNSWWVPLEVIYALEHSDAKLLIGDSKRLQGLESLPNLTKIVTSYTPDSSFTSFDAFISEHDKTFPEVEIGRDDHATIYYTSGSTGKPKGVLSSQKAVLATMFSWACFSSVMNQVEAQRNPDAAAIV

SEQ ID NO: 160122 - protein, 111 aa, Unknown
  Bacterial polypetide isolated from the Sargasso Sea
MQIIFKKLTNSFEQILLNSLIKNAKREEFEKIRKNLINQASKEEFGDYQSNVCLVLSKIYNRNPREIAIEFVQSLKENNKISNLCEDLEIAGPGFINIKLKNNILIEEIKS

SEQ ID NO: 160123 - protein, 252 aa, Unknown
  Bacterial polypetide isolated from the Sargasso Sea
TDRALQKNDGSWTYFANDVGYHMDKVNRKFDYLINILGADHTGYVKRITAVVKALSENKVKLDCKVCQLVKLYKNKKPFKMSKRAGDFISAKDLLNEVNKDSIRFMMLNRSNDVELDFDFDKVLEKSKDNPVFYVQYSFARINSLLRTINKNLKDKISLNETKFLLNHYEVNILKKIFEWPKIIDIASSKYEPHRIPFYLYDLATLFHAYWSKGNESSDFRFIENGKIKKDETLAIVVLVDTVIQRGMSILG

SEQ ID NO: 160124 - protein, 261 aa, Unknown
  Bacterial polypetide isolated from the Sargasso Sea
FGDDTDRAIQKNDGSWTYFANDIAYHMDKVDRKYEYLINVLGADHTGYKKRIEAAVNALSKNKVKLNCKVCQLVKLFKNGKPFKMSKRAGEFISANDLLNEVDKDSLRFMMLNRSNDVELDFDFNKVLEKNKDNPVYYVQYSFARISSVFRTININNTKNAKIKSEEFQINDFEIKIIKKIFEWPKIVGTASSKYEPHRIPYYLYELATLFHSYWSKGNEDHNYKIIENGKIKNPATLTILILIYIVLQRRYEYFRSIITR

SEQ ID NO: 160125 - protein, 270 aa, Unknown
  Bacterial polypetide isolated from the Sargasso Sea
LQKNLGNFSPQNTYKGKYIEEIGIAFSKEKVVSYKEPKLIINNLPGDAEEEIDQIISNLKEMDNKIWDEVKEFSLKNILDLIKQDLASFNVNFDNWFQESSLGDLKDPNSQISTLVNKLKEDDNAYEKDGALWLNTDVSGDDKHRVLIRDDGRATYFASDVAYHKNKVDRKFDTLINIWGADHHGYIKRIEASIEALGSKKEKLVVKLVQFANLFKDGKKVKMSTRSGEFFTLKDLINDIGADAARFYYLSRQADQHLDFDIDLAKSDSK

SEQ ID NO: 160126 - protein, 302 aa, Unknown
  Bacterial polypetide isolated from the Sargasso Sea
MSCNPAIGGLGKGHLVREIDALDGIMGRAIDNSGIQFRMLNLSRGPAVQGPRAQADRVLYKKSIQNIVKKQENLDILEGSVEDIILTNNKLKGVLVENIGEIMSKTLVLTTGTFLRGLIRIGKKSYEAGRVGDKPAINLARSIERLKFSIGRLKTGTPPRIEKKSINFNGLKEQKPDLIIKPFSFINKLIHIKQVSCFLTNTNVHTHEIINNNIHLSPMYSGEIKAMGARYCPSIEDKVRKFSDKNSHQIFLEPEGLESEVIYPNGISTSLPENVQEEFVHSIMGLENAKIIKPGYAIEYDY

SEQ ID NO: 160127 - protein, 287 aa, Unknown
  Bacterial polypetide isolated from the Sargasso Sea
KINLIIKNNENYGKGDIGSGKTANVEFVSANPTGPLTVGHGRNAILGDTISKILEWQNFKVTREYYYNDAGRQMRILGKSVEARYYELLGKSFDFPKDGYQGKYINDIAKIVLEKKGGNLKSGDEFFRKIAEEIIFNDIKNSLRKLDVKFDHFTNEKTFYENGDIDKLLKNLADKNLIYKKDNATWFRTSALGKNQDRVYIKSSGEPTYRVPDTAYHLDKIKRKYDLIVDIFGADHADTYPDVIIALKALGLKTDHIKVLLYQFVTLIRNGEKIKMSTRQANFITLE

SEQ ID NO: 160128 - protein, 187 aa, Unknown
  Bacterial polypetide isolated from the Sargasso Sea
YKKGKPFKMSKRSGDFISVNELLNEVDKDSIRFMMLSRSNDVELDFDFDKVLEKTKDNPVFYVQYCYARINSLFRMLHLDLNSKIELEKEKFKLNTFEYKILRKIFDWPKVVDSASMKYEPHRIVFYLYDLATLFHSYWSKGNESEKYKFIIDGKMNNKNTFVIIKLVALVVENGMKILGVSLPKKM

SEQ ID NO: 160129 - protein, 292 aa, Unknown
  Bacterial polypetide isolated from the Sargasso Sea
TGPLHVGHVRGAVIGDVLSNILKMVGYNVTKEYYINDAGNQIDILAASVFIRYEELITKNKAEIPKGYYPGEYLIPLAKSLYNVHGNSLLNRDKFKSLELIKKFSINNLLNQIRDDLKKLNIEMDKYSSEKKLVEDLSVERTIQELDKKGLIYIGVLPSPKSTADDWEPKEQTLFKAKKFGDDEDRTIIKSDGSLTYFASDVAYHRDKLIRTKGKLINIWGADHSGYVKRMTAAVNAIADKEGQLEIKLCQMVNLIKNNKPLKMSKRAGNFITLNEIIDEVGADAIRFIMLT

SEQ ID NO: 160130 - protein, 117 aa, Unknown
  Bacterial polypetide isolated from the Sargasso Sea
DVAYHHNKWERGFERVINEQGADHHSTITRVRAGLQGLDAGIPEGWPEYVLHQMVTVMRDGAEVKLSKRAGSYVTLRDLIEWVGCDATRYFLVARAPTSQLTFDIDLALARSNENPV

SEQ ID NO: 160131 - protein, 192 aa, Unknown
  Bacterial polypetide isolated from the Sargasso Sea
MIISFNESNINIDYSSKSKKGDLSTNIYLVLSKIITKKDFDLKIYILNFLMKLEYIAKVDFAKAGFINIIIEKKFLISNLINFYNNNFKLENDNIHKKSINIEFISANPTGPLHLAHIRGAVLGDVLSSILETVGHKVTREYYVNDSGAQIKSLGVSLFKRYKELFNEEIIFSENEYPGEYLIDIATKIKDL

SEQ ID NO: 160132 - protein, 260 aa, Unknown
  Bacterial polypetide isolated from the Sargasso Sea
KSSALGDDKDRVLKRSNGEFTYFASDVAYHLDKYDRGYDRIINIWGSDHHGYLPRVKAAMEASKKNVEKLEVVFIQFANLIKAGKKVTMSTRSGEFITLKELIEEVTSEAARFFYINRKADQHLDFDLDLAKEQSKDNPLYYIQYAHARICSVLLKSKAREEELNASELGLLDSNKEIEIQKILKQYPPLIERAALASEPHLICYYLKDLASIFHSYYNTEKFIIEDQKLMNSRLFLLSGVKQVIYNGLAVLGINAPHEM

SEQ ID NO: 160133 - protein, 138 aa, Unknown
  Bacterial polypetide isolated from the Sargasso Sea
MNIFDIYLEKIKKILIDLSEKKELILPAKINGITAEIPPTKFNCDISTNVAMVLSKINKTTPIELAEKLSNQIKKSDEFIETISVAKPGFINIKFKTIFWTKFVEIIIKNYKTYGINYSEKKNNYLVEFVSANPTGPL

SEQ ID NO: 160134 - protein, 131 aa, Unknown
  Bacterial polypetide isolated from the Sargasso Sea
FDKMLSLNGNTAPYLLYTLVRILGIKRKNDFVYESKDLLYVNYEHKSEWKLIRKLLRFDEVIISIEKDLMPNRLCNYLFELCQTFNRFYDQVPILKEEKNIKISRLNLCDLTAKTLKLSLELLGIETLERM

SEQ ID NO: 160135 - protein, 232 aa, Unknown
  Bacterial polypetide isolated from the Sargasso Sea
TGGNGVHPVADACDFARHCSALDFWSINDHAEASTPKRWQETKETIRKCNALNLDPANPDCVAFLGWEWTQVGVIRANHWGHHNVILKEEDDDLVPPRAIASLSITRQAMTTRPLLPQTLFPFVDFANFKRYNDSYRYAKETVKVPDCDLRTPSIDLPIDCHERAVTPLGLVNRMEMYPSDYMIIPHGQTWGLYTPAGYTLDKSLEHSKRFPRMFELLETYSGHGNAEEYRT

SEQ ID NO: 160136 - protein, 173 aa, Unknown
  Bacterial polypetide isolated from the Sargasso Sea
RSGEFIPLRHLREEVGNDAARFFYIMRSNEQHLDFDLALAKSKTSENPVYYIQYAHARIASVINQLNEKSLKYDKKNGISNLKLLTTEKERQLMVSISRFSEILFLSAKNKAPHSLAQYLRDLANDFHSYYNESIIIIDDHTLRDARVSLSISTKKVISMGLSLLGVSSPSSM

SEQ ID NO: 160137 - protein, 192 aa, Unknown
  Bacterial polypetide isolated from the Sargasso Sea
QLVKLIKDKKPFKMSKRKGDYITIEDLINEVGKDATRFIMLSRSSDAEIDFDFDKVKEKSKENPIYYVQYAYARISSVFRNTQNDINNNLEIKNSDFNFGNEEIKLFKKISEWPKCVEVSSEKLEPHRISVYLYDLASEFHSYWNMGKEDVSKRFIDQDNTIQLEKLVFLKSIANTLKTGMNILGVDTPEKM

SEQ ID NO: 160138 - protein, 258 aa, Unknown
  Bacterial polypetide isolated from the Sargasso Sea
KIKAPAGDEDKNWVEREQLLFKSTDFGDDKDRALQKSDGAWTYFASDVAYHKNKVDRKFDYLINILGADHAGYIKRISSSVEALSGKKDKLICKISQLVKLIKDNKPFKMSKRKGDYITVDDLIEEVGKDATRFIMLNRSSDVELDFDFDAVKEKSKDNPLYYVQYCYARISSVFRHIDKDLNSNIKLDDFSFEYSNDEIKILKKISEWPKCIDAASSKLEPHRIPVYLYDLASEFHSYWNLGKQNPEKRFINDQKIV

SEQ ID NO: 160139 - protein, 314 aa, Unknown
  Bacterial polypetide isolated from the Sargasso Sea
MNFILGEYLIDVAKKIIDKYGTTILENDNHFSTIKAECVNLLLENIKEDLSKLSINQDIFVSEKELITQGKIDKTIDELKNMNLIYEGILDKPKGKQIEDWEPRKQLLFKSSEYGDEIDRPLQKSDGEWTYFANDIAYHYDKYLRGSTHLIDILGADHGGYIKRMSASIQALTNNKARFTAKLCQMVKLISDGKELKMSKRSGDFITLSDLVKEVGSDSIRFMMMYRKNEAPLEFDFKKVTEQSKENPVFYVQYAHARISSVLNNLHSQNIKLNLENFSECNFSELNDLSEISLLKKSWIIVISLIRQFLYLSR

SEQ ID NO: 160140 - protein, 256 aa, Unknown
  Bacterial polypetide isolated from the Sargasso Sea
KTTDFKDDKDRVLLRENGEPTYYLTDVGYHKNKIDRGYDLCINVFGADHHGYIPRLTAAFDVMKSDKQEIEFMLYQLVNLYEDGKKKMMSTRKGDYHSLQELRNELGPDVIKFFFLEKKSDHPMDFDINLAKDESKNNPYFYSQYAHVRCCSILAKKIFDPNKKIEENEIKQNFDLVNKILNFPNLLEGFTNERSPHSLVHYIKDLSASFHTFYEMSPVIGENESIENTRLLLTTATQIVLANSFRILNVEPLEKM

SEQ ID NO: 160141 - protein, 269 aa, Unknown
  Bacterial polypetide isolated from the Sargasso Sea
IYKIFDIEFDYLRGESWYESDLENLITWLKEKNVTTISEGALIVDLNPEGIKTPALIKTAHNTTLYITRDLAAAKSRWEEFKFDQSLYVVGAEQTLHFQQLIAVLKKCKVGWESKMEHVPFGLIRLNEGKLSTRQGRVITLYEVIEKAIGLAKTSIKAKNPSLENQEDVAKQIGVGAVVFHDLKHQRQKNVIFNWDEVLSFEGDTGPYLQYTHARCCSILRKSNFQPSKLSEADIEDLAKNSELWVAIGRLPNNLKEAAEKREPMILAH

SEQ ID NO: 160142 - protein, 224 aa, Unknown
  Bacterial polypetide isolated from the Sargasso Sea
DNFVYESKLIKNKSVSKVVKKLQKKNYIYKGELEPPKGEKTKDWKKRYQLLFKSTFFGDDIDRPLQKADGEWTYFAGDMAYHYDKVFRKYDLLINILGADHAGYTKRIISATKAISDNKTILICKVSQLVKLFKNGLPFKMSKRQGDYITVDDLINEVGKDSTRFMMLNRSNDVELEFDFQKVTEKSKDNPVFYVQYAYARICSVFRLLNINLNNKIKLDSSFY

SEQ ID NO: 160143 - protein, 267 aa, Unknown
  Bacterial polypetide isolated from the Sargasso Sea
IIENKKNINATSLEDCFEELKELSLIESMRLIKDDLKKLGIEHDNFCSETELVQKDLVSKTVKELQRKNFVKEGYLNPPKGEKTINWKKTKKLIFKSTEFGDDRDRALQKDDGEWTYFANDVAYHSDKIKRKYDNLINILGADHTGYIKRITAAVSALSNKKVKLNCKVCQLVKLYKNGRPFKMSKRAGDFISVRDLLSEVNKDSIRFMMLNRSNDAELDFDFEKVKEKTKDNPVFYVQYAYARINSISRILEINLNDKVSMNSKIF

SEQ ID NO: 160144 - protein, 219 aa, Unknown
  Bacterial polypetide isolated from the Sargasso Sea
HAGYIKRISSSVEALSGEKDKLICKISQLVKLIKDNKPFKMSKRKGDYITVDDLIEEVGKDATRFIMLNRSSDVELDFDFDAVKEKSKDNPLYYVQYCYARISSVFRHIDKDLNSNIELDDFNFEYSNDEIRILKKISEWPKCIDAASSKLEPHRIPVYLYDLASEFHSYWNLGKQNSEKRFINDQKTVSPDKLIFLKAISNVVKSGMDIVGVDTPDKM

SEQ ID NO: 160145 - protein, 288 aa, Unknown
  Bacterial polypetide isolated from the Sargasso Sea
MTALSIEQALLLIKKNLKSLGINHDNFVSEKSIVSNKEVESVIKFLEKNKFVYKGKIKAPVGEDDKNWVEREQLLFKSTDFGDDKDRSLQKSDGAWTYFASDVAYHKNKVDRKFDYLINILGADHAGYIKRISSSVEALSGKKDKLICKISQLVKLIKDNKPFKMSKRKGDYITVDDLIEEVGKDATRFIMLNRSSDVELDFDFDAVKEKSKDNPLYYVQYCYARISSVFRHIGKDLNSNIELNNFSFEYSNDEIKILKKISEWPKCIDAASSKLEPHRIPVYLYDLA

SEQ ID NO: 160146 - protein, 103 aa, Unknown
  Bacterial polypetide isolated from the Sargasso Sea
RKGGDLAATNAQLQFSEPQEWALVRELLKFDAVIAEVEEELLPNRLCSYLFELSQVFNRFYDQVPVLKADPEALASRLALCRLTADTLRLGLGLLGIATLDRM

SEQ ID NO: 160147 - protein, 191 aa, Unknown
  Bacterial polypetide isolated from the Sargasso Sea
RAFGQKPQFGMLLPILVGLDGTQKMSKSLDNIVGINEDSLSMYSKLEKVPDDLVLSYLNLLTNENLNELSSTPREVQKFMALKITSIFKGMEAAKKAQFNSEKLVLGTQDALEEIPEASISDVNFPAKAFYLFSKMKMCSSSSEARRQILGGGVRIDGKKIIDPNLEFDSPEDLIGKILQVGKKKFLRASN

SEQ ID NO: 160148 - protein, 176 aa, Unknown
  Bacterial polypetide isolated from the Sargasso Sea
SKRAGTFVTVRDVIKAVGSDVIRFIMLTRRSEQTLDFDYARVTEQSRDNPVFYVQYAHARACSVLRQAEAQAEGDAALHQLNDPAEMAVIRLLAGWPRQVVSAAAAHEPHRIAFYLMDLAAAFHALWTAGRENPDLRFIRDENPLLTAARLRLVKATALVIRSGLGVLAIDARKEM

SEQ ID NO: 160149 - protein, 306 aa, Unknown
  Bacterial polypetide isolated from the Sargasso Sea
CVESPKNEDNGDLSTNICMVLSKDLSQPPIKIAEILKTSLEKYSEFEQLAIAKPGFLNFRVNKSVWYKFLSEKLNSDELYDKNIGNGQTINVEYVSANPTGPLHIGHCRGAVFGDVLSNLLTSTGYDVTKEYYVNDAGVQINYLADSVIIRIKETLNQRNENNYPDNFYPGEYLIDVAKKIIDKNGDKILEQDNSFELIKDESVALLLDLIKADLKLLSIEQDHFISEKKLIAEGKIDEAITKLKDLDLIYEGILDKPKGKQIEDWEPREQMLFKSSNYGDETDRPLQKSNGEWTYFANGYRLPFD

SEQ ID NO: 160150 - protein, 156 aa, Unknown
  Bacterial polypetide isolated from the Sargasso Sea
RFIMLNRSSDVELDFDFDNVIEKSKDNPLYYVQYAYARIASVFRHLDKELKSEVKIDDYNFEYSDDEINILKKISEWPKCIDASSKRLEPHRIPTYLYELSSLFHSYWNLGKDNPEKRFINDQKRITDDKLIFLKTISNVIKSGMDIVGVSAPEKM

SEQ ID NO: 160151 - protein, 311 aa, Unknown
  Bacterial polypetide isolated from the Sargasso Sea
EYVSANPTGPMHMGHCRGAVVGDALATLLEFAGHKVIREYYVNDAGGQVDVLARSAHLRYREALGATIEIPEGLYPGEYLKPVGEALAAEFGNTFVDAPESEWLVLFRTRAVAAMMAMIREDLALLGIHHDIFSSEAELQAAGKPEAAEAELRSRGLVYDGVLEAPKGETPEDWEPVELPLFRSSQYGDDQDRPIKKSSGAWTYFGADLAYHYQKAQTADQLIDIWGADHAGTVKRIVAAVEALTGGKTRFDVKLVQMVRLLRGGEPVKMSKRAGNFVTLADVVREVGKDVVRFTMLTRRADAQMDFDFAK

SEQ ID NO: 160152 - protein, 151 aa, Unknown
  Bacterial polypetide isolated from the Sargasso Sea
PLEFDFKKVTEQSKENPVFYVQYAHARISSVLNNLHSQNIKLNLENFSECNFSELNDLSEISLLKKILDYSNIINTSVSLFEPHRISYYLYELASEFHSLWSQGKVDNSKKFIDADNIPKTYARMALLIATQRTIKSGLDILGVSSPDEMK

SEQ ID NO: 160153 - protein, 136 aa, Unknown
  Bacterial polypetide isolated from the Sargasso Sea
YDLDLAKEQSDANPVFYIQYAHARCCNMLRRFEGDLDSIDESSLEHLKLDIETQLINKLLTFPEVIRKSSITLEPQNISNYLAELSSSFHSYYAKERVIDSENKILTEARIYLVNATRIVIRNGLKVLGVSAPEQM

SEQ ID NO: 160154 - protein, 311 aa, Unknown
  Bacterial polypetide isolated from the Sargasso Sea
MNFDDYEEISDKLTALSIEQALLLIKKNLKSLGINHDNFVSEKSIVSNKEVESVIKFLEKNKFVYKGKIKAPAGEDDKNWIEREQLLFKSTDFGDDKDRALQKSDGAWTYFASDVAYHKNKVDRKFDYLINILGADHAGYIKRISSSVEALSGKKDKLICKISQLVKLIKDNKPFKMSKRKGDYITVDDLIEEVGKDATRFIMLNRSSDVELDFDFDAVKEKSKDNPLYYVQYCYARISSVFRHIGKDLNSNIELNDFSFEYSNDEIKILKKISEWPKCIDAASSKLEPHRIPVYLYDLASEFHSYWNLGK

SEQ ID NO: 160155 - protein, 213 aa, Unknown
  Bacterial polypetide isolated from the Sargasso Sea
MNFFNIYLEKIKKSTIKNKKKLDFKENQILNKIIVETPPENFDCDLSTNIALILAKKTNQNPKITAEKIKAILIHEIKHFSSIDIAGPGFLNIKLSDDAWFYVIKNIEKNKKNFGSNKKNHKYNIEFVSANPTGPLHIGHCRGAIFGDVLSNLLKFNGNKVTKEFYINDYGKQIDDFSKSIYLRLKEIKFNTKFPSDETLYPGSYIIDISKKF

SEQ ID NO: 160156 - protein, 252 aa, Unknown
  Bacterial polypetide isolated from the Sargasso Sea
MGDDKDRVLLRENGEPTYYLTDVGYHKDKIDRKYEHYINIFGADHHGYVRRIASAFDTLKNDYQSLEIILYQLVNLFENGKKKQMSTRKGDFYSLEELREEIGSDVIKFFFLEKKSDHTIDFDVLKAKEESKTNPYFYTQYAHVRCCSILQNKTPDFKCMYDEKEITKNFDLLNKIINYPKHLEDFANERSPHSLVHFLKELAADFHSFYETNPVLVENDTVANSRLIITKATQIVLKNGLELLSVKPLSKM

SEQ ID NO: 160157 - protein, 215 aa, Unknown
  Bacterial polypetide isolated from the Sargasso Sea
YEVVKEYYVNDAGKQIEILVTSVIQRYHELIDSNLNFSYEDLYKGDYIWDIAAELHRNFSSDLQILNIIDLKDPKIDLYMQRIKDALSIEKFLKIREISINAILENIKSSLRQSDINFDNWFFESSLIDDKSLIKAIDFLNQNNFTYQKDNALWFKSKDFGDEKDRVLIKENKDHTYLATDIAYHEKKIKRNFDININIWGADHHGYISRIQGAF

SEQ ID NO: 160158 - protein, 275 aa, Unknown
  Bacterial polypetide isolated from the Sargasso Sea
MNIFDNYLSKICEIITDNKKLLKLTSLDNLVNINLEVPPDHLDYDLSSNVSLVLAKTNKLNPMNLSSEIKDLLLKKESHFEKIDVAGPGFINIKLSNDALVFNINKILKIKDTYGSKKSKKSYNIEFVSANPTGPMHVGHCRGAIFGDVLSNLLSFNGNKVVREYYINDYGNQIRNFVESVYLRIREIKFKEKFVVRENLYPGDYIKDIAENIIKDNKNIDVENFKNCYEELKKFSLIASMALIKDDLKKLGIEHDNFFSESELVKKDLVNITVR

SEQ ID NO: 160159 - protein, 301 aa, Unknown
  Bacterial polypetide isolated from the Sargasso Sea
MNIFDNYLAKISKLILDNKESLKLKNLDNLKNINLEVPPEKFNFDLSTNISLMLSKPNKLNSNDLAHKIKEIFVKGIIHFEKVEVAGPGFINIKLSKDGILSNIKDIFNNKDSYGANKSNKTFNIEFVSANPTGPMHVGHCRGAIFGDVLSNLLSFNGNKVVKEYYINDYGSQIKNFVESVYQRIREIKYNEKFIAKKNLYPGKYIKDIANNILKQNKNIVVNNFQESFKELKQLSLKESMSLIKNDLKLLGITHDNFFSETNLVNKDLVSKAVIHLKKGNYVEEGFLAPQKVKLSNIGKK

SEQ ID NO: 160160 - protein, 299 aa, Unknown
  Bacterial polypetide isolated from the Sargasso Sea
HLGNGTLSQIANFGDNEVGGDYIDEALMRFVLEEMSREKSTGKKLLEAPGARAKLLEQCEKAKIELSKRDSAIIYVPNFYTNAGDDNDIDLNLTRECFQRVAERFINRGIGVIDELLLRLNIDRRRIALCLATGGMIHMPAIHSALVQLFGADRLHISPRGDRIISEGCAWIAEDESRLKLAKPLELAEARENYLPVFKPGDPLPVAGETIAQNLLVYCVDPRDGIAKIKLARPRFLGKCAATDPRDNYASVAVRVESQAKPFMERIDVELNIDHDLIVRVTARSTLLEDFDYAEILDL

SEQ ID NO: 160161 - protein, 264 aa, Unknown
  Bacterial polypetide isolated from the Sargasso Sea
MTIKTITKNIKENIQNSLEQFDINLSKKALNLSPPKQESFGDLSSSIALILAKKIKRNPLELAEKICEDLINSNIDSIDEITVTAPGFINFVIDKKFYQDNLKLIIKNGVEFGKDPSAKKRTANVEFVSANPTGPLTVGHGRNAVIGDTVSNILEWHGYNVTREYYYNDAGKQMRTLGKSVEARYYELLDKPFEFPEDGYQGDYIIEIAKSIINHYGKELEKEDKKFLSYAEKIIFKQIKNSLNSLGIQFDTFANEKSFYESGA

SEQ ID NO: 160162 - protein, 290 aa, Unknown
  Bacterial polypetide isolated from the Sargasso Sea
MDLVKLDLKNLGIKHDNFFSESKLIREDLVNKTIKNLKKNNFVEDGFLDPPKGNEGKKWKKTKKLIFKSTLFGDDTNRSLQKDDGSWTYFANDVAYHADKVSRNFDYLINILGADHTGYIKRITAAVAALSNNKVILKCKVCQLVKLYKKGKPFKMSKRSGDFISVNDLLNEVDRDSIRFMMLSKSNDAELDFDFEKVLEKTKDNPVFYVQYCYARISSLFKTLNINMSDKIVLEESNFKLNNFENKLLRKIFDWPKVIDSASSKYEPHKIVFYLYDLATLFHSYWSKGN

SEQ ID NO: 160163 - protein, 267 aa, Unknown
  Bacterial polypetide isolated from the Sargasso Sea
DDVDRPIKKSDGAWTYLAPDIAYHFDKVERNFDHLIDIFGADHGGYVKRMKAAVSALSDDKVKFDIKLTQLVKLFRRGEPFKMSKRAGTFVTLRDLVDQVGSDVTRFVMLTRKNDAPLDFDFEKVLEQSKDNPVYYVQYASARIHSVFRKAKDAGIYFEGEQMRYETFSKITHEAEIKIAKKLAEWPRLVEISAKTHEPHRIAFYLYELASDFHSLWNKGNENDELRFIQENDHEATCTKMAMISAVLVVISSGLGILGIEPATHMN

SEQ ID NO: 160164 - protein, 107 aa, Unknown
  Bacterial polypetide isolated from the Sargasso Sea
MKQVIAGLIDSALKTLIENGTLPDDVQPNIMVENTRDKSHGDYASNIALTLAKPARCNPRQLAEKLVAALPQSDNLTRTEIAGPGFINFFISEASTSSLLTTILEQK

SEQ ID NO: 160165 - protein, 262 aa, Unknown
  Bacterial polypetide isolated from the Sargasso Sea
IQDEKGNSFSEYVTFPDNLKGYFDFGLLHADKDFLVYESERYTFKETISKAAQVGNALIEEGIQKGDRVAICMQNNPEFIFAYMGIVGIGAVCVPLNSWWVPDEIIYAMEHCDAKVLFGDQKRLKGLESLTNVKKIITTYTPDDSFESFDDFTKNHSEEWPDIDINRDDHATIYYTSGSTGKPKGVLSSQRGVISSMFSWAFISTVLSQREARLGQDATPLASSESSILLCVPLFHATGSHVAFLMSILVGRKVVMMKKWDA

SEQ ID NO: 160166 - protein, 184 aa, Unknown
  Bacterial polypetide isolated from the Sargasso Sea
MKSLKKNLCKHIDSALSLLGFPKKDYSLIPPKSSSFGDISSNIGLLIGSEIKINPMICAQKILNELNRNNIENIKSITVTKPGFINFFIEDSFFQNYIRNINSLKSKFGRSSIGKGKKVNVEFVSANPTGPLTVGHGRNAVIGDTVSNILKWNGFNVTREYYFNNAGRQMRILGESVKAPLFRT

SEQ ID NO: 160167 - protein, 318 aa, Unknown
  Bacterial polypetide isolated from the Sargasso Sea
KSIDFIDHFVVSKNGFINFFLKDEFVLRSLKEIYSKNFLNYINYGADKKINVEFVSANPTGPLHIAHIRGAVFGDVLSSLYTKTGFDVTREYYVNDAGSQIDKLSNSLLKRYLQLFDKKIELDEDEYPGEYLIDIAKKIKNEDGDKWLNFQQEETIQYFKNFALKNILLSIKSDLELINIRFDKFTHETEIEKSKIIDELFSILDEKKLLYEGILEKPKGDDSDWEPREQLLFRSSNLLDNEDRALKKSNGEWTYFANDAAYHLDKCKRNFDRLVNIWGSDHIGYIPRMNSLIKAIKDDETYLNILTCQIVSLIQNKQ

SEQ ID NO: 160168 - protein, 232 aa, Unknown
  Bacterial polypetide isolated from the Sargasso Sea
FYSQKQLKKSPQEISNEVSKLYKFDNIPQIKNVESHPSGYLNFNIDYTQFSNLVISSSLQENYGSLDIGHNEKIVVEHTSVNPNKALHVGHIRNVILGDIVSKILRKGNFDVKVLNYVDDSGLQVADIIVGFTELGFSQEPPGNEKFDHYCGDTVYVKTTEKYETNKKLEEKRHEILKQIEDSSSLISKMAQTITRKVLNEQLKTVWNLGVFYDCLNFESQIIHSKLWGENI

SEQ ID NO: 160169 - protein, 364 aa, Unknown
  Bacterial polypetide isolated from the Sargasso Sea
MSKKIKSKIVDTLNKLYSSFESIDSLTIEINRTTDTSHGDLYTNVAMKLAKILKKSPMLIAEEIMKNLEAIDSIEKIEIATPGYINFFLTKSNKFNEMNKIMSDDLTILKENNKKNVHIEFVSANPTGPLHIGHGRGMVVGDTTARFLSYQGHSVNREYYVNDAGRQIDLLLVSVLLSYLNKEDHVFSDEKESDEALLVTYKGLYIKDVSNVISNVLKDIDSQKVLSLLNEPIDILIKFLKKHKNYLNIRKTLVDVIINDYIKEDLSSVSIAFDSWYYESELYKTGLLKQILIDLDNRNLSYKKDGALWFKNTKYGEEKDRVLVKSNGDMTYFATDIAYHAHKFKHYDLLIDIWGADHHDYAVR

SEQ ID NO: 160170 - protein, 484 aa, Unknown
  Bacterial polypetide isolated from the Sargasso Sea
MNDLLSLIKKDLTSLIEKLFNDDVIKNDISNKLTIDYNSKSKQGDLSSNVLFILKGQILDKSFNINDYVENYLSNLEYIETIDIHKAGFVNIILTKDYITKFLNKIYILENIYTKTNKQKINLEFVSANPTGPIHVAHLRGAVLGDVLSSILKRIGHEVTREYYVNDAGSQITILGNSLFKRYQELCGKNIQFLDGEYPGNYLIEIAKEIKNLDNEKWLSVKDSNKVQSYFEQYAIQYLVKKIQDDLLLLNIKFDQFTFESKIVKNNLINKVFSILKDNDLIYEGILEKPLTVDSEDWEPRKQLLFRSTIFSDDNDRAFQKSNGEWTYFANDAAYHFDKYKRGYDKLINIWGADHIGYIKRMVSIVDVFSNKKEYLKVIVCQIVRLFKDNQLLKISKREGNFVTLEEIYKQVGKDPLRYFMISTKNETPMDFYMDKVVEKNKDNPVFYCQYAYARASSVINNAKKLSNIDISKISFTDFNKLSI

SEQ ID NO: 160171 - protein, 628 aa, Unknown
  Bacterial polypetide isolated from the Sargasso Sea
MVFLELLENIRKETSEILDSQNYDPVSFSVESAKPGFGDITCNVAFLLSKQLKKSPQEISKELSKLYKFDHIPQIKNVESHASGYLNFNIDYTQFTNLVIDSSLQENYGSLDIGHNEKIVVEHTSVNPNKALHVGHIRNVILGDIVSKILRKGNFDVKVLNYVDDSGLQVADIIVGFTELGFSQEPPENEKFDHYCGDTVYVKTTEKYETDKQLEEKRHEILKQIEDSSSTISKMAQTITRKVLDEQLKTVWNLGVFYDCLNFESQIIHSKLWDKIFEKLKSENQIKYEETGDNAGCWVIPAEGEDDKILVRSNGVATYIAKDIPYAAWKLGLVDDPFSYKIHSTQKNSQTLYETTLDEISDHDDDKLNLSGNKVITVIDNRQIRLQKIVSGLMAKFKEEGAYTHLGYESVTLSADTVKSLGLSVDGESAQMSGRKGLYVNADTVLETLTKRVYDESKSRNENLSESELENIANIVAVGTIRYEMIKPDLDKIITFDLKNSLRLEGDTCSYIQYSYARASRILEKTETKPNFDSGFELLSSEYEKNLIKKIAMFDVQVNDSVNNFSPKVIAKYSYDLAVTFSSFYEHVKVLKSETPELLNARLCLVVSFQKTLKSSLGLLGIDAPERM

SEQ ID NO: 160172 - protein, 391 aa, Unknown
  Bacterial polypetide isolated from the Sargasso Sea
FGSVLSKLLKEAGFEVDEEYYVNDFGRQMNILSVSLWIRYAQIFDKNIKMLNNGYQGDYLIAIAQNLKKFRSDELYEDDEEIKSLLENENEEAEKHTDEVIDSIKSKLSDEFSYVRDFALREILELIKEDLLEFGVDHNHWFSESALYKSELHDLSKVDQSIEELSSKGFVYEKEGAIWFKSSELGDDKDRVLKRGNGEFTYFASDVAYHLDKYDRGYDRIINIWGSDHHGYLPRVKAAMEASKKNVEKLEVVFIQFANLIRAGKKVTMSTRSGEFITLKELIEEVTSEAARFFYINRKADQHLDFDLDLAKEQSKDNPLYYIQYAHARICSVLRKSKAREEELTSSELGLLDSNKEIEIQKILKQYPPLIERAALASEHHLICYYLKDLA

SEQ ID NO: 160173 - protein, 236 aa, Unknown
  Bacterial polypetide isolated from the Sargasso Sea
MKDPNILFKEIADEFTSSGQLFETRDYKDSNGIIHKEYAAFPDNLRGYFDFGLLHADKEFIVYESERFLYKDVIAKAAQVGNALISEGIKKGDRVAICMQNNPEFIFAYMGIVGIGAVCVPLNSWWVPDEVIYALEHSEAKLLFGDQKRLQGLESLKDVKKVITSYTPDENFISFSDFIKDHSSEWPDIKVSRDDHATIYYTSGSTGKPKGVLSSQRGLISSFFSWACMSMILSER

SEQ ID NO: 160174 - protein, 155 aa, Unknown
  Bacterial polypetide isolated from the Sargasso Sea
MSDIFHFYKSIISKEFASNFKLPEQAINESSFVVESPKNEDNGDLSTNICMVLSKDLSQPPIKIAEILKTSLEKYSEFEQLEVAKPGFLNFRVNKSVWYKFLSEKLHTSELYDKNIGNGQTINVEYVSANPTGPLHIGHCRGAVFGDVLSNLLTS

SEQ ID NO: 160175 - protein, 304 aa, Unknown
  Bacterial polypetide isolated from the Sargasso Sea
LKSLGINHDNFVSEKTIVLNNEVESVIKFLEKNKFVYKGKIKAPAGEDDKNWIEREQLLFKSTDFGDDKDRALQKSDGAWTYFASDVAYHKNKVDRKFDYLINILGADHAGYIKRISSSVEALSGKKDKLICKISQLVKLIKDNKPFKMSKRKGDYITVDDLIEEVGKDATRFIMLNRSSDVELDFDFDAVKEKSKDNPLYYVQYCYARISSVFRHIGKDLNSNIKLDDFSFEYSNDEIKILKKISEWPKCIDAASSKLEPHRIPVYLYDLASEFHSYWNLGKQNPEKRFINDQKTVSPDKLIF

SEQ ID NO: 160176 - protein, 372 aa, Unknown
  Bacterial polypetide isolated from the Sargasso Sea
MVFLELLENIRKKTDKILDSQNLEPVPFSVESAKPGFGDITCNVSFLLSKQLKKSPRDISRELSDLYNFDDLPEIKNVESHPSGYLNFSIDYEKFNEVVISSSLEENYGSLDIGNNEKVVVEHTSVNPNKALHVGHIRNVILGDIVSRILRKGNFDVNVLNYVDDSGLQVADIIVGFTELGFSQEPPNNEKFDHYCGDTVYVKTTEKYETDKKLEEKRHEILKQIEESSSEISKMAQTITRRVLDEQLKTVWNLGVFYDCLNFESQIIHSKLWEKIFEKLKSDNQIKFEESGDNAGCWVIPAEGEDDKILVRSNGVATYIAKDIPYAAWKLGLVDDPFSYKIHSTQKNSQILYETNLDEISDHNDKLHLSGN

SEQ ID NO: 160177 - protein, 136 aa, Unknown
  Bacterial polypetide isolated from the Sargasso Sea
MDNYIKNLLDFFYDFSSFLENENYISAIDKNQISIDYSSNNKQGDLATNFLLIIKRKIIKKNFDIEKELNKRIKSIEFIDRILISKNGFINFFLKNDFVFKKLNEIYNKDFLKYINYGDGKKINVEFVSANPTGPL

SEQ ID NO: 160178 - protein, 141 aa, Unknown
  Bacterial polypetide isolated from the Sargasso Sea
MNIFELYLDKIKSIIVDLNKNNQLEIPESFNGINAEIPPPKFNCDISTNVAMVLSKINKTSPIQLAEKLAPEIKNKDSQIENISVAKPGFINIKFKPSYWSNFIKNITDNADSFGINEKGKKNNYLVEFVSANPTGPLHVG

SEQ ID NO: 160179 - protein, 400 aa, Unknown
  Bacterial polypetide isolated from the Sargasso Sea
NFKINNNTWQKTIDSILKSNKSYGSNKFKKSFNIEFVSANPTGPMHVGHCRGAVFGDVLSNLLIFNGGKVTKEFYINDYGNQIENFVKSVYLRIREIKFKENFPDNKSLYNGEYIKDIANAVLKKLKKIKFDSYEKDFEILKKESLNYSLNLIKSDLKLLGVKHDLFFSETKMVKNKSVDKIIKILKKNNFVFEGFLEAPRGDDSSSWKKTKRLIFKSSSFGDDIDRALQKNDGTWTYFANDIGYHSTKLNRKYDSLINILGADHIGYIKRISAAVSAMSNNKINLTCKVCQLVKFLKNGEPFKMSKRSGDFFPLNKLLKEVNKDSIRFMMLYRSNDVELEFDFKKVLEKNKDNPVFYVQYCYARINSIFRTLKINPSKKTSLSSVDFKINNFEQKLLKK

SEQ ID NO: 160180 - protein, 139 aa, Unknown
  Bacterial polypetide isolated from the Sargasso Sea
MNIFDKYLDKIKKILLDLSKNGDLILPDKLDGITTETPPLKFNSDISTNVAMILSKVNNKPPVELATTLAEAIKKSDNLIDDISIIKPGFINIKFKSIFWTNFIEEIIKNSKIFGINSKEKKNNYLVEFVSANPTGPLH

SEQ ID NO: 160181 - protein, 358 aa, Unknown
  Bacterial polypetide isolated from the Sargasso Sea
MKDPEILFEEITNEITAKGQLFETREYVDTKGITHKEYASFPDNLRGYFDFAMLHAEKEFLVYESERFLFKDVVAKAAQVGNALIAEGITKGDRVAICMQNNPEFIFAYMGIVGIGAVCVPLNSWWVPDEVIYSLNHSEAKLLFGDKKRLQGLENLKNLKKIITSYTPDDNFTSFNDFIKDHSTDWPDIEIARDDHATIYYTSGSTGRPKGVLSSQRGIISSMFSWACISTVLSQREARLGKDSSPLASSESCILLCVPLFHATGSHVAFLLSILVGRKVVMMKKWDAGEAIRLIHDEKITDITGVPTQTWELLNHPDKDNYDLSSLKTLGGGGGPRPAEHVKLLDDNFEGRPGMDMD

SEQ ID NO: 160182 - protein, 355 aa, Unknown
  Bacterial polypetide isolated from the Sargasso Sea
MNFDDYDQISEKLTALSIDQALLLIKKNLKILGINHDNFVSEKSIVLNNEVESVIKFLEKNNFVYKGKIKAPAGEDDKNWVEREQLLFKSTDFGDDKDRALQKSDGTWTYFASDVAYHKNKVDRKFDYLINILGADHAGYIKRISSSVEALSGKKDKLICKISQLVKLIKDNKPFKMSKRKGDYITVDDLIEEVGKDATRFIMLNRSSDVELDFDFDAVKEKSKDNPLYYVQYCYARISSVFRHIGKDLNSNIELDDFSFEYSNDEIKILKKISEWPKCIDAASSKLEPHRIPVYLYDLASEFHSYWNLGKQNPEKRFINDQKTVSPDKLIFLKAISNVLKSGMGIVGVDTPDKM

SEQ ID NO: 160183 - protein, 250 aa, Unknown
  Bacterial polypetide isolated from the Sargasso Sea
MLLIYIRRLVNNFIKDLSDFLFDFTDFLENNKFISPINKKQISIDYSSNNKQGDLATNFYLIVRRKIINEKFNIEKELNDRIKLIGFIDHFVVSKNGFINFFLKDEFVLRSLKEIYSKNFLNYINYGADKKINVEFVSANPTGPLHIAHIRGAVFGDVLSSLYTKTGFDVTREYYVNDAGSQIDKLSNSLLKRYLQLFDKKIELEEDEYPGEYLINIAKKIKNEDGDKWLNFQQEETIQYFKNFALKNIL

SEQ ID NO: 160184 - protein, 368 aa, Unknown
  Bacterial polypetide isolated from the Sargasso Sea
EFIDHFVVSKNGFINFFLKDKFVLRSLKEIYSKNFLNYINYGAGKKINVEFVSANPTGPLHIAHIRGAVFGDVLSSLYTKTGFDVTREYYVNDAGSQIYKLSNSLLKRYLQLFDKKIELEEDEYPGEYLIDIAKKIKNEDGDKWLNLQQKETIQYFKNFALKNILLSIKSDLELINIRFDKFTHETEIEKSKIIDELFSILDEKKLLYAGILEKPKGDDSDWEPRKQLLFRSSKLLDNEDRALKKSNGEWTYFANDAAYHLDKCKRNFDRLVNIWGSDHIGYIPRMNSLIKAIKDDETYLNILTCQIVSLIQNKQKIKMSKRSGNFVTLANVYSKVGKDPIRYYMISTKNETAIDFDLDAVVEKNKDN

SEQ ID NO: 160185 - protein, 483 aa, Unknown
  Bacterial polypetide isolated from the Sargasso Sea
SAQVANALIEEGINKGDRVAICMQNNPEFIFAYMGIVGIGAVCVPLNSWWVADEITYALEHCDAKLMFGDKRRLKGLDDLKITKIITSYTPDDKFMSISEFINDHSDEWPEVDISRDDFATIYYTSGSTGKPKGVLSSQRGIISTIFSFACISTILSQREERMGNEFSPLTGSELAILLCVPLFHVTGSHVSFLMSILVGRKIVMMKKWDAGEALKLINDEKVTDITGVPTQTWELLNHPDKNKYDLTSLKVLGGGGGPRPAEHVKQLDENFKGRPGIGYGLTETNALGTLAGGDEYISNPSTAGRVVPPVTEIKIIDSKWNEVPLGEIGEIAIKSESNMIGYWKNDAATKECVNEAGWFKSGDMGKFEGPLLYILDRIKDMVIRGGENIACPEVENAIYDHPDVLEASVFGIPDQRLGEILCSAVVLREGSKLNKDDLVNFLSDKLAAFKIPALIKFMDSNLPRVASGKFDKPALREMFISK

SEQ ID NO: 160186 - protein, 540 aa, Unknown
  Bacterial polypetide isolated from the Sargasso Sea
MFETREYTNSKGIALREYASFPDNLRGYFDFGLLHADKEFLIYDSERFLYKDVIAKAAQVGNALVSEGIKKGDRVAICMQNNPEFIFAYMGIVGIGAVCVPLNSWWVPDEVIYALEHSEAKLLFGDQKRLQGLENLKDVKKVITSYTPDENFISFSDFIKDHSSEWPDIEVSRDDHATIYYTSGSTGKPKGVLSSQRGLISSFFSWACMSMILSERENRLGKDATPLASSESCILLCVPLFHATGSHVAFLMSILVGRKIVMMKKWDAGEAIKLIHDEKITDVTGVPTQTWELLNHPDKDNYDLSSLKTLGGGGGPRPAEHVKLLDDNFEGRPGIGYGLTETNALGTLGSGDEYISHPSSAGRVVPPLTEIKIFDDEWKELPEGKIGEIAIKSQSNMLGYWKNEEATAECMNDEGWFRSGDMGKFEGPYLFIVDRIKDMVIRGGENIACPEVENAIYEHPDVLQACVFGIPDERLGEILCTAIYLKEDAKLNEESLVEFLSDKLAAFKIPALIKFMDSKLPLVASGKFDKPALREIFTQE

SEQ ID NO: 160187 - protein, 480 aa, Unknown
  Bacterial polypetide isolated from the Sargasso Sea
MERPYQGGIQKGDRVAICMQNNPEFIFAYMGIVGIGAVCVPLNSWWVPDEIIYAMEHCDAKVLFGDQKRLKGLESLTHVKKIITTYTPDDSFESFYNFTKNHSEEWPDIDINRDDHATIYYTSGSTGKPKGVLSSQRGVISSMFSWGFISTVLSQREARLGKDASPLASSESSILLCVPLFHATGSHVAFLMSILVGRKVVMMKKWDAGDAIKLISEEKVSDITGVPTQTWELLNHPDRDKYDLSSLKVLGGGGGPRPAEHVKLLDENFKGRPGIGYGLTETNALGTLASGDEYIQNPSSAGRVVPPLTEIKIIDSNWNELPEGEIGEVAIKSQSNMLGYWKNDDATKECMNNEGWFKSGDMGKFDGPFLYIVDRIKDMVIRGGENIACPEVENAIYEHPDVLEASVFGIPDERLGEILCSAVVLREGSNLNKDDLGKFLSDKLAAFKIPALVKFMDSNLPLVASGKFDKPALREIFNKD

SEQ ID NO: 160188 - protein, 559 aa, Unknown
  Bacterial polypetide isolated from the Sargasso Sea
MNDSNKLFNEITNELTQKGQIFETREYKNNFGIITNEYASFPDSLRKYFDFALMHGDKEFLVFEEERFTFAEAFKIAAKFGNALINAGIKKGDKVSICMQNNPEFMFAYMGIVGIGAVCVPLNSWWVPNEVIYGIEHSQSKLLLADQKRLQGLESINITKIISSYTPDENFTDFKEFIKNESDEWPEVEISRDDDATIYYTSGSTGRPKGVLSTQRGLLSSMFSWAFMASVLSEREKRLGKDSTSLASGDSSILLCVPLFHATGSHVAFLLSILVGRKVVMMKKWDTGEALKLIDNEKITDITGVPTQTWELLNHPDRDSYDLSSLRTLGGGGGPRPAEHVKALDKNFKGRPGIGYGLTETNALGTMGAGDEYINNPSSAGRVVPPLTEIKIIDENWQELPEGKIGEVAIRSQSNMKGYWRNDDATAECINSEGWFKSGDLGKFDGPFLYILDRLKDMVIRGGENIACPEVEGAIYEHPDVLEASVFGIPDERLGEILCSSICLREGSKLSAESLNEFLSDKLAAFKIPVKIKFTYNPLPKIASGKFDKPTMRQNFIEE

SEQ ID NO: 160189 - protein, 560 aa, Unknown
  Bacterial polypetide isolated from the Sargasso Sea
MTDSNQLFNEIVSELIKPGEIFETREIQDEKGNSFSEYVTFPDNLKGYFDFGLLHADKDFLVYESERYTFKETISKASQVGNALIEEGIQKGDRVAICMQNNPEFIFAYMGIVGIGAVCVPLNSWWVPDEIIYAMEHCDAKVLFGDQKRLKGLESLTNVKKIITTYTPDDSFESFDDFTKNHSEEWPDIDINRDDHATIYYTSGSTGKPKGVLSSQRGVISSMFSWAFISTVLSQREARLGKDATPLASSESSILLCVPLFHATGSHVAFLMSILVGRKVVMMKKWDAGDAIKLISEEKVSDITGVPTQTWELLNHPDRDKYDLSSLKVLGGGGGPRPAEHVKLLDENFKGRPGIGYGLTETNALGTLASGDEYIQNPSSAGRVVPPLTEIKIIDSNWNELPEGEIGEVAIKSQSNMLGYWKNEDATKECMNNEGWFKSGDMGKFDGPFLYIVDRIKDMVIRGGENIACPEVENAIYEHPDVLEASVFGIPDERLGEILCSAVVLREGSNLNKDDLVKFLSDKLAAFKIPALIKFMDSNLPLVASGKFDKPALREIFTQE

SEQ ID NO: 160190 - protein, 225 aa, Unknown
  Bacterial polypetide isolated from the Sargasso Sea
HGGYIKRMSASIQALTNNKARFTAKLCQMVKLIIDGKELKMSKRSGDFITLSDLVKEVGSDSIRFMMMYRKNEAPLEFDFKKVTEQSKENPVFYVQYAHARISSVLNNLHSQNIKLNLENFSECNFSELNDLSEISLLKKILDYSNIINTSVSLFEPHRIAYYLYELASEFHSLWSQGKVDNSKKFIDADNIPRTYARMALLIATQRTIKSGLDILGVSSPDEMK

SEQ ID NO: 160191 - protein, 229 aa, Unknown
  Bacterial polypetide isolated from the Sargasso Sea
EKSSLAKLIELTSKIENIERIRYTTSHPYEFKDDLVDIYDKVPELVSHVHLPVQSGSDRILKLMRRRYTIDSYLSLVDKIKKVRSDMSFSSDFIVGFPGETANDFELTMNLINEVQFDESYSFIYSPRPNTTASDMDDDVTKDEKKERLDILQNRLNQLSFGYSRKKVDTLQTCLVYGQSKRDPGQLQARTICNRIVNFSSCDIDLIGQMVNIQINEALPNSLRGTLSN

SEQ ID NO: 160192 - protein, 274 aa, Unknown
  Bacterial polypetide isolated from the Sargasso Sea
MTMEEKIKGLIINALAESQGINEDEVNEIGLELSRNTNNDHGDFSSNIALKLASKFKSPPMKLAEEIIGSLETPAELELAECVKPGFINFYLSAEKKHSVLETILKNGKDFGSSCAPEKMRVLLEFVSANPTGPLHVGHGRHAAFGDSLARLLKKAGHDVFTEYYLNDAGRQIDILCLSVILEILRAEGLELKNINGLYKGIYIKEISQALIKEGFEINKKVLIPKLDGSADEIVDALILEIKNVIGSELFQKISDKTVSRMTKLLKDDLSDFR

SEQ ID NO: 160193 - protein, 293 aa, Unknown
  Bacterial polypetide isolated from the Sargasso Sea
MSKNGKIILPDKLDGINTEIPPAKFNSDISTNVAMFLSKINKKSPADLAEILAKVIKKSDNLIENVSVVNPGFINIKFKPIFWTNFIKEITQKSRTFGINDKEKKKNYLIEFVSANPTGPLHVGHCRGAILGDVIANVLLFNNHKVTREYYVNDYGNQIINFTKSVYFRIREIIFKEPFPSDNEDLYPGDYLIDFAKNIINSNEKIDFINFENISEKLTALSINEALKLIKKNLNSLGINHDNFVSEKKLILNQEVEKVIDYLKKNKFVYKGKIKAPAGENNDKLDRKRTIAF

SEQ ID NO: 160194 - protein, 144 aa, Unknown
  Bacterial polypetide isolated from the Sargasso Sea
MNIFEEYKNKILIILKKAHKDKLLNLPDNLNSINVDSTPPKIDFDISTNVSMVLSKPNNKPPNELAQILIKLLKNEDKSIDEITFAEPGFINIKFSNDYWSNFTNKLINSPNNYGASSKTKKKYLVEFVSANPTGPLHVGHCRG

SEQ ID NO: 160195 - protein, 297 aa, Unknown
  Bacterial polypetide isolated from the Sargasso Sea
SDEIERLEFAKPGFIYFYLSSDKKNRVLEEIMSKGRDFGSSCVSEKKKVLLEFVSANPTGPLHVGHGRHAAFGDSLARLLRKSGHEVFTEYYLNDAGRQIDILCVSVMFELLLLEGQKLGQLGGLYKGSYIKKIAGALRDEGIVINKKVSIPKASGSDDKIIDALILEMKDVVGNQIFQMVSDKTVLQMTKLLKDDLSDFRVKQDGFYSEKSLFSEGRIEEACGIIKKNRNAYEKDGALWLESTKYGDDKDRVVIREDGRSTYFASDIAYHHHKKLRGFDLLINVLGSDHHGYVSRL

SEQ ID NO: 160196 - protein, 145 aa, Unknown
  Bacterial polypetide isolated from the Sargasso Sea
MIGLIDKEIDSFLLSLVDTANKDKIKKIIDKYSTTITENLNNGHITTNVCMVAASILKLNPNELASKLVEKLNLLDLFQAVEAAGPGFINITLHRKDFVSIIRSINKDKERYGQTNIGNGKKIQIEFVSANPTGPLHVGHGRGAA

SEQ ID NO: 160197 - protein, 188 aa, Unknown
  Bacterial polypetide isolated from the Sargasso Sea
MKEKIQENLKGILGDLYNSADFDIKEFDINIQENKEKEHGDLASNIALVLAKPLGKNPKEIADQIKDNFFTDEDITKVEVAGPGFINFFLSKKSHGSVLKEISVEKDSYGSSKSNNKKVLIEYVSSNPTGPLHVGHGRGAVFGSVLARLLSEAGFKVDEEYYVNDFGRQMNILAASLWVRYAQIFNTN

SEQ ID NO: 160198 - protein, 147 aa, Unknown
  Bacterial polypetide isolated from the Sargasso Sea
MNIFDLYLIKIKDILKDLSKQNKIILPQNLEGITAEIPPVKFDSDISTNVAMFLAKINKKTPNDIAEILSPILSDNDEQIERISIEKPGFINIKFKPIFWTNFIKDVIENYKSFGVNKEEKKINYLIEFVSANPTGPLHVGHCRGAI

SEQ ID NO: 160199 - protein, 228 aa, Unknown
  Bacterial polypetide isolated from the Sargasso Sea
MNIFELYLDKIKSIIIDLNKNNQLEVPESFNGINAEIPPPKFDCDISTNVAMVLSKINKTSPLQLAEKLASEIKNKDSEIESISVAKPGFINIKFKPSYWSNFIKNITDNADSFGINEKEKKNNYLVEFVSANPTGPLHVGHCRGAILGDVISNVLIFNKHKVTKEYYVNDYGNQIINFTKSVYFRIREIHFKETFPEDNPDLYPGDYLIDFAKNIISNNSDLNFDNF

SEQ ID NO: 160200 - protein, 297 aa, Unknown
  Bacterial polypetide isolated from the Sargasso Sea
ECVKPGFINFYLSAEKKHSVLETILKHGRDFGSSCAPEKMRILLEFVSANPTGPLHVGHGRHAAFGDSLARLLKKAGHEVFTEYYLNDAGRQIDILCLSVILEMLRAEGLELKNINGLYKGIYIKEISQALIKEGFEINKKVLIPKLDGSADEIVDALILEIKSVIGSELFQKISDKTVSRMTKLLKDDLSDFRVNQDGFYSEKSLFSKGKIEEACEIIKKNGNAYEKDGALWLESSKYGDDKDRVVIREDGRSTYFASDIAYHHDKKMRGFDLLINVLGSDHHGYVSRLEAGLVST

SEQ ID NO: 160201 - protein, 322 aa, Unknown
  Bacterial polypetide isolated from the Sargasso Sea
MVRKVVDADPQELAHDSIAAELVEKYPDARQEVLGETVKLHEGDSENNKLWEQFMPVCREEIERIYSRLDVTFDHTIGESFYQPLLTGVVDDLTACGMARESRGAVGVFLEGYESPLLVQKADGAFLYATTDLATLAWRAEHWKPDRILYIVDHRQSQHFEQVFATARSWGCRAGEQLSGMDLIHVAFGTVLGEDGKPFKTRAGDTVGLEALLDEGVQRAACVVGDGEQARQGMDDARRQEVAEAVGIGAIKYADLSQNRSTDYVFSFDKMLELKGNTAAYMQYAVARVEGIVTRGGVDRELLRREVLDDASVLGLSDPFGT

SEQ ID NO: 160202 - protein, 197 aa, Unknown
  Bacterial polypetide isolated from the Sargasso Sea
MNIFDQYLDKIKKILLDLSKEDLITLPENLDGINTEIPPEKFNCDLSTNVGMILSKINKKPPLEIAGTIADALKKKDPLIKDISVVKPGFINIKFKPIFWTNFIQEIIKDAKTFGKNNKEQKKKYLVEFVSANPTGPLHVGHCRGAILGDVIANVLTFNNHKVTKEYYVNDYGNQIINFTKSVYFRIREIKFNEPFP

SEQ ID NO: 160203 - protein, 299 aa, Unknown
  Bacterial polypetide isolated from the Sargasso Sea
AAKQHSTLNRLNIVMDVLYNEQSLYEDGSLDKVVAKLRQKKLAYDKDGAVWFAVKELGGLDDRVIVKSTGEPTYRLPDIAYHCNKMERKFDLVIDVLGADHKDSFPDVILGVKAMGYEADRIKMLMHQFVNIKGQRMSKRSGKFISLDDLIDEVGADVVRFFMLMRASESHLEFDIDLARDQSDKNPVYYVQYAHARICSILEKASIAGYSLKDTKVDGLVHPSERLLMRNLLELSDTIDRAVSEMAPHYLTTYVRDLASSFHTFYGDCRVLDDDDVSLTIARLNLIRAVRVGLSHALG

SEQ ID NO: 160204 - protein, 271 aa, Unknown
  Bacterial polypetide isolated from the Sargasso Sea
KPGFINIKFKPLFWSNFIQEITDNSNTFGINQSEEKFNYLVEFVSANPTGPLHVGHCRGAILGDVISNVLTFNKHKVIKEYYVNDYGNQIINFTKSVYFRIREVKFNETFPSDNPDLYPGDYLIDFAKNIVSSNPDINFDDYNDISEKLTSLSIEQALLLIKKNLNSLGINHDNFVSEKNLVLNDEVKKVIKFLEDNNFVYKGKIKAPAGEDNKNWVEREQLLFKSTDFGDDKDRALQKSDGNWTYFASDVAYHKNKVDRKFDYLINILGA

SEQ ID NO: 160205 - protein, 156 aa, Unknown
  Bacterial polypetide isolated from the Sargasso Sea
RFMMLNRSNDVELDFDFDKVKEKTKDNPVYYVQYAYARINSITRTLKKSLNDNILITNKSFSPNEYEEKIIRKVFEWPKIIESASFKFEPHKIPFYLYELSTLFHSYWSKGNEDDRFKFIENGKVKREEILIFLYLVSIVIRNGMKILGVSLPEKM

SEQ ID NO: 160206 - protein, 300 aa, Unknown
  Bacterial polypetide isolated from the Sargasso Sea
NFSEFEKIDVANPGFINITFKINFWNKHIMKILKSNTNFGANKISKKKYNIEFVSANPTGPLHVGHCRGAILGDTISNLLKFNGHKVTKEYYVNDSGNQIQIFVSSVYNRILEILEEKEFPYNKNLYPGDYIIDIAKNIIKKKNIKSFSNYEKIYKKLEKESLNQSIKIIKNNLYKLGVTHDKFVYESDLINKKLVLKTINKLKKDKYVYTGKLLPPKGEENQNWKSRDQLLFNSSKFGDDVDRALQKEDKTWTYFASDIAYHAHKIKGKYNVLVNVLGADHAGYIKRIKSAVSAISNNK

SEQ ID NO: 160207 - protein, 316 aa, Unknown
  Bacterial polypetide isolated from the Sargasso Sea
DYGSSALGAGKKINIEYVSANPTGPLHAAHARGAVVGDALARLLMKTGYEVCKEYYINDAGSQVDILGQSTFLRYQEILGDDSIVIPEGHYPGAYLKDIAAEIVEKDGNKWLSKSVEERLDAFRKYSVQMMMEKVKADLNSLGIEMDIFSSEQSLIQSGGVDSVLNILEDRELLYEGVLDPPKGKQSENWISRPQRLFKSTLFGDDVDRAIQKTDGSWTYFASDIAYHYDKYKRGFTEMIDIWGADHGGYVKRMQSAVNAVTFDEAKLDVKICQIVHMLRDGKPVRMSKRSGDFITIEDVVTAVGKRMLSGFIMLT

SEQ ID NO: 160208 - protein, 300 aa, Unknown
  Bacterial polypetide isolated from the Sargasso Sea
MQENKDKEHGDYASNIAMILAKNLATNPKNLAEQISKDFPLDDDILKVEVAGPGFINFFVSEATHAEVLKKIDSEKVKYGHSKQKAGKVLIEYVSSNPTGPLHVGHGRGAVFGSVLASLLRAAGHEVDEEYYVNDYGRQMNILTVSVWLRYLQTSNENISMSALGYQGDYIKLIAEELFKKNKEKYQLSDNDQDNILPILKEQQDEKDIDTLISFMQSILGEGFFEIRSFALDNMLDIIKSDLINFGVEHNLWFFESSLYVEEKGESSKAYKAISDLSSNDFVYEKDGAIWFKSSELRDD

SEQ ID NO: 160209 - protein, 262 aa, Unknown
  Bacterial polypetide isolated from the Sargasso Sea
DYPIIDINVQVPKKITHGHLTTNVAMILAKDLQKSPIELANNLIKYLKTNFSEFYEEVNVAGPGFINIKMNKKIILDLIREIKKQNDNFGKNNQGQGKNAIVEFVSANPTGPLTVAHGRGAIVGDTISRILEWNGYSVDREYYFNNAGRQMRILGESVKARYLNNCGIKTKFPDEGYQGEYINDIAISFQQEFDNKYINEENIEIFKNYAEQQIFDDIKQTLNTLEINFDNYFNEDDLYKNNSIEQTVSDLDKKGLIYKKDN

SEQ ID NO: 160210 - protein, 297 aa, Unknown
  Bacterial polypetide isolated from the Sargasso Sea
FFTNLFWQNQLSQFIKLDGSYNYNIKPKSICIEFVSANPTGLMHIGHARGAVLGDTISSVLEEVGHNIKREYYINDAGEQIKKLNKTIIFHIENILKNTTNELFNDLYPGEYLENIAKEIFNKFSIKNLNELKKFEKNIIDFVLNDIKEDLAELGIIHDNFVSEKNISSSDNINKLKNKLLESELAYYGFQEKPKNISDKDWEKKEQLLFCSKKFGDDSDRSLMKPGGEITYFMSDLLYHINKIERNFDVLINIWGVDHFGYVKRLQNALYALCKENFLLDIKLTSLVNLIKNGGKT

SEQ ID NO: 160211 - protein, 213 aa, Unknown
  Bacterial polypetide isolated from the Sargasso Sea
MNIFTDYQKKIISILKKLEKKNIIKISDNIKGILVELPPKNQEGDISCNAALVISKINNKSPLDIAKEIKKYLLINLKELESIEVAGPGFLNIKFKSYFWNRVLLKVINLNKKFGSLNNKKKKYNIEFVSANPTGPLHVGHCRGAIIGDALANLLIFNGNNVTKEYYVNDHGGQIEKFILSVYKRILEIKYNKPFPLNEDLYPGNYIKDIAIK

SEQ ID NO: 160212 - protein, 286 aa, Unknown
  Bacterial polypetide isolated from the Sargasso Sea
TNVAMVLSKPNNKSPLELAKIIADIIKKNDENLDDIKIEKPGFINLKFKKIFWNNFLKTIINQSNYGSNTSNVSKKYLVEFVSANPTGPLHVGHCRGAILGDVISNLLIFNNHKVTKEYYVNDYGNQIIHFAKSVYFRIREILFKEKFPIDNKDLYPGDYLIDIAKNIIDKNTGIKFDNFENISNDLTKLSVQESLKLIKFNLNNLGISHDNFASETDVVLNKEVDQVVDKLKKDNFVYLGKIKAPEGESSKNWTEREQLLFKSTDFGDDKDRALQKSDKSWTYFA

SEQ ID NO: 160213 - protein, 174 aa, Unknown
  Bacterial polypetide isolated from the Sargasso Sea
MNIFDQYLEKIKKIIFDLSKNGNLILPDKLDGITVETPPAKFNSDISTNVAMILSKINKKSPTDIAKNLSDVLKKKDDLIEDIEIINPGFINIRFKPIFWTNFIKDLNNNSETFGINTKERKKNYLVEFVSANPTGPLHVGHCRGAILGDVIANVLLFNQHKVTKEYYVNDYGN

SEQ ID NO: 160214 - protein, 276 aa, Unknown
  Bacterial polypetide isolated from the Sargasso Sea
LINKVNKEIKLFISSIDGIDKDSVGEICEKFKTSISDNLKNGHITTNVCMIAGSILKCDPKNLATDLHKRISNLKIFENVEVAGPGFINITLKRIDFLSILNKIYEKNVTYGSSSLGERKKVQIEFVSANPTGPLHVGHGRGAAYGDALSRILKSTGYKVEKEYYVNDAGRQIDILTASVIIRMLKKELNGFFPQNAYKGEYIESIGEKFGEKIKFDDANNLIKNLSSDAEDEINEIIANLKMKDLMIWNKVKNRSLAFKVDLIKEDLKNFNVSFD

SEQ ID NO: 160215 - protein, 270 aa, Unknown
  Bacterial polypetide isolated from the Sargasso Sea
ELAEKLAPEIKNSDNQIDNISVVKPGFINIKFKPSFWSNFIKEIIDNSEKFGINEKENKNNYLVEFVSANPTGPLHVGHCRGAILGDVISNVLIFNKHKVTKEYYVNDYGNQIINFTKSVYFRIREIKFNETFPQDNTDLYPGDYLIDFAKNIVSENSDLNFDDYDQISEKLTALSIEQALHLIKKNLKSLGVNHDNFVSEKSIVSNNEVESVIKFLEKNKFVYKGKIKAPAGEDDKNWVEREQLLFKSTDFGDDKDRALQKSDGAWTYF

SEQ ID NO: 160216 - protein, 286 aa, Unknown
  Bacterial polypetide isolated from the Sargasso Sea
WTNFIKDIIINSKTYGINNKEKKKNYLVEFVSANPTGPLHVGHCRGAILGDVIANILLFNKHKVTKEYYVNDYGNQIINFTKSVYFRIREIAFKEPFPINDENLYPGDYLIDFAQNIINKNNKIDFKNFENISEQLTTLSIEEALKLIKKNLNSLGIIHDNFVSEKKLVLNQEVEKVIDILHKNKFVYKGKIKAPMGENNNNWIEREQLLFKSSDFGDDKDRALQKSDGAWTYFASDVAYHKNKLDRNFDYLINILGADHAGYIKRISSSVEALSNSKDKLICKVS

SEQ ID NO: 160217 - protein, 145 aa, Unknown
  Bacterial polypetide isolated from the Sargasso Sea
LILSKKLKMDLDQIFLEVKKFFEDSDDFRDIVLAKSGFINFFVKDNILHDFIREVLKNRENFGKKEFGKGEKINIEYVSANPTGPLHVGHTRGAVFGDTLANIFDFVGFDVCREYYINDSGEQINNLAKSVYLRYLQNFSDNEIV

SEQ ID NO: 160218 - protein, 301 aa, Unknown
  Bacterial polypetide isolated from the Sargasso Sea
SNIAMIGCKILKTSPMHLADEFAIYLKKEDKIQKIEILKPGFINFFFHESYWQNQLKEYLNINQKFDYKIKSKKICLEYVSANPTGLMHIGHARGAVLGDTLSSILKEVGHDVTDEYYINDAGEQINKLLRTVNFHLSNNFESSSSFPDSLYPGDYLKNVAKVIHKENKKNILEQSNLNKKVIDYILNDIKEDLKTLKVNHKNFISEKKLSSKDCVDKLKKKLLDMKIAYYGFQEKPKNIDNDKWEKKKQLLFCSKKFGDDSDRALIKPNGSLTYFMSDILYHQNKVERNFDTLINIWGVD

SEQ ID NO: 160219 - protein, 55 aa, Unknown
  Bacterial polypetide isolated from the Sargasso Sea
MNQSHDYGSSNKDKKKYLVEFVSANPTGPLHVGHCRGAILGDVISNLLKFNKNVV

SEQ ID NO: 160220 - protein, 242 aa, Unknown
  Bacterial polypetide isolated from the Sargasso Sea
EPRVLVKSDGTYAYFATDLAYHHMKLEKYDLVIDIWGADHHGYIPRMKAGLKALGHDTSKLDIHLIQFANLFRDGEKISMSTRKGEYVEINELNDQIGKDAINFFYLTKNKDQHLDFDLDVAIKQNKNNPVYYIQYAHARIEKILNEVDDYKNKKYDFSSLNHELEKELISTLIKFEEVSNKTIMDLQPQLMTHYLQKLAQCFHSYYANIKILNDGKADYSKVHLIAAVQKVIKCGRRFIKY

SEQ ID NO: 160221 - protein, 239 aa, Unknown
  Bacterial polypetide isolated from the Sargasso Sea
MNIFEIYKENIIKIIKNFNTKNILKLPENLNNINVDVPPVKFVCDISTNVAMVISKINEKNPEEVAKLIIKELYKQKDIENITFEKPGFINIKFKKIFWSNFLLDVHNNHKTYGINNKGVKKNYLVEFVSANPTGPLHVGHCRGAILGDVLSNLLIYNNNNVTKEYYVNDFGGQINNFTKSIFLRIREILFKEIFPNDDKDLYPGDYLIDIAKNIIQNNKNLKFDNFENISDELTKISV

SEQ ID NO: 160222 - protein, 148 aa, Unknown
  Bacterial polypetide isolated from the Sargasso Sea
MNIFVEYQQKILKSLNGLQKAKKIKLPLKFKNITVEISPKNQKADISCNAAMVLSKYNNTNPVKLAEIIKKNLLITFKEFKKIEISGPGFINISFQTTFWKNYLSKVISLNSKFGSNRIKNKKYNVEFVSANPTGPLHVGHCRGAILG

SEQ ID NO: 160223 - protein, 215 aa, Unknown
  Bacterial polypetide isolated from the Sargasso Sea
KDSFGSSAVGKKNKVQIEFVSANPTGPLHVGHGRGAAYGDAIGRILESTGSIVEKEYYVNDAGRQIDILTASVILRLIKNDTSNYFPANGYKGEYIDEIGKKLDKKVKIQDFKSLSIKSYEDPEEEIDSIIHELEKLNNNSWNLIKNFSLKEIVKSIEDDLKAFNVNFDNWFYESSLGEIDDDSSDIASSVNKLKKDGHAYEKDKAIWLNTDVKW

SEQ ID NO: 160224 - protein, 225 aa, Unknown
  Bacterial polypetide isolated from the Sargasso Sea
NIEYVSANPTGPLHAGHARGAVFGDALASLLTEVGFSVTREYYINDAGNQIEKLVESSLLRYNELLTNKSVDIPEGLYPGEYLKDVGKILFEKYGDKLELGDKEKVFEKVRSVSLEVIMGMIKKDLLKLGIEMDVFTSEKEIISGHLLTEILKILESKNLIFNGVLDPPKGTDPENWEKRKQLLFKSSQYGDDSDRALKKSDGTWTYFATDMAYHLDKMNRTKGN

SEQ ID NO: 160225 - protein, 221 aa, Unknown
  Bacterial polypetide isolated from the Sargasso Sea
VEALTDGVGGVTVALCQMVRLFDQGEPMKMSKRAGNFVTVRDLIEAMDKRVGEGQGKDVIRFIMLTRKNDAPLDFDFARVSEQSRDNPVFYVQYAHARICSVLRRAQEIKIEMVPTSIDGTGYVFKGAELELLRMLADWPRIVELASAAREPHRVVFYLNELASEFHSLWNKGNSSSDARFIVEEDWEATNARLTLLSGVKVILVSGLQGIVGVLPQAEMR

SEQ ID NO: 160226 - protein, 176 aa, Unknown
  Bacterial polypetide isolated from the Sargasso Sea
MNIFELYLDKIKSIIVDLNKKNQLEIPESFNGINAEIPPPKFDCDISTNVAMVLSKINKTSPLELAEKLAPEIKNKDSQIETISVAKPGFINIKFKPSYWSNFIKNITDNADSFGINEKEKKNNYLVEFVSANPTGPLHVGHCRGAILGDVISNVLIFNKHQVTKEYYVNDYGNQI

SEQ ID NO: 160227 - protein, 248 aa, Unknown
  Bacterial polypetide isolated from the Sargasso Sea
MIDEINKEIEMFLSSIINNKKNIDSIMEKCTTSITDDLNKGHLTTNVCMVTASILKINPKKLAEELKTRLQKINKFDNVEVAGPGFINISLKRENFASIIEYINKNKDSFGSSDIGKKNKVQIEFVSANPTGPLHVGHGRGAAYGDAIGRILESTGSIVEKEYYVNDAGRQIDILTASVILRLIKNDINNYFPANGYKGEYIDEIGKKLDKKLKIDDFKSISIKSCKDPEEEIDNIILELEELNNNSW

SEQ ID NO: 160228 - protein, 200 aa, Unknown
  Bacterial polypetide isolated from the Sargasso Sea
MNIYNLYQKKILSILKSANKSDIIKLPEKLDGINVEIPPPKFNCDISTNVAMILAKTNNKSPTDMANQILELIKKQDEEIALIEAVKPGFINIKFKNTFWNSFLKELIKSGENFGKPINIKKNKYLIEFVSANPTGPLHVGHCRGAILGDVLSNLLSFHGHSVDREYYVNDHGNQILHFSKSVFLRIREILNNEPFLKTT

SEQ ID NO: 160229 - protein, 264 aa, Unknown
  Bacterial polypetide isolated from the Sargasso Sea
YEKNDALWLKSTVHGDDKDRVLVRENGKGTYLASDVAYHKDKLDRGFDEIINVWGADHHGYIKRIESAIESIGYSKDKLVVQLVQFANLIENGKKLKMSTRSGEFYQLSDLITAIGSGAARFYYLSKQADQHFDFDITLAKSKTKENLFYYIQYAHARICSLTKKYNQGDNEELSQFSDENFSKCDDLILKVSKFNEIIEAAAQKYQPHLIIFFLRDVAQTFHKFYNDNNILDSDKDERENIMLCMVNVRHVIAKCLGLLGIEP

SEQ ID NO: 160230 - protein, 269 aa, Unknown
  Bacterial polypetide isolated from the Sargasso Sea
IENDLKKFNVSFNNWFRESSLGNINENSSIISSSINKLKKDGHAYEKDNAIWLNTESSGDDKHRVLVRDDGRPTYFASDVAYHKDKIDRGFDTLINVWGADHHGYIKRIEASIEALGSEKEKMIVKLVQFANLYKNGKKVKMSTRSGDFFTLENLIDEIGSDASRFYYLSKQADQHLDFDLDLAQSDKKENIFYYIQYAHARICSLLDKYNKNADIKNLNLSSIEKNSYNKCDELIHEISRYPDVVTKASNTLQPHLIIFYLRDLSQLF

SEQ ID NO: 160231 - protein, 264 aa, Unknown
  Bacterial polypetide isolated from the Sargasso Sea
ISIIKDSIGKSVFEEITASVVGNMLKIIKSDLSDFGVEFDYWFSEKNMIKDSKIALALKKLKKENELFKKDGATWLRTTNYGDDKDRVVLRDDGRSTYFASDIAYHADKKDRGFTKLINILGSDHHGYIKRLKGGLASMGFNAKDLEVILMQFVTLFRGNKKIQMSTRSGEFIPMRELYEEVGIDAARFFYVSRSFDQHLDFDLELAKQQNNQNPVYYIQYANARISSVIKEIEKKGYKNNQRLGIKNIGSLDGKHESELISML

SEQ ID NO: 160232 - protein, 236 aa, Unknown
  Bacterial polypetide isolated from the Sargasso Sea
FFTDMSYHYDKFQERRFEKVINIFGADHHSHVNRLKSAVSAMDIEVEKLNILLTQIVHFKNQEKIEKFSKRSGNIYSIRDLIDIVGSDSIRFNFLNRTLDSQQEFDLDLAVKQSNENPVYYVQYAHARLCSIINSADMNIQDANLSLLSTKYEKKLIDNIDFFEDIIIHSVENLETHNITQFSIDLAKDLQIFYENCRVLSEDKELTKSRLNLVLSCKIVLCNLLNILGVNAPERM

SEQ ID NO: 160233 - protein, 300 aa, Unknown
  Bacterial polypetide isolated from the Sargasso Sea
LPENLDSINVEIPPSKFNCDLSTNAAMVLSKINKMSPQQIGEQLKILMLKIDGVENVTFVKPGFLNLNLSNNYWNFFLKDLLKNQNEYGINKSESKKKYLIEFVSANPTGPLHVGHCRGAILGDVISNLLIFNKHHVTKEYYVNDYGNQINSFTKSVFLRIREIKFNEKFPYDNTELYPGDYVKDIAENIIKKHKNLDFEKYDKISEKLTVFAINESLNLIKNNLKNLGIYQDNFVSEKSLVLNNEVEKVIDKLKSKNLLYSGLIKAPERIKSSDYKEREQLLFKSTSFGDDKDRALQKS

SEQ ID NO: 160234 - protein, 300 aa, Unknown
  Bacterial polypetide isolated from the Sargasso Sea
KLNSKYGSSRINKKKYNIEFVSANPTGPLHVGHCRGAVLGDTLSNLLSFNGNKVTKEYYVNDYGGQIENFVLSVYYRILEIKENKPFPTDKNLYPGDYVIDIAKKIIKSKIIKNFNNLEKIKTKLSLESLKYSIQLISSNLILLGVKHDNFVYESKLIDKKMVSKIIKKLKNQNYIYKGKLDAPKGEQITDWQSRNLLLFKSTIFGDDVDRPLQKADGTWTYFAGDMAYHAHKISRKFDVLINILGADHAGYIKRIISATKAISNNKVNLICKVSQLVKLFKNGEPFKMSKRKGDYITVE

SEQ ID NO: 160235 - protein, 312 aa, Unknown
  Bacterial polypetide isolated from the Sargasso Sea
MNFLILNGEVGDFEFKKQSFGIEIPQKSGFGDISSNIAMVLAKTFKTSPIKLAKLIQNELIKKNFIKKVEVVNPGFINIFFYKEFWHNQLSLILKNGLKFNYNVKKQKVCIEFVSANPTGLMHIGHARGAVLGDSISSLLEEVGYETLREYYINDAGEQIKKLIKTIDFHLINNHKKNVEFPEDLYPGEYLRTLSSSFANNKKVKKNKIIDMVMSDIKKDLNELKVKHTNFVSEENNLKPIKIESLKSKLLKDDLAYYGFQEKPKISTSDWKPEQQFLFRSKKFGDDSDRALLKTNNELTYFMSDIIYHNEK

SEQ ID NO: 160236 - protein, 148 aa, Unknown
  Bacterial polypetide isolated from the Sargasso Sea
MNLNNFKGVTVEIPPDQFKFDLSCNVSLVLGKINQINSKDLAVKIREIIIQNLKDFKDIEIAGPGFINIQFTNDAIIKNINKILKNRKTYGKKNSNKNYNIEFVSANPTGPMHVGHCRGAVYGDVLANLLKYNGNNVTREYYINDYGQ

SEQ ID NO: 160237 - protein, 256 aa, Unknown
  Bacterial polypetide isolated from the Sargasso Sea
MNIFENYLLKIEKIIKSAHKDNLLELPDNLSGINVDIPPAKFTGDISTNVAMVLSKINKKPPLELAKQIADLIKDSDNNIDEISIEKPGFINLKFKNEFWNGFILDVLNNSSYGSSTSGRKNSFLVEFVSANPTGPLHVGHSRGAILGDVISNLLSFNGHKVTKEYYVNDYGNQISHFTRSVYLRIKEILYDEIFPIEDNELYPGDYLIDIAKKIISKNKDLDFKNFESVSEKLKKLSIQESLKLIKINLENLGIK

SEQ ID NO: 160238 - protein, 149 aa, Unknown
  Bacterial polypetide isolated from the Sargasso Sea
KYDVELDFDFEKVKEKTKENPVYYVQYAYARINSITRTLKKKLSDKILIESKSFNPNEYEKKILRKIFEWPKIIESASYKFEPHKIPFYLYELSTLFHSYWSKGNEDKNYRFLENDKVKRLETLAFIYLTAIVIKNGMNILGVSLPEKM

SEQ ID NO: 160239 - protein, 165 aa, Unknown
  Bacterial polypetide isolated from the Sargasso Sea
MNLYSHYLFKIKKTIQDNKRNINFDSEKVLNSIVLESPPDKFNFDLSSNAALILSKNNKENPRDLAEKIKKILLINIKDFSEIDIAGPGFLNFKLTFDAWIKIMQMILKSKKKFGSNNKNKKYNIEFVSANPTGPLHVGHCRGAVFGDVLSNLLIFNGNKVIREF

SEQ ID NO: 160240 - protein, 150 aa, Unknown
  Bacterial polypetide isolated from the Sargasso Sea
MKAELAALITEALEKLVTEGVLEAITDPRPQIDRPKDTSHGDLSCNIAMVLAKRAGLPPRDLAIRIIDALPDNTLVETSNIAGPGFLNFFINAGQHTQVIKTILETGNGFGCCDEGAGRSAQVEFVSANPTGPLHVGHGRGAAIGDSLSR

SEQ ID NO: 160241 - protein, 202 aa, Unknown
  Bacterial polypetide isolated from the Sargasso Sea
MNIFDQYLDNIKKTLLDLSKKGDLVLPGTLDGITAEIPPSKFNSDISTNVAMVLSKLNEKPPIDLANVLSAEIKKKDKLIDEVSVVKPGFINIKFKPIFWTNFIKEVIQNSKSFGINKKENKKNYLIEFVSANPTGPLHVGHCRGAILGDVIANILLFNKHKVTKEYYVNDYGNQIINFTKSVYFRIREISLNEPFPNDNED

SEQ ID NO: 160242 - protein, 180 aa, Unknown
  Bacterial polypetide isolated from the Sargasso Sea
MNIFDYYHSSLLKGLKDFEKKGAIKIPEKTNSISVEVPPDKFDADISTNVCMVLSGINKSKPKDIYENYVSKLLSKDDNLENFEIVNPGFVNLKFKKKFWNSFLEKIVQLKEYGSNKNEKTRKYLVEFVSANPTGPLHVGHCRGAVFGDVLSNLLKFNNHNVTKEYYINDHGNQITNFTH

SEQ ID NO: 160243 - protein, 290 aa, Unknown
  Bacterial polypetide isolated from the Sargasso Sea
DFIREVLKNRENFGKKELGKGEKINIEYVSANPTGPLHVGHTRGAVFGDTLANIFDFVGFDVCREYYINDSGEQIRNLAKSVYLRYLQNFSDNEIAIPDNLYPGEYLIPIAKKISDEHGEKFIDKDETDWLDFFKKESISSVMDIIKSDLKSLEINHDVFISEKALLEEGHVNKAYKYLEDKKLLYKGNTNPPKGSKNDEWSEKKHILFKSKSFGDDEDRVVKKHDGQWTYFMPDIAYHLNKYERGFIRMINIFGADHSGYIARMKAAVRAVTNEKTNLEIKTCQLVRLS

SEQ ID NO: 160244 - protein, 278 aa, Unknown
  Bacterial polypetide isolated from the Sargasso Sea
MNIFEIYLNKIKELVLSLNKDNSIQIPSNLSSINVDVPPEKFDCDISTNVAMVLAKINQTNPLELAKTIVNELKKNDKNIEKIDIAKPGFINIKFKLNFWNGFLKDILSNHKNFGINKNEDKKKYLVEFVSANPTGPLHVGHCRGAILGDVISNILKFNEHKVTKEYYVNDHGNQILNFTKSVYYRILEITKNKKFPKEDKDLYPGEYIIEIAKNIINDNKNVDFNNFDKITKKLTSLAVSESLKLIKTNLKNLGITHDNFQSETEIVKNKEVETVID

SEQ ID NO: 160245 - protein, 277 aa, Unknown
  Bacterial polypetide isolated from the Sargasso Sea
MSKSAKKKPRQIAETLANRLTNVDIIENSQVAGPGFLNLRISIKAWQSTLNKILELGSAYGRTGLGKNLRVNVEFVSANPTGPLHVGHTRGAVFGDSLSELLSFAGYKVTREYYINDGGSQVDTLARSVYLRYLEAHGQDVAFEDGTYPGDYLIPVGQSLKEKVGADYIDKPEHYWLEDVREFSTGAMMKLIKDDLASLGVEMDAFFSEKSLYGGGKIEEAIESLKSKNLIYEGILDPPKGKKVEDWEPRVQTLFKSTSHGDDVDRPIKKSDGAWTY

SEQ ID NO: 160246 - protein, 250 aa, Unknown
  Bacterial polypetide isolated from the Sargasso Sea
MDLFYTVRQHVLNELKSMVAAGELPSGLDMTSVAVEPPRDPSHGDMATNAAMVLSKSAKKNPREIAETLANRLSNVDIIENSQVAGPGFLNLRISIKAWQSILNKILELGSAYGQTGLGKNLRVNVEFVSANPTGPLHVGHTRGAVFGDALSALLSFAGYKVTREYYINDGGSQVDTLARSVYLRYLEAHGQDVAFEDGTYPGDYLIPVGQSLKEKVGSDYIDKPEHYWLEDVREFSTRCYDESDKRRSR

SEQ ID NO: 160247 - protein, 265 aa, Unknown
  Bacterial polypetide isolated from the Sargasso Sea
LSLKESMNLIKNDLQKLGIKHDNFFSETDLVNQDLVKKAVEKLQDKKFVEEGYLDPPKGEESKNWKKVKRLIFKSSKFGDDMDRALQKNDGSWTYFANDVAYHSDKINRKFDNLINILGADHTGYIKRITAAVSALSNEKVKLNCKVCQLVKLYKNGKPFKMSKRAGDFISAQDLLNEVNKDAIRFMMLNRSNDMELDFDFEKVKEKTKDNPVYYVQYAYARINSIARTLQKNLKDEIYIDTKSFSFNEYEEKIYRKVFEWPKSN

SEQ ID NO: 160248 - protein, 213 aa, Unknown
  Bacterial polypetide isolated from the Sargasso Sea
NRGFINLKFKNEFWNGFILDVLNNSSYGSSLSGKKNSFLVEFVSANPTGPLHVGHSRGAILGDVISNLLSFNGHKVTKEYYVNDYGNQISHFTRSVYLRIKEIFYDETFPIEDNELYPGDYLIDIAKNIISKNKDLDFKNFESVSEKLKKISIEESLKLIKINLENLGIKHDNFASETEVINNNEVDEVIKNLKDKKYIYEGKIKAPEGENND

SEQ ID NO: 160249 - protein, 321 aa, Unknown
  Bacterial polypetide isolated from the Sargasso Sea
LLGIQHNNFVYESKLIKENEVTKVVKKLKKENYIYEGKLDVPKGEQTKDWKIRNQLLFKSTLFGDDTDRALQKADGSWTYFAADVAYHSYKVSRKFDVLINILGADHAGYIKRITSATNAISKNKVNLICKVSQLVKLFKNGKPFKMSKRKGDYITVEDLIKEVGKDSTRFMMLNRSNDVELDFDFEKVTEKSKDNPVFYVQYAYARINSIFRLLKLDLKKNIKFGAKNFTLNRYEIEILKKISEWPKCVEISSSRLEPHRIPFYLYELVTLFHSYWNLGKDNKEFRFVQEHDNLNKPRLVVLQALSIVIKNGMFILGVSA

SEQ ID NO: 160250 - protein, 317 aa, Unknown
  Bacterial polypetide isolated from the Sargasso Sea
ANQLIELIKKDDNEIEVISVAKPGFINIKFKSSFWNNFLKNIISNSKSFGKDTKTNKKKYLLEFVSANPTGPLHVGHCRGAILGDILSNLLVFNSHNVTKEYYVNDYGNQILHFSKSVYLRIRETLKSEPFPKNDPDLYPGDYVISIAKNIIQNNKNLNFDNYEKISQIIIKEAVKESLKLIKFNLKNLGIVHDSFVSETEIVKNNEVEKVIEKLKKNNFVYEGKLKAPNNEKTTEWKERKQLLFKSTDFGDDKDRPLQKADKSWTYFASDVAYHNNKLDRNYDILINILGADHAGYIKRITSVVDALSGEKNKLIV

SEQ ID NO: 160251 - protein, 213 aa, Unknown
  Bacterial polypetide isolated from the Sargasso Sea
DKNIDTINVAKPGFINIKFNNFFWNDFSKKVLNLKDEYGSNTKGKKLKYLIEFVSANPTGPLHVGHCRGAILGDVISNILIFNNHNVSKEYYVNDHGNQIMNFTKSVFFRIREIKYGEKFPTNNNELYPGDYIIDIAKDIISKKIKLEFDDFDKISNKLKKLAIEQSLLMIKSNLKNLGIFHDNFQSETKIIENKEVQLVIDLLKKKKFVYEG

SEQ ID NO: 160252 - protein, 157 aa, Unknown
  Bacterial polypetide isolated from the Sargasso Sea
MDILEKYKNILITELNKSYSKEDLSNISFEFPRDTSHGDFSTNAALVLSKKLKMNLDQIFLEVKKFFEDSGDFKDIVLAKSGFINFFVKDNILHDFIREVLKNRENFGKKELGKGEKINIEYVSANPTGPLHVGHTRGAVFGDTLANIFDFVGFDVC

SEQ ID NO: 160253 - protein, 291 aa, Unknown
  Bacterial polypetide isolated from the Sargasso Sea
TLPDELDGINTEIPPEKFNCDISTNVAMFLSKANQKSPTDLAETIAKAIKKNDELIEDISIAKPGFINIKFKSIFWTNFIEEIIKNSKSFGINTKEKKKNYLVEFVSANPTGPLHVGHCRGAILGDVISNVLLFNKHKVTKEYYVNDYGNQIINFTKSVYFRIREIIFKEPFPSDNENLYPGDYLIDFAQNIINSNKKIDFKNYENISEELTSLSIKEALKLIKKNLSSLGINHDNFISEKDLVLNKEVEKVIDYLQKNDFVYKGKIKAPAGEDDDNWIEREQLLFKSTDF

SEQ ID NO: 160254 - protein, 306 aa, Unknown
  Bacterial polypetide isolated from the Sargasso Sea
MIVKKNDKNIDHISIEKPGFINLKFKKEFWNAFILDVLNKPSYGSNLNSKKNSFLVEFVSANPTGPLHVGHSRGAILGDVISNLLSFNGHKVTKEYYVNDYGNQISHFTKSVYYRIKEITNNETFPIDNKDLYPGAYLIDIAKKIISKNKDINFNEYDKISEKLKKLSIEESLKLIKTNLENLGIKHDNFASETEVIKNKEVDEVIKNLKDKKYIYEGKIKAPEGESKENWVEREQLLFKSTEFGDDKDRALQKEDKSWTYFASDVAYHNTKLKRNFDVLVNILGADHAGYIKRITSVVEALSGEK

SEQ ID NO: 160255 - protein, 200 aa, Unknown
  Bacterial polypetide isolated from the Sargasso Sea
MNEIGLELSRNANNDHGDFSSNIALKLASKLKSPPMKLAEEIIGSLETPAELELAECVKPGFINFYLSAEKKHSVLETILKHGRDFGSSCAPEKMRVLLEFVSANPTGPLHVGHGRHAAFGDSLARLLKKAGHEVFTEYYLNDAGRQIDILCLSVILEMLRAEGLELKNINGLYRGTYIKEIAQKVIDEGLKINKKVQSQ

SEQ ID NO: 160256 - protein, 194 aa, Unknown
  Bacterial polypetide isolated from the Sargasso Sea
MNIFEEYLNKILNKIKLASEEKLILLPESLSGINVDIPPKKFKCDLSTNVAMVLSKTNNEPPIKIAEKLKDIIFKDDTNIEKIEIAKPGFINIILKKEFWTSFLLNINNLSNFGAALNGSKKKHLIEFVSANPTGPLHVGHCRGAILGDVISNLLKFNNQEVVKEYYVNDHGNQILHFTRSVYLRIKEKLDNQT

SEQ ID NO: 160257 - protein, 132 aa, Unknown
  Bacterial polypetide isolated from the Sargasso Sea
MDQVEFEISAEESRGDYASSCCLKLAKQFNKKPLELAESIVANLADEKIENIKIEGPGFINVFITSETKGSLLKDILHQGDDWGLTKDYSGKILLEFVSSNPTGPLHVGHGRGAVLGMAIANLLERIGYEVT

SEQ ID NO: 160258 - protein, 152 aa, Unknown
  Bacterial polypetide isolated from the Sargasso Sea
FIANTSRIIGLGAVKYADLIQNRITNYQFSFDKMLSLNGNTAPYLLYTLVRILGIKRKNNFVYDSKDFQYINYEHKSEWKLIRKLLKFDEFIISIEKDLMPNRLCNYLFELFQTFNRFYDQVPILKEEKNIKISRLNLCDLTAKTLKLSLEL

SEQ ID NO: 160259 - protein, 135 aa, Unknown
  Bacterial polypetide isolated from the Sargasso Sea
YQFSFDKMLSLNGNTAPYLLYTLVRIAGIKRKNNFVYESKDFQYVNYEHKSEWKLIRKLLRFDEVIISIEKDLMPNRLCNYLFELCQTFNRFYDQVPILKEEKNIKISRLNLCDLTAKTLKLSLELLGIETLERM

SEQ ID NO: 160260 - protein, 207 aa, Unknown
  Bacterial polypetide isolated from the Sargasso Sea
MLNNSLFDSIKNAYSLEKEDFQKLDLGFIASTSEDHGDYSSSASLKLAKKLDSSPRDIAEKISDGLLSELIEEISVDGPGFINIYLTRSAKVNELKNVIELKEQWAFKKHNRKKALVEFVSSNPTGPLHVGHGRGAVLGIAISNLLQSQGYQVDKEYYVNDAGRQINILALSIILETINHSLNRDGLYQGGYINDLAKKFTKTINLE

SEQ ID NO: 160261 - protein, 212 aa, Unknown
  Bacterial polypetide isolated from the Sargasso Sea
GGVIDAFSDGKIDFDVKLCQLVSLSNKGKPIKMSKRAGNFITMKHVIESVGPDVLRFIMLTRKNDATLDFDMNKVLEESKENPVYYVQYAYARVNSLLDKSKSLNLNNYKIDYSLLNNKEEVFLMKLMAKWPRFVEAAAKAHEPHRITIFLNNLAGALHSYWAKGNEDEKQRIILEDDLLLTRSRLALAETVQKLIGIGLKIIGVQPLDKLN

SEQ ID NO: 160262 - protein, 191 aa, Unknown
  Bacterial polypetide isolated from the Sargasso Sea
AEFATRARQLVVELQSGDEYCNKLWREFNDISLSHCHEVYERLGVSLTRADVHGESAYNADLEQVVKDLDAQGLLTQSNGAKVVFQEEFRNKEGEALPVIIQKADGGYLYATTDLAAMRYRSSVLKADRVLYFVDLRQALHFQQVFSLAKLAKFVRNDMSLEHLGFGTMNGEDGRPFKTRTGGVVKLVDLL

SEQ ID NO: 160263 - protein, 292 aa, Unknown
  Bacterial polypetide isolated from the Sargasso Sea
IALKLASKLKRPPMKLAEEIISSLETPAELELAECVKPGFINFYLSAEKKHSVLETIFKHGRDFGSSCAPEKMRVLLEFVSANPTGPLHVGHGRHAAFGDSLARLLKKAGHEVFTEYYLNDAGRQIDILCLSVILEMLRAEGLDLKNINGLYKGAYIKEISQALIKEGFEINKKVLIPKLDGSADEIVDALILEMKNVIGSELFQKISDKTVSRMTKLLKDDLSDFRVKQDGFYSEKSLFSKGKIEEAFEIIKKNGNAYEKDGALWLESSKYGDDKDRVVIREDGRSTYFAS

SEQ ID NO: 160264 - protein, 261 aa, Unknown
  Bacterial polypetide isolated from the Sargasso Sea
FDNWFLESSLLGADSKIDAAIQQLNTNNLIDNRDGNIWFKSSDFGDDKDRVLIRTDGRQTYFASDVAYHKDKLDRGFDEIINIWGSDHHGYIKRVEASLEGLGYDKNKLSVKLVQFANLIKGGSPVKMSTRSGEFYSLEDLLSDVGSDVARFYYLSKQTDQHLDFDLDLAVSSKKENMYYYIQYAHARICSLEKKAGLKDFLAEDISEDHVDICSNLIHEISKYPNVLEKTCNNLSPHLLIFYLKDLASIFHNFYNDNKIL

SEQ ID NO: 160265 - protein, 228 aa, Unknown
  Bacterial polypetide isolated from the Sargasso Sea
MNIFEEYLNKILNKIKFASEEKLILLPESLSGINVDIPPKKFKCDLSTNVAMVLSKTNNEPPIKIAEKLKDIIFEDDNNIEKIEIANPGFINIILKKEFWTSFLLNINNLNNFGASLNGSKKKHLIEFVSANPTGPLHVGHCRGAILGDVISNLLKFNNQEVVKEYYVNDHGNQILHFTRSVYLRIKEKLDNQTFPQNEDDLYPGEYIKDIAQHIIDNNKDLQFDDYE

SEQ ID NO: 160266 - protein, 147 aa, Unknown
  Bacterial polypetide isolated from the Sargasso Sea
DAELDFDFEKVKEKTKENPVYYVQYAYARINSITRTLKKKLSDKILIENKSFNPNEYEKKILRKIFEWPKIIESASYKLEPHKIPFYLYELSTLFHSYWSKGNEDKNYRFLENDKVKRLETLAFIYLTAIVIKNGMNILGVSLPEKM

SEQ ID NO: 160267 - protein, 263 aa, Unknown
  Bacterial polypetide isolated from the Sargasso Sea
AAIEILRQQGLIYNGVLEAPKGKQIDDWEPREQMLFKSSKFGDEVDRPLQKSNGEWTYFANDMAYHFDKYQRGSKHLIDIWGADHGGYIKRMNAAIEALTEKDAKFSVKLCQMVKLISDGKPLKMSKRSGDFVTLNEMVERVGSDSIRFMMLYRKNEAPLEFDFQKVSEQSKDNPVFYVQYAHARISSVLRRIDEHKLKFNLSDFSQCKFYLLNSDHELDLIKKILDWSSVIITSVNLYEPHRIAYYLYELASSFHSLGIKEK

SEQ ID NO: 160268 - protein, 293 aa, Unknown
  Bacterial polypetide isolated from the Sargasso Sea
ICNTIIQNVKMNIFEDYLIKIENTIKRANQDNLLELPENLSGINVDIPPAKFNCDVSTNVAMVLSKINKKPPIELAEIISGLLKKNDKNIDHISIEKPGFINLKFKKEFWSAFILDVLNKPSYGSNLNGKKNSFLVEFVSANPTGPLHVGHSRGAILGDVISNLLSFNGHNVTKEYYVNDYGNQISHFTKSVYFRIKEITNNETFPIEDKDLYPGAYLIDIAKKIISKNKDIDFNDYDKISEKLKKLSIEESLKLIKKNLENLGIKHDNFASETEVIKNKEVDEVIKNLKAKK

SEQ ID NO: 160269 - protein, 195 aa, Unknown
  Bacterial polypetide isolated from the Sargasso Sea
MNIFEKIENIVEQTLQEMPFWCENESLPAIRIKLETPRDKTHGELSSNIAMILAKNIGKTPKDFAAEICSHLAGVESIQSATVAGPGFINLKLRTDVWFECVRCILRLGKDFGSSNFGKNEFINIEYVSANPTGPLHAAHARGAVVGDTLARLLKKVGFRVCKEYYVNDAGTQVDILAKSTYLRYLEALGHEIGP

SEQ ID NO: 160270 - protein, 255 aa, Unknown
  Bacterial polypetide isolated from the Sargasso Sea
MFLSKLNNKPPLELAKLLAKPIKENDDLIEDVSVVKPGFINIKFKPIFWTNFIQSIIKDSDNFGINSNEKKKSYLIEFVSANPTGPLHVGHCRGAILGDVIANILLFNKHKVTKEYYVNDYGNQIINFTKSVYFRIREILFKEPFPSDNEDLYPGNYLITFAENILNANKKINFENFDQIAEKLTEQSIEEALKLIKKNLNILGINHDNFVSEKKIVTNQEVENVIEYLQKTKFVYKGKIKAPVGENIDNWKKES

SEQ ID NO: 160271 - protein, 277 aa, Unknown
  Bacterial polypetide isolated from the Sargasso Sea
KKEFWNNFLKEIIGNKIKYGSDEKQKKIKYLVEFVSANPTGPLHVGHCRGAILGDVISNILKFNNHDVVKEYYVNDYGSQIQNFVKSVFLRIREILNKEKFPTNNKDLYPGDYIVQISNNIINENKNLDFSKFEPISEKLTKLSVEQSLKLVKFNLNNLGIRHDNFVKETDLVKNNSVEVVVKNLKKNNFIYEGQIEAPENEKNSNWVKREQLLFKSTLFGDDKDRPLQKSDKTWTYFASDVAYHKNKLDRKFDCLINILGADHAGYIKRISSAVEA

SEQ ID NO: 160272 - protein, 163 aa, Unknown
  Bacterial polypetide isolated from the Sargasso Sea
MDILEKYKNILITELNKSYSKEDLSNISFEFPRDSSHGDFSTNAALILSKKLKMNLDKIFLEVKKFFEDSGDFKDIVLAKSGFINFFVKDYILHDFIREVLKNRENFGKKELGKGEKINIEYVSANPTGPLHVGHTRGAVFGDTLANIFDFVGFDVCREYYIN

SEQ ID NO: 160273 - protein, 189 aa, Unknown
  Bacterial polypetide isolated from the Sargasso Sea
MNIFDLYLDKIKKILLDLSKKNKLILPDNLNGITTEIPPANFNSDISTNVAMVLSKINKKSPIDLAKILTDAIKKKDDLIEDISIVKPGFINITFKPIFWTNFVETITSNSKDFGRNMKAKKKNYLVEFVSANPTGPLHVGHCRGAILGDVIANILLFNKHNVVKEYYVNDYGNQILNFTKSVYLRIRE

SEQ ID NO: 160274 - protein, 264 aa, Unknown
  Bacterial polypetide isolated from the Sargasso Sea
IKIGKEIITKLNKEKLDSIKKITLTNPGFINFKIKNYFFQSKINTIILKGKNYGSNSIGKGKTANVEFVSANPTGPLTIGHGRNAILGDSISNILEWNSYKVTREYYFNNAGRQMRVLGESVKARYFQILGIDKKFPDEGYQGSYIKEIAKKIISKYGEKLNYKSPKFKDEAEKIIFKQIKSTLKKLEINFDQFTNEKTFYENGDIESLLSKLNKKKLLYQKDGATWFKTTTLGKEKDRVYIKKSGEPTYRVPDTAYHKNKIDR

SEQ ID NO: 160275 - protein, 177 aa, Unknown
  Bacterial polypetide isolated from the Sargasso Sea
LRQVVDEVEKDAVRFMMLTRNSDAPLDFDLKKALEQSKDNPLFYVQYAHARVCSVIRNAAVAFPDLLLDDSSLAKADMSEVNDPGEIKMIRELASWPEVVERAARSREPHKIVFYLSELAASFHAFWNKGNSEESLRFIVIDNPRKTMQRVALARAVGIVIGSGLAVIGVDPVEEMR

SEQ ID NO: 160276 - protein, 283 aa, Unknown
  Bacterial polypetide isolated from the Sargasso Sea
EINEVGLELSRNKNNEHGDFSSNIALKLSGKLKRSPMVVAEEIINSIHVSDELERTEFVKPGFINFYLSAEKKHVVLEEIIREGKAFGSSCVSEKKKILLEFVSANPTGPLHVGHGRHAAFGDSLARLLRKSGHEVFTEYYLNDAGRQIDILCASVMFELLLLEGQKLGQVDGLYKGSYIKEIAGDLHEEGLAINKKISLTKAGGSDDEIVDALILEFKDVAGNELFQMVLEKTVLQMTKLLKDDLSDFRVRQDGFYSEKSLFSEGRIEEACGIIKKNGNAYE

SEQ ID NO: 160277 - protein, 293 aa, Unknown
  Bacterial polypetide isolated from the Sargasso Sea
LNQYFWNDFLKEIINNHKEFGINKNEVKKKYLIEFVSANPTGPLHVGHCRGAILGDVISNILQFNQHKVSKEYYVNDYGNQILSFTKSVYLRIREILNGEKFPVNDPDLYPGDYLIEIAKNIIKENKNIKFDNFDNVSAKLTSLAIFQSLILIKTNLKNLGISHDNFQSETEIVNNNEVQNVIDKLKKKNFVYIGKIKAPVDEKKNNWVEREQLLFRSTDFGDDKDRPLQKSDKSWTYFASDVAYHNNKLNRNFDAMINILGADHAGYIKRITACVEALSGEKNKLICKVSQL

SEQ ID NO: 160278 - protein, 320 aa, Unknown
  Bacterial polypetide isolated from the Sargasso Sea
LDKIKKTLFDLSKNSKLILPENLDTITAEIPPSKFDSDISTNVAMILSKVNKKAPIELANMLAEAIKKNDKLIENISVVKPGFINIKFKVIFWTNFVEEIIKNSKSFGINTKEKKNNYLIEFVSANPTGPLHVGHCRGAILGDVIANVLLFNKHKVIKEYYVNDYGNQIINFTKSVYFRIREIIFNEKFPSNNEDLYPGDYLIDFANNIINSNKKIDFKNFDKISEKLTELSIEEALKLIKKNLKSLGINHDNFVSEKKIVLNQEVEKVIDFLQKSKFVYKGKIKAPEGENKDKWIEREQLLFKSTDFGDDKDRALQKSD

SEQ ID NO: 160279 - protein, 233 aa, Unknown
  Bacterial polypetide isolated from the Sargasso Sea
GITVELPPQKENSAISCNAALLLSKHNNISSIELAQILKKHLLKAFKEFKTIDVAGPGFLNINFETYFWLENLLTIIKLNKNYGSSKSRKKKYNIEFVSANPTGPLHVGHCRGAVLGDTLSKMLSFNGNRVTKEYYVNDYGGQIRNFVTSVYYRILEIEENKLFPEDDNLYPGEYIKDIAKRIIKKKIIKNFGNFEKIYNVLEKESIDCSMKLIKMNLSLLGVEHNNFINESK

SEQ ID NO: 160280 - protein, 310 aa, Unknown
  Bacterial polypetide isolated from the Sargasso Sea
NYKIKLQESKDKEHGDYASNIAMILAKTLSRNPKDLAEQISKEFPLDEQILKVEVAGPGFINFFVSEETHSKILMTINLEKEKYGHSQKKDSKVLIEYVSSNPTGPLHVGHGRGAVFGSVLAKLLSAAGHEVDEEYYVNDYGRQMSILTVSVWIRYMQNSRDDVTMSALGYQGDYIKLIADDLAKENKEKYLLSDKDHERILSFLKIQEDEKDIDALITFMQETLAEGFTEIRSFALDSMLKIIEKDLMRFGVNHNLWFFESSLYSKEQDEDCKANKAISELSSNNYVYEEDGALWFKSSDFKDDKDRVL

SEQ ID NO: 160281 - protein, 179 aa, Unknown
  Bacterial polypetide isolated from the Sargasso Sea
ATSRATRTVLEKNPEISEKKAREIGEIIGIAAIKYADLSKNRTNDYIFDWDQMLSLEGNTAPYLLYAYTRIQSLINRSGRSERDLVKMVAPEDESERLLCVELIKLDDVVEQVAKDGYPHLLCNHLYSVATTFNQFYEQSAILNQPEETILRRLSLTHATGRTLQKGLSLLGIDVVDKM

SEQ ID NO: 160282 - protein, 265 aa, Unknown
  Bacterial polypetide isolated from the Sargasso Sea
NALNYLEQLGLGKEPKDSLLDFSTPSRIEIRRNSEWLENLNLSEVIELLSNSTVGQMLAKEDFSNRYKSGTPISLHEFLYPLLQGYDSVAINSDVELGGTDQKFNIAMGRDLQRAFGQKPQFGMLLPILVGLDGTRKMSKSLDNIVGINEDPLSMYSKLEKVPDDLVLTYLNLLTNENLKELSSNPREVQKFMALKITSNFKGIEAAKNAQFNSEKLVLGTKDSLEEIPEASVSNVNFPAKAFYLFSKMEMCSSSSEARRQILEE

SEQ ID NO: 160283 - protein, 170 aa, Unknown
  Bacterial polypetide isolated from the Sargasso Sea
MNIFDQYLEKIKIIIKNLSDKGELILPDTLEGINAELPPKKFNSDISTNVAMVLSKINKKSPMDLAEDLAKLFKKRDGFIEEANIVNPGFINLKFKPIFWTNFIKEIIKNSKTYGINKKDKKKNYLIEFVSANPTGPLHVGHCRGAIIGDVIANVLSFNNHKVTREYYVN

SEQ ID NO: 160284 - protein, 232 aa, Unknown
  Bacterial polypetide isolated from the Sargasso Sea
MNIYKFYFNHLIEAVEKFKSDFKYSFIVEDILKKLTLEPPKSSINGDMSTNLAMILSKDLKLSPKIIAENFMVYISNFPGVDNVNVAGPGFINITFKQNVWLDFLSNMLQNSGNWDKLEIGKGKNINIEYISANPTGPLHAGHARGAVFGDALASLLTEVGYTVTREYYINDAGNQIEKLIDSSLLRYNELVTNKSIDIPKGLYPGEYLKEVGKNLIEKYGYKIETDPKEKV

SEQ ID NO: 160285 - protein, 314 aa, Unknown
  Bacterial polypetide isolated from the Sargasso Sea
INFFVKDYILHDFIREVLKNRENFGKKELGKGEKINIEYVSANPTGPLHVGHTRGAVFGDTLANIFDFVGFDVCREYYINDSGEQIRNLAKSVYLRYLQNFSDKEIVIPDNLYPGEYLIPIAKKISDEHGEKFLDKDESEWLDFFKRESISNVMDIIKSDLKSLEINHDVFISEKALLEEGHVNKAYKYLENKKLLYKGNTNPPKGSKKDEWSEKKHILFKSKNFGDDEDRVVKKHDGQWTYFMPDIAYHLNKYERGYIRMINIFGADHSGYIARMKAAVKAVTNEKANLEIKTCQLVRLSRGGKPVKMSKRSG

SEQ ID NO: 160286 - protein, 203 aa, Unknown
  Bacterial polypetide isolated from the Sargasso Sea
MNIFQIYQKKIKDLILDINKNGKIEIPENLDSIGVDIPPNQFKSHISTNVAMILSKINKTNPMDLAKKIETELAKVDQSIEKIDIVKPGFINITFKNIFWNQFIQEVISEKYEYGSSSSNNKKSYFLEFVSANPTGPLHVGHCRGAVSGDVLANILKFNKHKVHKEYYVNDYGNQIINFTKSVYLRIKEQIDNKPYPKDQEDL

SEQ ID NO: 160287 - protein, 286 aa, Unknown
  Bacterial polypetide isolated from the Sargasso Sea
MNIYNDFKNQIFDIFLKIIEENNSNLDNIHNLKEKFAVELPREENHGDISTNISLVLSKLIGYKPKELAILIKSNLEKLESVKSVSIEGPGFININLYNSFWHEQIFKILKLKSQFGESQIFLNKNINVEFVSANPTGPLHVGHVRGAVIGDVLSNILKMVGYEVTKEYYVNDAGNQIDILANSVFIRYEEIILKKKAVIPDGYYPGEYLIPLARSLYDIHNDSLLNCDKFRALEIIKKFSIDFILNEIKIDLGRLNIKMDQYSSEKKLVQDLSVNKTIQELKKKD

SEQ ID NO: 160288 - protein, 201 aa, Unknown
  Bacterial polypetide isolated from the Sargasso Sea
FGVTFDNWFLESSLLGADSKIDAAVQQLDTNNLIDNRDGNIWFKSSDFGDDKDRVLIRADGRQTYFASDVAYHKDKLDRGFDEIINIWGSDHHGYIKRVEASLEGLGYNKNKLSVKLVQFANLIKSGSPVKMSTRSGEFYSLEDLLSDVGSDVARFYYLSKQTDQHLDFDLDLAVSSKKENMYYYIQYAHARICSLKKKLV

SEQ ID NO: 160289 - protein, 300 aa, Unknown
  Bacterial polypetide isolated from the Sargasso Sea
MINIDDIEVETLFDQRGDFTTNTALKFSKIYNSNPKQLANLIIENLNIDVFEKVEIAGPGFINFTLKDGTFNSQLINNKIEFKNTDKVNIEFVSANPTGPLHLAHGRGAVVGDILSNLFEYFGHKVTREYYVNNTGNQINEFLSSILYSISNKNNLSLDENQFYKGDYINDIANNCYENFKSLFSKELSPSDRINIVNFAIENLVNQTIKTLSSAGINFDEISYETNIMEKEYLPLIIEKLNKSELTYKGQLNAPKDYTGTQKDNDLTIFKSTLFNDDEDRALTKNDGSPTYFCNDIAYH

SEQ ID NO: 160290 - protein, 86 aa, Unknown
  Bacterial polypetide isolated from the Sargasso Sea
QELPLAAKLAQFGEVLNSVGEKGEPHLLCAYLYDLAGLFSSFYEHCPILSAEQPEQKQSRLRLAALTGKTLKQGLELLGLETLERM

SEQ ID NO: 160291 - protein, 179 aa, Unknown
  Bacterial polypetide isolated from the Sargasso Sea
MSKRKGDYITIEDLIYEVGKDATRFIMLSRSSDAEIDFDFDKVKEKSKENPIYYVQYAYARISSVFRNTQNDINSNLEIKNSDFNFGKEEIKLFKKISEWPKCVEVSSEKLEPHRISVYLYDLASEFHSYWNMGKDDASKRFIDQDNTIQIEKLVFLKSIANTLKTGMNILGVDTPEKM

SEQ ID NO: 160292 - protein, 227 aa, Unknown
  Bacterial polypetide isolated from the Sargasso Sea
MNIFENYLLKIEKIIWSAHKDNLLELPDNLSGINVDIPPAKFTGDISTNVAMVLSKINKKSPLELAKQIADLIKDSDNNIDEIIIEKPGFINLKFKNEFWNDFILDVLNNSSYGSSTSGKKNSYLVEFVSANPTGPLHVGHSRGAILGDVISNLLSFNGHKVTKEYYVNDYGNQISHFTKSVYLRIKEILYDETFPIDDKELYPGDYLIDIAKKIISKNKDLDFKNF

SEQ ID NO: 160293 - protein, 185 aa, Unknown
  Bacterial polypetide isolated from the Sargasso Sea
RGGLEVKLSKRAGNIVTLEELVEEVGVDAARYTLIRYPADSPLTLDLETITRQTNDNPVFYVQYAHARISSVLRNARELGIEWREAEFDPGCLTHEREIELLGRLAEYPRIVASAAELREPHRVARYLEEMATDYHRFYDVCWVLPRGEEDVQPLHISRLWLCAAARQVLANGLDLLGVSAPERM

SEQ ID NO: 160294 - protein, 254 aa, Unknown
  Bacterial polypetide isolated from the Sargasso Sea
MFLSKVNKKPSDVIANKLIELIKKEDDKIENISVAKPGFINIKFKSVFWNEFLQDVIKNNINFGKNEKSKKRNFLIEFVSANPTGPLHVGHCRGAILGDVLSNILLFNNNKVTKEYYVNDYGNQILHFIKSVYLRIREIVFKEPFPKDKPDLYPGDYIIDIAKNIIANNNDLKFDNFDKISSLLTKLSVDESLKLVKLNLKNIGVFHDNFYRETDIVNNNEVESVVKKLKDKNFVYEGKIKAPEGEDLSKWVER

SEQ ID NO: 160295 - protein, 123 aa, Unknown
  Bacterial polypetide isolated from the Sargasso Sea
MNEIGLELSRNANNDHGDFSSNIALKLASKLKSPPMKLAEEIIGSLETPAELELAECVKPGFINFYLSAEKKHSVLETILKHGRDFGSSCAPEKMRVLLEFVSANPTGPLHVGHGRHAAFGDS

SEQ ID NO: 160296 - protein, 169 aa, Unknown
  Bacterial polypetide isolated from the Sargasso Sea
MELDNTNALKSVNLEIPPEKFDYDLSCNVAMVMAKANKKKPEHLAKNIQALLIENLKNFSKVDIAGPGFLNINFKNEALTEIINKIIKKKSNYGSNLKKNKYNLEFVSANPTGPLHVGHCRGAIFGDVLSNLLSFNGNKVTKEYYVNDHGNQIKNFVKSVFLRLREIKF

SEQ ID NO: 160297 - protein, 249 aa, Unknown
  Bacterial polypetide isolated from the Sargasso Sea
KNYLIEFVSANPTGPLHVGHCRGAILGDVIANVLLFNKHKVTKEYYVNDYGNQIINFTKSVYFRIREISYSEPFPNNDENLYPGDYLIDFAKNILESNKDIDFKNFDNISEKLTILSIDEALKLIKKNLDSLGINHDNFVSEKKLVANQEVEKVIDILQKNKFVYKGKIKAPAGEENNNWVEREQLLFRSTDFGDDKDRALQKSDGAWTYFASDVAYHKNKLDRNFDYLINILGADHAGYIKRISSSVE

SEQ ID NO: 160298 - protein, 251 aa, Unknown
  Bacterial polypetide isolated from the Sargasso Sea
MNIFQTYNDKIIKLLKTAKENNLLELPENLSGINVEIPPAKFNCDMSTNVAMVLSKTNNKSPLELAKIIADIIKKNDENLDDIKIEKPGFINLKFKKIFWNNFLKTIINQSNYGSNTSNVSKKYLVEFVSANPTGPLHVGHCRGAILGDVISNLLIFNNHKVTKEYYVNDYGNQIIHFTKSVYFRIREILFKEKFPIDNKDLYPGDYLIDIAKNIIDKNTGIKFDNFENISNDLTKLSVQESLKLIKFNLN

SEQ ID NO: 160299 - protein, 279 aa, Unknown
  Bacterial polypetide isolated from the Sargasso Sea
LNEEKDIENILIEKPGFINIKFKKSFWSNFLVQVINNGNTYGKYIKKNNKKYLLEFVSANPTGPLHVGHCRGAILGDVLSNLLLFNNNEVTKEYYVNDDGGQINLFAKSVYLRIREILFKDDFPKDNEELYPGDYLIDIAKNIIQNNKNLKYDNFENIEDEITKLSVSESLKLIKLNLKNLGIEHDSFASEKRIIINNEVDKAIEKLKKKDFVYHGKIKAPEGDKKSKWVEREQLLFKSTEFGDDKDRALQKEDNSWTYFAGDVAYHENKLNRNFDILI

SEQ ID NO: 160300 - protein, 313 aa, Unknown
  Bacterial polypetide isolated from the Sargasso Sea
KKIQVEFVSAIQTGPLHVGHGRGAIYGDVISKLLEKKGHKVQKEYYVNDAGRQIDILTASVYLRAIGIEDNIFPESAYKGKYIKEIAKNTNLQDAVNIDDLFKSLPKDDEEKIDKIISHLKSASKKDWKSIKKVSLENVLSAIEKDLKDFGVTFDNWFLESSLLGAESKIDAAVQQLNTNNLTDNRDGNIWFKSSDFGDDKDRVLIRADGRQTYFASDVAYHKDKLDRGFDEIINIWGSDHHGYIKRVKASMEGLGYDKNKLSVKLVQFANLIKSGSPVKMSTRSGEFYSLKDLLRDVSSDVARFYYLSKQTD

SEQ ID NO: 160301 - protein, 196 aa, Unknown
  Bacterial polypetide isolated from the Sargasso Sea
MKEKIKKSLRSIIIDLYGSSESIHDEFEISIQDNKEKQYGDLASNIALVLAKPLKRNPKEIAEEIKGKFITDKEIVKVDVAGPGFINFFLSKESHGAILRDISIQKDKFGKFESNNKKVLIEYVSSNPTGPLHVGHGRGAVFGSVLSRLLKEAGFQVDEEYYVNDFGRQMNILSVSLWIRYAQIFDKNIKMLNNGY

SEQ ID NO: 160302 - protein, 228 aa, Unknown
  Bacterial polypetide isolated from the Sargasso Sea
MNIFEEYLNKILDKIKLASEEKLILLPESLSGINVDIPPKKFKCDLSTNVAMVLSKTNNEPPIKIAEKLKDIIFKDDNNIEKIEIAKPGFINIILKKEFWTSFLLNINNLNNFGAALKGSKKKHLIEFVSANPTGPLHVGHCRGAILGDVISNLLKFNNQEVVKEYYVNDHGNQILHFTRSVYLRIKEKLDNQTFPLNEDDLYPGEYIKDIAQHIIDNNKDLQFDEYE

SEQ ID NO: 160303 - protein, 223 aa, Unknown
  Bacterial polypetide isolated from the Sargasso Sea
MNEIGLELSRNANNDHGDFSSNIALKLASKLKSPPMKLAEEIIGSLETPAELELAECVKPGFINFYLSAEKKHGVLETIFNHGRDFGSSCAPKKMRVLLEFVSANPTGPLHVGHGRHAAFGDSLARLLKKAGHEVFTEYYLNDAGRQIDILCLSVILEMLRAEGLDLKNINGLYKGAYIKEISQELIKEGFEINKKVLIPKLGGSADEIVDALILEMKNVIGS

SEQ ID NO: 160304 - protein, 245 aa, Unknown
  Bacterial polypetide isolated from the Sargasso Sea
MNIFELYLDKIKLIIVELSKKNQLIIPESFNGINAEIPPPKFDCDISTNVAMVLSKLNKTSPIELAEKLAPEIKKSDDQIDNISIAKPGFINIKFKPSFWSNFIKEIIDNAEKFGINEKEKKNNYLVEFVSANPTGPLHVGHCRGAILGDVISNVLIFNKHKVTKEYYVNDYGNQIINFTKSVYFRIREIKFNETFPQDNPDLYPGDYLIDFAKNIVSDNSDLNFDNYDQISDKLTIISIEQALL

SEQ ID NO: 160305 - protein, 208 aa, Unknown
  Bacterial polypetide isolated from the Sargasso Sea
MQKIPPSKFDSDISTNVAMVLSKINNKSSLDLASILAEKIKKKDKFIEDISVVKPGFINIKFKPIFWTNFIKEVIKNSNSFGTNKNIKRNYLIEFVSANPTGPLHVGHCRGAILGDVMANLLLFNNNKVTKEYYINDYGNQIINFTKSVYYRIREISFNEPFPVDNENLYPGDYLIGFAQNILNSNKNIDFKSFDKISQELTSLAINE

SEQ ID NO: 160306 - protein, 268 aa, Unknown
  Bacterial polypetide isolated from the Sargasso Sea
NYGKNELGCNKNILLEFVSANPTGPLHVGHGRGAVFGDCLSNLLGFSGYNVTKEYYVNDAGKQIMILTLSVLYRYHELINESFKKFFKDFYQGDYIWDISAHLHREYGDIFFIENLENIKLDELDQTILEVKNNLKDKFEILREESVNYIIQDINKTLKNIDVNFDNWYLESDLLKSDMLRKTLDKLESKNMIEKKEGALWFKSKDNSDDTDRVLVKSNGDHTYFLSDIAYHQAKSNRNYDVLLNVWGADHHGYVPRIKSAFHEIKRN

SEQ ID NO: 160307 - protein, 232 aa, Unknown
  Bacterial polypetide isolated from the Sargasso Sea
HSGTLKIIKDILNKNTIREEADSKKIQVEFVSANPTGPLHVGHGRGAIYGDVISKLLEKKGHEVQKEYYVNDAGRQIDILTASVYLRAINIEDNIFPESAYRGKYINEIAKNANLQEAVNIDDLFKGLPEDDEEKIDKIILHLKSASEKDWQSIKKVSLENVLSTIEKDLEDFGVTFDNWFLESSLLGADSKIDAAVQQLDTNNLIDNRDGNIWFKSSDFGDDKDRVLIRAD

SEQ ID NO: 160308 - protein, 244 aa, Unknown
  Bacterial polypetide isolated from the Sargasso Sea
IEIAGSGFLNINLSDSFLMNFVNLVLKDQDKYGSNKLKKKYNIEFVSANPTGPLHVGHCRGAIYGDVLANLIKFNGGNVVKEYYINDYGSQIFNFTKSVYLRLREIKFNETFINNQNLYPGEYIKDIASEILKENSDMDVDDFEKSFENLKKLSLDGSMKLIKRDLKNLGIIHDNFISENDLVKKKLITKVIKKLEKAKYVKLGYLQPPKGEEKKDWKKIKRLIFKSSIFGDDSDRALQKNDGS

SEQ ID NO: 160309 - protein, 143 aa, Unknown
  Bacterial polypetide isolated from the Sargasso Sea
MKEKIKESLYSIIIDLYGSSEFIHDEFEISIQDNKEKEYGDLASNVALVLAKPLKRNPREIAEEIKIKFITDKEIVKVDVAGPGFINFFLSKESHGAILKDISIQKNNFGKIESNNQKVLIEYVSSNPTGPLHVGHGRGAVFG

SEQ ID NO: 160310 - protein, 267 aa, Unknown
  Bacterial polypetide isolated from the Sargasso Sea
MNIFDKYLEIIYKLIKDESDKGKLILPHKLNSITVEIPPEKFDCDLSTNVAMVLGKINKKPPLILAEQIKKRLSEVLDINEIKIVKPGFINIKLKNDYWGLFTKDILSNSKDFGVNLKEKKISYLIEFVSANPTGPLHVGHCRGAILGDVLSNLLIFNKHNVTKEYYVNDYGNQILFFTKSVFLRIREILFKEPFPFDNPDLYPGDYLIEISNNIINNNSKLKFDNFETVSEKLTEISVNESLKIIKNNLNNLGIKHDNFVSEKSIV

SEQ ID NO: 160311 - protein, 254 aa, Unknown
  Bacterial polypetide isolated from the Sargasso Sea
KHRVLIREDGRATYFASDVAYHKNKVDRGFDKLINIWGADHHGYIKRIEASIEALGSSKEKLIVKLVQFANLFKEGKKVKMSTRSGDFFTLKNLIDDIGTDAARFYYLSKQADQHLDFDIDLAKSDSKENIFYYIQYAHARIASLEEKASKKNSKIKTNINNIQNNNYKECDKLIHETSKYPNVVNKAANTLQPHLVIYYLRDLAQLFHSYYNDNHVLSETDQNIESILACLLSVRQVISNGLDLLGISPIEKM

SEQ ID NO: 160312 - protein, 243 aa, Unknown
  Bacterial polypetide isolated from the Sargasso Sea
MHTGIKKLPKISKAHDSSFFSETVERTRDSSHGDFTSNIALRLAKSLKKNPRELANEIIKYIPRNNSIKKIEVAGPGFMNFYLDDSAYHIEIEKILSNKDLIEKNKDFKKHKLLLEFVSANPTGPLHVGHGRHAAFGASLRNILEAVGYDVKSEYYVNDSGRQMDILCISVIIHLLQRENQKISMPLAGYQGQYIKTISLAIDQKFNEDEIKLKELIPKIDDRNNQDQYMDCLIENTKKLIAQ

SEQ ID NO: 160313 - protein, 225 aa, Unknown
  Bacterial polypetide isolated from the Sargasso Sea
MNIFDLYLDKIKKILLDLSKKNKLILPDNLNGITTEIPPANFNSDISTNVAMVLSKINKKSPTDLAQILADGIKENDDLIDDISVVKPGFINITFKRIFWTNFVEKITSNPKDFGRNIKEKKKNYLVEFVSANPTGPLHVGHCRGAILGDVIANILLFNKHNVIKEYYVNDYGNQILNFTKSVYLRIREIIFNETFPTDNEDLYPGIYLIDFAKNIINKKKDKRL

SEQ ID NO: 160314 - protein, 252 aa, Unknown
  Bacterial polypetide isolated from the Sargasso Sea
NAHNDPNYFLNSSNTSKEKIQIEFVSANPTGPLHVGHGRGAAYGDAIGRILERLGHEVSREYYVNDAGRQIDILACSIFLRKFECFNKNEFPESAYKGSYILEIADAIELDIGITKSEKESLIDNLPNDNEERIDALIERIKINYPETWSKIRDFGLSYVIESIRGDLTKFKVIFNNWFFESSLGELSDKKSEISKALAKVQKDHAYEKNGAIWLESSKFGDDKDRVIIREDGRGTYLSADLAYHRNKLDRG

SEQ ID NO: 160315 - protein, 264 aa, Unknown
  Bacterial polypetide isolated from the Sargasso Sea
MDILEKYKNILITELNKSYSKEDLSNISFEFPRDTSHGDFSTNAALILSKKLKMNLDQIFLEVKKFFEDSGDFKDIVLAKSGFINFFVKDNILHDFIREVLKNRENFGKKELGKGEKINIEYVSANPTGPLHVGHTRGAVFGDTLANIFDFVGFDVCREYYINDSGEQIKNLAKSVYLRYLQNFSDNEILIPDNLYPGEYLIPIAKKISDEHGEKFLDKDESEWLDFFKKESISSIMDIIKSDLKSLEISHDVFISEKSFMEEG

SEQ ID NO: 160316 - protein, 251 aa, Unknown
  Bacterial polypetide isolated from the Sargasso Sea
SGTLKIIKDILNKNTIREEADSKKIQVEFVSANPTGPLHVGHGRGAIYGDVISKLLEKKGHEVQKEYYVNDAGRQIDILTASVYLRAIEIEDNIFPESAYRGEYIKEIAKNANLQDAINIDDLFKSLPEDDEEKIDKIISHLKSASEKDWQSIKKVSLESVLSTIEKDLEDFGVTFDNWFLESSLLGADSKIDAAVQQLNTNNLIDNRDGNIWFKSSDFGDDKDRVLIRADGRQTYFASDVAYHKDKLDRG

SEQ ID NO: 160317 - protein, 214 aa, Unknown
  Bacterial polypetide isolated from the Sargasso Sea
MNIFEEYLNKILNKIKLASEKKLILLPESLSGINVDIPPKKFKCDLSTNVAMVLSKTNNEPPIKIAEKLKDIIFKDDNNIEKIEIANPGFINIILKKEFWTSFLLNINNLNNFGASLNGSKKKHLIEFVSANPTGPLHVGHCRGAILGDVISNLLKFNNQEVVKEYYVNDHGNQILHFTRSVYLRIKEKLDNQTFPLNEDDLYPGEYIKDIAQH

SEQ ID NO: 160318 - protein, 175 aa, Unknown
  Bacterial polypetide isolated from the Sargasso Sea
MNIFEKIENIVEQTLQQMPFWCENENLPPINIKLEAPRDKTHGELSSNIAMILAKTIGKTPRDFAAEICSHLADVELICSATVAGPGFINLKLKTDVWFECVRCILRLGKDFGSSNFGKNEFINIEYVSANPTGPLHAAHARGAVVGDTLARLLKKVGFRVCKEYYVNDAGTKVD

SEQ ID NO: 160319 - protein, 242 aa, Unknown
  Bacterial polypetide isolated from the Sargasso Sea
MYNQILTSLNDFIDNDLSFDPDQKKTLLDKHKLTLANSLRKGHWTTNLCLIASNLAKKNPRDIASALIPKLENQPEIAKVELAGPGFVNIFLTREAFFNQLDDVDKNPISFVKSSNAVKEKIQIEFVSANPTGPLHVGHGRGAAYGDAIGRILQQLGHEVSREYYVNDAGRQIDILACSIFLRKFECLDEKAFPNSAYKGSYILEIAKGAEIDQALTESDKEKLITNLPEDDEDKIDELIER

SEQ ID NO: 160320 - protein, 241 aa, Unknown
  Bacterial polypetide isolated from the Sargasso Sea
MNIFELYLDKIKSIIFELSKKNQLIIPESFNGINAEIPPPKFDCDISTNVAMVLSKLNKTSPIELAEKLAPEIKKSDDQIENISIAKPGFINIKFKPSFWSNFIKEIIDNAEKFGINENEKKNNYLVEFVSANPTGPLHVGHCRGAILGDVISNVLIFNKHNVTKEYYVNDYGNQIINFTKSVYFRIREIKFNEPFPQDNPDLYPGDYLVDFAKNIVLDNSDLNFDDYEKINDKLTALSIE

SEQ ID NO: 160321 - protein, 325 aa, Unknown
  Bacterial polypetide isolated from the Sargasso Sea
NIALQVSRELNQNPEEIAKIIIKNLELPDFIKNVSFKKPGFINFFLSDQWLQENLKSILNKENNYSKKENFNKKIQVEFVSVNPTGNLHIGHARGAVIGSTLSNLLETQGFQVNREYYINDAGNQIDLFTESLYVRYMNLFNNNLPIPENGYEGKELEEIAEQIKSENYEKFTKISKKEALIHLKEIGIKQILNNIKDDLIKLGVEYNSWFSEKSLIKNGEFTETINILKKKNLVFEEDGATWLDSKKLGDNKNNVLIKSEGGAPTYFATDIAYHKNKFLTRNFDMVIDIWGADHHGHIKRLSDALKALGVERNRFVVILNQICF

SEQ ID NO: 160322 - protein, 263 aa, Unknown
  Bacterial polypetide isolated from the Sargasso Sea
VSDSSSEISNSINKLKNDGNAYEKDGAIWLNTDISGDDKHRVLIREDGRSTYFASDVAYHKNKVDRGFDKLINIWGADHHGYIKRIEASIEVLGSSKEKLIVKLVQFANLFKEGKKVKMSTRSGDFFTLKNLIDDIGTDAARFYYLSKQADQHLDFDIDLAKSDSKENIFYYIQYAHARIISLEEKASKKNSKIKTNINNIENNSYKECDKLIHEISKYPDVVNKAANALQPHLVIYYLRDLAQLFHSYYNDNHVLSETDENI

SEQ ID NO: 160323 - protein, 301 aa, Unknown
  Bacterial polypetide isolated from the Sargasso Sea
LGHEHIKPESAYNAMLQPIVDSLKQQGLAVESEGALVVFLQELADKEGNPSPFIVQKTGGGFLYATTDLAACQYRSFDLAADRIVIFTDARQALHFKQVELVARKAGLLKDHVAYDHCPFGTMMGEDGKPFKTRTGGTVKLAELLEEAVVRAKAVVEQKSSDLSAEEMAEVARKVGIGAVKFADLSKNRTSDYVFSWDAMLSFEGATAPYLQYAYTRVSGILRKAGIDESFVAPLQLLEEQEKQLAVKLLRLEETLQAVMKDAVPNLLCNYLYELSSQFMSFYEACPIFKESIEPDIKNSP

SEQ ID NO: 160324 - protein, 232 aa, Unknown
  Bacterial polypetide isolated from the Sargasso Sea
MHTGIKKLPKISKAHDSSFFSETVERTRDSSHGDFTSNIALRLAKSLKKNPRELANEIIKYIPRNNSIKKIEVAGPGFMNFYLDDSAYHIEIEKILSNKDLIEKNKDFKKHKLLLEFVSANPTGPLHVGHGRHAAFGASLRNILEAVGYDVKSEYYVNDSGRQMDILCISVIIHLLQRENQKISMPLAGYQGQYIKTISLAIDQKFNEDEIKLKELIPKIDDRNNQDQYMDC

SEQ ID NO: 160325 - protein, 315 aa, Unknown
  Bacterial polypetide isolated from the Sargasso Sea
PAELELAECVRPGFINFYLSAEKKHSVLETILKQGRDFGSSCAPEKMRVLLEFVSANPTGPLHVGHGRHAAFGDSLARLLKKAGHDVFTEYYLNDAGRQIDILCLSVILEMLRAEGLGLKNINGLYKGIYIKEISQALIKEGFEINKKVLIPKLGGSADEIVDALILEIKNVIGSELFQKISDKTVSRMTKLLKDDLSDFRVRQDGFYSEKSLFSKGKIEAACEIIKKNGNAYEKDGALWLESSKYGDDKDRVVIREDGRSTYFASDIAYHHDKKMRGFDLLINVLGSDHHGYVSRLEAGLASTGNKASDLDVIL

SEQ ID NO: 160326 - protein, 268 aa, Unknown
  Bacterial polypetide isolated from the Sargasso Sea
MNFFNIYLDKIKKTVIKNKKKLDIADNLALSKITVEVPPEKFNCDFSTNLCLILGKNINQNPRILADKIKDILIDEINHFSSIEIAGPGFLNIKLSTDAWLYIINNIEKNKKTFGSNKNNNKYNIEFVSANPTGPLHIGHCRGAIFGDVLSNLLKFNGNKVIKEFYVNDYGKQIEDFSKSIYFRLKEIKSKTNFPNDENLYPGEYIKEISKKILKRQPNINLQDFEKIKQNLKKQGLKYSMDLIKSDLKDLGISHDIFFSETNLVKEK

SEQ ID NO: 160327 - protein, 156 aa, Unknown
  Bacterial polypetide isolated from the Sargasso Sea
MNVFSAFTEIVESAIGSLVSDGTLPEGTDGVRISVDPPRDPEHGDLTTNAAMVLANPAGLKPRELAESLAERLRAQDGIATVDVAGPGFINLRLHDDYWRDLLRDILAAGEAYGQSALGQGRAVNIEYVSANPTGPLHVRHARRAVVGDVLAALLA

SEQ ID NO: 160328 - protein, 422 aa, Unknown
  Bacterial polypetide isolated from the Sargasso Sea
MLHNLKKNLFEILVKIDKNIIINIDDIEVETLFDKRGDFTTNTALKFSKIYNSNPKQLANLITESLNINDFEKVEIAGPGFINFTLKDGTFNSQLINNKIEFKNTDKVNIEFVSANPTGPLHLAHGRGAVVGDILSNLFEYFGHKVTREYYVNNTGNQINEFLSSILYSISNKNNLSLNENQFYKGDYINDIANYCYENFKSLFNKELSPSDKTNIVNFAIENLVNQTIQTLSSAGINFDEISYETNIMEKEYLPLILEKLNQSELIYKGQLNAPKDYTGTQKDNDLTIFKSTLFNDDEDRALTKNDGSPTYFANDIAYHEDKYQRGYNKLINIWGADHLGYLKRLSSAITSLHPEIDFSVVFCQIVNLKRNNKIQKLSKREGNIFELKNLINEIGVDNFRYFMSYRKNDTHMDLDIDLIKR

SEQ ID NO: 160329 - protein, 577 aa, Unknown
  Bacterial polypetide isolated from the Sargasso Sea
MNIFEIYLEKIIKLLKKLQKEGLIEIPDTLDGINVDIPPVKFNADISSNVAMVLSKINKKSPIDIANQLLPIIKKNDDNIDSITIEKPGFINIKFKVLFWNNFLQELIKSSDKFGFNKNNKNKKYLIEFVSANPTGPLHVGHCRGAIIGDVIANLLSFNNNKVVKEYYVNDYGNQILSFTKSVYFRIREVLYKEKFPSENIELYPGDYIVDIANNIISENKNLKFEDFDKVSKELTKLSINESLKLIKKNLKNLGITHDNFVSETEIVNNKEVDKAVNNLKKNKFIYLGKIKAPEDEDKSKWVEREQLLFKSTEFGDDKDRPLQKSDKSWTYFAGDVAYHQNKINRNFDVLINILGADHAGYIKRISSVVEALSGDKNKLVCKVSQLVKLIKDGKPFKMSKRKGDYITIEDLVNEVGRDAVRFIMLSRGSDVELDFDFSKVKEKSKENHLYYVQYCYARISSVFRNLDKNLENPINVNKYDFAYTADEIKIFKKLSEWPVCIKVASNKLEPHRLPVYLYELASEFHSYWNLGKDNESKRFIDKNNKISDEKLVILKSVSNVIKIGLDIIGVNSPKKM

SEQ ID NO: 160330 - protein, 330 aa, Unknown
  Bacterial polypetide isolated from the Sargasso Sea
WNIAKNFSLKEIVSSIKDDLKNFKVYFDNWFNESSMGDIADSSSEISKSINKLKDAGHAYEKDGAIWLNTDLSGDDKHRVLIREDGRATYFASDVAYHKNKIDRGFNKLINIWGADHHGYIKRIEASIDALGSSKDKLVVKLVQFANLFKNGKKVKMSTRSGEFFTLKNLMDDIGPDAARFYYLSKQADQHLDFDIDLAKKDSKDNVFYYIQYAYARIVSLEKKVLENNFSDDINLNSIESNTYDKCDFLIHEISKYPDIIYKASNSLQPHIIIYYLRDLAQLLHSYYNDNHVLSESKENIQSIILCLSSVKQVLSNGLNILGISPINKM

SEQ ID NO: 160331 - protein, 339 aa, Unknown
  Bacterial polypetide isolated from the Sargasso Sea
MRIEDKIKELIVTALTKSQGMNNDEINEVGLELSRNKNNEHGDFSSNIALKLSGKLKRSPMVVAEEIINSIHVSDELERTEFVKPGFINFYLSAEKKHGVLEEITNKGKAFGSSCVSEKKKILLEFVSANPTGPLHVGHGRHAAFGDSLARLLRKSGHEVFTEYYLNDAGRQIDILCASVMFELLLLEGQKLGQVDGLYKGSYIKEIAVGLREEGVAINKKISLTKASGSDDEIVDALILEFKDVAGDELFQMVLEKTVLQMTKLLKDDLSDFRVRQDGFYSEKSLFSEGRIEEACGIIKKNGNAYERDGALWLESTKYGDDKDRVVIREDGRSTYFAS

SEQ ID NO: 160332 - protein, 422 aa, Unknown
  Bacterial polypetide isolated from the Sargasso Sea
MNIFDYYHSYLLKGLKDFEKKGAIKTPEKTNSISVEVPPDKFDADISTNVCMVLSGINKSKPKDIYENYVSKLLSKDDNLKNFEIVNPGFVNLKFKKKFWNSFLEKIVQLKEYGSNKNEKTRKYLVEFVSANPTGPLHVGHCRGAVFGDVLSNLLKFNNHNVTKEYYINDHGNQITNFTHSVFYRILELKHKKKFPDDENLYPGEYIKEIAQNIISNSKIDKFDELEPIFEELQKLCIENSLLIIKSNLKKIGIVHDNFVSEKSIIGNKEVEKALKKLKEQNLVFEGKIEAPQGEKKKISETRNQLLFRSTEFGDDKDRALKKGDDSWTYFAGDLAYHNNKISRNFDILINILGADHAGYIKRISSVVDALSKNKQKIECKVTQLVKLIKDNKPFKMSKRKGDYITLEDLINEVGKDAAKIY

SEQ ID NO: 160333 - protein, 319 aa, Unknown
  Bacterial polypetide isolated from the Sargasso Sea
MNIFDYYHSSLLKGLKEFEKKGAIKIPEKTNSISVEVPPDKFDADISTNVCMVLSGINKSKPKDIYENYVSKLLSKDDNLENFEIVNPGFVNLKFKKKFWNSFLEKIVQLKEYGSNKNEKTKKYLVEFVSANPTGPLHVGHCRGAVFGDVLSNLLKFNNHNVTKEYYINDHGNQITNFTHSVFYRILELKHKKKFPDDENLYPGEYIKEIAQNIISNSKIDKFDELEPIFDELQKLCIENSLLIIKSNLKKIGIVHDNFVSEKSIIGNKEVEKALKKLKEQDLVFEGKIEAPQGEKKKISETRNQILFRSTEFGDDKDR

SEQ ID NO: 160334 - protein, 389 aa, Unknown
  Bacterial polypetide isolated from the Sargasso Sea
FFCSNTYKGKYIEEIGIAFSKEKVVTYKEPKLIINNLPGDAEEEIDQLISNLKEMDKKIWNEVKDFSLKNILYLIKQDLENFNVNFDSWFQESSLGDLEDPNSQISTLINKLKEDDKAYEKDGALWLNTDVSGDDKHRVLIRDDGRATYFASDVAYHKNKVDRKFDTLINIWGADHHGYIKRIEASIEALGSRKEKLVVKLVQFANLFKNGKKVKMSTRSGEFFTLKDLIKDIGADAARFYYLSKQADQHLDFDIDLAKSDSKENIFYYIQYAHARIFSLEKKFNENNQGKNISSITAESISYDKYDKLIHEISKYPNIVKKSAQTLQPHLIIFYLRDLSQLFHSYYNDNHVLSESEKNMESIIFCLSAVRQTIANGLTLLGISPMQKM

SEQ ID NO: 160335 - protein, 415 aa, Unknown
  Bacterial polypetide isolated from the Sargasso Sea
MQENKDKEHGDYASNIAMILAKDLSLNSKDLADQISNEFPLDNQILKVEVAGPGFINFFVSKETHAQVLNTIDLEKEKYGHSKKKLGKVLIEYVSSNPTGPLHVGHGRGAVFGSVLAKLLRAAGHEVDEEYYVNDYGRQMSILTVSVWLRYLQNSNKEIIMSDLGYQGDYIKLIAEGLVKENKKKYLLSSEEHESIMPLLKVQKDESDIDSLISFMQKTLADGFLEIRSFALDNMLNLIKVDLDKFGVNHNLWFFESSLYSEDRGNESKANEAISKLTSNNFVYEEDGALWFKSSEFKDDKDRVLQRSNGEYTYFSSDVAYHLDKYNRAYDRIINIWGSDHHGYLPRVRAAMEASGKDTEKLEVVFMQFANLIRNGEKISMSTRSGEFISLKELLEEVTSDAARFFYINRKADQH

SEQ ID NO: 160336 - protein, 576 aa, Unknown
  Bacterial polypetide isolated from the Sargasso Sea
MNIFENYLLKIEKIIKSAQKDNLLELPDNLSGINVDIPPAKFNGDISTNVAMVLSKINKKPPLELAKQIADLIKNSDNNIDEISIEKPGFINLKFKTNFWNVFILDVLNNSSYGCSTSGKKNSFLVEFVSANPTGPLHVGHSRGAILGDVISNLLSFNGHKVTKEYYVNDYGNQISHFTKSVYLRIKEILYDETFPIDDKELYPGDYLIDIAKKIISKNKDLDFKNFDSVSEKLKKLSIQESLKLIKTNLENLGIKHDNFASETDVINNNEVDEVIQNLKEKKYIYEGKIKAPEGESKENWVEREQLLFKSTDFGDDKDRALQKEDKSWTYFASDVAYHNTKLKRNFNILINILGADHAGYIKRITSVVEALSGEKNKLICKVSQLVKLIKDKKPFKMSKRKGDYITIEDLINEVGKDATRFIMLSRSSDAEIDFDFDKVKEKSKENPIYYVQYAYARISSVFRNTQNDINSNLEIKNSDFNFANEEIKLFKKISEWPKCVEVSSEKLEPHRISVYLYELASEFHSYWNMGKEDVSKRFIEEDNTIKMEKLVFLKSIANTLKTGMNILGVDTPEKM

SEQ ID NO: 160337 - protein, 299 aa, Unknown
  Bacterial polypetide isolated from the Sargasso Sea
DNWFFESSLGELADKKSEIFQALDQVKKEHAYEKNGAVWLESTKFGDDKDRVIIREDGRGTYLSADLAYHRNKLDRGFDTIINVWGSDHHGYIKRIEATIEAMGYSKKQMQVQLVQFANLFENGSKVKMSTRSGNFYTLKQLIDDIGPDASRFYYLSKQADQHLDFDIGVARTNSKDNLYYYVQYAHARICSVEKKYLELGMALPSKFDDSDFDGCDELLQMALNAQFVIKSSGENLQPHLIVYYLRDISQSFHQFYNNVNILNAKESEQNNIMRALIIVKSVIASSLELLGIEPLDSM

SEQ ID NO: 160338 - protein, 278 aa, Unknown
  Bacterial polypetide isolated from the Sargasso Sea
MLILPDNLNSVNVDSTPPKIDFDISTNVSMVLAKPNNKSPNDLALILIDLLRKEDKSIEEISFAKPGFINIKFNKDYWNNFTNKLINSPHNYGSANKEKKKYLVEFVSANPTGPLHVGHCRGAILGDVISSILEFNQNIVKREYYVNDYGNQISHFNNSVYLRIREKLYDEKFPLDNPDLYPGDYLKDIAISIIKNNKDINFENFKDIEDHLKKLSINESLNLIKKNLNDLGIKHDNFISETTLVNDNEVEKVIEKLKKSKHVYKGKIKAPEGEDQSN

SEQ ID NO: 160339 - protein, 576 aa, Unknown
  Bacterial polypetide isolated from the Sargasso Sea
MNIFEEYLNKILDKIKLASEEKLILLPESLSGINVDIPPKKFKCDLSTNVAMVLSKTNNEPPIKIAEKLKDIIFKDDNNIEKIEIAKPGFINIILKKEFWTSFLLNINNLNNFGAAFNGSKKKHLIEFVSANPTGPLHVGHCRGAILGDVISNLLKFNNQEVVKEYYVNDHGNQILHFTRSVYLRIKEKLDNQTFPVNEDDLYPGEYIKDIAQHIIDNNKDLQFDDYEKIKLTLTKLAITESLKLIKTNLNNLGIIHDNFASETEIVENKEVDKVIEKLKKDKFVYIGKIKAPEGEDTTNWVERDQLLFRSTDFGDDKDRALQKSDNTWTYFAGDVAYHNTKLNRNFDKLINILGADHAGYIKRITSVVEALSGEKNKLICKVSQLVKLIKDGKPFKMSKRKGDYITVEDLISEVGKDATRFIMLSRSNDAELDFDFTKVKEKSKDNPLYYVQYCYARISSVFRNINKNIDDKIDNENNNMQFNNEEIEIFKKISEWPKCVEISTKKLEPHRIPVYLYELSSQFHSYWNMGKDDVEKRFINDDKTINIEKLIFLKSIAKTIKTGMDIIGVDTPEKM

SEQ ID NO: 160340 - protein, 576 aa, Unknown
  Bacterial polypetide isolated from the Sargasso Sea
MNIFEIYLDKILNLIKSAKENNLLELPENLSGINVEIPPAKFNCDMSTNVAMVLSKSNNKSPLELAKVIADIIKENDENLDDIKIEKPGFINLKFKKIFWNNFLKTIINQSNYGSNTSDVSKKYLVEFVSANPTGPLHVGHCRGAILGDVISNLLIFNNHKVTKEYYVNDYGNQIIHFTKSVYFRIREILFKEKFPIDNKDLYPGDYLVDIAKNIIDQNTGIKFDNFENISNDLTKLSVQESLKLIKFNLNNLGISHDNFASETDVVLNNEVDQVVDKLQKDNFVYLGKIKAPEGEDSKNWTEREQLLFKSTDFGDDKDRALQKSDKSWTYFASDVAYHNTKLKRNFDVLINILGADHAGYIKRITSVVEALSGEKNKLICKVSQLVKLIKDGQPFKMSKRKGDYITVEDLISEVGKDATRFIMLNRSNDAELDFDFTKVKEKSKDNPLYYVQYCYARISSVFRNLNKNINDEVNINNFDLNYTDDEIKIFKKISQWPKCIEVATSKLEPHRIPVYLYELSSEFHSYWNMGKEDETKRFIEKDNSIKDEKIIFLKIVSNIIKSGMNIIGVDTPEKM

SEQ ID NO: 160341 - protein, 288 aa, Unknown
  Bacterial polypetide isolated from the Sargasso Sea
MNIFENYKNKIISILNEAASEGHIVLPDNLNGINVDSTPKSIDFDISTNVSMVLAKLNSKSPEELSKVIIELIKKKDTKIDLIEFAKPGFINIKFTKHFWSEFSQSVIENEISYGSSKLKGRKILVEYVSANPTGPLHVGHCRGAILGDVISNLLIFNNNDVSKEYYVNDHGNQIYHFTYSIYLRIREKLFNEIFPIDNEDLYPGNYLIDIASNIITKKKISDFSDYENIKDELKTASVEESLALIKKNLNDLGINHDNFISETKIVNDNEVDKVVKKLQDSNYIIRK

SEQ ID NO: 160342 - protein, 227 aa, Unknown
  Bacterial polypetide isolated from the Sargasso Sea
MDILEKYKNILITELNKSYSKEDLSNISFEFPRDTSHGDFSTNAALILSKKLKMNLDQIFLEVKKFFEDSGDFKDIVLAKSGFINFFVKDSILHDFIREVLKNRENFGKKELGKGEKINIEYVSANPTGPLHVGHTRGAVFGDTLANIFDFVGFDVCREYYINDSGEQIKNLAKSVYLRYLQNFSDNEIVIPDNLYPGEYLIPIAKKISDKHGEKFLDKDESDWLDF

SEQ ID NO: 160343 - protein, 576 aa, Unknown
  Bacterial polypetide isolated from the Sargasso Sea
MNIFETYLDKIIDLIKKANQDNLITLPENLSGINVDIPPSKFNCDMSTNVAMVLSKPNNKSPIEVAEIITNIIKENDENIDDIKIEKPGFINLKFKKIFWNNFLKTIINQKNYGSNTLKDSKKYLVEFVSANPTGPLHVGHCRGAILGDVISNLLTFNNHIVTKEYYVNDYGNQIIHFTKSVYFRIREILFKEKFPIDNKDLYPGDYLVDIAKNIIDQNKGINFDNFDSISKELTKLSVQESIKLIKFNLNNLGISHDNFASETDIVLNNEVDQVVDKLKKDQFVYLGKIKAPEGEDSKNWVEREQLLFKSTDFGDDKDRALQKTDKSWTYFASDVAYHNTKLKRNFDVLINILGADHAGYIKRITSVVEALSGDKNKLICKVSQLVKLIKDGQPFKMSKRKGDYITVEDLISEVGKDATRFIMLSRSNDVELDFDFTKVKEKSKDNPLYYVQYCYARISSVFRNLNKSINDKIEVINYDFKYTDDEIKIFKKISQWPKCVDVASTRFEPHRIPVYLYELASEFHSYWNMGRDDVTKRFIEKDNTIKDEKIIFLKVVSNIIKSGMNIIGVDTPEKM

SEQ ID NO: 160344 - protein, 576 aa, Unknown
  Bacterial polypetide isolated from the Sargasso Sea
MNIFEDYLIKIENTIKTANKDNLLELPENLSGINVDIPPAKFNGDVSTNVAMVLSKINKKSPIELAELISGLLKKNDKNIDHISIEKPGFINLKFKKEFWSAFILDVLKKPSYGSNLGGKKNSFLVEFVSANPTGPLHVGHSRGAILGDVISNLLSFNGHKVTKEYYVNDYGNQISHFTKSVYFRIKEITNNETFPIEDKDLYPGAYLIDIAKKIISKNKDIDFNDYDKISEKLKKLSIEESLKLIKTNLENLGIKHDNFASETEVIKNKEVDEVIKNLKEKKFIYEGKIKAPEGENNENWVEREQLLFKSTEFGDDKDRALQKEDKSWTYFASDVAYHNTKLKRNFDVLVNILGADHAGYIKRITSVVEALSGKKNKLICKVSQLVKLIKDKKPFKMSKRKGDYITIEDLINEVGKDATRFIMLSRSSDAEIDFDFDKVKEKSKENPIYYVQYAYARISSVFRNTQHEIKSDIKITNSEYKFGDQEIKLFKKISEWPKCVEVSTEKLEPHRISVYLYELASEFHSYWNMGKDDISKRFIEEDNSIKEEKLVFLKSIANTIKSGMDILGVDTPEKM

SEQ ID NO: 160345 - protein, 339 aa, Unknown
  Bacterial polypetide isolated from the Sargasso Sea
MNIFDLYQTKITKLVKSANQNKLIENIDNIEKTNVDLPPKHFDCDISTNVAMILAKNNNTSPIKISEILITLFKKDFSEIQDISFAKPGFINIKFKLSFWNNFLRELINDKNFGKNNNIINKSYLLEFVSANPTGPLHVGHCRGAILGDVLANLLLFNNHTVNKEYYVNDYGNQILYFTKSVYYRIREKLYNEPFPKDNKDLYPGDYLINIASNIINKNNNLNFDNFNEISTELTKLSVQESLNLIKLNLNNLGISHDKFISETDLVKNQEVEKVIEKLKKKDFVYNGKIKAPENEKNSNWVERDQLLFKSTYFGDDKDRALQKEDKSWTYFASDTAYH

SEQ ID NO: 160346 - protein, 474 aa, Unknown
  Bacterial polypetide isolated from the Sargasso Sea
MNIFELYLDKIKSIIVELSKKNQLIVPENFNGINAEIPPPKFDCDISTNVAMVLSKLNKTSPIELAEKLAPEIKNNDDQIDNISVAKPGFINIKFKPSFWSNFIKEIIDNAEKFGINEKEKKYNYLVEFVSANPTGPLHVGHCRGAILGDVISNVLIFNKHKVTKEYYVNDYGNQIINFTKSVYFRIREVKFNETFPQDNPDLYPGDYLVDFAKNIVSVNSDLSFDDYEKISDKLTALSIEQALLLIKKNLKSLGINHDNFVSEKSIVSNNEVESVIKFLEKNKFVYKGKIKAPAGEDDKNWVEREQLLFKSTDFGDDKDRALQKSDETWTYFASDVAYHKNKVDRKFDYLINILGADHAGYIKRISSSVEALSGKKDKLICKISQLVKLIKDNKPFKMSKRKGDYITVDDLIEEVGKDATRFIMLNRSSDVELDFDFDAVKEKSKDNPLYYVQYCYARISSVFRHIDKDLNSK

SEQ ID NO: 160347 - protein, 418 aa, Unknown
  Bacterial polypetide isolated from the Sargasso Sea
MNIFSDYQKKIIFTLKKLEKKKIIKIPELTNGIIVELPPKNQEADISCNAALIISKINNKPPYEVAEIIKKNLLSNFKEFKSVDIAGPGFLNIQFKVSFWKRILLNIIKFNSKFGSLNKEKKKYNIEFVSANPTGPLHVGHCRGAIIGDALSNLLIFNGNKVTKEYYVNDHGGQIQKFVLSVFYRILEIKEKKNFPLDKDLYPGSYIIDIAKKVIESKKIKNFKNYEKIYNNLKNQSLNFSMQLIKDNLKMLGVKHDNYIFESKLINNKMVSKVIKKLEKNDFIYKGKLEPPKGETISNWKARQQLLFKSTKFGDDVDRPLQKEDGEWTYFAADMAYHSNKVERKFNYLINILGADHAGYIKRIIAATKAISNNKINLICKVSQLVKLFKNGQPFKMSKRKGEYITVEDLVKEVGKDS

SEQ ID NO: 160348 - protein, 538 aa, Unknown
  Bacterial polypetide isolated from the Sargasso Sea
MIDKIIQALIDTLKKLDYPQKEIKVSSSSNPDYGDLSSSLPLMLAKDLEKNPIDIAKIIMDNISISKDLIKEITISKPGFINFKISNKYYYSVLEQILSNNKFGQSSSFNGKKANVEFVSANPTGPLTVGHGRNAVLGDVVCNILEWNGYSVTREYYFNDAGRQMRILSKSVASRYLEELGKSSDFPEGGYEGSYIYDIAKDIINEHGDQLDKDDILFKEVPEKNIFKQIKNTLNDLGIKFDVFSNEKTFYENGDIDKLLDELRSKNLIYEKDGATWFKSSSLGKDQDRVFIKSSGEPTYRVPDTAYHRNKVERNYDLIVDIFGADHMDTYPDVLVALDALGIKTNHIKVLLYQFVTLLRGGEKIKMSTRKADFVTLDELIDEVGADVVRYFFIMRGINTHLNFDLDLAADQSDKNPVYYLQYAHARICNIIKRNDDTNPTDMNYNSALLKNELEIDLLKKLEQFPMIVSSALDSLEPQTIANYLQETAGKFHKYYANCRIIVEDKELTQSRIALIKATKNVIYNGLKLLGITAPDKM

SEQ ID NO: 160349 - protein, 410 aa, Unknown
  Bacterial polypetide isolated from the Sargasso Sea
NFVNKLIGNSNNYGSFNKEKEKYLVEFVSANPTGPLHVGHCRGAILGDVISNLLKFNNNIVEKEYYVNDYGNQILHFNHSVYLRIREKLYNEEFPSGNPDVYPGDYLIDIANNIIKNNKDINFENFKDIEERLKKVSIDESLNLIKQNLNELGINHDNFVSETKIVNDREVEKVIEKLKKNNHVYTGKIKAPEGEDKSKWTERDQLLFKSTEFGDDKDRALQKSDLAWTYFASDVAYHNTKILRNFDKLINILGADHAGYIKRITSVVEALSGEKNKLSCKVSQLVKLIKDGKPFKMSKRKGDYITVDDLIKEVGRDATRFIMLSRSNDVELDFDFSKVKEKSKDNPLYYVQYCFARVCSVFRNINLNINDDLKIKNQNYNYSPDEIKILKKVSEWPRCLEISSKKLEPH

SEQ ID NO: 160350 - protein, 373 aa, Unknown
  Bacterial polypetide isolated from the Sargasso Sea
NKKAPSVLAEQLIELIKKDDKEIENISVANPGFINIKFKNSFWNNFLKNIISNNKSFGKNKKTNKKKYLLEFVSANPTGPLHVGHCRGAILGDVLSNLLSFNNHSVTKEYYVNDDGNQILHFSKSVYLRIREILKKEPFPKDNPDLYPGDYLINIAKNIIKNNKNSKFDNFEKVSDNLTKQSVEESLKLIKFNLKNLGIIHDNFVSEEEIVKKKEVEKVINKLKKNNFVYEGKLNAPKNEKSTDWTERNQLLFKSTDFGDDKDRPLQKADKSWTYFASDVAYHNNKLERNYDVLINILGADHAGYIKRITSVVEALSGKKNKLICKVSQLVKLIKDGKPFKMSKRKGDYITVEDLINEVGKDATRFIMLNRSS

SEQ ID NO: 160351 - protein, 147 aa, Unknown
  Bacterial polypetide isolated from the Sargasso Sea
MNIFELYLDKIKSIVVKLGKKNQLVVPESFNGINAEIPPPKFDCDISTNVAMVLSKLNKTSPIELAEKLVVEIKNSDDQIESISVAKPGFINIKFKPSFWSNFIKEIIDNSEKFGINEKEKKNNYLVEFVSANPTGPLHVGHCRGAI

SEQ ID NO: 160352 - protein, 397 aa, Unknown
  Bacterial polypetide isolated from the Sargasso Sea
MNIFEIYLKKIKDLIIGLSKEELIQIPKDLNSINVDIPPEQFDSDISTNVAMVLSKLNKTNPLELAKIIESNLKKNDTNIDKIEIVKPGFINIKFKSIFWNDFLKEIINNHKEFGINKNEVKKKYLIEFVSANPTGPLHVGHCRGAILGDVISNILQFNQHKVSKEYYVNDYGNQILSFTKSVYLRIREILNGEKFPVNDPDLYPGDYLIEIAKNIIKENKNIKFDNFDNVSAKLTSLAIFQSLILIKTNLKNLGISHDNFQSETEIVNNNEVQNVIDKLKKKNFVYIGKIKAPVDEKKNNWVEREQLLFRSTDFGDDKDRPLQKSDKSWTYFASDVAYHNNKLNRNFDTMINILGADHAGYIKRITACVEALSGEKNKLICKVSQLVKLIKDGKPF

SEQ ID NO: 160353 - protein, 326 aa, Unknown
  Bacterial polypetide isolated from the Sargasso Sea
MNIFELYLDKIKSIIVELSKKNQLIVPESFNGINAEIPPPKFDCDISTNVAMVLSKLNKISPIELAEKLASEIKNNDDQIDNISVAKPGFINIKFKPSFWSNFIKEIIDNAEKFGINEKEKKNNYLVEFVSANPTGPLHVGHCRGAILGDVISNVLIFNKHKVTKEYYVNDYGNQIINFTKSVYCRIRELKFNETFPQDNPDLYPGDYLIDFAKNIVSDNSDLNFDNYDQISDKLTALSIEQALLLIKKNLKSLGINHDNFVSEKSIVLNKEVESVIKFLEKNKFVYKGKIKAPVGEDDKNWVEREQLLFKSTDFGDDKDRALQKS

SEQ ID NO: 160354 - protein, 292 aa, Unknown
  Bacterial polypetide isolated from the Sargasso Sea
MNIFEEYKNKILTIIKKAEKDKLLVLPENLNGVNVDSTPPNIDFDLSTNVSMVLSKSNNKSPNVIAETIIDLLKKEDTFIEEISFAKPGFINIRFNKDYWNNFANKLINISNKYGSSNKDKKKYLIEFVSANPTGPLHVGHCRGAILGDVISNILKFNNNIVEKEYYVNDYGNQISHFNYSVYLRIREKLYNEEFPLDNPDLYPGDYLIDIATNIIKNNKNVNFENFKDIEDYLKKLSINESIKLIKQNLNDLGINHDNFVSETNIVNDKEVDKVIEKLKKSNHVYTGKINA

SEQ ID NO: 160355 - protein, 133 aa, Unknown
  Bacterial polypetide isolated from the Sargasso Sea
MLHNLKKSLFEILIKIDKNVSINFEDVEVETLFDKKGDFTTNAALKFSKIFGKNPNQLADIILKSINLNNFEKVEIAGPGFINFFLKDESFNPQLFNNKKEFTENEKVNIEFVSANPTGPLHLAHGRGAVVGD

SEQ ID NO: 160356 - protein, 578 aa, Unknown
  Bacterial polypetide isolated from the Sargasso Sea
MTMEEKIKCLIINALAESQEIDEDELNDVGLELSRNSNNEHGDFSSNIALKLGAKLKTPPMTIAEEIVSSLEASDELERVEFVKPGFINFYLSAEKKHGVLETILNHGREFGSSCASEKKKILLEFVSANPTGPLHVGHGRHAAFGDSLARLLRKAGHEVFTEYYLNDAGRQIDILCLSVIIEMLRAEGLKLKDIPGVYKGAYIKEIAQGLIEEGFKINKNVVPPDVGGSSDEIVDSFILEMKDVAGSELFQRISDITVLQMTQLLKKDLSDFRVEQDGFYSEKSLFSTGKIEQACEIIKKNGNAYEKDGALWLESSKYGDDKDRVVIREDGRSTYFASDIAYHHDKKMRGFDLLINVLGSDHHGYVSRLEAGLASTGNKASDLDVILMQFVTLYRGKKKIQMSTRSGNFVPMRDLYSDVGVDAARFFYVSRSHDQHLDFDLDLATKQNNNNPVYYIQYANARIKSVLKENKKRGYIFDEAIGKSNLVKLDLPIEEEIIALLGKYPEIILKSSEARAVNKIANYLKSLAQLFHSYYGSTKFVSEDEQTRNARVLLLICVSIIIENGLDILGVSSPAKM

SEQ ID NO: 160357 - protein, 405 aa, Unknown
  Bacterial polypetide isolated from the Sargasso Sea
MVLSKSNNKSPNIIAETIIDLLKKQDTQIEEITFAKPGFINIRFNKDYWNSFANKLISISHKYGSSNKNKKKYLVEFVSANPTGPLHVGHCRGAILGDVISNILKFNNNTVEKEYYVNDYGNQISHFNYSVYLRIREKLYNENFPSDNPDLYPGDYLIDIASNIIKNNKNVNFESFKDIEDHLKKLSINESLKLIKKNLIDLGINHDNFVSETNIVNDKEVEKVVEKLKKSNHVYIGKINAPEGEDKKNWTERDQLLFRSTDFGDDKDRALQKSDLTWTYFASDVAYHNTKINRNFDKLINILGADHAGYIKRISSVVEAISGEKNKLSCKVSQLVKLIKDGKPFKMSKRKGDYITVEDLVKQVGKDATRFIMLSRSNEVELDFDFSKVKEKSKDNPLIMYILLY

SEQ ID NO: 160358 - protein, 319 aa, Unknown
  Bacterial polypetide isolated from the Sargasso Sea
MNLIKDDLKKLGISHDNFLSETDIVNKNMVDKAINNLKEKNYVEEGYLDPPKGENIKDWKKVKRLIFKSTLFGDDTDRALQKNDGSWTYFANDIAYHMDKVDRKYDNLINILGADHTGYIKRIKSAVSALSDNKTLFDCKVCQLVKLYKNGQPFKMSKRAGEFISAQDLLDEVEKDPIRFMMLNRSNDVELDFDFDKVKEKNKDNPVFYVQYAYARINSILRSLKIKFTNKVELNDKDFQLNEIEQKILRKVFEWPKIIESASNKFDLHKIPVYLYDLATLFHSYWSKGNEDEKYKFIKNEKIKRNEIFAIMNLIAIVL

SEQ ID NO: 160359 - protein, 179 aa, Unknown
  Bacterial polypetide isolated from the Sargasso Sea
IKLSKRTGTMVEVSELIEAVGPDVARFAYLLQSIDTRQTIDIDVLSSEANENPVYYVQYAHARIAAVSREATNRGISRCPVDAMDVTVLQHERELEILRCLSTLPEIVEFAARDRAPHRVATWIRELAAAFHGFYHDCPVLRSDVAAEIQQARLWLVETARIGFAIGLDLLGITAPEEM

SEQ ID NO: 160360 - protein, 291 aa, Unknown
  Bacterial polypetide isolated from the Sargasso Sea
MNIFEDYLIKIENTIKKANQDNLLELPENLSGINVDIPPAKFNGDVSTNVAMVLSKINKKPPIELAEIISGLLKKNDKNIDHISVEKPGFINLKFKKEFWSAFILDVLNKPSYGSNLNGKKNSFLVEFVSANPTGPLHVGHSRGAILGDVISNLLSFNGHKVTKEYYVNDYGNQISHFTKSVYFRIKEITNNETFPIEDKDLYPGAYLIDIAKKIISKNKDMDFNDYDKISEKLKKLSIEESLKLIKTNLENLGIKHDNFASETEVIKNKEVDEVIKNLKEKKFIYEGKIK

SEQ ID NO: 160361 - protein, 435 aa, Unknown
  Bacterial polypetide isolated from the Sargasso Sea
MNIFEEYRTKIINILKEEEKSNAIHLPENLNIINVDSTPTNIDFDISTNLSMVLAKLNNKTPEDLSSKLIKLIKQEDDNIDEIVFAKPGFINIRFNNNFWNQFAENLINNSNNYGSAKKNGKKYLVEYVSANPTGPLHVGHCRGAILGDVISNILKFNNNEVVKEYYVNDHGSQISHFTYSVYLRIIEILEKKPFPIDNPDLYPGDYIIDIAQKILKDNKEINFKDFKEVENKLKLLSVNESLKLIKKNLQELGIKHDNFASETQIVENKEVENVVEKLKSADQVYIGKIKAPEGEDNTKWVERKQLLFRSTNFGDDKDRALQKSDNTWTYFASDVAYHNTKIKRGFDKLINILGADHAGYIKRITSVAEAISGEKNKLVCKVSQLVKLIKDGKPFKMSKRKGNYITVEDLIEQVGKDATRFIMLSRSSDVELDF

SEQ ID NO: 160362 - protein, 512 aa, Unknown
  Bacterial polypetide isolated from the Sargasso Sea
IEKELNNRIKSIGFIDHFVVSKNGFINFFLKDEFVLRSLKEIYSKNFLNYINYGADKKINVEFVSANPTGPLHIAHIRGAVFGDVLSTLYTKTGFDVTREYYVNDAGSQIDKLSNSLLKRYLQLFDKKIELDEDEYPGEYLIDIAKKIKNEDGDKWLNFQQEETIQYFKNFALKNILLSIKSDLELINIRFDKFTHETEIEKSKIIDELFSILDEKKLLYEGILEKPKGDDSDWEPREQLLFRSSNLLDNEDRALKKSNGEWTYFANDAAYHLDKCKRNFDRLVNIWGSDHIGYIPRMNSLIKAIKDDETYLNILTCQIVSLIQNKQKIKMSKRSGNFVTLKNVHSKVGKDPIRYYMISTKNETAIDFDLDAVVEKNKDNKVFYCQYAHARASSVINKANELGIKIKNDYNLTAIQNLSNEEVKLIKKLISYPYLLYQSSYYNEPHRLINYLEEISSDFHSIWNKGKDNESLRFIDKKNKEKTISKIFWLESFRVVLKDIFSIIDISAPETM

SEQ ID NO: 160363 - protein, 375 aa, Unknown
  Bacterial polypetide isolated from the Sargasso Sea
MNIFEQYLDKIKEILSTLSSNGDLILPDSLNGITAEIPPSKFDSDISTNVAMVLSKINNKSPSDLASILAEKIKKEDKFIEEISVVKPGFINIKFKPIFWTNFIKEVIKNSNSFGTNKNIKRNYLIEFVSANPTGPLHVGHCRGAILGDVMANLLLFNNNKVTKEYYINDYGNQIINFTKSVYYRIREISFNEPFPVDNEDLYPGDYLIEFAQNILNTNKNIDFKNFDKISQELTTLAINEALKLIKSNLKCLGINHDNFVSEKKLVENQEVEKVVEFLQKNKFVYKGKIKAPAGEDDSNWVEREQLLFRSTDFGDDKDRALQKSDGAWTYFASDVAYHKNKLDRKFDRLINILGADHAGYIKRISSSVEALIKL

SEQ ID NO: 160364 - protein, 544 aa, Unknown
  Bacterial polypetide isolated from the Sargasso Sea
MKKFKLYLKKNIKSTLKSLSLPDLEFSLSEPKNINFGDLSSNLPLLIGSKQKINPIEIGESIAQNLKEKCLEDIIEINVTPPGFINFKISEKFFQNKIDLIIENNKNYGRGNIGSGKIANVEFVSANPTGPLTVGHGRNAVLGDTISKILEWQSFDVTREYYYNDAGKQMRILRKSVEARYYELLEKSYDFPRDGYQGKYIYDIAKFVLEKKGETLKSGDESFGKIAEEIIFNDIKNSLKELGVKFDHFTNEKTFYENGDIDKLLKDLADKNLIYKKDNATWFRTSALGKDQDRVYIKSSGEPTYRVPDTAYHLDKIKRKYDLIVDIFGADHADTYPDVITALRALGLKTNHIKVLLYQFVTLIRNGEKIKMSTRKANFITLDQLIKELSPDVVRYFFIMRSMNTHLDFDLDVAKDQSEKNPVFYLQYAYARICNIIKRADEVEQNQKHSNNNSLLVHKDEMNMLKHMVRFPEVIDIAYENLEPQHIANYLQQLASYFHKFYSQCKVINDNKDLTYARIRLIKSVKIILNNGFNILGIHSPERM

SEQ ID NO: 160365 - protein, 248 aa, Unknown
  Bacterial polypetide isolated from the Sargasso Sea
MNIFENYLLKIEKVIKSAHKDNLLELPDNLSGINVDIPPAKFTGDISTNVAMVLSKINKKPPFELAKQIADLLKDSDSNIDEISIEKPGFINLKFKNEFWNGFILDVLNNSSYGSSSSGKKNSFLVEFVSANPTGPLHVGHSRGAILGDVISNLLSFSGHKVTKEYYVNDYGNQISHFTKSVYLRIKEILYDETFPIKDKELYPGEYLIDIAKNIISKNKDLDFKNFESVSEKLKKNFNRRIFKVNKN

SEQ ID NO: 160366 - protein, 457 aa, Unknown
  Bacterial polypetide isolated from the Sargasso Sea
NVEFVSATPTGPLHVGHTRGAVFGDALSELLSFAGYKVTREYYINDGGSQVDTLARSVYLRYLEAHGQDVAFEDGTYPGSYLIPVGQALKEKVGSDYMDKPERYWLDHVREFSTDAMMKLIKDDLAALGVKMDAFFSEKSLYGGGKIEEAIESLKSKNLIYEGILDSPKGKKVEDWEPRVQTLFKSTSHGDDVDRPIKKSDGAWTYFAPDIAYHFDKVERNFDQLIDIFGADHGGYVKRMKAAVSALSDDKVKFDIKLTQLVKLFKRGEPFKMSKRAGTFVTLRDLVDQVGSDVTRFVMLTRKNDAPLDFDFEKVLEQSKDNPVYYVQYASARIHSVFRKAKEAGIHFDEEQLKYETFCKITHEAEIKIAKKLAEWPRIVEISAKTHEPHRIAFYLYELASDFHSLWNKGNENDELRFIQENDHKATYTKMAMISAVLVVISSGLGILGVEPATHMN

SEQ ID NO: 160367 - protein, 272 aa, Unknown
  Bacterial polypetide isolated from the Sargasso Sea
MNIFELYLDKIKSIIVELSKKNQLIVPETFNGINAEIPPPKFDCDISTNVAMVLSKLNKTSPIELAEKLAAEIKNSDDQIDNISIVKPGFINIKFKPSFWSNFIKEIIDNAEKFGINEKEKKNNYLVEFVSANPTGPLHVGHCRGAILGDVISNVLIYNKHKVTKEYYVNDYGNQIINFTKSVYFRIREVKFNETFPQDNPDLYPGDYLIDFAKNIVSDNSDLNFDNYDQVTDKLTALSIEQALLLIKKNLKSLGIRHDNFVSEKSIVLNKE

SEQ ID NO: 160368 - protein, 257 aa, Unknown
  Bacterial polypetide isolated from the Sargasso Sea
MNIFTIYKNKIFNILKDLNRKNKIILPENLNSINVDIPPKNFDADISTNVCMILAKKNNKKPEEISNLIIDDLSKQDKNILSSEFVNPGFINIKFNRKFWNYFLKEISKTIKTFGSNKTKDKNKYLIEFVSANPTGPLHVGHCRGAILGDVISNLLIFNGKSVKKEYYINDHGNQIIDFTKSVYFRIIEIKKKKAFPNDENLYPGDYIKDIAKKILKKKKFNYENFDKIYHKLSKECIKESMNFIKDDLKKLGIKHD

SEQ ID NO: 160369 - protein, 262 aa, Unknown
  Bacterial polypetide isolated from the Sargasso Sea
MIDEINKEIEKFLSSIVNNKKNINSIIKKCSTSISDDLKKGHITSNVCMVAASILKLNPKNLAEDLKTRLEKIDRFDNVEIAGPGFVNISLNREDFVSTIQFINKNKDSFGSSAIGKKNKVQIEFVSANPTGPLHVGHGRGAAYGDAIGRILESTGSIVEKEYYVNDAGRQIDILTASVILRLIKNDISNYFPANGYKGEYIDEIGKKLDKKVKIHDFKSLSIKTSEDPEEEIDNIIHELEKLNNNSWNLIKKFSLKEIVNQ

SEQ ID NO: 160370 - protein, 569 aa, Unknown
  Bacterial polypetide isolated from the Sargasso Sea
MILDTLNKQLIEVVQNVAAQKSVKIDKELLDQINFEISDEESHGDYSTSCALKLAKAFNMKPREISELLTKDLSLPFIESMSIEGAGFINVFLTSAEKTLALKEVIKLDSKWGKNSKRQGNVLVEFVSSNPTGPLHVGHGRGAVLGMALSNLLENSGYKVTKEYYVNDAGRQISILTSSILLKAYAGNFDVEGMYEGDYIHEIAQEFLKDNEKIDINLDLKGLSDDKEKKLDQISEYFQKNHKEAWKEANDFSITKILNVIKEELHSFNIIHDNWFHESSLGSIQDSSSDLSKSLSVIEKAGHTFSEDGAIWFKTTDFKDDKDRVLLRENGEPTYYLTDVGYHKNKIDRKYDLCINVFGADHHGYIPRLTAAFNVMKSKQQEIEFMLYQLVNLYEDGSKKTMSTRKGDFYSLKELRDELGPDVIKFFFLEKKSDHTMDFDINLAKDESKNNPYFYSQYAHVRCCSILTKKSFDPNGEVEEKEIMKNFDIVNKILNFPHLVENYAEERSPHSLVHYVKDLSASFHAFYEQSPVINKDEKIENARLLLTMATKIVLANSFRILNVEPLEKM

SEQ ID NO: 160371 - protein, 162 aa, Unknown
  Bacterial polypetide isolated from the Sargasso Sea
MYAIKESLSKSIDSESGLIAFKNQILAKSKVSISDNLSNGHLSSNVCMIAASFLNKKPIEISHAFEEGLQKLSFVKDVKTVGPGFLNIFLEQSCFLDNFLNIKDITSLVQKDDKKSIQIEYVSANPTGPLHVGHGRGAAYGDALARILKFYGHDVSTEYYVN

SEQ ID NO: 160372 - protein, 529 aa, Unknown
  Bacterial polypetide isolated from the Sargasso Sea
MRSLSFPEKEFSLAPPKISEFGDLSSNIALLLARDLNKPPMDICKSIAGELENSLPDHVHNISITKPGFLNFQISKDFFQSQITEILKDRKDFGKGDAGYGKTANVEFVSANPTGPLTVGHGRNAILGDTVSNLLQWQGFEVTREYYFNDAGRQMRLLGQSVEARYFEILGKEIDFPSEGYQGNYIKEIAQTIFDEKGSDLESGDPIFKERAEELIFSDIKSSLIKLGITFDQFTNEKTFYENGDIDSFLKKLKDKELIYEKDNATWFKTSSLGKDQDKVYIKSSGEPTYRVPDTAYHQDKINRDFDLIVDVFGADHADTYPDVILALQALGHKTDHIKVLIYQFVTLLRSGEKIKMSTRKANFVTLDELVDELGIDVVRYFFIMRGMNAHLDFDLDLAADQSDKNPVFYLQYAHARICNIISRANDKGIILNESFDHSLLDHEDEINLLKYLSNFPDFVELGYENLEPQTIANYLQELSGYFHKFYSKCRVITDDNELTMSRIALIYATRTVLTNGFRILGISAPERM

SEQ ID NO: 160373 - protein, 369 aa, Unknown
  Bacterial polypetide isolated from the Sargasso Sea
SVKKTFGDKYVVKGDSSVLSSDVIPEILKQVKEEFPDFDELTVFILSLQIDDIKRVLSKFRAFHENWISEKKLYEKSKGKSMFDEVIHTLEKNNSTYVSDDALWFKSKERGDEKDRVLIRDNKDPTYFASDVAYHKFKFDRKFDRLVNIWGADHHGYIPRIKGALDALGLKGDLLETIIIQFVSLNRSGKTVSMSTRKGDFVSLNELIEEVGIDASRFFFLARKSDQALEFDVELALKKDKNNPVYYIQYAHARICSLLKEVEKRDFVIDSKNGLENLNLITGEQELSLINEIELFQDTLEQCQIDLEIHPLCFYLRDLASKFHSYYNANKFIEEEKNLRDAKFTIVLSIKRIITDGLNILAINAPEEM

SEQ ID NO: 160374 - protein, 191 aa, Unknown
  Bacterial polypetide isolated from the Sargasso Sea
MNIFKLYKDKIINILKSANKENLIKLPENLNSINVDLPPSKFNCDISTNVAMVLSKSNEKSPIVLAEILSKLIKQNDHYINDISIEKPGFINIRLNKDFWNFFLKKIINDNSYGSQKSLNQKKYLVEFVSANPTGPLHVGHSRGAILGDVISNLLKFNNHIVTKEYYVNDYGNQILHFTKSVYLRIREILK

SEQ ID NO: 160375 - protein, 146 aa, Unknown
  Bacterial polypetide isolated from the Sargasso Sea
MKDIIKNILVDAINRTYPNKNFIKLIEVQNVTAKNVDADFFSNISMKLSKELKINPMETANQLIKNMSMNNDIQIDVVKPGYINFLIKDTKKNNIISAINTNNDLLENCRANNKLNINVEFVSANPTGPLHVGHGRGVIYGNIIAK

SEQ ID NO: 160376 - protein, 278 aa, Unknown
  Bacterial polypetide isolated from the Sargasso Sea
MTKDGKAYKKDGAVWLDTESAGDDKHRVLIRDDGRATYFASDVAYHKNKIDRGYDNLINIWGADHHGYIKRIEASIEAIGSKKEKLIVKLVQFANLFKNGKSVKMSTRSGEFFTLRELLEDIGSDAARFYYLSKQADQHLDFDLDLAKSDSKENIFYYIQYAHARIFSLEQKYKEMYPNLDPSIQAIEEDLYRKCDSLIHEISKYPYIVNKSARTLQPHIIIFYLRDLSQLFHSYYNDNHVLSESKENMRSIILCLSALRQVISNGLGILGISPMQKM

SEQ ID NO: 160377 - protein, 373 aa, Unknown
  Bacterial polypetide isolated from the Sargasso Sea
MNIFENYLLKIKKIIKSGHKNNLLELPDNLSGINVDIPPAKFTGDISTNVAMVLSKINKKSPLELAKQIADLIKDSDNNIDEISIEKPGFINLKFKNEFWNGFILDVLNNSSYGSSISGKKNSYLVEFVSANPTGPLHVGHSRGAILGDVISNLLSFNGHKVTKEYYVNDYGNQISHFTKSVYLRIKEILYDETFPIDDKELYPGDYLIDIAKKIISKNKDLDFKNFESVSEKLKKLSIQESLKLIKINLENLGIKHDNFASETDVINNNEVDEVIKNLKEKKYIYEGKIKAPEGESDENWVEREQLLFKSTDFGDDKDRALQKEDKSWTYFASDVAYHNTKLKRNFNILINILGADHAGYIKRITSVVEALS

SEQ ID NO: 160378 - protein, 243 aa, Unknown
  Bacterial polypetide isolated from the Sargasso Sea
MNIFEVYLEKIKSIISELQKDNKIIVPDKFNGINAEIPPPKFNCDISTNVAMVLSKINNKPPLDLAEQLAPIIKDKDKLIETITIAKPGFINIKFKKSFWANFTKEISDNSEIFGINQKEKKNNYLVEFVSANPTGPLHVGHCRGAILGDVISNILTFNNHKVTKEYYVNDYGNQIINFTKSVYFRIREITHKETFPSDNADLYPGDYLIDFAKNISSNSNLNFDKYDEISEKLTELSIEQAL

SEQ ID NO: 160379 - protein, 356 aa, Unknown
  Bacterial polypetide isolated from the Sargasso Sea
MNNDEISEAGLELSRNKNNDHGDFSSNIALKLSGKLKRSPMVIAEEIVSSIQFFDGLERTEFVKPGFINFYLSAEKKHGVLEEIMSKGKSFGSSCVSEKKKVLLEFVSANPTGPLHVGHGRHAAFGDSLARLLRKSGHEVVTEYYLNDAGRQIDILCASVMFELLILEGQKLGQIAGLYKGSYIKEIATGLRDEGMVINKQITLPKTGGSDDEIVDALILEMRDIAGNDLFQIVLEKTVLQMTKMLKDDLADFRVIQDGFYSEKSLFSEGRIEEACEIIEKNGNAYKKDGALWLESTKYGDDKDRVVIREDGRSTYFASDIAYHHHKKIRGFDLLINVLGSDHHGYVTRLKAGLAS

SEQ ID NO: 160380 - protein, 474 aa, Unknown
  Bacterial polypetide isolated from the Sargasso Sea
MNIFDQYLDKIKNILLDLADEGIILLPEKLDGINTEIPPEKFNCDLSTNVGMVLSKINKKNPIEIAQTIADTLKKKDPLISEISIVKPGFINIKFKSIFWTNFIQKIIENSKTFGKNIKEKKKSYLIEFVSANPTGPLHVGHCRGAILGDVIANVLLFNNHKVTKEYYVNDYGNQIINFTKSVYLRIKEIKFGEPFPNDEDLYPGDYLKDFANNIISSNKKMDFSNFDNISDELTSLSIDEALKLIKKNLNNLGINHDNFISEKKLVLNQEVEKVIDYLRKSKFVYEGKIKAPASEDNDKWIQREQLLFKSTDFGDDKDRALQKSDGTWTYFASDVAYHKNKLDRNYDCLINILGADHAGYIKRISSSVEALSKSKEKLICKVSQLVKLIKDKKPFKMSKRKGDYITVEDLISEVGKDATRFIMLNRSSDVELDFDFDSVVEKSKDNPLYYVQYCYARIASVFRHLDMNLIDDV

SEQ ID NO: 160381 - protein, 542 aa, Unknown
  Bacterial polypetide isolated from the Sargasso Sea
MIDIKKYLSEIVADALAKLNVQSNIIIEKSSNTNFGDYSTNIALSLSKQLKNSPLKIAEDIGNLLKIDKNIITEYSVTKPGFLNFFVSNTYYQKTVNEIISSSKSYGMTEIGKNKTANVEFVSANPTGPLTVGHGRQAVLGDTIANILEWHNYEVTREYYYNDAGRQMRILGESVAARYFDLIGKKYDFPDDGYKGEYIISIANQIKDSHNEKLQTNSKVFRREAEKAIFKDIKKTLNSIGIKHDVFSNEQTYYDNGSIDELVKELNNKNLIYNSDGAVWFKATKLGLEKDRVYYKSSGEATYRLPDTAYHRHKLNRGFDLVVDIFGADHADAYPDVLAALNALDIDTNPIKVLIHQFVTLLKGGEKVKMSTRQANFVTLDELINEVGGDVVRYFFIMRSMNSHLNFDLDLAADQSEKNPVYYIQYAHARISNIINNGKSKHIDVDGNFDSSLLLNTAEISLIKSLYEFPEIMKKTLNTLEPQSIANHLHDIASEFHKFYAKCRVITDDIELTKSRIHLIKSVKIVLANGLNILGIQAPEKM

SEQ ID NO: 160382 - protein, 256 aa, Unknown
  Bacterial polypetide isolated from the Sargasso Sea
MNIFTNYLDEIKKILFNLSKKGELILPDKMNGINTEIPPSKFNCDISTNVAMVLSKLNNKSPIDLAKILSGEIKKNDQLIEDISVVKPGFINIKFIPIFWTKFVKNITQNSKTFGISKSKKKKNYLVEFVSANPTGPLHVGHCRGAILGDVISNVLLFNKHKVTKEYYLNDYGNQIINFTKSVYYRIREIIYKEPFPNDNENLYPGDYIIDFAQNIINSNKKLDFKDFKKISNELTALSTNEALKLIKKNLNSVGI

SEQ ID NO: 160383 - protein, 335 aa, Unknown
  Bacterial polypetide isolated from the Sargasso Sea
MQQKILNQLKLIVEELIKKSDVGDIKYKIRLQENKDKEHGDYASNIAMILAKDLSENPKNLAKQISEEFLLDEDILKVEVAGPGFINFFVSQATHAEILKDIDSEKGKYGHNKKKAGKVLIEYVSSNPTGPLHVGHGRGAVFGSVLASLLTAAGHEVDEEYYVNDYGRQMNILTASVWIRYLQNSNENISMSALGYQGDYIKLIAEGLFREKKEEYLLSDNDQENILPILKVQKDEKDVDSLISFMQSILGEGFFEIRSFALDNMLDIIKSDLINFGVKHNLWFFESSLYFEEKGKPSKADKAISDLSSNDFVYEKDGAIWFKSSELRDDKDRVL

SEQ ID NO: 160384 - protein, 183 aa, Unknown
  Bacterial polypetide isolated from the Sargasso Sea
MNIFENYKNKIISILNEAASEGHIVLPDNLNGINVDSTPKSIDFDISTNVSMVLAKLNSKSPEELSKVIIKLIKKKDTKIDLIEFAKPGFINIKFTKKFWSEFSQSVIENEISYGSSKLKGRKILVEYVSANPTGPLHVGHCRGAILGDVISNLLIFNNNDVSKEYYVNDHGNQIYHFTYSIY

SEQ ID NO: 160385 - protein, 210 aa, Unknown
  Bacterial polypetide isolated from the Sargasso Sea
MKKQLQELINQSLQTLKSEGLEITIQKNDIKIEYSRDASHGDFATNIAMVLAKMLDCNPRELANKITKNIPKTDLVKNVEIAGPGFINFFLSQNSYQSVVLDILKRGDLYGNSKIGENKPTLVEFVSANPTGPLHIGHGRGAACGAAICNLLRKTGFDVYCEYYVNDSGRQVNILTVSVWLRYLQQFEEKIIFPDNAYQGNYITDIAISL

SEQ ID NO: 160386 - protein, 542 aa, Unknown
  Bacterial polypetide isolated from the Sargasso Sea
MPDNLSGINVDIPPAKFTGDISTNVAMVLSKINKKPPLDLAKQIADLIKDSDKNIDEISIEKPGFINLKLKNEFWNGFILDVLNNSSYGSSTSGKKNSFLVEFVSANPTGPLHVGHSRGAILGDVISNLLSFNGHKVTKEYYVNDYGNQISHFTKSVYLRIKEILYDETFPINDNELYPGDYLIDIAKKIISKNKDLDFKNFESVSEKLKKLSIQESLKLIKINLKNLGIKHDNFASETDIINNHEVDEVIKNLKEKKYIYEGKIKAPEGESKENWVEREQLLFKSTDFGDDKDRALQKEDKSWTYFASDVAYHNTKLKRNFNILINILGADHAGYIKRITSVVEALSGEKNKLICKVSQLVKLIKDKKPFKMSKRKGDYITIEDLINEVGKDATRFIMLSRSSDAEIDFDFDKVKEKSKENPIYYVQYAYARISSVFRNTQNDINSNLKIKNSDFSFGNEEIKLFKKISEWPKCVEVSSEKLEPHRISVYLYELASEFHSYWNMGKEDISKRFIGQDNSIQMEKLVFLKSIANTLKTGMNI

SEQ ID NO: 160387 - protein, 282 aa, Unknown
  Bacterial polypetide isolated from the Sargasso Sea
MNIFENYLEKIINLLNNPKLNSSIQLPEKIAGINVDVPPQQFNCDISTNAAMILSKANKKPPLEIANELAELIKKNDEEIDTITTVKPGFINIKFKNSFWNKFIKEIIFQKEGFGVNKKSPKIKYLIEFVSANPTGPLHVGHCRGAILGDVLSNLLSFNGHKVSKEYYVNDYGNQIIHFSKSVYFRIREILNNEPFPTSNKDLYPGDYIINIAKNIINNNKNLKFDNFDQVSSKLTTLSVAESLKLIKLNLKNLGIVHDKFVSETELVKNNEVEKTIKKLKS

SEQ ID NO: 160388 - protein, 273 aa, Unknown
  Bacterial polypetide isolated from the Sargasso Sea
MNEIGLELSRNAKNDRGDFSSNIALKLASKLKSPPMKLAEQIIGSLETPAELELAECVKPGFINFYLSAEKKHSVLETILKHGRDFGSSCAPEKMRILLEFVSANPTGPLHVGHGRHAAFGDSLARLLKKAGHEVFTEYYLNDAGRQIDILCLSVILEMLRAEGLELKNISGLYKGIYIKEISQALIKEGFEINKKVLIPKLDGSADEIVDALILEIKNVTGSELFQKISDKTVSRMTKLLKDDLSDFRVKQDGFYSEKSLFSKGKIEEAWKS

SEQ ID NO: 160389 - protein, 264 aa, Unknown
  Bacterial polypetide isolated from the Sargasso Sea
MYGSSESIHDEFEISIQDNKENQYGDLASNVALVLAKPLKRNPKEIAEEIKGKFITDKEIVKVDVAGPGFINFFLSKESHGAILRDISIQKDKFGKFESNNKKVLIEYVSSNPTGPLHVGHGRGAVFGSVLSRLLKEAGFQVDEEYYVNDFGRQMNILSVSLWIRYAQIFDKNIKMLNNGYQGDYLIVIAQHLKKLRSDELFDDDDEIKSLLEYENEEAEKYTDEVIDSIKSKLNDEFSYVRDFALREILELIKEDLLEFGVDH

SEQ ID NO: 160390 - protein, 518 aa, Unknown
  Bacterial polypetide isolated from the Sargasso Sea
MVVAEEIINSIHVSDELERTEFVKPGFINFYLSAEKKHGVLEEITSKGKAFGSSCVSEKKKILLEFVSANPTGPLHVGHGRHAAFGDSLARLLRKSGHEVFTEYYLNDAGRQIDILCASVMFELLLLEGQKLGQVDGLYKGSYIKEIAGGLREEGVAINKKISLTKASGSDDEIVDALILEFKDVAGDELFQMVLEKTVLQMTKLLKDDLSDFRVRQDGFYSEKSLFSEGRIEEACGIIKKNGNAYERDGALWLESTKYGDDKDRVVIREDGRSTYFASDIAYHHHKKVRGFDLLINVLGSDHHGYVSRLEAGLASTGNKISDLEVILMQFVTLYRGKKKIQMSTRSGNFVPMRDLYSEVGVDAARFFYVSRSHDQHLDFDLELATKQNNKNPVYYIQYANARIKSVIKENKKRGYLFDEALGRSNLGKLKLSIEEDIISLLGKYPETILKSSNSREVNKIANYLKSLSQLFHSYYGSTKFVSDEDGLRNARLLLLKCVSTVIEDGLDILGVSAPTKM

SEQ ID NO: 160391 - protein, 478 aa, Unknown
  Bacterial polypetide isolated from the Sargasso Sea
IQKDKFGKFESNNKKVLIEYVSSNPTGPLHVGHGRGAVFGSVLSRLLKEAGFQVDEEYYVNDFGRQMNILSVSLWIRYAQIFDKNIKMLNNGYQGDYLIAIAQNLKKLRSDELFDDDDEIKSLLEYENEEAEKHTDEVIDRIKSKLNDEFSYVRDFALREILELIKEDLLEFGVDHNNWFSESTLYKSEPHDLSKVDQSIDELSSKGFVYEKEGAIWFKSSELGDDKDRVLKRGNGEFTYFASDVAYHLDKYDRGYDRIINIWGSDHHGYLPRVKAAMEASEKNVEKLEVVFIQFANLIRAGKKVTMSTRSGEFITLKELIEEVTSEAARFFYINRKADQHLDFDLDLAKEQSKDNPLYYIQYAHARICSVLRKSKVQEEELTTSELGLLDSNKEIEIQKILKQYPPLIERAALASEPHLICYYLKDLASIFHSYYNTEKFIVEDQKLMNSRLFLLSGVKQVIYNGLTVLGINAPHEM

SEQ ID NO: 160392 - protein, 569 aa, Unknown
  Bacterial polypetide isolated from the Sargasso Sea
MILDKLNNKLVEVVKNTAKEKSVEISEEILNQVHFEINDEESHGDYSTSCALKLAKTFSMNPREVAESLVEHLALPSIKSLAVEGAGFINVFLTSSEKSLLLKEIVRLDSQWGKNEKHKGQILVEFVSSNPTGPLHVGHGRGAILGMALSNLLENSGYQVTKEYYVNDAGRQISILTSSILIDAYVENLNINGMYEGSYIHELAQEFLKDHGKVDIALKSEELSDDKEKALDQISEYFQTNHADKWEAAKNFSVANILGTIKQELRSFDIVHDNWFHESSLGSIQDSNSDLSKSLSVIERAGHTFSRDDAIWFKTTEFQDDKDRVLLRENGEPTYYLTDVGYHKNKIDRGYDLCINIFGADHHGYITRLTAAFDVMKSKKQEIEFMLYQLVNLYEDGNKRAMSTRKGEFYSLEELRKELGPDVIKFFFLEKKSDHPMDFDINLAKDESKNNPYFYSQYAHVRCCSILTKKSFDPDIQVDDKEIEKNFDIVNKIINFPHFLERYTDERSPHSLVHYIKDLSAAFHAFYEQNPVINDEEKIENSRLLLTLATRVVLANSFKILNVKPLEKM

SEQ ID NO: 160393 - protein, 144 aa, Unknown
  Bacterial polypetide isolated from the Sargasso Sea
MDKNVLSIINEKYSTTISDDLKNGHLTSNVCMVAASILNLNPKDLAKELEEKLKKLNKFQEIKVAGPGFINISLNRKDFISILDEINNNKEKFGESNLGNGNKIQIEFVSANPTGPLHVGHGRGAAYGDALARILTKTGSIVEK

SEQ ID NO: 160394 - protein, 577 aa, Unknown
  Bacterial polypetide isolated from the Sargasso Sea
MNIFDIYLDKINFIVNKGKKSNQIIVPENISGINVDIPPDKFDADISTNVAMVLAKPNNKNPLEIAEIITKLLIQEDDQIDKADTVKPGFINIKLKKSFWNNFLKNTINEGIKYGTNKKNVKKKYLIEFVSANPTGPLHVGHSRGAILGDVLSNLLKFNNHEVVKEYYVNDYGNQIVNFTKSVYHRIREIKFNEKFPTDNEDLYPGDYLIEIAKNIIKKNKNIPFDSYESSSEILSKKSIEESLVIIKSNLKNLGVQHDNFVSETLLVENNEVDDVVKDLKNKNFVFVGKIKAPEGEDNSNWVERDQLLFKSTDFGDDKDRALQKSDNTWTYFASDVAYHNNKLKRKFDFLINILGADHAGYIKRITSVVEAISGKKNKLVCKVSQLVKLIKDGKPFKMSKRKGDYITVEDLISEVGRDATRFIMLNRSNDAELEFDFEKVKEKSKDNPLYYVQYCYARISSVFRNISKKVSDDVIINEYNFNYSKEEIEILKKISQWPKCVEISSNKLEPHRVPVYLYELAQQFHHYWNLGKEDETKRFISKDKTISEDKIAILKGVSIVIKSGMDILGVSTPERM

SEQ ID NO: 160395 - protein, 573 aa, Unknown
  Bacterial polypetide isolated from the Sargasso Sea
MNIFDIYLNKIKNIVTNNSANLKIPQNLSGINVDTAPAKFKADLSTNVCMVLSSLNKLPPTEIYKQLNLDDLKNDKDIENIEFVKPGFVNIKFVKKFWNTFLTKMLNDQKYGASLKNDKKNYLLEFVSANPTGPLHVGHCRGAIYGDALCNLLKFCDHKVTKEYYVNDHGNQIKNFSLSVYFRIKEKLYNEEYPKGENLYPGDYIIEIAEQIISKNSIKNYENYEKISDELSKLSVVASLEIIKKNLNSLGVVHDNFVSENNIINSKEVDEAIDNLKKNNLVFKGKIEAPEGEDKSKWVEREQLLFKSTNYGDDKDRALTKSDNSWTYFAGDIAYHNNKLKRNFDEYINILGADHAGYIKRINSVVDALSNKKKNLICKVTQLVKLIKDGKPFKMSKRKGDYIIVDDLVNEVGKDATRFIMLSRSNDVQLEFDFEKVKEKSKDNPLYYVQYCYARICSVFKNADEKIENDLTEVEKNYEFNDEEIKIINKISEWPKCVEVSSQKLEPHRIPIYLYQLSALFHSYWNMGKDNESMRFLDKSKKLNKNKAVLLNSVLKTIGTGMKILDVETPETM

SEQ ID NO: 160396 - protein, 510 aa, Unknown
  Bacterial polypetide isolated from the Sargasso Sea
MLLIYIRRLVNNFIKDLSDFLFDFTDFLESNKFISPINKKQISIDYSSNNKQGDLATNFYLIVKRKIINENFNIEKELNDRIKSIGFIDHFVVSKNGFINFFLKDKFVLRSLKEIYSKNFLNYINYGAGKKINVEFVSANPTGPLHIAHIRGAVFGDVLSSLYTKTGFDVTREYYVNDAGSQIDKLSNSLLKRYLQLFDKKIELEEDEYPGEYLIDIAKKIKNEDSDKWLNFQQEETIQHFKNFALKNILLSIKSDLELINIRFDKFTHETEIEKSKIINELFLILDEKKLLYEGILEKPKGDDSDWEPREQLLFRSSKLLDNEDRALKKSNGEWTYFANDAAYHLDKCKRNFDRLVNIWGFDHIGYIPRMYSLIKAIKDDETYLKILTCQIVSLIQNKHKIKMSKRSGNFVTLANVHSKVGKDPIRYYMISTKNETAIDFDLDAVVEKNKDNKVFYCQYAHARASSVINKANELGIKIKNDYNFSEIKNLSYEEIKLIKKLICYPLFVV

SEQ ID NO: 160397 - protein, 543 aa, Unknown
  Bacterial polypetide isolated from the Sargasso Sea
VDLPPSQFKAHISTNVAMVLSKINKSNPNDLAKKIEVELLKIDKDIEKIEIVKPGFINITFKNIFWNKFIQNVINQKLEYGSNLTAKKKSFFLEFVSANPTGPLHVGHCRGAVSGDVLANILKFNKHKVHKEYYVNDYGNQIINFTKSVYYRIKEQTDNELFPKDNEDLYPGDYIIQIAKNIINDNKGLDFKNFEKISDKLTILAVNESIKIIKSNLKNIGIVHDKFQSEREIVNNNEVQKTVDKLIKKQFVYKGKIKAPEGEDKKNWVEREQLLFKSTDFGDDKDRALQKSDNSWTYFAGDVAYHENKLNRKYDTYINILGADHAGYIKRITASVEALSGEKNKLVCKVSQLVKLIKDGKPFKMSKRKGDYITVEDLIDEVGKDATRFIMLNRSSDAEIDFDFDKVKEKSKDNPLYYVQYCYARICSVFRHIGKEIDKDIKVDNYNFNFSSEDIDIYKKISEWPKCIEISSKKLEPHRVPTYLYELSSLFHSYWNMGKDDKSKRFISEDKEISDEKLVLLKSVSNVIKCGMNLVGASTPEKM

SEQ ID NO: 160398 - protein, 373 aa, Unknown
  Bacterial polypetide isolated from the Sargasso Sea
KSKDKLVPQSSEFFELVKKAKDSEEGLNEAISWIKDEEGQNLKIIKDSALRNILSVIKLDLKEFGVNHNSWFHESSLYKKEGSKNSKIEQAIETLQNNDFIYEEDGAIWFKSTEFGDDKDRVVRRANEDPTYFASDIAYHLDKYERKYDRVINIWGSDHHGYLPRVKASVSALNQDEKKLEVVFIQFANLLRSGEKVSMSTRGGEFIELIDLIEEVGSDAARFFYINRKGDQHLDFDLDLAKEQSKDNPLFYIQYAHARVCSVMQKLNKNQKLDINLAKKNLNLLIGEKEIDLQKQLAMFPEIIERSASKLEPHTICYYLKDLASIFHSYYNDEKIITDDENLLQSKLLLINSVRQVIKNGLGVLGIQAPESM

SEQ ID NO: 160399 - protein, 427 aa, Unknown
  Bacterial polypetide isolated from the Sargasso Sea
TANVEIVSANPTGPLTVGHGRQAVLGDTIANILEWHNYKVTREYYYNDAGRQMRILGESVAARYFNLIGKNFTFPEDGYKGEYIISIAKEIKNIHGEGLDTNSPVFRKEAEKAIFNDIKKTLNSIGINHDVFSNEQTYYDNGSIDTLVEKLTNKNLIYKSDGAVWFKATDLGLEKDRVYYKSSGEATYRLPDTAYHQHKLDRSFDLVVDIFGADHADAYPDVLAALNALGLNTDPIKVLIHQFVTLLKSGEKVKMSTRKANFVTLDQLINEVGVDVVRYFFIMRSMNSHLNFDLDLAADQSEKNPVYYIQYAHARISNIINNGKVNNLSINGKFDTSLLINKSEISLIKSLNDFPEVMVKVLDNLDPQIIATYLHNIASEFHKFYAKCRVMTDDIELTKSRLHLVKSVKVVLGNGLKILGIQAPERM

SEQ ID NO: 160400 - protein, 410 aa, Unknown
  Bacterial polypetide isolated from the Sargasso Sea
AVVGSCLANILSFSGYNVTREYYVNDAGTQIDLYVKSILYNIYSKFNLEFEKPEEGYQGEFIENISNEIINEFNIAKNLDLLTNRENFYLQVKKTSLENTILKIENDLKDLGVEYDKWFYESSLFNDATNKVLSILESKKLIYEKEGAKWFMSSKFFTDQDVVIERSEDGGHTYFFTDISYHYDKFQNRRFDKVINIFGADHHSHVNRLKSAVSAMDINVEKLNILLTQIVHFKNQDKIEKFSKRSGNIYSIRDLIDIVGSDSIRFNFLNRTLDSQQEFDLDLAVKQSNENPVYYVQYAYARLCSIINSADMDFKNPDLSLLKTKYEEKLIDDIDFFEDVIVHSVENLETHNITKFSLDLAKDLQIFYENCRVLSDNKELTNSRLSLVLSCKIVLSNLLNLIGVNAPERM

SEQ ID NO: 160401 - protein, 359 aa, Unknown
  Bacterial polypetide isolated from the Sargasso Sea
NVTKEYYINDAGTQIDTLANSTIIRIKEIFDSKSEENYPDDFYPGEYLIDIAKKIIDKYGTSILESDNHFSTIKDECVNLLLENIKEDLGKLSINQDIFVSEKELITQGKIDQTIEELKNMNLIYEGILDKPKGKQIEDWEPRKQLLFKSSEYGDEIDRPLQKSDGDWTYFANDIAYHYDKYLRGSTHLIDILGADHGGYIKRMSASIQALTKNKARFTAKLCQMVKLLSDGKELKMSKRSGDFITLSDLVEEVGSDSIRFMMMYRKNEAPLEFDFKKVTEQSKENPVFYVQYAHARISSVLNNLHSQNIKLNLENFSECNFSELNDDSEILLLKKILDYSNIINTSVSLYEPHRIAYY

SEQ ID NO: 160402 - protein, 174 aa, Unknown
  Bacterial polypetide isolated from the Sargasso Sea
MIELPSGININNLIDDIRIFSWQAADILLYYSKLLENKDHKINILKNNNEDDPVTLADLKVNELIIKRINEKYKNINWDILSEENVKISSEILDSKTDWIWVLDPLDGTKDFIQGTGNYAMHLALNFKEKPYIGFVLIPDKNQLWISDGKKTWCERRDGSKYETILLKNRNLNE

SEQ ID NO: 160403 - protein, 255 aa, Unknown
  Bacterial polypetide isolated from the Sargasso Sea
MIELPSGVDINNLIDDIRILSWQAADILLYYSKLLENSDDKRNILKNNNEEDPVTLADLKVNELIIKRINEKYKNINWDILSEENVKISSKIFDSKRDWIWVLDPLDGTKDFIQGTGNYAMHLALNFKQKPYIGFVLIPDKNQLWITDGKTTWCEKRDGTKCKPTLLNNKNLQEMTLVTSKNHGNQVLRNLIQKINFCKVQIMGSIGCKIASIVQGESDIYICLSLPGKSSPKDWDFAAPDSILKAVWWSNYKFR

SEQ ID NO: 160404 - protein, 219 aa, Unknown
  Bacterial polypetide isolated from the Sargasso Sea
MKKRILTGIRPTGKLHLGHYVGALENWIRLQDEYDCFFLIADYQALGDHIDEMENIKTAVRDVVLDWLSVGLNPEQSTFVVQSYVPEHAELAMLLSMLTPLGMLDRNPTLKSERERISNTSLSVGFYTYPVSQVADILLPKAHLVPVGEDQLPHIEMTREIARRFNNRYGDVFPEPDSLVGRVARLMGTDGQAKMSKSIGNVIYLSDEPETVTKKIMSM

SEQ ID NO: 160405 - protein, 42 aa, Unknown
  Bacterial polypetide isolated from the Sargasso Sea
MIKKNEKLAFSGVQPTGNLHIGNYLGAMKNFVNLQNKMSCIY

SEQ ID NO: 160406 - protein, 243 aa, Unknown
  Bacterial polypetide isolated from the Sargasso Sea
MIELPSGVDINNLIDDIRIFSWQAADILLYYSKLLENSDDKTSILKNNNEEDPVTLADLKVNELIIKRINEKYKNINWDILSEENVKISSNIFDSRSDWIWVLDPLDGTKDFIQGTGNYAMHLALNFKQKPYLGFVLIPDKNQLWISDGKKTWCEKRDGSKYEPILLKNRNLHEMTLVTSKNHGNEILKNLIQEINFCKVQVMGSIGCKIASIVQGESDIYICLSLPGKAHQKIGILLHQSLS

SEQ ID NO: 160407 - protein, 30 aa, Unknown
  Bacterial polypetide isolated from the Sargasso Sea
MAADILLYDAQVVPGWKRPASTFRNHPKCC

SEQ ID NO: 160408 - protein, 144 aa, Unknown
  Bacterial polypetide isolated from the Sargasso Sea
MIELPAGVDINNLIDDIRIFSWQAADILLYYSKLLENSNDKKIILKNNNEEDPVTLADLKVNELIIKRINEKYKNINWDILSEENVKISSKIFDSKTNWIWVLDPLDGTKDFIQGTGNYAMHLALNFKQKPYLGFVLIPNKNQL

SEQ ID NO: 160409 - protein, 87 aa, Unknown
  Bacterial polypetide isolated from the Sargasso Sea
AIKNFVSLQKEYECFFCVVDLHAITVWQDPKVLANKTREVTAAFIASGIDPNQNNILCSITSSSTCTTWMVVQLCCEDGMVKPYDAI

SEQ ID NO: 160410 - protein, 50 aa, Unknown
  Bacterial polypetide isolated from the Sargasso Sea
FLHFFIVDLHAITVPQEPSKLKSSTHEVTAAIIASGIDIDKSILFNQSSG

SEQ ID NO: 160411 - protein, 177 aa, Unknown
  Bacterial polypetide isolated from the Sargasso Sea
AQQRINARFGGKDTPVLKVPKPLILKEGARVMSLTDGRSKMSKSDPNEGSRITLLDPPELITKKIKRAKTDPERGLEFGNPDRPETDNLLGLYAILTGKGREQAATECAEMGWGQFKPLLAEATVSALEPIQARHRELMQDPTELDQVLKTGREKAETVANATLERVRDALGFSRPA

SEQ ID NO: 160412 - protein, 198 aa, Unknown
  Bacterial polypetide isolated from the Sargasso Sea
DILAYKATHVPVGEDQKQHLELCREMAAKFNNDFGIDFFPIVEPLIIGPATRVMSLKNGLNKMSKSAASDGSRISLTDSTDDISKKIRKAKTDNIEIPAEVQNLEGRPEVKNLVGIYAALAGCSVDKVLEIFGGGGHAVFKKELEALVIGTLTPIREEMKKLLADSSFIDQTLKEGATRAKEMARPIIEDVHKIVGFL

SEQ ID NO: 160413 - protein, 231 aa, Unknown
  Bacterial polypetide isolated from the Sargasso Sea
MIKLPSGLDINNLIDDIRIFSWQAADILLYYSKLLEDSDDKKNILKNDNEDDPVTLADLKVNEIIIKRINEKYKNINWDILSEENVKTSNTFFTKNDWVWVLDPLDGTKDFIQRTGNYAMHLALNFKQKPCIGFVLIPDKNQLWITDGKKTWCEKRDGTQYKPNLLNKKNLQEMTLVTSKNHGNEILKNLIQKINFRKVEIMGSIGCKIASIVRGDSDIYICLSFAGKAHQ

SEQ ID NO: 160414 - protein, 180 aa, Unknown
  Bacterial polypetide isolated from the Sargasso Sea
MKKRILTGITTTGIPHIGNYVGAIRPALSMVGDSDESFFFLADYHSIIKNNDPTDILNSVKSIALAWLSCGLDPNKSYFYKQSDVPEIMELSWILNCVTAKGLMNRAHAYKSATSLNDNDPDKGITMGLFSYPVLMAADILMFDSTHVPVGLDQVQHLEMTRDIAARFNHLYKSVLTLPE

SEQ ID NO: 160415 - protein, 43 aa, Unknown
  Bacterial polypetide isolated from the Sargasso Sea
MSKLPSGLDINNLIDDIRIFSWQAADILLYYSKLLEDSDDKKK

SEQ ID NO: 160416 - protein, 28 aa, Unknown
  Bacterial polypetide isolated from the Sargasso Sea
IFSGVQPTGNLHLGNYFGSNQKFCKTQQ

SEQ ID NO: 160417 - protein, 134 aa, Unknown
  Bacterial polypetide isolated from the Sargasso Sea
MIELPSGVDINNLIDDIRIFSWQAADILLYYSKLLENSNDKKNILKNNNEDDPVTLADLKVNELIIKRINEKYKNINWDILSEENVKISSEIFDSKTDWIWVLDPLDGTKDFIQGTGNYAMHLALNFQQKPYLG

SEQ ID NO: 160418 - protein, 126 aa, Unknown
  Bacterial polypetide isolated from the Sargasso Sea
LCRDIAQKFNNEYKCTDFLRPPEPLIQKNFSRIMSLKDGTKKMSKSDIAEGSRINLTDTDDQIINKIKKAKTDNDALPGKEEELMGRPEAENLMGIYSSLSNQNITDTLNEFEGKNFSDLKNKLSD

SEQ ID NO: 160419 - protein, 179 aa, Unknown
  Bacterial polypetide isolated from the Sargasso Sea
LELCRDIAQKFNNDFKAEDFFKIPEPLIQKQFSRIMSLKDGTKKMSKSDLSDLSRINLTDEKDQIINKIKKAKTDPLPMPSSVEELEKRFEAKNLIGIYSSISGSTLEKTIEKFSGKNFSDFKENLFQVVVDKITPISTEIKKLLNEKDYLDKILLDGCKKADNIASKKIEKIHEIVGF

SEQ ID NO: 160420 - protein, 190 aa, Unknown
  Bacterial polypetide isolated from the Sargasso Sea
MIKLPSGVDINNLIDDIRIFSWQAADILLYYSKLLENSDDKINILKNNNEDDPVTLADLKVNEIIIKRINEKYKNINWDILSEENVKISSKNFDIDNDWIWILDPLDGTKDFIQKTGNYAMHLALNFKQKPYIGFVLIPDKNQLWITDGKKTWCEKRDGSKYEPVLLKSKNLKEMTLVTSKNHGNEILKN

SEQ ID NO: 160421 - protein, 135 aa, Unknown
  Bacterial polypetide isolated from the Sargasso Sea
MKNRILTGITTSGTPHLGNYFGAIRPSLELAKESNDSFFFLADYHSIIKVNNPQEVTSSIENIALAWLSSGLDTKNSYFYKQSDIREILELSWILHCVTAKGLMNRAHAYKALKENNDDDKGINMGLFSYPILMA

SEQ ID NO: 160422 - protein, 102 aa, Unknown
  Bacterial polypetide isolated from the Sargasso Sea
MRILSGIQPSGNLHIGNYFGMMKPVIDLQDENETFLFIANYHAMTTVHDSFILKNMTMSTALDFLACGLNPEKTAFYRQSDIPEVNELAWFLSILTPMGLLE

SEQ ID NO: 160423 - protein, 224 aa, Unknown
  Bacterial polypetide isolated from the Sargasso Sea
WQAADILLYYSKLLENSDDKSKILKNNSEEDPVTMADLKVNEIIITKINEKYKNIHWDILSEENVKSYSEKFDSKNDWLWVLDPLDGTKDFIQGTGNYAMHLALNFKQKPYLGFVLIPDKNELWIADGKKTWCENRDGSKYEPIFLNNKNLQEMTLVTSKNHGNEILQNLIKKINFNKVEIMGSIGCKIASIVRGDSDIYICLSLPGKSSPKDWDFAAPESIIK

SEQ ID NO: 160424 - protein, 150 aa, Unknown
  Bacterial polypetide isolated from the Sargasso Sea
GARVMSLTDARSKMSKSDPNEGSRITLLDPPEVINKKIKRAKTDPQRGLEFGNPDRPETDNLLGLYAILSGCGRDAAAEQCAEMGWGQFKPLLAEATVAALEPIQQRHRELMADPAELDRVLSSGRERAETVAQNTLERVRSAMGFAPRA

SEQ ID NO: 160425 - protein, 178 aa, Unknown
  Bacterial polypetide isolated from the Sargasso Sea
ELSRDIAQKFNLDFNVRDFLKAPEPLIQKNFSRIMSLKDGKNKMSKSDPSDSSRINLNDDKDQIVNKIKKAKTDNEVLPSDDKNLSNRPEVENLLGIYSSLIGQSLKNSINEFSGKNFSEFKKKLAEIVVEKISPISNEINKLQKDINYIDKILQEGGNRADLIASKKVGEMKKIIGF

SEQ ID NO: 160426 - protein, 287 aa, Unknown
  Bacterial polypetide isolated from the Sargasso Sea
IDDIRIFSWQAADILLYYSKLLENSDSKTNILKNNNIEDPVTLADLKVNELIIKRINEKYKNINWDILSEENVKISSKIFDSKSDWIWVLDPLDGTKDFIQGTGNYAMHLALNFKQKPYIGFVLIPDKNQLWITDGEKTWCEKRDGSKYKPIVLKSKNIQDMNLVTSKNHGNEILQNLIKKINFNKVEIMGSIGCKLASIVRGDSDIYICLSLPEKSSPKDWDFAAPESILKSAGGAITNIDNEELTYGKNCFEHGGIIVATNDKNTHGSICLEIKKIIEENEIYPL

SEQ ID NO: 160427 - protein, 68 aa, Unknown
  Bacterial polypetide isolated from the Sargasso Sea
MIKLPSGVDINNLIDDIRIFSWQAADILLYYSKLLENSDDKKNILKNNNEEDPVTLADLKVNEIIIKR

SEQ ID NO: 160428 - protein, 44 aa, Unknown
  Bacterial polypetide isolated from the Sargasso Sea
MPQKNIFSGVQPTGNLHLGNYIGAIKNFVKLQSENDSKCIYCVV

SEQ ID NO: 160429 - protein, 215 aa, Unknown
  Bacterial polypetide isolated from the Sargasso Sea
MSSDEFVVTPWNVEGDIDYDKLTKQFGTQKISPEILSKIKKITGEDHFMLRRGIFFSHRDLNVILDNFEKGKKFFLYTGRGPSGNTHIGHLVPWVFAKWLQEKFDVNIYFQLTDDEKFYTKSDLTLEDTSKFALENALDFIALGFNPEKTKIIINTRNIKKLYPIAAQVAKKINFSNTKAVFGFTNDTNVGMIFYTSLQSAPCFIEDLPVLFHLE

SEQ ID NO: 160430 - protein, 331 aa, Unknown
  Bacterial polypetide isolated from the Sargasso Sea
MKRILTGITPSGYPHLGNYIGAIKPSLELLDEKCESFLFIADLHALIKVSDPEQLNQLTHGIALAWMASGLDPQKTYFYRQSDVPEITELAWILSCVTEKGLLNRSHAYKAAIDINKESGKKDTDEGVSMGLFSYPLLMACDILTPNATHVPVGKDQKQHLEIARDIAEKFNKKYGEVFNIPEAVINEEKTVLGTDGRKMSKSYNNIVPILSSEKDLKKSIMTIVTNSQEPGEKKDCKDNTLFSIYSSFATDTQIEDMKNKYQDGIGWGDAKNIVFNDLNDLIKPIRDRYLELESNKSDTEEILQTNAKEVRNHTQPLIKEVKELVGIKKL

SEQ ID NO: 160431 - protein, 343 aa, Unknown
  Bacterial polypetide isolated from the Sargasso Sea
MQQHSSLSIPAQPDKVLTGDRATGPLHLGHYVGSLKQRIELQHRFEQTILVADMQGLTDNGHQPQKVAANILNVVADYLAVGIDPAKTTICLQSSIPALAELTMYYANLVSIARLERNPTVKNEINSKAFGRSIPAGFLTYPISQAADITAFKATLIPVGDDQLPMLEQTNEIVRKLNQIAQDEVLVECRPLLSHMTRLPSVDGKCKMSKTMGNTIMLGSSEQDISKAVKAMYTDPTHININDPGRVEGNVVFTYLDAFHPDLQYVAELKSHYRAGGLGDGKTKTILEECLQSLLAPIRERRALLLADKAQLVSILKEGTAKAREESDGVLRRVKTAFGLNLF

SEQ ID NO: 160432 - protein, 46 aa, Unknown
  Bacterial polypetide isolated from the Sargasso Sea
MSKKIFSGVQPTGNLHLGNFLGAIKNFVDLNKEKENECIFCVVDLH

SEQ ID NO: 160433 - protein, 321 aa, Unknown
  Bacterial polypetide isolated from the Sargasso Sea
MKKRILSGAQPSGQLHIGNYFGMIERMIQFQNESELFCFVANYHSMTSINDKVKLEANTREAFIDLLALGIDPDQSTFWVQSHVPEVTELAWILSNFASVGLMQRSTSYKDKIANGLKPNMGLFSYPILMASDILLFQSELVPVGKDQKQHLEMTRDIAIKFNNSFGEIFTIPEIEIDKSNDIVIGIDNQKMSKSYNNTIPIFADNDTIKDQVMNIVTDSAGLNEPKDKHTPLFKIYSLFLNDESKKELADRYDTPGLKYIEIKNELIETIISFFELQRSKREQLLANPDEVNQKMILGQNKAKKIAQKTLQEVKSATGLI

SEQ ID NO: 160434 - protein, 321 aa, Unknown
  Bacterial polypetide isolated from the Sargasso Sea
MKKRILSGAQPSGQLHIGNYFGMIERMIRFQSESDLFCFVANYHSMTSINDKAELEDNTRQAFIDLLALGIDPDKSTFWVQSHVPEVTELAWILSNFASVGLMQRSTSYKDKISNGLKPNMGLFSYPILMASDILLFQSEMVPVGKDQKQHLEMTRDIAIKFNNTFGEIFTIPDIEINESNDVVIGIDNQKMSKSYNNTIPIFASNDIIKDQVMNIVTDSAGLNDPKDQDTPLFKIYSLFLDDESKKELSDRYNTPGLKYMDIKKELIETIISFFESQKLKREKLVLDNDEVTKKMILGQTKAKEIAQKTLQEVKSATGLI

SEQ ID NO: 160435 - protein, 210 aa, Unknown
  Bacterial polypetide isolated from the Sargasso Sea
MKRVLSGIQPSGQLHLGNYFGMMSRMIKYQNENDLFCFIVNYHALTTIQDKKLLMKNTLNAAMDFMSLGLDPKKSTFWIQSDVPQVCESTWLLSNIVNLGLLDRSTSYKDKLAKGLTANLGLYSYPVLMASDILLFGGEIVPVGQDQKQHIEITRDIANRFNNIYGEIFVEPVPDIEKTSKLIPGIDGQKMSKSYGNTIPIFGEEKQIRK

SEQ ID NO: 160436 - protein, 118 aa, Unknown
  Bacterial polypetide isolated from the Sargasso Sea
MAKILTGIQSTGTPHLGNILGAIIPAIKMANESNEESYLFIANMHSLTQIKDKKSLSDNTFATAATWLAFDLDPKKSCFYRQSDVPEVTELAWYLSCFFPYQRLKLAHSFKDKAENLK

SEQ ID NO: 160437 - protein, 87 aa, Unknown
  Bacterial polypetide isolated from the Sargasso Sea
MAKILTGIQSTGSPHLGNILGAIIPAIKMANESNEESYLFIANMHSLTQIKDKKTLNENTLATAATWLAYDLDPKKSCFYRQSDVQR

SEQ ID NO: 160438 - protein, 111 aa, Unknown
  Bacterial polypetide isolated from the Sargasso Sea
MSKKIFSGVQPTGNLHLGNYIGAIKNFVDLQNQQGNECVYCVVDLHAITTKQDPKTLKSNIRETTAAFLASGIDPKKSIIFNQSLVSAHSEGSWLLGCIARMGWLNRMTQF

SEQ ID NO: 160439 - protein, 217 aa, Unknown
  Bacterial polypetide isolated from the Sargasso Sea
MAYKALKENNDDDKGINMGLFSYPILMAADILMFNSTHVPVGPDQLQHLEMTRDIANRFNHIFGNTFEIPEAIINDDESIPGIDGRKMSKSYNNVIPLLCDEKTLRKSIMKIVTNSLEPGEPKDYKTCNVFSLYTNFASDEEIAELKEEYNNGISWGDAKNKLFDKANDSLLPIRERYFELKEQKDLVKDHLSDGAKKVRPLAQGFIEEIRSKIGIS

SEQ ID NO: 160440 - protein, 86 aa, Unknown
  Bacterial polypetide isolated from the Sargasso Sea
MGRPRVLSGVQPTGALHLGNWLGAIRNWVDLQESHDTFVCVVDLHAITVPHDPAQLAEDTLNTAALYLGCGMDPDRCSIFIQSQVA

SEQ ID NO: 160441 - protein, 315 aa, Unknown
  Bacterial polypetide isolated from the Sargasso Sea
IKKITGEDHFMLRRGIFFSHRDLNVILDNFEKGKKFFLYTGRGPSGNTHIGHLVPWVFAKWLQEKFDVNIYFQLTDDEKFYTKSDLTLEDTSKFALENALDFIALGFNPEKTKIIINTKNIKRLYPIAAQVAKKINFSNTKAVFGFTNDTNVGMIFYTSLQSAPCFIEDLPVLIPLGVDQDPHFRITRDVAPKINKPKPALIHNIMIPALTGPGGKMSASDEKSTIYTTDSPEVVKKKINKYGFSGGQVDIEKHRELGGNPDIDVSFQYLRIFFEQDDEKLKKIYEDYKSGKMLTGELKAILIEKINSFLKIHQQ

SEQ ID NO: 160442 - protein, 156 aa, Unknown
  Bacterial polypetide isolated from the Sargasso Sea
MPNKNSLRVLSGIQPSGSLHLGNYFGMMSRMIKYQSQNELFCFIANYHALTTLPDSKSLSSNTFNAACDFLALGLDPEKSTFWVQSDVPEVAELTWILSSQVGVGLMDRATSYKDKISQGLKPNMGLYSYPILMAADILLFDTEIVPVGKDQKQHL

SEQ ID NO: 160443 - protein, 112 aa, Unknown
  Bacterial polypetide isolated from the Sargasso Sea
MSSFQKRVFSGVQPTGTLHLGNYLGAIKNFVELQKEFECIYCVVDQHAITVEQNPAELRSNTLEVLASFIAAGVDYKKQIIFQQSSVAEHSQLAWVFNCVSRIGWLNRMTQF

SEQ ID NO: 160444 - protein, 56 aa, Unknown
  Bacterial polypetide isolated from the Sargasso Sea
MTSFQKRVFSGVQPTGTLHLGNYLGAIKNFVELQKEFECIYCVVDQHAQSPLSKKS

SEQ ID NO: 160445 - protein, 96 aa, Unknown
  Bacterial polypetide isolated from the Sargasso Sea
MTKNRILSGVQPSGDLHLGNYLGAIKNFVSLQKDYECFFCVVDLHAITVWQDPKELAQKTREVTAAFIASGIDPNENILFAQSQVPTHSQLAWIFN

SEQ ID NO: 160446 - protein, 112 aa, Unknown
  Bacterial polypetide isolated from the Sargasso Sea
MEKPTKRILSGVQPSGDLHLGNYLGAIKNFVSLQKEYECFFCVVDLHAITVWQDPKVLANKTREVTAAFIASGIDPKKNNIFVQSQVPQHAQLGWLFNCVARMGWLNRMTQF

SEQ ID NO: 160447 - protein, 161 aa, Unknown
  Bacterial polypetide isolated from the Sargasso Sea
MTLKKRSLSGIKPTGTPHLGNYLGMIKPAIKMQETHQTFYFIADYHALTSIREPESLKEHSYDLTATFASLGMDFEEHAFFRQSDIPEVTELTWFLACLTSKGLMERAHAFKDAQSKGQDVNMGLFSYPILMAADILIYDSHVVPVGKDQKQHLEITRDLA

SEQ ID NO: 160448 - protein, 182 aa, Unknown
  Bacterial polypetide isolated from the Sargasso Sea
KQHLELTRDIAQKFNTDFKAQDFFKIPEPLIQEKFSRIMSLKDAKNKMSKSDPSDASRINLTDTDEQIHNKIKKAKTDTKSFPTNEKDLTKRPEIQNLIGIYSSLKSQKITNTLKEFQGKNFSNFKEKLSEVVTENISPISKEINKLKSDKGHILQVLKDGSEKAEIIASEKVKKIKEIIGF

SEQ ID NO: 160449 - protein, 89 aa, Unknown
  Bacterial polypetide isolated from the Sargasso Sea
MSKKIFSGVQPTGNLHLGNYIGAIKNFVDLQNNKENSCIFCVVDLHAITVMQDPIELKNNIRETAAAFIASGIDSKNSIIFNQSLVSAH

SEQ ID NO: 160450 - protein, 169 aa, Unknown
  Bacterial polypetide isolated from the Sargasso Sea
MTQKKRSLSGIKPTGTPHLGNYLGMIKPAIKMQETHQTFYFIADYHALTSIREPKSLKEHSYDLTATFASLGMDFEEHAFFRQSDIPEVTELTWFLACLTSKGLMERAHAFKDAQSKGQDVNMGLFSYPILMAADILIYDSHVVPVGKDQKQHLEITRDLALRFNHLYG

SEQ ID NO: 160451 - protein, 47 aa, Unknown
  Bacterial polypetide isolated from the Sargasso Sea
MSKKIFSGVQPTGNLHLGNYLGAIKNFVELNNDNKNECIFCVVDLHA

SEQ ID NO: 160452 - protein, 74 aa, Unknown
  Bacterial polypetide isolated from the Sargasso Sea
MTSFQKRVFSGVQPTGTLHLGNYLGAIKNFVELQKEFECIYCVVDQHAITVEQNPKELRSNTLEVLASFIAAGV

SEQ ID NO: 160453 - protein, 162 aa, Unknown
  Bacterial polypetide isolated from the Sargasso Sea
LKIPQPIIMKNGSKIMSLIDGSKKMSKSDPNEGSRINLLDPPEIITKKIKRAKSDSSIGIEFNNPERPESKNLLMIYSILSGKEISQCEKEFSETGWGTFKKLITEQLIESLEPIQKKYKLLINDPYQLNKILNEGKEKAEDLANQTLRRVKSKLGFFEMEK

SEQ ID NO: 160454 - protein, 192 aa, Unknown
  Bacterial polypetide isolated from the Sargasso Sea
DTSSNLYKNFWPADLHIIGKDILRFHAIYWPAFLMAADIPLPKRVFGHGWILSDEKKMSKSIGNILDPIEIIKSYGIDQLRYYLIKEVSLGNDGNISLENLKNCINNDLANNYGNLCQRVFAFLKKNCANKIPKSDNFSKADKNLTDRLKNDLKKLNELIDNQDLNNYIKQVIEYSFDSNKYFNDSKPWSLK

SEQ ID NO: 160455 - protein, 134 aa, Unknown
  Bacterial polypetide isolated from the Sargasso Sea
MDKVTKRILSGVQPSGDLHLGNYLGAIKNFVSLQKEFECFFCVVDLHAITVWQDPKLLKQKTREVAAAFIASGIDPEKNTLFVQSQVPQHAQLAWIFNCVARMGWLNRMTPFKDKAGKNSENVSVGLFSYPTLM

SEQ ID NO: 160456 - protein, 43 aa, Unknown
  Bacterial polypetide isolated from the Sargasso Sea
MSKKIFSGVQPTGNLHLGNYLGAIKNFVSLQKDKQNNCIYCVV

SEQ ID NO: 160457 - protein, 154 aa, Unknown
  Bacterial polypetide isolated from the Sargasso Sea
VIGGPAARVMSLRDGTKKMSKSDPSDLSRINMTDNSDMIANKIRKAKTDQYGLPSEPKGLEGRAEAQNLVAIYAALGDQSLEGVLSEIGGKQFSDFKPMLVERATEVLSPISSEMSRIMQDIPQLDKVLDDGALKAKSIAKPILQKTFDIIGMA

SEQ ID NO: 160458 - protein, 181 aa, Unknown
  Bacterial polypetide isolated from the Sargasso Sea
NILSLLGEIANKFNLDFKAKDFLKAPEPLIKQNFSRIMSLKDGTKKMSKSDPSDLSRINLNDTGDKIINKIKKAKTDALEMPTSQNDLGKRPEIENLFGIYSSLNNKKIDDSINEFKDRNFSEFKEKLSDLIVEKISPVSSEITKLQNDIKYLDDILKAGSEKANEISSKKVEDMKKIIGF

SEQ ID NO: 160459 - protein, 74 aa, Unknown
  Bacterial polypetide isolated from the Sargasso Sea
MSGVQPTGSIHLGNYFGAIRNYVKLQDDFDAFYCVVDLHAITAGGHDPASLEASTRTSAAIYLAAGVDPDKANV

SEQ ID NO: 160460 - protein, 161 aa, Unknown
  Bacterial polypetide isolated from the Sargasso Sea
MKKRILTGITTTGTPHIGNYIGAIRPAVELSSNNDESFFFLADYHSIIKNQDSLLIKDSVKDIALAWLSCGLDPKKTCFYRQSDVPEIIELTWILNCVTAKGLMNRAHAYKAATALNDSDPDKGITMGLFSYPILMAADILMFDSTHVPVGSDQIQHLKDK

SEQ ID NO: 160461 - protein, 147 aa, Unknown
  Bacterial polypetide isolated from the Sargasso Sea
MTETTFTPRVFSGIQPSGNLHLGNYLGALKRFVDWQDKDMETIYCMVDLHAITVWQDPNDLKKATRELCAGFIAAGLDPEKSILINQSQVPEHAQLAWVFNCVARMGWMQRMTQWKDKAGKNQQNASLGLLAYPSLMAADILIYHAT

SEQ ID NO: 160462 - protein, 118 aa, Unknown
  Bacterial polypetide isolated from the Sargasso Sea
MEKPTKRILSGVQPSGDLHLGNYLGAIKNFVSLQHEYECFFCVVDLHAITVWQDPSTLAQKTREVTAAFIASGIDPKKNTLFVQSPVPQHSQLAWGFSCIARMGWFKRMTHFKDKLEK

SEQ ID NO: 160463 - protein, 96 aa, Unknown
  Bacterial polypetide isolated from the Sargasso Sea
MAVKKIFSGVQPTGNLHLGNYIGAIKNFVDLQNDNNECIFCVVDLHAVTVKQDPEVLKQNIRETAATFIASGIDPKKSIIFNQSSVSAHAEGSWLL

SEQ ID NO: 160464 - protein, 31 aa, Unknown
  Bacterial polypetide isolated from the Sargasso Sea
MKKKIFSGVQPTGNLHLGNYLGAIKNFVALQ

SEQ ID NO: 160465 - protein, 94 aa, Unknown
  Bacterial polypetide isolated from the Sargasso Sea
MPQKNIFSGVQPTGNLHLGNYIGAIKNFVKLQSENDSKCIYCVVDLHAITTKQDPQKLKENILETTAVFLASGIDPSKSIIFNQSMVPAHSEGT

SEQ ID NO: 160466 - protein, 232 aa, Unknown
  Bacterial polypetide isolated from the Sargasso Sea
MARILTGVQSTGTPHLGNILGAIIPAIELSKKHSDSFLFIADLHSLTQIKNSTELKQNTYSTAATWLSFGLNPKKTVFYKQSDIPITTELAWILSSYFPYQRLTLAHSFKDKSKDLKNVNAALFTYPMLMAADILLYDANYVPVGKDQMQHLEITRNVASKFNNLHGDTLIIPEAIVNEDTKLIIGTDGQKMSKSKNNIINIFLPNNKLKKQIMSIKTDSLSVESPKKSRYM

SEQ ID NO: 160467 - protein, 90 aa, Unknown
  Bacterial polypetide isolated from the Sargasso Sea
MSNAMQSEPTGKFKKRVFSGVQPSGGLTLGNYLGAIKRFVQMQNDDYETIYCVVDLHAITVWQDPKMLRQNIRELAASFIASGLNPNKSI

SEQ ID NO: 160468 - protein, 162 aa, Unknown
  Bacterial polypetide isolated from the Sargasso Sea
DFFPVTEPVIGGPAARVMSLRDGTKKMSKSDPSDLSRINMTDNSDMIANKIRKAKTDQYGLPSEPKGLEGRAEAENLVSIYAALGDDSVEGVLSEIGGKQFSDFKPMLVERAVEVLSPISSEMGRIMQDIPQLDKVLDDGASKARLIAEPILQKTYDIIGMV

SEQ ID NO: 160469 - protein, 146 aa, Unknown
  Bacterial polypetide isolated from the Sargasso Sea
MKKRILTGITTTGTPHIGNYIGAIRPAVELSSNNDESFFFLADYHSIIKNQNSLSIKESVKDIALAWLSCGLDPKKTCFYRQSDVPEIMELTWILNCVTAKGLMNRAHAYKAATALNDNDLDKGITMGLFSYPVLMAADILMFDST

SEQ ID NO: 160470 - protein, 163 aa, Unknown
  Bacterial polypetide isolated from the Sargasso Sea
MAKILTGIQSTGTPHLGNILGAIIPAVDMANSTNDESYLFIANMHSLTQIKDEKILKENTFSTAATWLAFGLDPEKTCFYRQSDVPEVTELAWYLSCFFPYQRLKLAHSFKDKSDNLKDVNSGLFSYPMLMSADILLYDANIVPVGKDQQQHLEMTRDVASRI

SEQ ID NO: 160471 - protein, 139 aa, Unknown
  Bacterial polypetide isolated from the Sargasso Sea
MKNRILTGITTSGTPHLGNYFGAIKPSLELAKESSDSFFFLADYHSIIKVNNPQEVTSSIENIALAWLSSGLDTKSSYFYKQSDIREILELSWILHCVTAKGLMNRAHAYKALKENNDDDKGINMGLFSYPILMAADIL

SEQ ID NO: 160472 - protein, 109 aa, Unknown
  Bacterial polypetide isolated from the Sargasso Sea
MSKKIFSGVQPTGNLHLGNYLGAIKNFTKLQNDIENSCIFCVVDLHSITVHQDPKQLRKNVRETVATFIACGIDPSKSIIFNQSSVPAHYEGAWILGCISRMGMVNRRH

SEQ ID NO: 160473 - protein, 102 aa, Unknown
  Bacterial polypetide isolated from the Sargasso Sea
MNNSKNKIVFSGVQPSGDLHIGNYLGAIKNFISMQHEYDCLFCVVDLHAITVKQDPNELKNNTYEVVATYIASGIDPKKSIIFNQSHVSSHTELAWILNCVC

SEQ ID NO: 160474 - protein, 266 aa, Unknown
  Bacterial polypetide isolated from the Sargasso Sea
NQYSYELTAIFAALGMDFDNHAFFLQSDIPEVTELTWILSCITPKGLMERAHAFKDALSNNQEINMGLYCYPILMACDILIYDSNFVPVGKDQRQHLEITRDLAIRFNHLYGESFVIPEAIIQKNVAIIPGIDGRKMSKSYTNVIPLFSSEKIFRKSIMKIKTDSKSVNEPKDPKECNVFSLYQSFANKEEKNDLTKLYLKGGIGYGDAKQLCFEKLNAVLKEPRDIYNEIINDKIKLRGILEAGRDKARPIAKKVNARIRDKVGI

SEQ ID NO: 160475 - protein, 82 aa, Unknown
  Bacterial polypetide isolated from the Sargasso Sea
MKRIFSGIQPSGNLQLGNYLGAIRNWAKMQNDYECIFCVVDLHAITLPQDPLTMRNATREVAAGVIAGGVNPETCIIFNQSQ

SEQ ID NO: 160476 - protein, 170 aa, Unknown
  Bacterial polypetide isolated from the Sargasso Sea
KFNLDFNKPNFLKVPNPLIQKKFARIMSLKDGTKKMSKSDPSDLSRINLTDSEDEIINKIRKAKTDTESLPDNEIDLSKRPEAENLLGIYSSLTNQSLQNSINEFSGKNFSDFKKNLTDLIVAKIIPISNEINKLKKEKNFIDNVLSEGSVKADKISSNKVKEIKKIIGF

SEQ ID NO: 160477 - protein, 67 aa, Unknown
  Bacterial polypetide isolated from the Sargasso Sea
MAKFRHKPRVFSGVQPTGEIHLGNYLGALKNFVNLQDENFETIYCLVDLHAITVWQDPNELRNSTRE

SEQ ID NO: 160478 - protein, 34 aa, Unknown
  Bacterial polypetide isolated from the Sargasso Sea
MTKKIFSGVQPTGNLHLGNYLGAIKNFVELNNDK

SEQ ID NO: 160479 - protein, 188 aa, Unknown
  Bacterial polypetide isolated from the Sargasso Sea
MARILTGVQSTGTPHLGNVLGAIKPAVKMANESNNESFLFIADLHSLTQIKNPKELKKNTYSTAAAWLACGLDIEKTVFYKQSDVAIATELAWILSCHFPYQRLTLAHSFKDKSDRLKDVNAGIFTYPMLMAADILLYDAEFVPVGKDQQQHLEMTRDVASRFNNLYGETFVLPSPKIDNETKYVIGT

SEQ ID NO: 160480 - protein, 260 aa, Unknown
  Bacterial polypetide isolated from the Sargasso Sea
LDPKKSCFYLQSMIPEISELTILMSMLCSVPRLQRIPTLKEKISDLNLNENYSLGLLSYPVLMSCDILIFNASKVPVGEDQLSHVELSRELARKFNSTYKEVFKEPEPLISSHSRLVGIDGQSKMSKSLNNCIYLVDSKKDVEKKVMKMFTDPNRTSADVPGKVEGNPVFIYHDIFNNNKEELEDFKDRYKKGKIGDVEVKKSLSKHINAFLEPIREKRSEVVKNKDEILDIIFEGSKTAREVTKINLEIIKEAMSLKFD

SEQ ID NO: 160481 - protein, 201 aa, Unknown
  Bacterial polypetide isolated from the Sargasso Sea
MAKILTGIQSTGTPHLGNILGAIIPAIKMANESNEESYLFIANMHSLTQIKDKKTLNDNTFATAATWLAFDLDPKKSCFYRQSDVPEVTELAWYLSCFFPYQRLKLAHSFKDKAENLKDINSGLFSYPMLMSADILIYDANIVPVGKDQLQHLEMTRDVAARFNNLMGETFIIPEAKIQDDSNYVTGTDGQKMSKSKGNTI

SEQ ID NO: 160482 - protein, 58 aa, Unknown
  Bacterial polypetide isolated from the Sargasso Sea
MSKKIFSGVQPTGNLHLGNYIGAIKNFVDLQNSQENNCIFCVVDLHAITVMQDPIELK

SEQ ID NO: 160483 - protein, 80 aa, Unknown
  Bacterial polypetide isolated from the Sargasso Sea
MEKPTKRILSGVQPSGDLHLGNYLGAIKNFVSLQKEYECFFCVVDLHAITVWQDPKVLANKTREETAAFIASGIDPNQNN

SEQ ID NO: 160484 - protein, 54 aa, Unknown
  Bacterial polypetide isolated from the Sargasso Sea
MNNTKNKIVFSGVQPSGGLHIGNYLGAIKNFIKMQHEYDCLFCVVDLHAITVKQ

SEQ ID NO: 160485 - protein, 261 aa, Unknown
  Bacterial polypetide isolated from the Sargasso Sea
DLTATFASLGMDFEEHAFFRQSDIPEVTELTWFLACLTSKGFMERAHAFKDAQSKGQDVNMGLFSYPILMAADILIYDSHVVPVGKDQKQHLEITRDLALRFNHLYGETLVVPEAIIEDQVAVIPGLDGQKMSKSYNNVIPLFAPEKQLRKAIMKIETDSKTVEEVKDPESCNVFQLFQCFADQTAQQDLAEQYRAGGMGYGTAKQICFEAIRDELKDASEHYRQIREDHAHLEGILEGGKDRARKVARDVVDRVRNKVGL

SEQ ID NO: 160486 - protein, 167 aa, Unknown
  Bacterial polypetide isolated from the Sargasso Sea
LDYEAPNFLKVPEPLIQKKFSRIMSLKDGTKKMSKSDPSDLSRINMTDTKDQIVNKIKKAKTDPHLLPSTDKDFQKRPELENLLGIYSSMKSQSLLESVNEFSGKNFSDLKEKLTEIIVENISPISNEINKLQKDSKFIDNVLYEGAQKAEEIANKKVKEIKKIIGF

SEQ ID NO: 160487 - protein, 223 aa, Unknown
  Bacterial polypetide isolated from the Sargasso Sea
FKEKVGKDKEKASIGLYSYPILMSADILLYDASHVPVGEDQKQHLEICRDIAQKFNNDFGVDDFFKVPEPLIQNEFARIMSLKDGTKKMSKSELSDLSRINLTDSKDEIINKIKKAKTDPLPLPSVIKELEKRPEAKNLLGIYSSLTNSTLENTIEIFGGKNFSEFKEKLSQVLIEKIDPISIEIKKLVNEKEFLDKILLEGNNKAENIASKKIKKMQEIIGF

SEQ ID NO: 160488 - protein, 199 aa, Unknown
  Bacterial polypetide isolated from the Sargasso Sea
NYPILMAADILMFNADEVPVGQDQKQHLEMTRDIANRFNHHYGEVFTIPEAVISDETGILPGIDGQKMSKSYDNTIPAFIDTTKLKKLVNKIKTNSLEPGEPKDTEGCTVFSLYKAFASTEQILSMQEAYKNGISWGEAKNQLHVLLEEFISPYREEYLRISKDRGYVEQTLKEGAEKAMQVSSPILESVRKKVGIKGF

SEQ ID NO: 160489 - protein, 172 aa, Unknown
  Bacterial polypetide isolated from the Sargasso Sea
HKNLIWDYEVPNFLKVPEPLIQKKFARIMSLKDGTKKMSKSDPSDLSRINMTDTKDQIINKIKKAKTDTDLLPSTDKDFQKRPELENLLGIYSSMKSQSLLESINEFSGKNFSNLKENLTDIIVEKITPISNEINKLKKDSKFIDDVLYEGAQKAEEIASKKVNEIKKIIGF

SEQ ID NO: 160490 - protein, 274 aa, Unknown
  Bacterial polypetide isolated from the Sargasso Sea
FFLADYHSIIKVNNPQEVTSSIENIALAWLSSGLDTKSSYFYKQSDIREILELSWILHCVTAKGLMNRAHAYKALKENNDDDKGINMGLFSYPILMAADILMFNSTHVPVGPDQLQHLEMTRDIANRFNHIFGVTFEIPEAIINDDESIPGIDGRKMSKSYNNVIPLLCDEKTLKKSIMKIITNSLEPGEPKDHQTCNVFNLYQNFASDEEIAEFKEEYENGISWGDAKNKLFYKANDSLLPIRERYFELKEQKDLVKDYLSDGAKKVRPLAQE

SEQ ID NO: 160491 - protein, 65 aa, Unknown
  Bacterial polypetide isolated from the Sargasso Sea
MGKKIFSGVQPTGNLHLGNYIGAIKNFVDLQNQKDNECVYCVVDLHAITTNQDPQILKSNIRETT

SEQ ID NO: 160492 - protein, 187 aa, Unknown
  Bacterial polypetide isolated from the Sargasso Sea
MKNRILTGITTSGTPHLGNYFGAIRPSLELAKESTDSFFFLADYHSIIKVNNPQEVTSSIENIALAWLSSGLDTKSSYFYKQSDIREILELSWILHCVTAKGLMNRAHAYKALKENNDDDKGINMGLFSYPILMAADILMFNSTHVPVGPDQLQHLEMTRDIANRFNHIFGNTFEFQRQLLMMMSQF

SEQ ID NO: 160493 - protein, 298 aa, Unknown
  Bacterial polypetide isolated from the Sargasso Sea
GNYLGMIKPAIQMQQTHETFYFIADYHALTSTHDPNQLRENAYDLTAIFAALGMDFENHAFFRQSDIPEVTELTWILSCITPKGLMERAHAFKDAISKKQEVNMGLFSYPVLMACDILIYDSNFVPVGQDQRQHLEITRDLAIRFNHLFGEVFVIPEAIIQKDVSTIPGLDGRKMSKSYGNVVPLMAPEKQFRKAIMKITTDSKTVEEPKDPDTCNVFSLYKCFSTETDQKELASRYRSGGMGYGEAKQLCFEALNAELREPRENYQNIRKDIPQLNGILESGRDKAHAVARQVTERV

SEQ ID NO: 160494 - protein, 152 aa, Unknown
  Bacterial polypetide isolated from the Sargasso Sea
IKKDFSRIMSLKDGLKKMSKSDPSDLSRINLTDTKDEIINKIKKAKTDSFSLPNEEHKLKDRPEAENLLGIYSSVLNQTLDKTLDEFGGKNFSDLKSQLAEVLSSKISPISNEIKKLVNDRNYLDKVLVEGANKAEEIAGKKIKEMKKIIGF

SEQ ID NO: 160495 - protein, 79 aa, Unknown
  Bacterial polypetide isolated from the Sargasso Sea
MSKKIFSGVQPTGNLHLGNYIGAIKNFVNLQRDQSNECIYCVVDLHAITSKQDPKILKENIRETTAVFLASGLDPKKSI

SEQ ID NO: 160496 - protein, 49 aa, Unknown
  Bacterial polypetide isolated from the Sargasso Sea
MGKKIFSGVQPTGNLHLGNYLGAIKNFVKLNNEDQNECIFCIVDLHAIT

SEQ ID NO: 160497 - protein, 55 aa, Unknown
  Bacterial polypetide isolated from the Sargasso Sea
MHKKRVFSGVQPTGNLHIGNYLGALKNFVDLQNKFECVYCIVDLHAITNRQDPKV

SEQ ID NO: 160498 - protein, 112 aa, Unknown
  Bacterial polypetide isolated from the Sargasso Sea
MQKPTKRILSGVQPSGDLHLGNYLGAIKNFVSLQKEYECFFCVVDLHAITVWQDPKVLANKTREVTAAFIASGIDPNQNNIFVQSQVPQHAQLGWLFNCVARMGWLNRMTQF

SEQ ID NO: 160499 - protein, 143 aa, Unknown
  Bacterial polypetide isolated from the Sargasso Sea
SLKDGLKKMSKSDPSDLSRINLTDSEDEIINKIKKAKTDSFPIPNEDQKLINRPEALNLLGIYSSISNQNLNKTLDEFGGKNFSDLKVKLAEILSSKISPISNEIKKLISDKQYLDKLLLEGANKAEAIAGKKIKEMKKIIGF

SEQ ID NO: 160500 - protein, 89 aa, Unknown
  Bacterial polypetide isolated from the Sargasso Sea
MSKKKLVFSGVQPTGNLHLGNSLGALKNFVSLQKEMECIYCVVDLHAITPFQKPDELQNNVLETVASFIAPGLDPSNRKIFNQSSVPGP

SEQ ID NO: 160501 - protein, 193 aa, Unknown
  Bacterial polypetide isolated from the Sargasso Sea
ATHVPVGADQKQHLELSRDIAQKFNNDFKCENFFPLPEPLIPKNVSRIMSLRDGTKKMSKSEESDFSRINLKDSADEIKKKIKKAKSDSEPIPDNLKKLEKKPEALNLVSIYSEISNNNLEKVLNEMSGKEYSFLKSKLTDLLISEITPVGIEIKKLMEDKSHLKKIMKKGTEKANIIAEENLKIIREKVGLI

SEQ ID NO: 160502 - protein, 94 aa, Unknown
  Bacterial polypetide isolated from the Sargasso Sea
MNKKIFSGVQPTGNLHLGNYLGAIKNFVELQNDKKNECVYCVVDLHSITVKQDAKILKKNIRETVATFIASGLNPDKSIIFNQSAVSAHAEAAW

SEQ ID NO: 160503 - protein, 179 aa, Unknown
  Bacterial polypetide isolated from the Sargasso Sea
MKRILTGITPSGYPHLGNYVGAIKPSLDLAKEDNKSFLFIADLHAIIKISDAKQLKELTKGIALAWLASGLDPEKTYFYRQSDIPEVSELAWILSCVAEKGLLNRSHAYKAATDLNKENGKKDVEEGISAGLFSYPILMASDILCPNATHVPVGKDQQQHLEITRDIAEKFNKKFGNIF

SEQ ID NO: 160504 - protein, 267 aa, Unknown
  Bacterial polypetide isolated from the Sargasso Sea
MAKILTGIQSTGTPHLGNILGAIIPAIKMANESNEESYLFIANMHSLTQIKNKEILENNTFTTAAAWLAFDLDPNKSCFYRQSDIPEVTELAWYLSCFFPYQRLKLAHSFKDKSENLKDVNSGLFSYPMLMSADILIYDANIVPVGKDQLQHLEMTRDVAARFNNLMGDTFIIPEAKIQDNSNYVTGTDGQKMSKSKNNIIDIFLDDKSLKKQIMKIQTKSLSVDEQKDPDDCNVFKLYKIIAEEENIKNLASRYRKGGIGYGEIKG

SEQ ID NO: 160505 - protein, 187 aa, Unknown
  Bacterial polypetide isolated from the Sargasso Sea
KQHLELARDIAQQRINARFSKDKNILKIPQPIIMKNGSKIMSLIDGSKKMSKSDPNEGSRINLLDPPEIITKKIKRAKSDSSIGIEFNNPERPESKNLLMIYSILSGKEISQCENEFSETGWGTFKKFITEQLIESLEPIQKKYKLLINDPYQLNKILDEGKEKAEDLANQTLKRVKSKLGFFAMEK

SEQ ID NO: 160506 - protein, 49 aa, Unknown
  Bacterial polypetide isolated from the Sargasso Sea
MTKPIVFSGAQPSGELTIGNYMGALRQWVSMQDDYHCIYCIVDHMASPF

SEQ ID NO: 160507 - protein, 143 aa, Unknown
  Bacterial polypetide isolated from the Sargasso Sea
MKNRILTGITTSGTPHLGNYFGAIRPSLELAKESTDSFFFLADYHSIIKVNNPQEVTSSIENIALAWLSSGLDTKSSYFYKQFDIREILELSWILHCVTAKGLMNRAHAYKALKENNDDDKGINMGLFSYPILMAADILMFNS

SEQ ID NO: 160508 - protein, 176 aa, Unknown
  Bacterial polypetide isolated from the Sargasso Sea
QQRINARFSKDKNILKIPQPIIMKNGSKIMSLIDGSKKMSKSDPNEGSRINLLDPPEIITKKIKRAKSDSSIGIEFNNPERPESKNLLMIYSILSGKEISQCENEFLETGWGTFKKLITEQLIESLEPIQKKYKLLINDPYQLNKILNEGKEKAEDLANQTLKRVKSKLGFFEMEK

SEQ ID NO: 160509 - protein, 196 aa, Unknown
  Bacterial polypetide isolated from the Sargasso Sea
LLYDATHVPVGDDQKQHLELCRDIAQKFNNDFEIENFLQVPEPLIQKEFSRIMSLKDGSKKMSKSELSDLSRINLSDDRDKIINKIKKAKTDPLPMPEDIKELDGRLEARNLLGIYSSINNSSLQNSVEIFAGKNFSDFKEKLAEELVNKIEPIGKEIKKLLSDKKYLDEILLDGVEKANLIASKKIERIKEIVGF

SEQ ID NO: 160510 - protein, 73 aa, Unknown
  Bacterial polypetide isolated from the Sargasso Sea
MSKKIFSGVQPTGNLHLGNYIGAIKNFVDLQNDKDNKCIFCVVDLHAITVMQDPTELKNNIRETAAAFIASGI

SEQ ID NO: 160511 - protein, 41 aa, Unknown
  Bacterial polypetide isolated from the Sargasso Sea
MSSRKLVFSGVQPTGNLHLGNYLGALKNFVSLQKNTECIYC

SEQ ID NO: 160512 - protein, 287 aa, Unknown
  Bacterial polypetide isolated from the Sargasso Sea
MTVYQDPNNLNHQIKSLAAILFAAGLDPAKCSVFIQSHVKEHSELCWLLNCITPIGWLERMTQYKDKSSGQESVSTGLLDYPVLMASDILLYDAVEVPVGDDQKQHVELARDICQRFNNIYGDTFALPEPVIPNIGARVMGFDNPLIKMSKSYSHIRGHAIRIIDTEDEILRTVKRAVTDSGNEIKFSDNPDNAGVNNLLGIYKVITGESTKDVESNFINSRGYGDLKIKVAEVIIEELQPIRKRYRDLMENPDHLDKLLSDGAEKARSLAEKKMEIVKNKIGLVSR

SEQ ID NO: 160513 - protein, 79 aa, Unknown
  Bacterial polypetide isolated from the Sargasso Sea
MEKPTKRILSGVQPSGDLHLGNYLGAIKNFVSLQKEYECFFCVVDLHAITVWQDPKVLANKTREVTAAFIASGIDPNQN

SEQ ID NO: 160514 - protein, 53 aa, Unknown
  Bacterial polypetide isolated from the Sargasso Sea
MDKPNKRILSGVQPSGDLHLGNYLGAIKNFVTLQKEYECFFCVVDLHAITVWQ

SEQ ID NO: 160515 - protein, 133 aa, Unknown
  Bacterial polypetide isolated from the Sargasso Sea
RAVAAPFLAELREAVGLRSFVNQAAVPVVTKKKAAKAARFVSFREDDGSFRFRLLAPNGEQLLVSRKFSDGKLAGAATKDLQSGKALDIREEGTTFSVWLEGYCIADGPFFEEISSRDAAIAALRAALTPIED

SEQ ID NO: 160516 - protein, 175 aa, Unknown
  Bacterial polypetide isolated from the Sargasso Sea
RDIAQKFNLDFNVPDFLRAPEPLIQKNFSRIMSLKDGKNKMSKSDPSDLSRINLTDDKDQIVNKIKKAKTDNDPLPSDDKNLSNRPEVENLLGIYSSLTGQSLKNSINEFSGKNFSEFKKKLAEIVVEKISPISIEINKLQRDINYIDKILKEGGKRADLIASKKVREMKKIIGF

SEQ ID NO: 160517 - protein, 55 aa, Unknown
  Bacterial polypetide isolated from the Sargasso Sea
MSSFQKRVFSGVQPTGTLHLGNYLGAIKNFVELQKEFECIYCVVDQHAITVEQNP

SEQ ID NO: 160518 - protein, 53 aa, Unknown
  Bacterial polypetide isolated from the Sargasso Sea
MSKDTVFSGVQPTGDIHLGNYLGAIKQFLNFQNDSDSIFCIVDQHAITVFQEP

SEQ ID NO: 160519 - protein, 276 aa, Unknown
  Bacterial polypetide isolated from the Sargasso Sea
YHSIIKVNNPQEVTSSIENIALAWLSSGLDTKSSYFYKQSDIREILELSWILHCVTAKGLMNRAHAYKALKENNDDDKGINMGLFSYPILMAADILMFNSTHVPVGPDQLQHLEMTRDIASRFNHIFGDTFVVPDAIINDDESIPGIDGRKMSKSYNNVIPLLCDEKTLKKSIMKIITNSLEPGEPKDHESCNVFSLYQNFASDEEIAEFKEEYENGISWGDAKNKLFNKANDSLLPIRERYFELKEQKDLVNDHLSDGAKKVRPLAQEFIEEIRS

SEQ ID NO: 160520 - protein, 201 aa, Unknown
  Bacterial polypetide isolated from the Sargasso Sea
LFNYPILMAADILMFSADIVPVGQDQKQHIEMTRDIALRFNHHYGDLLTPPEAKISKLTGVLPGIDGRKMSKSYNNTIPIFADEGSLKKTIMKIKTNSLKPGVPKDITDCNIFAIFKSIANENDIKSFQQMYEEGIGWGDAKTYLFDNLSSFLSSYKKEYLKIIKDRDYVESVLKEGANKALEVSTPLIENIRNSVGIKGF

SEQ ID NO: 160521 - protein, 183 aa, Unknown
  Bacterial polypetide isolated from the Sargasso Sea
QKQHLELSRDIAQKFNLDYEAPNFLKVPEPLIQKKFSRIMSLKDGTKKMSKSDPSDLSRINMTDVKDQIVNKIKKAKTDTDLLPSTDKDFKKRPELENLLGIYSSMKSQSLLESINEFSGKNFSDLKKKLTEIIVEKITPISNEINKLQKDPKFIDDVLYEGAQKAEEIASKKVKEIKKIIGF

SEQ ID NO: 160522 - protein, 170 aa, Unknown
  Bacterial polypetide isolated from the Sargasso Sea
MKKRILTGITTTGVPHIGNYIGAIKPALELAKDSDESFFFLADYHAIIKNQNSNEISDSVKDVALAWLSCGLNTDSSYFYRQSDVPEILELSWILNCVTAKGLMNRAHAYKAATALNKNDLDKGISMGLFSYPVLMAADILMFNSTHVPVGSDQIQHLEMTRDIAIRFNH

SEQ ID NO: 160523 - protein, 323 aa, Unknown
  Bacterial polypetide isolated from the Sargasso Sea
MTQKKRSLSGIKPTGTPHLGNYLGMIKPAIKMQETHQTFYFIADYHALTSIREPESLKEHSYDLTATFASLGMDFEEHAFFRQSDIPEVTELTWFLACLTSKGLMERAHAFKDAQSKGQDVNMGLFSYPILMAADILIYDSHVVPVGKDQKQHLEITRDLALRFNHLYGETLVVPEAIIEDQVAVIPGLDGQKMSKSYNNVIPLFAPEKQLRKAIMKIETDSKTVEEVKDPESCNVFQLFQCFADQSAQQDLAEQYRAGGMGYGTAKQICFEAIRDELKDASEHYHQIRGDHAHLEGILEGGKDKARKVARDVVDRVRNKVGL

SEQ ID NO: 160524 - protein, 370 aa, Unknown
  Bacterial polypetide isolated from the Sargasso Sea
MSSDEFVVTPWNVEGNIDYEKLIKQFGTQKISPEILSKMQQITGEDHFMLRRGIFFSHRDLNLILDNFEKGKKFFLYTGRGPSGNTHIGHLVPWVFAKWLQEKFDVNIYFQLTDDEKFFTKSDLTLEDTNNFALENALDFIALGFNPEKTKIIINTQNIKKLYPIAAQVAKKINFSNTKAVFGFTNDTNVGMIFYTSLQSAPCFIEDLPVLIPLGVDQDPHFRITRDIAPKINKPKPALIHNIMIPSLTGPGGKMSASDQKSTIYTTDSPEEVKKKINKYGFSGGQVDIEKHRELGGNPDIDVSFQYLRIFFEPDDEKLKKIYDDYKSGKMLTGELKAILIEKINSFLKIHQQKREEAKKSLSKFLLSDE

SEQ ID NO: 160525 - protein, 330 aa, Unknown
  Bacterial polypetide isolated from the Sargasso Sea
MKKRILTGITTTGTPHIGNYIGAIRPALEMAKDSSESFFFLADYHSIIKNNNSEDIKNSVKNIALAWLACGLNPNKTIFYKQSDVPEILELTWILNCVTAKGLMNRAHAYKAAISLNKEDPDKGINMGLFSYPVLMSADILMFDSTHVPVGSDQIQHLEMTRDIAQRFNHLYKPILTIPEPMIQDSENTVPGLDGRKMSKSYNNVIPLLGSEKELRKSVMKIVTNSLEPGEPKDINDCTVFALYEYFASEGQIDDLKKSYKDGISWGDAKGILFELINEELNPIRAKFEELKNNNDYLNDVLHEGAKKARVLAQEKILAIKEIIGISKIN

SEQ ID NO: 160526 - protein, 325 aa, Unknown
  Bacterial polypetide isolated from the Sargasso Sea
MKNRILTGITTSGTPHLGNYFGAIRPSLELAKESTDSFFFLADYHSIIKVNNPQEVTSSIENIALAWLSSGLDTKSSYFYKQSDIREILELSWILHCVTAKGLMNRAHAYKALKENNDDDKGINMGLFSYPILMAADILMFNSTHVPVGPDQLQHLEMTRDIANRFNHIFGNTFEIPEAIINDDESIPGIDGRKMSKSYNNVIPLLCDEKTLKKSIMKIVTNSLEPGEPKDHKTCNVFNLYTNFASDEEIAEFKKEYNNGISWGDAKNKLFDKANDSLLPIRERYFELKEQKNLVKDHLSDGAKKVRPLAQEFIEEIRSKNRYIL

SEQ ID NO: 160527 - protein, 394 aa, Unknown
  Bacterial polypetide isolated from the Sargasso Sea
MSGMRPSGRLHLGHYHGVLKNWVKLQHEYDCFFCIVDWHALTTEYAECGQLSQHVMDMAVDWLAAGVSPSSATLFVQSQVPEHAELHLLLSMICPLSWLERVPSYKEQQEHQGSKDLSTYGFLGYPLLQAADILLYRAGQVPVGADQLPHIEFAREVARRFNHLYGSEPDFERKAEAAIGKLGKKLGKLYSNLRKAYQEQGDAQALETARALLKEQTSITLGDQERLYGYLEGGGKVILSEPQPILAEFSRVPGLDGQKMAKSSGNAIFLRDSDAELEEKLRRMPTDPARVHRDDPGEPQRCPVWSLHQLYSSAEQLHWVIEGCRSASIGCLDCKSTLCSSLQAELAPLQQRAIDYEESPDLVRSILAEGAERARDEARETLAEVRMAMGLNYR

SEQ ID NO: 160528 - protein, 324 aa, Unknown
  Bacterial polypetide isolated from the Sargasso Sea
MKNRILTGITTSGTPHLGNYFGAIRPSLELAKESTDSFFFLADYHSIIKVNNPQEVTSSIENIALAWLSSGLDTKSSYFYKQSDIREILELSWILHCVTAKGLMNRAHAYKALKENNDDDKGINMGLFSYPILMAADILMFNSTHVPVGPDQLQHLEMTRDIANRFNHIFGNTFEIPEAIINDDESIPGIDGRKMSKSYNNVIPLLCDEKTLRKSIMKIVTNSLEPGEPKDYKTCNVFSLYTNFASDEEIAELKEEYNNGISWGDAKNKLFDKANDSLLPIRERYFELKEQKDLVKDHLSDGAKKVRPLAKEFIEEIRSKIGIS

SEQ ID NO: 160529 - protein, 163 aa, Unknown
  Bacterial polypetide isolated from the Sargasso Sea
ILKIPQPIIMKNGSKIMSLIDGSKKMSKSDPNEGSRINLLDTPEKITKKIKRAKSDSSIGIEFNNPERPESKNLLMIYSILSGKEISQCENEFSETGWGTFKKLITEQLIESLEPIQKKYKLLINDPYQLNKILDEGKEKAEDLANQTLKRVKSKLGFFEMEQ

SEQ ID NO: 160530 - protein, 324 aa, Unknown
  Bacterial polypetide isolated from the Sargasso Sea
MKNRILTGITTSGTPHLGNYFGAIRPSLELAKDSKDSFFFLADYHSIIKVNNPQEVTSSIENIALAWLSSGLDTKSSYFYKQSDIREILELSWILHCVTAKGLMNRAHAYKALKENNDDDKGINMGLFSYPILMAADILMFNSTHVPVGPDQLQHLEMTRDIANRFNHIFGDTFEVPEAIINDDESIPGIDGRKMSKSYNNVIPLLCDEKTLKKSIMKIITNSLEPGEPKDHESCNVFSLYQNFASDEEIAEFKEEYENGISWGDAKNKLFNKANDSLLPIRERYFELKEQKDLVNDYLSDGAKKVRPLAQEFIEEIRSKIGIS

SEQ ID NO: 160531 - protein, 124 aa, Unknown
  Bacterial polypetide isolated from the Sargasso Sea
MKTVFSGIQPTGKVHLGNLLGAINNWVELSNEENKNYFCVVDLHSLTTHPNPETMEENIFETIKVLVASGINLKNSNIYIQSNVSEHVQLSWILSNFCQIGELQRMTQFKEKADQLGNHAGILT

SEQ ID NO: 160532 - protein, 279 aa, Unknown
  Bacterial polypetide isolated from the Sargasso Sea
MATILTGVQSTGTPHLGNLLGAIIPSIEMANRSSEESYLFIANLHSLTQIKDPEVLQKNTFSTAAAWLSFGLDTNKACFFKQSDVTEVTELAWYLSCFYPYQRLTLAHSFKDKSDNLKDINAGLFSYPMLMAADILIYDANIVPVGKDQLQHLEMTRDVASKFNNLMGDTLVVPEPKLQEASKYVIGTNGEKMSKSKNNTIDIFLPDKELRKQIMRIKTQSLSVEDRKDPEECNVFKIYSLIAPNEKTEELKQRYISGGFGYGEAKEILFNEIIEKFHK

SEQ ID NO: 160533 - protein, 336 aa, Unknown
  Bacterial polypetide isolated from the Sargasso Sea
MDKKKRILTGIRPTGALHLGHYVGALETWLEFQDSYESFFLIADYQALGDNFDDIDKITDSVRQVAIDWLSVGLDPNKSNFVIQSYVPEHAELTMLLSFVTPLGMLERNPTLKSEIDQLAVEKRTVGFFNYPMSQVADILLPRADLVPVGEDQAPHIEMTREVVRKFNRIFEPIFSEPGIKIGRVPRLKGTDGDNKMSKSKGNVIELRFSEDQVNKAVMSMYTDPNRLKATDPGTVEGNPVFEYHDAFNDDKEKVEDFKTRYREGKVGDVEVKKDLAIAINNFLRPIREKRDYYEKNPKLVEEALMAGTDNARKIADETMRMVRSAMKIDSYTSRW

SEQ ID NO: 160534 - protein, 74 aa, Unknown
  Bacterial polypetide isolated from the Sargasso Sea
MNKAVQSESAGKFKKRVFSGVQPSGGLTLGNYLGAIKRFVEMQNDNYETIYCVVDLHAITVWQNPSILRQNTRE

SEQ ID NO: 160535 - protein, 168 aa, Unknown
  Bacterial polypetide isolated from the Sargasso Sea
MKKRILTGITTTGTPHIGNYLGAIKPALDLVEPDNDSYFFLADYHALIKQNNPNEIEKSVKNVALAWLSSGLDPEISNFYRQSDIPEVHELTWILNCSASKGLLNRAHAYKSMTAENTQAGNDEDKAINMGLFSYPVLMASDILIFNATHVPVGPDQAQHMEMTRDIA

SEQ ID NO: 160536 - protein, 297 aa, Unknown
  Bacterial polypetide isolated from the Sargasso Sea
NEESFFFLADYHSIIKNQNSKLIQDSVRDVALAWLSCGLDPNKTYFYKQSDVPEILELTWILNCVTAKGLMNRAHAYKAATSINETDLDKGITMGLFSYPVLMSADILMFDSTHVPVGSDQIQHLEMTRDIAARFNHLYKSLFILPEPIINTQDKVVPGLDGRKMSKSYDNVIPLLGSEKKLKKSIMKIVTNSLEPGVAKDHTNCTVFELYQYFANANDIDEFKKAYEDGISWGEAKEKLFNIINSELLPIRAKYEELINDKDYLNDVLSEGAKKARILAIEKIKEVKEVIGLTKIS

SEQ ID NO: 160537 - protein, 216 aa, Unknown
  Bacterial polypetide isolated from the Sargasso Sea
MANKNKYRVLSGIQPSGSLHLGNYFGMMSRMIKYQSKNELFCFIANYHALTTLPDSKEISANTFNAACDFLALGLDPEKSTFWIQSDVPEVTELTWILSSQAGVGLMDRATSYKDKIAQGLKPNMGLYSYPILMAADILLFDTEIVPVGKDQKQHLEMTRDIATRFNNTFGEALVIPKPDIQEETKLIPGIDGQKMSKSYNNTIPIFASEKISEKE

SEQ ID NO: 160538 - protein, 323 aa, Unknown
  Bacterial polypetide isolated from the Sargasso Sea
MKTVFSGIQPTGKVHLGNFLGAINNWVEMSNNKNKNYFCVVDLHSLTTHPDPKTMEENILSTVKVLIAAGINLNNSTIYVQSKVPEHAQLSWVLSNFCQIGELQRMTQFKEKSSELGNHAGILTYPILMTSDILIHKANEVPVGDDQTQHLELTRNIAERFNNKYGDIFPVPEKTSGKVGARLMSLRHPENKMSKSADDINGTIYFDDTKDKIMKKFKSSVTDSEDEIRYDLESKIGISNLIDIYSSVKGISHKEVEKKFSSSKYGEFKIEVGEAVSNYLEPIFSKYDSLSDKEIMSLMDTNLNVAKSSAKKTMEEVNSLLGI

SEQ ID NO: 160539 - protein, 331 aa, Unknown
  Bacterial polypetide isolated from the Sargasso Sea
MKRILTGITPSGYPHLGNYVGAIKPSLDLAKKDNESFLFIADLHAIIKISDAKQLKELTKGIALAWLASGLDPEKTYFYRQSDIPEVSELAWILSCVAEKGLLNRSHAYKAATDLNKENGKKDVEEGISAGLFSYPILMASDILCPNATHVPVGKDQQQHLEITRDIAEKFNKKFGNIFNIPEAVINEEKTVLGTDGRKMSKSYNNIIPLLSGEDELKKSVMKIITNSQEPGEKKEWEDNILSSIYSSFADEQSIKELQNKFSDGIGWGDAKKIVFEDLNKLLTPIREKHAELKSKENYLEEILQSNAKKVRAFTKPLLEEVKSSIGISKF

SEQ ID NO: 160540 - protein, 331 aa, Unknown
  Bacterial polypetide isolated from the Sargasso Sea
MKRILTGITPSGYPHLGNYIGAIKPSLDLLDEKCESFLFIADLHAVIKVSDPNKLEELSTAIAMAWLASGLDPNTTSFYRQSDVPEITELAWLLSCITEKGLLNRAHAYKAAVDQNNESGKKEMDEGISLGLFSYPLLMASDILTPNATHVPVGKDQQQHLEITRDIAEKFNSKYGKFFNVPEAVIQNEKTVLGTDGRKMSKSYNNIIPLLSNEKELRKSVMKIVTNSQEPGEKKEWKDNTLFAIYSSFASVEKQENMKNLFEDGIGWGDAKQKVFEDLNQMLLPIREKFMELSNNKKFIEEILKSGAEKVRLQTVPALKEVKKLVGISRL

SEQ ID NO: 160541 - protein, 370 aa, Unknown
  Bacterial polypetide isolated from the Sargasso Sea
MSSDEFVVTPWNVEGDIDYDKLTKQFGTQKISPEILSKIKKITGEDHFMLRRGIFFSHRDLNVILDNFQKGKKFFLYTGRGPSGNTHIGHLVPWVFAKWLQEKFDVNIYFQLTDDEKFYTKSDLTLEDTSKFALENALDFIALGFNPEKTKIIINTRNIKKLYPIAAQVAKKINFSNTKAVFGFTNDTNVGMIFYTSLQSAPCFIEDLPVLIPLGVDQDPHFRITRDVAPKIGKPKPALIHNIMIPALTGPGGKMSASDEKSTIYTTDSPEVVKKKINKYGFSGGQVDIEKHRELGGNPDIDVSFQYLRIFFEQDDEKLKKIYEDYKSGKMLTGELKAILIEKINSFLKIHQQKREEAKKNLSKFLLSDE

SEQ ID NO: 160542 - protein, 331 aa, Unknown
  Bacterial polypetide isolated from the Sargasso Sea
MKRILTGITPSGYPHLGNYIGAIKPSLELLDEKCESFLFIADLHALIKVSDPEQLNQLTHGIALAWMASGLDPEKTYFYRQSDVPEITELAWILSCVTEKGLLNRAHAYKAATDVNKESGKKDTDEGISMGLFSYPLLMACDILTPNATHVPVGKDQKQHLEIARDIAEKFNKKYGEVFNIPEAVINEEKTVLGTDGRKMSKSYNNIVPILSSEKDLKKSIMSIVTNSQEPGEKKDWKDNTLFSIYSSFAADNQIKDMKHKYEDGIGWGDAKNIVFNDLNDLIKPIRDKYLELESRKSDTEEILQTNAKEVRTHTQSLIKKVKEFVGIKKL

SEQ ID NO: 160543 - protein, 322 aa, Unknown
  Bacterial polypetide isolated from the Sargasso Sea
MAKILTGVQSTGTPHLGNLLGAIIPSIKMANKSNEESYFFIANLHSLTQIKDAKVLQDNTFSTAAAWLAFGLDTNKACFFRQSDVSEVTELAWHLSCFFPYQRLTLAHSFKDKSDNLKDVNAGLFSYPMLMAADILIYDANIVPVGKDQLQHLEITRDVAARFNNQMGETLVIPEPKLQEESKYVIGTDGEKMSKSKGNTIDIFLSDEKLKKQIMKIQTQSLSIEDKKNPNECNVYNIYSLIASKEKKEALKKRYTTGGLGYGEAKEILFNEILERFQKERDLYNTYHSNKSKVEGVLKDGAKKARKQAQIVLKRVRSKVGF

SEQ ID NO: 160544 - protein, 52 aa, Unknown
  Bacterial polypetide isolated from the Sargasso Sea
MDKPTKRILSGVQPSGDLHLGNYLGAIKNFVTLQKEYECFFCVVDLHAITVG

SEQ ID NO: 160545 - protein, 291 aa, Unknown
  Bacterial polypetide isolated from the Sargasso Sea
QDESDLFCFVANYHSMTSINDKVKLEENTREAFIDLLALGIDPDQSTFWVQSHVPEVTELAWILSNFASVGLMQRSTSFKDKIANGLKPNMGLFSYPILMAADILLFQSEIVPVGKDQKQHLEMTRDIAIKFNNSFGEIFTIPEIEIDKSNDVVIGIDNQKMSKSYNNTIPIFADNDTIKDQVMNIVTDSAGLNEPKDKHTPLFRIYSLFLNDESKKELADRYDTPGLKYMDIKNELIETIISFFELQRSKREQLLANPDKVNQKMILGQNKAKKIAQKTLQEVKSATGLL

SEQ ID NO: 160546 - protein, 109 aa, Unknown
  Bacterial polypetide isolated from the Sargasso Sea
MKFTLDWLREHLDTSENLNTITDTLTNIGLEIESVEDKSEIFKNFTVAKVLKAEKHPDADKLKVCQVETISGNYQVVCGAPNAREGMLGIFAPENSYIPGTDLHLKKTK

SEQ ID NO: 160547 - protein, 152 aa, Unknown
  Bacterial polypetide isolated from the Sargasso Sea
MSDIKKIKDDYIAKLNTENNIEKVNNIKSELFGKNGIISNEFKKLGSISVEERKKLASDLNNIKDELQNKILIKIQEIETKEINLKLEKEKIDVTLPERNIEIGKIHPVSQVIDEISSIFSEIGFSVEEGPDVENEYNNFTALNTPDNHPAR

SEQ ID NO: 160548 - protein, 200 aa, Unknown
  Bacterial polypetide isolated from the Sargasso Sea
MKLTREWLKDHLKTNKTELQIIEKLNNIGLEVEKVEPVKNELSDFLIAKIIKAEKHPNADRLKLCHVDIGQNDLVKVVCGGPNAKDNLLTIYAPPGSVIPKNNMKLEISKIRGETSYGMLCSESELNISDESDGIIELNKKYKSQIGKSYFNESQDNVIELSITPNRPDCLGIRGIARDLSSAGFGKLIDNKIKKVKRSG

SEQ ID NO: 160549 - protein, 101 aa, Unknown
  Bacterial polypetide isolated from the Sargasso Sea
MSSNKDISPPKIIKDRGSIHPINNMKDSIMSLLVSFGFEIVDGPEVETEEFNFDMLNIKKTHPARQMHDTFYVEKKSNLLRTHTSPVQIRGMLEKKPPLAF

SEQ ID NO: 160550 - protein, 307 aa, Unknown
  Bacterial polypetide isolated from the Sargasso Sea
EYPGKFKSKNISIRRSELDLFAGCKITDKEVKMILDGLNIKHEKKKDFWKCTPPSFRPDLEREADLIEEIIRVYGYDNIPSAMNYSSSYLLERPDPEQSLEDLRNLFYAFGYQECQSNTLQSKHWTTIHGKKSIAMMNPLTEHMTHMRTDLLPGLLEALDFNIKNGSSDLYLFELGNIFLQEKKGFAGMKEIPMVCGIMHGNRVSLSAHDQAKPVTVFSVMGHIDRLCNVLGVNAPTYDPLEMKGYQKAFTVCMGKEEIGVLGTVDPDFIQNLGLEIDNPVHCFNLEVNKLVPLMQHEQKFSPINVY

SEQ ID NO: 160551 - protein, 317 aa, Unknown
  Bacterial polypetide isolated from the Sargasso Sea
MKFTIGWLKEHLDTKFKDSEIIEKLTDVGLEVESFEKVSSDLDNFKVAKIINAEQHPNADKLKVCDVDIGEQDTVKVVCGAPNAKKDLLTVYAGPGSVIPKNNMKLAVSKIRGVTSYGMLCSESELNLSDESDGITELKSNKYSDKVGKIFFKNNTEKVIDLSITPNRPDCLGVRGVARDLAAAGVGKLKHTSNIKIKNNGAQKIKVSITKEKNQGCTIFGSCLIKDVANKESPKWLKDKIESLGQKPISAIVDITNYVMLDLNRPLHAYDADKIDKEIIVRNSVKDETFEALDNKEYKLDNDMCVISDKSGVLGLG

SEQ ID NO: 160552 - protein, 222 aa, Unknown
  Bacterial polypetide isolated from the Sargasso Sea
FKNNDLIQEEVLNGAIFGNRKFGEWVYSGKDNDLNYYQARGKLNEALSCLNIKIDDKPTNSIDFLHPGRTAKLFIEGKDAGYFGEIHPKLILQKKALKKVYLFSLNVGILLGASTRKNKWIPIYRQYPTVPKIERDINFIFSKNYLISEITSEIRKTGKNLLEDVNLIDVFEDINLGDDFVSYTFRLSYRDKDKTLLDSDITSIHSNIVSKVEKRFNTKLRN

SEQ ID NO: 160553 - protein, 308 aa, Unknown
  Bacterial polypetide isolated from the Sargasso Sea
YELGISNEHDGIIRLDEKETIGRSFSEIYGLNDIVIEIGITPNRQDCLGVKGIARDLASAGMGELIERKISKEKGSFKSPIKIEIQDNKICSAFAGRYFRNVKNTESPEWLKNKLKSIGLRPISALVDITNFVMYDENRPLHVYDADKINGKIIVRAANDGESFLALDEKDYHLKNGMCVIADEKKVLGLGGIMGGESTGCSTETKNVLLESALFDEINTAKTGRNLSILSDARYRFERGIDPNSTLKGIDLATQLILEICGGECSEVELAGNIKENKNEVSTSSSYISRRLGFEVSDKELISILSSL

SEQ ID NO: 160554 - protein, 224 aa, Unknown
  Bacterial polypetide isolated from the Sargasso Sea
MKFTLSWLKDHLTTNAGLDEICDKLNMIGLEVEDVFDPSEIYKDFTICEISSIKKHPDADKLKICTLNTINGIQDVVCGANNVKEGMKAVFAPEGSYIPGLSMTLQATKIRGVKSSGMLLSERELSLSDEHDGILELDPKSQIGNNIYDQINKSDPVIEISITPNRSDALGVRGIARDLSAANIGKLKPLKATKIIGKYDIPKKIKINKDVENNIYASFRLIKI

SEQ ID NO: 160555 - protein, 126 aa, Unknown
  Bacterial polypetide isolated from the Sargasso Sea
RIENVLGFEIFLDNIPETRKKIREKKPQFVISDYQKVVRDFAFVIDEKYSSGEIINLVKKVDDKLIKHVKIFDVYQGDNITQGKKSIAFNVTLEPKDKTLSEKDIDQVSKKIISKVQEITGATLRS

SEQ ID NO: 160556 - protein, 278 aa, Unknown
  Bacterial polypetide isolated from the Sargasso Sea
EKLTFIGLEVESFESISSELDNFKVVKIVSAEQHPNADRLKVCEVDTGKKNTIKVVCGAPNAKKDLITIYASPGTVIPKNKMKLSISKIRGVTSYGMLCSESELNISNESDGIIELSSKKYQNKIGNKYFKNNSPKILDLSITPNRPDCLGVRGVARDLAAAGYGKLKKINHKKLKLDGSQDIKISIKKEKYQGCESFGSCLIKGIKNVESPQWLKNKIISLGQKPISAVVDITNYVMIDLNRPLHAYDADKIDKEIIVRNSKKGESFEALDNKKYIP

SEQ ID NO: 160557 - protein, 289 aa, Unknown
  Bacterial polypetide isolated from the Sargasso Sea
VLGVKGIARDLASAGMGELLERKISREKGSFKSPIKIEIQDNKICSAFAGRYFRNVKNIESPEWLKNKLKSIGLRPISALVDITNFVMYDENRPLHVYDADKIDGKIIVRSANDGESFLALDEKDYQLKNGMCVIADEKKVLGLGGIMGGESTGCSTETKNVLLESALFDEINTAKTGRNLSIQSDARYRFERGIDPNSTLKGIDLATQLILEICGGECSEVELAGNIKENKNEVSTSSSYISRRLGFEVSDKELISILSSLGIKTSQTGNVIKCSIPSWRQDIHGEAD

SEQ ID NO: 160558 - protein, 118 aa, Unknown
  Bacterial polypetide isolated from the Sargasso Sea
DTGLEVESIIDPKKRLGKLSVGEILRVEKHPNADKLKICEVKSSTGIINIVCGAPNVKSGMKVVVARPGDFIPGLDVHLKASKIRDIKSEGMMCSERELEICDEHDGIIELPSKTEVG

SEQ ID NO: 160559 - protein, 276 aa, Unknown
  Bacterial polypetide isolated from the Sargasso Sea
HVYASPGSIIPKNKMKLTVSKIRGVTSSGMLCSESELNLSNESEGITELKQAKYSDQIGKNFFQNKIEKVVDLSITPNRPDCLGVRGIARDLAAAGVGKLKKIQIKNIKKEGSQNIKISISKDKNQGCTIFGSCLIKGVKNKESPKWLKDKIESLGQKPISAIVDITNYVMFDLNRPLHAYDADKIDKEIIVRNSKKGETFEALDNKRYKLDNNMCVISDKSGVLGLGGIIGGTRSGTEFNTKNILLEAAYFIPRSIRKTSKLLNIDTDAKFRFER

SEQ ID NO: 160560 - protein, 240 aa, Unknown
  Bacterial polypetide isolated from the Sargasso Sea
HLDTSENLNTITDTLTNIGLEIESVEDKSEIFKNFTVAKVLKAEKHPNADKLKVCQVETINGNFQVVCGAPNARQGMLGIFAPENSYIPGTDLHLKKTKIRGVESCGMLVSEREMGISDEHDGIIEIKDNYKIGDFFSKIFTIDEPVIEINLTPNRSDCLSVRGIARDLSAAGIGKLKDINYKKSKESFKSPITWKKEFQNNNLCPGVAGRYFKNVKNVESPKWLQDRLTAIGLRPISAL

SEQ ID NO: 160561 - protein, 170 aa, Unknown
  Bacterial polypetide isolated from the Sargasso Sea
MKFTLSWLKDHLDTNEDLETIVDTLTNIGLEIESVEDKSKDFNDFTVAEVLKAEKHPDADRLKVCTVKSIDGTFQVVCGAPNAREGMKGIFAPENSFIPGTGVKLKKSKIRGVESCGMLVSEREMGISDEHDGIIEVDSKYSLGEKFIEIFNLDDPIIEINITPNRGDCL

SEQ ID NO: 160562 - protein, 311 aa, Unknown
  Bacterial polypetide isolated from the Sargasso Sea
MSGETKINRYCLNPINNIVDVTNYVMYEYGTPLHAFDADSLNGKIVVKNANKGSEFITLDGVSHKMKDHHLMITNGKENLCIAGVFGGENSGITNKTKNIFLECAYFDPTCIRKTAKDLGLNTDASFRFERGIDSSSLTDSIKRAALLIQELTKGKISMPLKCVGSKLDDFKTVNFNPNKARTLIGTDISDELIKQILNELEIDICSSENENWELNVPSYRVDVNRHADVVEEVLRIYGFNKIEIPNKLNTSIPSFAKPDLEKVKENISNMLVSKGYFEVLNNSLSKLKYLEFDNESSSAIHLLNPLSQDL

SEQ ID NO: 160563 - protein, 42 aa, Unknown
  Bacterial polypetide isolated from the Sargasso Sea
IDSENWTGFAAGLGVERFCMVRHQIDDIRKFYTNDIRFLEQF

SEQ ID NO: 160564 - protein, 299 aa, Unknown
  Bacterial polypetide isolated from the Sargasso Sea
FIVKIEKSKNQACTIFGSCLIKNIKNQESPEWLKKRILSLGLRPISAVVDITNYVMFDLNRPLHAYDADKINKGIIVRNSKKGENFKALDNKNYKLDDGMCIISDHEGVLGLGGIIGGTRSGTELNTKNILLESAFFDPEITRKTAKKLELNSDAKFRFERGIDPNSITKGLEKASEMIVKICGGEVSKFDIQSTKKVEIKKILFDSNLASKTIGIQIKTNEVIKILEGLGFKIKKKGKNLIVEVPSWRPDVFGQIDLVEEVIRIKGFDKIQSVEPDKKRLKPTLNFFQRHFHLAHRSV

SEQ ID NO: 160565 - protein, 137 aa, Unknown
  Bacterial polypetide isolated from the Sargasso Sea
MADIFTNLGLECESSNKTLNFDITPNRGDALSLSGLAREFSASQKNARFIQKSFNKVSFQNSKDYIGKVSNECCQNYHLLELREINKFKALPKEIVRLLEKADIPLIHPVVDIGNYVMLELGTPLHVFDRDKLTLPL

SEQ ID NO: 160566 - protein, 31 aa, Unknown
  Bacterial polypetide isolated from the Sargasso Sea
GLGVERFCMVRHQIDDIRRFYTNDLRFLKQF

SEQ ID NO: 160567 - protein, 305 aa, Unknown
  Bacterial polypetide isolated from the Sargasso Sea
VESVQDTGLAYKTFIVGQVLEEEKHPNADKLKLCKVDIGREKVDVVCGAPNVTKGMKVVYAPVGCVIPVNQMKIKAAKIRGVESYGMMCSEYELGISNEHDGIISLEQDTEVGSSYADTSGMNDILIEIGITPNRQDCLGVLGVARDLAAAGVGKLKNREFKTEKGSFESPIKIEIQDNDICPAFAGSYIKNVKNVASPDWLQKKLKSIGLRPISALVDITNYVMFDQNRPLHVYDADKVKGKIIVRAAQDGESFKALDEKTYNLKNGMCTISDEEKVLGLGGIMGGESTGCNLDTINVLLESAL

SEQ ID NO: 160568 - protein, 69 aa, Unknown
  Bacterial polypetide isolated from the Sargasso Sea
MVHPNVLKNVNVNTDKYQGYAFGIGIDRLGMLKYGINDLRAFFETDYRWLNHFGFDPLDVPSNYRGLSR

SEQ ID NO: 160569 - protein, 301 aa, Unknown
  Bacterial polypetide isolated from the Sargasso Sea
IPTTNVYIEKDLSINENIEKMRLSATSSLLSGRKDVVVVASVSCIYGIGNPDEFGKNVIKLKIGDRVELKKLLFSLVDILYERSEEDFKRGSFRIQGDTIDIYVAYDDFIYRIIFWGDEIESISKVDPLSGRKISDQDSIIIYPANLFVTNKEIIDLAIKEIEEDLLNQIKFFEAEGRFAEAKRIKERTEFDLQMIEEIGYCSGVENYSRYFDRRQSGMRPFCLLDYFPNDYLVFIDESHVTIPQVRAMWGGDRSRKTNLVDYGFRLPSALDNRPLNFEEFESMINQVVFVGATPSEYELN

SEQ ID NO: 160570 - protein, 249 aa, Unknown
  Bacterial polypetide isolated from the Sargasso Sea
APENSYIPGTDLHLKKTKIRGVESCGMLVSEREMGISDEHDGIIEVKDNYKIGDLFSKIFAIDEPVIEINLTPNRSDCLSVRGIARDLAAAGIGKLKDLNYKKSKESLKSPIKWKKEFQNNNLCPGVAGRYFKNVKNVESPKWLQDRLTAIGLRPISALVDITNYITFDLGRPLHVYDAEKISGNLTMRLANKNEECLALNEVNYTCDSDMIVISDDENKLHGIGGVMGGLDSGCSMETTKCFFRSCVI

SEQ ID NO: 160571 - protein, 203 aa, Unknown
  Bacterial polypetide isolated from the Sargasso Sea
NKKFGAWVNSGKDNDLNYYEARGKLKEALSSLNIKVDDKPTNSIDFLHPGRTAKLFIEGKDAGYFGEIHPKLILDKTALKKVYLFSINVANLLGASTRKNKWIPIYKQYPIVPKMERDINFIFSKEHLISEITSEIRKTGKNLLEDVNLIDVFKDINFGEDFISYTFRLSYRDKDKTLLDSDISSIHSNIVSKVEKRFNTKLR

SEQ ID NO: 160572 - protein, 268 aa, Unknown
  Bacterial polypetide isolated from the Sargasso Sea
VLAGIMGGLNSSVSEDTTEVFIEVANWVAEDVRQTSTRLGLRTDSSQRYEKSLDSHQCYKTLLRTLDLILNLNPKAKIVGKPQYDGEDLSLSKPRVIKTSFKNISNVLGHDVPSDKILAIFNSLEFKTKVEGDNVTVTLPSFRTTKDIEYEACLIEEVGRMIGYDNIVPVSPTSGIEATRFHPAKSMHRKIQDFLVFNAKALEVMTYPLLGKKLLDKANWNNFNEELVLVNSLSKDADRMRPSMIPHSLNTVAINSKNFDKFNFFELG

SEQ ID NO: 160573 - protein, 68 aa, Unknown
  Bacterial polypetide isolated from the Sargasso Sea
LVSWKDGDWLEILGCGMVDPNVFKKVKYKKGTQGFAFGVGVERLAMLRYNIDHIKNFYDNDLRFLRQF

SEQ ID NO: 160574 - protein, 202 aa, Unknown
  Bacterial polypetide isolated from the Sargasso Sea
MKVSQNWLKNLVEITSTPEDLSEKLSIGGFEVESLEDCSENVNGVVLGKVLSVLKHEGSDKLSICQVDIGASKNLQIICGARNIKPNIYVYVATVGAKLNAVDLTIKRSEIRGVMSEGMICSLQELGLEDTSEGIEIIDDDLALKHELGTPGSDLLQLNDFIYDLAITANRPDGMSVVGIAREISALLESTLNFPKLNHKYN

SEQ ID NO: 160575 - protein, 180 aa, Unknown
  Bacterial polypetide isolated from the Sargasso Sea
PKVIDLSITPNRPDCLGVRGIARDLAAAGVGSLKKIKDSKLNQNFDQDLKVTIKKEKKQGCTIFGSCLIRGVSNKESPQWLKDKIVSLGQKPISAIVDITNYVMIDLNRPLHAYDADKVSKEIIVRNSKKGETFEALDNKKYSLDDDMCVISDHSGVLGLGGVIGGTRSGTELDTKNILL

SEQ ID NO: 160576 - protein, 185 aa, Unknown
  Bacterial polypetide isolated from the Sargasso Sea
DAKSDAEMALGVLGVRKASLSVDKSAPDYFHPGRSGVLMQGRRKLASFGELHPNIASHFSLRGPVVGFELFLDDVPLAKAKGSARSLLQMSSFQPVNRDFAFVLDADVAASELLRAVKSAAGPLLSDIQLFDVYQGKGIEDGKKSLAVSITLTPQKATLTEEEIEKISEVVVAFAKKNCGATLRG

SEQ ID NO: 160577 - protein, 283 aa, Unknown
  Bacterial polypetide isolated from the Sargasso Sea
KILPHNFVELIDGSIKCLKGRKFQLYPDFPTSGVVDVTNYNDGKRGGRIKVRAKINQLNKNTLIITQIPYTTTSSSLIDSILKANEKGKIKIKKIEDNTASDVEILIHLPNGVSPDKTIDGLFAFTNCEVSISPLGCIIENNKPLFTGVSDMLIKSTMNTKELLKKELENKLKELNQLWHSSTLEKIFIERRIYRLIEDKDSWELVLEAIKDGLKPHLELLKQVVTQDDVIKLTEIRIKRISKYDIDKADKKIIEIENQIEETNYNLENLNDFAINYFKDLKL

SEQ ID NO: 160578 - protein, 243 aa, Unknown
  Bacterial polypetide isolated from the Sargasso Sea
YAPPGSIIPKNQMKLSVSKIRGVTSYGMLCSESELLLSNESDGIIDLKNNKYSNKIGEKYFKTTSEKVIDLSITPNRPDCLGVRGIARDLSAAGAGKLKINKKSNLKYRGNQNINVTIKKEKVQGCTIFGSCLIKGVTNKESPKWLKDKIKSLGQKPISAIVDITNYVMFDLNRPLHAYDADKIDNEIIVRSSSKGESFQALDNKKYILDNDMCVISDRSGVLGLGGIIGGTRSGTEYSTKNI

SEQ ID NO: 160579 - protein, 269 aa, Unknown
  Bacterial polypetide isolated from the Sargasso Sea
NNNFKEEIDTIKIVNPISSDLNVLRNSLYPNLIFYMEKNSNRGFDDQSLFEIGPVFKGKKPGEQITVVCGLKRQSGSDKQHRQMDVFEIKKDLVQTLMELGINKDEFKIEAKTPSYYHPGISGSIYSKRYNLLLGYFGELHPKITKKTFGFEVLLENIVEYKSRTNKVKESLTFSDYQKSDRDFAFVVDKHINAQNLIEVISDIDNSLIKDVKIFDVYEGENIPSGKKSIALKVTIQSDYKTLNENDLTDISNKIINSVEEKIGAKLRS

SEQ ID NO: 160580 - protein, 82 aa, Unknown
  Bacterial polypetide isolated from the Sargasso Sea
MIYTGGLETETDHRITKGTGWLEIMGCGMVDPKVLQNCNIDSEKYTGYAFGLGLERIAMLIYQIPDIRLFFENDVRFLNQFK

SEQ ID NO: 160581 - protein, 196 aa, Unknown
  Bacterial polypetide isolated from the Sargasso Sea
DVYNENWNVDNQPGAFFYFKGVLNKVLKKNTSKEWEEKNTRLDIFSEGLSYFIDDQPLLEFGFLKKQILKTFDIDQDVLYAEIDFEALSEVAKKNHIEYKEIPRFPNSRRDFALLLDTSVKFDSIKEIAFKTEKSILSTVELFDVYQGKNLPEGKKSYGVSFYFQDPRKTLTDKYVDKIMGKLQKQFEGKLGAQLR

SEQ ID NO: 160582 - protein, 293 aa, Unknown
  Bacterial polypetide isolated from the Sargasso Sea
VVRHLETDKTAIEIGDALTNLGLELESFTDYSSYSKFVVATIKDFKKHPNADRLNICKVDDGTNTYQVICGANNVKKGLKGIFAKDGMYIPGTQIHLKKGKIRGEISEGMLLSERELNLSDNHEGIIELLGNFENGTSAIEALKLNDPIFEIGITPNRGDCLGIRGVARDLSAKGFGKLKPLKFDKIEHLEFESPISWNIKNDDNSCEYVVSRYFKNVSNAKSPDWLQKKLISLGLRPINALVDITNFITIDLGRPLHVFDADKVEKQLDMRLANSNEKILALDNKEYSLDVN

SEQ ID NO: 160583 - protein, 307 aa, Unknown
  Bacterial polypetide isolated from the Sargasso Sea
REGLLTVYAPPGAIIPKNKTKLVVAKIRDVTSYGMLCSESELNLSDESDGITELSSSKYAKNIGKSYFSKSSSNLIDLSITPNRPDCLGVRGIARDLSAAGFGNLKPEKDKKIKSDKKQTLRVKIIKEKNQGCLSFGSCLITNVKNTESPKWLKDKLISIGQKPISAIVDITNYVMIDINRPLHAYDADKIDKGIIVRNSKSGEEFTALDNKNYKLDDGMCVISDNKGVLGLGGIIGGTRSGTELYTKNVLLESAYFDPRSIRKTAKKLNIDTDAKFRFERGIDQLSIEDGLIKAAFLIREICGGEI

SEQ ID NO: 160584 - protein, 309 aa, Unknown
  Bacterial polypetide isolated from the Sargasso Sea
SLKIKFPKNKLCVDIGSNDGTLLKGFKQFGFRVQGIEATNIAKIANKDGIDTIQAFFNSKISKEIIEKKGKASVITATNVFAHVPNMSSLMMGVDKLIEREGVFITESHYLLDLIKTLQYDSIYHEHLKYYTLHSLKVFFDYYNFEIFDVEFIKNYGGSIRVYAAKKGVYKVKKTVINCIKNEIKLFKDSDKVFKLFSSKIKNNKSEIINLINKYLKKGQKVVGIGCPGRCSTILNYCKINKKKMMYIAEQQSSLKLKKFLPGMHIPIIDEKEMFKSPPDLSILLSWHYSDEIIKILRKKGFKSKILIS

SEQ ID NO: 160585 - protein, 110 aa, Unknown
  Bacterial polypetide isolated from the Sargasso Sea
ESRKKIREVKPQFVFSDYQKVVRDFAFVIDEKYSSGEIINFVKKIDKGLIKNVKIFDVYQGENITSGKKSIAFSVTLEPKDKTLSEKDIEEVSKKIISAVQETTGATLRS

SEQ ID NO: 160586 - protein, 258 aa, Unknown
  Bacterial polypetide isolated from the Sargasso Sea
MEVDVQSKEDSPVFMTRVIKSINRNAKSPKWLKEKLDQSGYKSINAVVDIANYVMLETGQPLHTYDLKKINKTILVRRAKKKEAIDILDGTRKILDPNYLVIADVEKPLGIAGIMGSLESGISEDTEDIVLESAYFNFETIMGRARALSLHSEASMRFERGVDPAIQEHAIQRFTNLINEIAGGENGPIHSSINKKEMPKNKFITLRKDKIKQILGITIPNQTVKNILDRLDMEIDEKDFGYIGWSVKAPSYRFDINE

SEQ ID NO: 160587 - protein, 270 aa, Unknown
  Bacterial polypetide isolated from the Sargasso Sea
MKLEVSKIRGETSYGMLCSEAELKLSDESEGIISLSSKYNNSVGKPYFKSKNNNNVIELSITPNRPDCLGVRGIARDLFASGMGNLKEIRKTKFKKNSKHNLKVKIEKSKNQACSIFGSCLIKNITNKESPSWLKERILALGLRPISAVVDITNYVMFDLNRPLHAYDLDKIKNSITVRNSKKGETLKALDNKTYTLKENMCVISDDEGALGLGGIIGGVRSGTELETKNILIESAYFDPSITRKTSKELEINTDAKFRFERGIDPESVE

SEQ ID NO: 160588 - protein, 262 aa, Unknown
  Bacterial polypetide isolated from the Sargasso Sea
FGSCLITNVKNSQSPKWLKDKLISVGQKPISAIVDVTNYVMLDINRPLHAYDYDKIEKGIIIRNSKFGEEFTALDNKNYKLENGMCVITDNKGILGLGGIIGGTRSGTEFNTKNVLLESAFFEPRSIRNTAKKLNLDTDAKFRFERGIDPLSIEQGLNKAAKLIKEICGGEISKIDIQKTETYKTKKIIFDPNIFEKISGFKISSKEMIKILEDLGFRVKKHKKRFEIVIPSWRPDISQEVDVVEELVRITGYDKIKFIDPI

SEQ ID NO: 160589 - protein, 322 aa, Unknown
  Bacterial polypetide isolated from the Sargasso Sea
AGLGKLKDLKIKKIKGSFKSDVKWLRKFNIKEDHLCPGVSGRLFTNVKNTQSPEWLKRRLELIGLRSISALVDITNYVTFDLGRPLHVYDADKFNGNLVMRKAQKNEKCKTLDEKEYLLSEDMIVISDDDSLHGIGGVMGGLNSGCSLETKNVFLEVALFDPISITKTGRKLNLQSDARYRFERGVDFTSIEWGVDAATQMIIDLCGGEVSEIVFDKIQNPKLKKLDYDINLTKTYGGIDVEIKKQIKILENLGFKINSKNNLKLEIVIPSFRPDIIGPADIVEEILRIYGFDKIQPISLTNKKDKNLEILNSNLQAYYKSK

SEQ ID NO: 160590 - protein, 99 aa, Unknown
  Bacterial polypetide isolated from the Sargasso Sea
QYKEFKNHCSVPVLANITEFGKTPLFTQKQLKEVGVDMALYPLTAFRAMSQSAEKIYDSIIKDGTQEALLDIMQTREELYEVLDYYNFEKQLDKKLSNN

SEQ ID NO: 160591 - protein, 164 aa, Unknown
  Bacterial polypetide isolated from the Sargasso Sea
MNIKDTIESVRKQFRTDSDPFPDDNDKIDSLKIKYLGRKGLIANLFTQMNQVEAEDRPLFGKYLNQLKNEINSVFDSSQQKDSNSKTDQIDYSLPGLNFNIGYQHPLQTTLNEIKSIFQNLGFSVAYGPEVDDDFHNFSALNFPPEHPARDMQDTFFIEKDIVL

SEQ ID NO: 160592 - protein, 160 aa, Unknown
  Bacterial polypetide isolated from the Sargasso Sea
RRLKAAVDAKKDESFFIMARTDALASEGIEKAIERCGEYLKVGADGIFFEAALSLDEYKEFKKNFSFPLLANITEFGKTPLFTQKELSDVGVDIVLYPLTAFRAMSLSAEKIYNSIIKDGTQEPLLDIMQTREELYEVLDYYNFEKQLDEQFENTKKEGS

SEQ ID NO: 160593 - protein, 119 aa, Unknown
  Bacterial polypetide isolated from the Sargasso Sea
MIITLPWLKEHLKTNASENEIINKLTNIGLEVESVKENSGELSEFKIAKIIKSEKHPNADKLKVCDVNIGGKETLKVVCGAPNARDGLITIYAPPGAVIPKTKFQLKIAKIRGVESRGM

SEQ ID NO: 160594 - protein, 108 aa, Unknown
  Bacterial polypetide isolated from the Sargasso Sea
MIAEIIDCKPHPNADKLKVCTLDWGGNEPARVVCGAPNVKSRLKVIFARVGVKIPSTGEVITRRPLKGVMSEGMILSAAELGWTENAIGIVECPRKSVVGEPAPQRST

SEQ ID NO: 160595 - protein, 295 aa, Unknown
  Bacterial polypetide isolated from the Sargasso Sea
QVLVQRGYSEAITYSFINPAIPADFSVAGEIIEVTNPISSALSVMRQSCWPGLLSALQHNVNRQQSRVRLFEFGRVFWSDGDRQIKQPRRIACLAAGPLYTNAWSSSTNQEVDFFAVKQDVMALLSTTRHAEQFEWRVGTHPALHPGQRAELYLANQCVGHLGVLHPELGANWDLTTMPVLFEMDWSALVEATLPQFTGVARFPEVKRDLALVVDEQVTAASLLAAVREFAGDQLVNVEVFDVYVGKSIESGQKSVALGLTFQDPSRTLIDSEIDKLQSHVIESLGKKLNATMRA

SEQ ID NO: 160596 - protein, 268 aa, Unknown
  Bacterial polypetide isolated from the Sargasso Sea
MDIAVTPNRPDCLGVRGIARDLASSGLGQLKRQPPIKINQKFKSPIKVSIKKEKNQGCGIFGSVYIKNIQNKESPDWLKKRIIALGLSPISAIVDITNYVMFDLNRPLHAYDADKIDKEIIVRNSKKGESFEALDNKKYMLQNNMCTISDKSGVLGLGGIIGGTRSGTELSTKNILLESAYFFPSMIRKTSKILNIDTDAKYRFERGIDPNSIKLGLELAMCMILDICGGTASKFSVVGKIRDERKIIELDPEKFSKVIGFFITNLKI

SEQ ID NO: 160597 - protein, 143 aa, Unknown
  Bacterial polypetide isolated from the Sargasso Sea
LAYFGEIHPIILKRLDIKADNVLGFEIILENIPLSRKKIRESKDRFIFSDYQKVVRDFAFVFDEKYSSGEIINLVKEADKELIRDVRIFDVYQGDNIESGKKSIAFNVTLVPKNKTLSDNEIEEVSKKIISKVEKTTGATLRS

SEQ ID NO: 160598 - protein, 197 aa, Unknown
  Bacterial polypetide isolated from the Sargasso Sea
MKLTKNWLNDHLKTNKSESQIIEKLNRIGLEVEKVESIKSELNDFVVAKIIKANKHPNADRLKLCDVNIGGKENIKVVCGAPNAHDGLLTIYAPPGSTIPKNGMKLEVSKIRGETSYGMLCSESELKLSNESEGIIELGQKFNSSIGKPYFKNKSNNNVIELSITPNRPDCLGVRGIARDLFASGYGELKEIKNFKF

SEQ ID NO: 160599 - protein, 224 aa, Unknown
  Bacterial polypetide isolated from the Sargasso Sea
MKFTIGWLKEHLDTKYKDNKIIEKLTDVGLEVEKFENVNSEFDSFKVAKIINAEQHPNADRLKVCDVDIGEKNTVKVVCGAPNAKKDLLTVYAGPGSIMPKNKMKLTVSKIRGVTSYGMLCSESELNLSNESEGITELKQQKYSDQIGKSFFKNNSEKVVDLSITPNRPDCLGVRGIARDLAAAGVGKLKKISDKKIKKESFQNIKVSITKDKNQACTIFGSCL

SEQ ID NO: 160600 - protein, 287 aa, Unknown
  Bacterial polypetide isolated from the Sargasso Sea
SKHPNADKLKLCEVDIGSGNLVKVVCGAQNARDGLFAVYAPPGAVIPKTNLKLKVAKIRGIESHGMLCSGYELDESIDKEGIIELNKKEKNIGERYFQNIGEKTMDISITPNRPDCLGVRGIARDLASSGLGQLKKHFPIKINQKFKNPIKISIKKEKDQGCGVFGGVYIKNVQNKESPDWLKKKIISLGLKPVSAIVDITNYVMFDLNRPLHAYDADKIDREIIVRNSTVGESFEALDNKKYTLQNNMCAITDKSGVLGLGGIIGGTRSGTELSTKNILLESAYFF

SEQ ID NO: 160601 - protein, 145 aa, Unknown
  Bacterial polypetide isolated from the Sargasso Sea
MSDLKNIKEEYNTKLNNNLSLDEINQIKTELFGKNGLISSQFKNIGSIPDNDRKKFASDLNNIKDELQNLISNKINEIESKKINEKLEKEKIDVTLPERSFVRGKIHPVSQTIDEISSIFSEIGFSVEEGPDIENEYNNFTALNT

SEQ ID NO: 160602 - protein, 154 aa, Unknown
  Bacterial polypetide isolated from the Sargasso Sea
MIITIPWLKEHLKTNAKDNEIISRLTNIGLEVESVKENFGELSEFKIAKIIKVEKHPNADKLKVCDVNIGKTETLKVVCGAPNARDGLITIYAPPGATIPKTKFQLKIAKIRGVESRGMLCSESELNLSDESDGIIELNAKETEIGKSYFKSKS

SEQ ID NO: 160603 - protein, 166 aa, Unknown
  Bacterial polypetide isolated from the Sargasso Sea
MFVSIDWLREYLDIPTDINIGEFADRITAASAEVEGIRTVGADWGELITVGQVLEVNAHPDADKLRLATVDHGADIPATVVCGAPNLAVDQKIAFAQEGAMVTNPANGQLTKLKKAKIRGIESSGMVLSEAELGLSEAHDGILVLDESAPIGKTLENHLGDIILDV

SEQ ID NO: 160604 - protein, 315 aa, Unknown
  Bacterial polypetide isolated from the Sargasso Sea
TNIGLEVESVENLSEDLNLFKVAKIIKTEKHPNADRLKICDVDIGEKNFKKVVCGASNARKGLITIYAPPGAIIPKSKIKLVVAKIRDVTSYGMLCSESELNLSDESDRIAELSSKKFEKSLGKSYFSKSNSNLIDLSITPNRPDCLGVRGIARDLAASGFGKLRNIKEKKIKSNLKQTIKVKIKKEKNQTCNAFGSCLITNLKNTESPQWLKDKLVSIGQKPISAIVDITNYVMLDMNRPLHSYDADKIDKGIVVRNSKSGEEFNALDNKNYKLDNGMCVISDNKGVLGLGGIIGGRRSSTEFNTKKCTFGISL

SEQ ID NO: 160605 - protein, 174 aa, Unknown
  Bacterial polypetide isolated from the Sargasso Sea
MKVSHNWLKNLVEITSTPEDLSEKLSIGGFEVESLEDCSENVNGVVLGKVLSVLKHEGSNKLSICKVDVGTSNNLQIICGAQNIKPNIFVYVATVGTKLSAVNLTIKKSEIRGVMSEGMICSLQELGLEDSSEGIEIIDEDLALKHELGNPASNLLEINDFIYDLAITANRPDG

SEQ ID NO: 160606 - protein, 91 aa, Unknown
  Bacterial polypetide isolated from the Sargasso Sea
EVDLGYELKDGKIIIGEGDKWLEILGCGMVLPYVLKIVNIYPDKYQGYAFGIGIDRLALLKYGINDLRAFFESDYRWLNHFGFGPLDVPSN

SEQ ID NO: 160607 - protein, 277 aa, Unknown
  Bacterial polypetide isolated from the Sargasso Sea
MKITFDWLKDHLKTNLKEKNLLEQLTNIGLEVESVESPSDDNGLFKIVEIIKTEKHPNADRLKICDVNIGENEIKKVVCGAENAKEGLLTIYAPPGAIIPKTKMKLVIAKIRGVTSYGMLCSESELNLSDESDGITELPKGYKKDIGKSYFTKLKSNLIDLSITPNRPDCLGIRGIARDLAASGFGKLVDLKEKKIRSKIKNTLKVKINKEKKQGCTAFGSCLITNVKNTESPQWLKDKLISVGQKPISAIVDITNYVMLDINRPLHAYDADKMKKV

SEQ ID NO: 160608 - protein, 162 aa, Unknown
  Bacterial polypetide isolated from the Sargasso Sea
MIFELKEDLQNLLNSITISIQNSKSSSELENIRVNSLGKKGSITLYLKNIRDYDLETKKEIGAYLNDIKSQINKLILDKRNFFKKEHLKDKLNSEKIDISLTPYETEIGTLHPLSRTIEELCAIFADMGFSIVDGPDIESDYYNFTALNIPEEHPARQEHDT

SEQ ID NO: 160609 - protein, 270 aa, Unknown
  Bacterial polypetide isolated from the Sargasso Sea
LEVESVEPVKNELSDFVIAKIIKAEKHPNADRLKLCHVDIGKKELVKVVCGGPNAKDDLLTIYAPPGSIIPKNKIKLEVSKIRGETSYGMLCSESELNLSNESDGIIELNQKYKSKVGKSYFNNNLENVIELSITPNRPDCLGIRGIARDLSASGYGKLLDNRNIKIKKNGKQTLKVKIEKSKNQACTIFGSCLVKNIKNQESPEWLKKRIHSLGLRPISAVVDITNYVMFDLNRPLHAYDAEKIKKGITVRNSKKGENFLALDKKNYNL

SEQ ID NO: 160610 - protein, 204 aa, Unknown
  Bacterial polypetide isolated from the Sargasso Sea
YFSKSKSNLIDLSITPNRPDCLGIRGIARDLAAAGFGKLLELKEKKIKSKFKQSLKVKINKEKNQGCNAFGSCLIVNVKNTESPQWLKDKLISIGQKPISAIVDITNYVMFDINRPLHAYDADKIEKGIIVRNSNAGEAFTALDNKNYKLEKGMCVISDHKGVLGLGGIIGGTRSGTELDTKNILLESAYFDPRSIRNTSKKLN

SEQ ID NO: 160611 - protein, 291 aa, Unknown
  Bacterial polypetide isolated from the Sargasso Sea
KLEVSKIRGETSYGMLCSESELKLSKESEGIIELGKKYINKIGKSYFKNNEKSNVIELSITPNRPDCLGVRGIARDLSASGYGDLKDIKKVKFKNILKHNLKVKIEKNKNQACSIFGSCLIKNIRNKESPSWLKERILALGLRPISAVVDITNYVMFDLNRPLHAYDLDKIKKSIKVRNSIKGEKLTALDNKTYTLKENMCVIADEEGALGLGGIIGGVRSGTELETKNILIESAYFDPGITRKTAKELEINSDAKFRFERGIDPQSVKEGLEMSARLIVDICGGEVSNFD

SEQ ID NO: 160612 - protein, 138 aa, Unknown
  Bacterial polypetide isolated from the Sargasso Sea
MKVSQNWLKNLVEITSTPEDLSEKLSIGGFEVESLEDCSKNVNGVVLGKVLSVLKHEGSDKLSICQVDIGNSKNLQIICGARNIKPNIYVYVATVGAKLNAVDLTIKRSEIRGVMSEGMICSLQELGLEDSSEGIEII

SEQ ID NO: 160613 - protein, 176 aa, Unknown
  Bacterial polypetide isolated from the Sargasso Sea
MKFTWYWLLDHLKTDKNLNEIVEALPKLGLEVSSVINLAEELKQFISVKVLEVKKHPNADTLNLCKVFDGNNTFSVVCGAPNVKAGMIGVFASVDTYVPGINLTLKKAKIRGESSEGMLCSEKELTLSDNHEGIIELPKDSKIGLPVRDVMELTDPVIEIEITPNRGDCLGVRGIA

SEQ ID NO: 160614 - protein, 279 aa, Unknown
  Bacterial polypetide isolated from the Sargasso Sea
QNNVELVVAKIRGVTSFGMLCSESELNLSDESDGIIELSSAKYEKRVGKSYFLKSNSNIIDLSITPNRPDCLGVRGIARDLAASGFGKIKDIKEKKISSNTKQTVKVKINNEKDQACTAFGSCLITNVKNTESPKWLKDKLISIGQKPISAIVDVTNYVMLDINRPLHAYDADKIEKGIIVRNSKSGEKLTALDNKNYELDNGMCVITDNKGVLGLGGIIGGTRSGTEFDTKNILLESAYFKPALTRRTAKKLNLDTDAKFRFERGIDPLSIEDGLNKA

SEQ ID NO: 160615 - protein, 238 aa, Unknown
  Bacterial polypetide isolated from the Sargasso Sea
MRINLEWLREWISFDFEPYELAHQLTIGGLEVGSIETISCHSKGVLIAKIIDCRPHPNADRLNICQVDTGSSVHSVVCGAQNAQKNMLTAYAPLGSILPDGRTIEPVNLRGEESEGMLCSSAELGLIEDHSGLVEFEENAPLGAFIKDYLKLDDVALDLELTPNRGDCFSVIGIAREASALNGKSFKESSVKAVSEQITDSFDVSIKAKKACPRFVGRVIKGISTNAITPSWMRERLR

SEQ ID NO: 160616 - protein, 40 aa, Unknown
  Bacterial polypetide isolated from the Sargasso Sea
EKYTGYASGMGVDRLAMLRYGVDDLRIFFENDLRFIEQFS

SEQ ID NO: 160617 - protein, 224 aa, Unknown
  Bacterial polypetide isolated from the Sargasso Sea
MKFTLSWLDEHIKLNKSEIEVSELLTNLGLEVESLDSLNENFKNFLVCKIVKTKKHPNADRLKVCEINYGKENFKVVCGASNAVEGLKTIFAPNGTYIPGTNFKLEKKSIRGVEGDGMLCSEKELGLPEKVDGIIELDNNYDVGKTLKNYIQNDFLFNIGLTPNRGDCASVRGIARDLAASLSLSLIKRKINSKSGTFKSDIKWDIKSLKDINDCPLIYGRYLK

SEQ ID NO: 160618 - protein, 301 aa, Unknown
  Bacterial polypetide isolated from the Sargasso Sea
IIGSEASSVSSNTNNIAVEAAFFRPEIIVNQARKYGLATDASYRFERGVDPEIQQLALERFIFLLNQLAEYDSVKIYYSESSKAKKNNVKFNLERFNKFSGLTLKAGESILILKNLGFKLLTKTKNYLTFKIPSYRFDISLEEDLYEELLRSYGYDNIPTSKPKAGPRIKNNQINVLDKLRLGLVYSGFRELMHMPFVSRESFMRLNSNGWTAAELQNPINDNEPLLRGSLFRSLFAAISANLKKGYSSIKVFEAGNVFKKEKNNFTQSLHVSGMIYHHEPQQTWDQKELNYDFLSLKAEI

SEQ ID NO: 160619 - protein, 247 aa, Unknown
  Bacterial polypetide isolated from the Sargasso Sea
MADIFTNLGLECESSNKTLNFDITPNRGDALSLNGLAREFSASQKNSRFIQKPFNKVSFQNSKDYIGKVNNECCQNYHLLEILEINKFKALPKEIVKLLEKADIPLIHPMVDIGNFVMLELGTPLHVFDRDKLALPLSVNFADEDETVTIIGGEKKILDSNIATIRDRNATVAIAGIIGCDNSSVTSETKNFLVESAAFLPNVIMNKARKLGLNTDASLRFERGVDSTMQVNALVRFLELLNEITSV

SEQ ID NO: 160620 - protein, 269 aa, Unknown
  Bacterial polypetide isolated from the Sargasso Sea
NIGCTIKPEKNDQFIIKKSKIRGVESFGMLCSEEELNLSDDSEGIIELSKDCKVGEKFSTYVSDENIEIEIAITPNRVDCAGVYGIARDLSAAGFGILKLRKANKVAVEKKSSIKLKNTLQDSVCPQFLLREITHLKNRKSSSAIIKRFKGSGLKVISSLVDITNYITIDFCRPLHVFDLDKIQGNITIRLSEKGEEFLGLDEKNYSLDENMIVICDEKNIISLAGILGGKNTCCDDNTKNILVESAYFDPEIIASAGRKLNITSDARY

SEQ ID NO: 160621 - protein, 334 aa, Unknown
  Bacterial polypetide isolated from the Sargasso Sea
MLCSEYELNLSNESEGITELKTSNYSDKIGKNFFNSRAEKVVDLSVTPNRPDCLGVRGIARDLAAAGAGKLKKVSKNNIKKNGSQKIKVSISKDKNQGCTVFGSCLIEGVTNQESPKWLKEKIASLGQKPISAIVDITNYVMLDLNRPLHAYDADKINKEIIVRNSIKGETFKALDNKEYKLDDDMCVISDKSGVLGLGGIIGGTRSGTEIDTKNILLESAYFIPRSIRKTSKLLNIDTDAKFRFERGIDPQSIELGLSKAAELISEICGGKISNFDIQKTDKHEKNKIKFRVSLFEKITGFKVKDNEIIKILTDLGFEVAKRKLEIDLKVPTW

SEQ ID NO: 160622 - protein, 300 aa, Unknown
  Bacterial polypetide isolated from the Sargasso Sea
ETIVNQARKYGLATDASHRFERGVDPEIQKLALERYLCLLNEIATYDSAELYHSQSKKSKKANVRLHIERFNNFSGLNMKASQAILILSSLGFEIAAKSSKSLAFNIPSHRFDISLEEDLYEELLRCYGYDNIPISKPKAGPIIKNKKDNALENLRVGFVHAGFKELMHMPFVSQESFQQLNSENWTAAELQNPINENEPFLRGSLFKSLFSAINNNVKKGYSSIKVFEAGNVFKKEKRGFAQSLNLSGIVYHHEPNQTWSQKKIVYDFFSMKAEIFKLLQTLGIHNAELQKTSFCTPFS

SEQ ID NO: 160623 - protein, 273 aa, Unknown
  Bacterial polypetide isolated from the Sargasso Sea
GIRGIARDLSSTGIGKLTSLKKKKITQSSKHKIKVSIAKDKHQGCLAFGSCYIKNIENKESPEWLKNKLLSLGLKPISAVVDITNYVMFDLNRPLHAYDANKIDKEIIVRDSKEGEEFEALDNKKYKLKKGMCVIADKSSILGLGGIIGGTKTSTEFDTKNILLESAYFLPSSIRKTSRELIIDTDAKYRFERGIDPKSITEGLEVATELILSICGGQASKFIITGKNSPKQKIIKFNINNFENLIGIPISINEAQKILASLGFNCKKGKKDL

SEQ ID NO: 160624 - protein, 94 aa, Unknown
  Bacterial polypetide isolated from the Sargasso Sea
MDKISLPSVPRALGTIHPINQIKDHILKILSEMGFIEVFGPEIETEKFNFDMLNIKESHPARQMHDTFYVDNKSKVLRTHTSPVQIRSMLETSP

SEQ ID NO: 160625 - protein, 167 aa, Unknown
  Bacterial polypetide isolated from the Sargasso Sea
MSNRLFQLGHEHEIEGEILDLEITPNRGDCLSLKGIARDLNYFYDSISDQDIYTDEIPKLDLKFKNQAKDVCPNISFLELEIDGTIADYKPYLENYFTDLSINKNNFFTDISNYLAYETGQPTHCFDAMKMQGEFALIKRKKSEKFQTLLNTEVELEGENLVFTLDG

SEQ ID NO: 160626 - protein, 193 aa, Unknown
  Bacterial polypetide isolated from the Sargasso Sea
MPELNLDKILASLDLRISEVTLTNEYDQISKDFLGKDSLLAEERKKLPTLSNQDKKTYGKKLTEISKKIESKIESSKKQFILDTYQKKEKEEFTDITIDWNRNEGSYKHIISSVMDEVVNIFSSIGYEVAYGPEAETSWHNFDALNTPDWHPARYESDTIYLNSNLQTLLRTQTSTVQIRHMEQNDPPVYIVL

SEQ ID NO: 160627 - protein, 28 aa, Unknown
  Bacterial polypetide isolated from the Sargasso Sea
VYFLESAFFKPSVIRGRARRFVSKQMLQ

SEQ ID NO: 160628 - protein, 112 aa, Unknown
  Bacterial polypetide isolated from the Sargasso Sea
MKFTLSWLKDHLDTDASVEEITETLTDLGLEVEEVVNPADMLGAFTLAKVVGAEQHPDADRLRVCRVMTDEGEKQIVCGAPNAREGITVVLCKPGDYVPGLDFTLSVGKIRG

SEQ ID NO: 160629 - protein, 289 aa, Unknown
  Bacterial polypetide isolated from the Sargasso Sea
VKENYYQLGQKPISAIVDITNYVMIDINRPLHAYDADKIEKSIVVRNSKSGEEFNALDNKKYKLDDNMCVITDSKGVLGLGGIVGGTRSGTEFKTKNIFLESAYFDPKSIRRTAKKLNIDTDAKFRFERGIDPLSIEEGLNKAALLIKEICGGEISKIDIQKIKTYKTKIIKFNPNLFEKISGFKISIKEMLKILDCLGFGYKKNKNYLELFIPSWRPDITLEIDIVEELVRISGYEKIKIVNPIKERIKSTLTQTQKLFHFLQRSIASKGYLETITWSFTDSNYNNYF

SEQ ID NO: 160630 - protein, 144 aa, Unknown
  Bacterial polypetide isolated from the Sargasso Sea
MKLSINWLKDYISLNKSVDEIADSLTMIGNEVEEIITTGDIPGVIVAEIKEIIPHPNADKLQLAKIYDGKNTLSVVCGAPNIKEGQKIFLATIGTNLPDPSNNSYFEIKKSKIRGVLSEGMICSEKELGISDDHEGIMVLPNEL

SEQ ID NO: 160631 - protein, 296 aa, Unknown
  Bacterial polypetide isolated from the Sargasso Sea
TMEFRKSMGKSYFSKSKSNLIDLSITPNRPDCLGIRGIARDLAASGFGKLVDLEEKKIHSKNKHTLRVKINKEKGQGCNVFGSCLITNVKNCESPKWLKDKLISIGQKPISAIVDITNYVMLDINRPLHAYDADKIEKGIIVRNSKSGEEFTALDNKNYKLENGMCVISDNKGVLGLGGIIGGTRSGTEFDTKNILLESAYFEPGSIRNTAKKLNLDTDAKFRFERGIDPLSIEDGLNKAAKLIKEICGGAISKIDIQKIETYKTKKIIFDTNIFEKISGFKISLKEMIKILEDLG

SEQ ID NO: 160632 - protein, 130 aa, Unknown
  Bacterial polypetide isolated from the Sargasso Sea
QIEGLVIDEGITFVDFKATLAEFARRYWGPDTQVRFRPSYFPFTEPSAEVDVKRIITRPDGTQYETEWLEIMGSGMVDPNVIANAGYDPERYTGWAFGMGPGRIAMLKHGVQDLRTFFENDIRFLEQFAR

SEQ ID NO: 160633 - protein, 124 aa, Unknown
  Bacterial polypetide isolated from the Sargasso Sea
MGGGPEEISEHLALRGAPVDDITSPGRDLSDIIIGRVIRARQHPNADRLRVCEVDNGAETVQIVCGAPVVKDGACYPLAPAGSILPGDFKIKRSKIRGEVSHGMLCSAKELGLGDDHSGIMELV

SEQ ID NO: 160634 - protein, 301 aa, Unknown
  Bacterial polypetide isolated from the Sargasso Sea
GIRGIARDLSASGVGKLIDNKNIKIKKIGKQNLKVKIEKSKNQACTIFGSCLIKNIKNKESPEWLKKRILSLGLRPISAVVDITNYVMFDLNRPLHAYDADKINKGIIVRNSKKGENFKALDNKDYKLDDEMCVISDHQGILGLGGIIGGIRSGTEINTKNILLESAYFDPEITRKTAKKLELNSDAKFRFERGIDPNSISIGLEKASEMIVKICGGNVTKLDIQSIKKIEKKKISFDPNLASKTIGIQIKTNEIVKILQDLGFNNNKKGKNLIVEIPSWRPDVKGQIDLVEEVIRIKGFD

SEQ ID NO: 160635 - protein, 261 aa, Unknown
  Bacterial polypetide isolated from the Sargasso Sea
IGLEVENIENLSEGLDLFKVAKIIKTEKHPNADRLKVCDVDVGNKEIKKVVCGAANAREGLLTVYAPPGAIIPKNKTKLVVAKIRDVTSYGMLCSESELNLSDESDGITELSSYKYAKKIGKSYFSKPSYNLIDLSITPNRPDCLGVRGIARDLSAAGFGNLKPEKDKKIKSNKKQTLKVKITKEKNQGCLSFGSCLITNVKNTQSPQWLKDKLISVGQKPISAIVDITNYVMIDINRPLHAYDADKIDKGIIVRNSKSGE

SEQ ID NO: 160636 - protein, 258 aa, Unknown
  Bacterial polypetide isolated from the Sargasso Sea
KTKIRGVESCGMLVSEREMGISNEHDGIIEIKDNYKIGDLFSKIFAIDEPVIEINLTPNRSDCLSVRGIARDLAAAGIGKLKELKYKKVKESFKSPITWKKEFKNNNLCPGVAGRYFKNVKNVESPKWLQDRLIAIGLRPISALVDITNYITFDLGRPLHVYDADKVSGNLTMRLANKNEECLALNEVNYKCYSDMIVISDDEKKLHGIGGVMGGLDSGCSMETKNAFLEVALFDPISVTKTGRKLNLQTDARYRLKE

SEQ ID NO: 160637 - protein, 195 aa, Unknown
  Bacterial polypetide isolated from the Sargasso Sea
MLEQINNLSEKAQNELNALTGAEQLPQWYQRYLGRNGDLTSLLKKLKTIPAEDRPEIGKVINKVKQELQELFDSRQQTLLESKLDQQLEIDDLDVSLPGRPCTPGHLHLTTQTLRRIYHIFREMGFQVYEAPEVESDEFNFQLLNIPQYHPSRDMWDTFWVNDKVVLRTHTSPGQIWAMREYFPEPIRVILPGKC

SEQ ID NO: 160638 - protein, 221 aa, Unknown
  Bacterial polypetide isolated from the Sargasso Sea
NKTEFIQEEVLNGAIYGNKKFGKWINSGKDNDLNYFQARGKLKEALSSLNIKIDDKPTDSIDFLHPGRTAKLFIEGKDVGYFGEIHPKLILEKKSLKKVYLFNINFSNLLGASTRKNKWIPIYKQYPIVPKMERDINFVFSKKFLISEITSQIRKTGKNLLEDVNLLDVFEDSKFGDDHISYTFRLSYRDKDKTLLDSDITSIHSNIITNVEKCFNTKLRN

SEQ ID NO: 160639 - protein, 275 aa, Unknown
  Bacterial polypetide isolated from the Sargasso Sea
DKFFKTLQGKEIRLESGDLVFQQDSEVINLAGIMGGSSSSCSPDTTKVLIEAAHFSPDSIIGKTIKYNINSDAAYKFERWVDPNMQEEAIRRFIKIVSDHANIISIRMSSSDQNDSDKKIIPFSNDNIQRILGVKIDEDLSKSFLNSLGFEFQSKKTVQVPSHRNDIKDSNDLSEEIARMIGYDNIERKTFKIANKIEFSNKEDIELKRYLTNKGFSEIINIPFVSKSSKSSILLDNPLDSNKDSLRTNIIDSLLQNLLYNERRQKDSIKLFEIA

SEQ ID NO: 160640 - protein, 51 aa, Unknown
  Bacterial polypetide isolated from the Sargasso Sea
RSEGLRKLGIDSEKWTGFAAGLGVERFCMVRHQIDDIRKFYTNDLRFLEQF

SEQ ID NO: 160641 - protein, 174 aa, Unknown
  Bacterial polypetide isolated from the Sargasso Sea
HRPNKQIVSVTEMQDRIKAAVDAKKDESFFIMARTDALASEGIEKAIERCGEYLKVGADGIFFEAAISLDQYKEFNKNFSVPLLANITEFGKTPLFTQKELSDVGVDIVLYPLTAFRAMSLSAEKIYNSIIKDGTQEPLLDIMQTREELYEVLDYYNFEKQLDEQFENTKKEGS

SEQ ID NO: 160642 - protein, 137 aa, Unknown
  Bacterial polypetide isolated from the Sargasso Sea
IHPFIIKKLDLKTDNVLGFEIILDNIPDSRKKIREAKPQFIVSDYQKVVRDFAFVIDEKYSSGEIINLVKKIDQKLIKDVKIFDVYQGDNIAKGKKSIAFNVILEPKDKTLSDSDIEQVSKKIISTVQETTGATLRS

SEQ ID NO: 160643 - protein, 314 aa, Unknown
  Bacterial polypetide isolated from the Sargasso Sea
LQDRLRAIGLRPISTLVDITNYLTYDQNRPLHVFDANKVKGNLEVRKARENEKIIALDEKEYVLDPTMTVISDDGGVESIGGIMGAMNSGCTYETTDVFVEAAYFNAIATAKTGRRLRIESDARYRFERGIDPEFTETGMELATKLILKYCGGEASNLIISGAPPNKPPTISLDPEKLNAVVGMTVSSREQCRILNDLGFKVSGNSPYEVSIPSWRPDIMGDIDLLEEISRVISLRNLEGKPFEKNDFGVPKPILTKMQRRVSRLRRAFTMEGYDECITYSFLDKASAELFREGKAQAFISNPISSEMTDMRPS

SEQ ID NO: 160644 - protein, 37 aa, Unknown
  Bacterial polypetide isolated from the Sargasso Sea
NEHYNFTALNTPENHPARDMHDTFYLDNNKELLLRTH

SEQ ID NO: 160645 - protein, 289 aa, Unknown
  Bacterial polypetide isolated from the Sargasso Sea
MKFTIGWLKEHLDTKFKDNQIIEKLTDVGLEVESFEKVKSDLDNFKVAKIINAEQHPNADKLKVCDVDIGEQNIVKVVCGAPNAKKDLLTVYAGPGSVIPKNNIKLTVSKIRGVTSYGMLCSESELNLSDESDGITELKSNKYSDKVGKNFFKNNTEKVIDLSITPNRPDCLGVRGVARDLVAAGVGRLKNISNMKIKNSGPQKITVSITKDKNQGCTIFGSCLIKDVTNKESPKWLKDKIISLGQKPISAIVDITNYVMLDLNRPLHAYDADKIDKEIIVRNSKKGET

SEQ ID NO: 160646 - protein, 297 aa, Unknown
  Bacterial polypetide isolated from the Sargasso Sea
LRKVKNGFIENGFNEVLSYSLVPEDDEKLIKISNPLLLETSCLRDNIWKEHLEIVNRNIKAGQASCYIFEIGNIFQKKNEFIQEEVLNGAIYGNKKFGKWINSGKDNDLNYFQARGKLKEALSSLNIKIDDKPTDSIDFLHPGRTAKLVIEGKDAGYFGEIHPKLILERKSLNKIYLFNINVSNLLGASTRKNKWIPIYKQYPIVPKMERDINFVFSKKFLISEITSQIRKTGKNLLEEVNLLDVFEDTKFGDDHVSYTFRLSYRDKDKTLLDSDITSIHSNIISNVEKCFNTKLRN

SEQ ID NO: 160647 - protein, 280 aa, Unknown
  Bacterial polypetide isolated from the Sargasso Sea
NKDVESNIYASFRLIKNIKNCESPRWLKNRLEAIGLRPINALVDVTNYLTYDLNRPLHVFDYDKINKGLEIRKAKAGEKILALDDKEYNLSRSHTIFSDDNNPESIAGIIGGKRTGCNMDTVNVLVESAVWDKINIADTGRELNINSDARYRNERGIDSGFNNSGLDKAIEMIKEICGGEISNIKSVGKLLNRQEKINFNLDEVSRLLGVSFKKSDINQILTGLGFSLLEKNNKIEITVPSWRHDISENACIVEEIMRIKGTDNIKPIPLKKSVGVASKK

SEQ ID NO: 160648 - protein, 137 aa, Unknown
  Bacterial polypetide isolated from the Sargasso Sea
LASEGIEKAIERCGEYLKVGADGIFFEAALSLDEYKEFKKNFSFPLLANITEFGKTPLFTQKELSDVGVDIVLYPLTAFRAMSLSAEKIYNSIIKDGTQEPLLDIMQTREELYEVLDYYNFEKQLDEQFENTKKEGS

SEQ ID NO: 160649 - protein, 53 aa, Unknown
  Bacterial polypetide isolated from the Sargasso Sea
MVHPVVLRNGGYDPDEWNGFAFGMGVERPALLKHNIDDIRYFYNNDLRFLHQF

SEQ ID NO: 160650 - protein, 292 aa, Unknown
  Bacterial polypetide isolated from the Sargasso Sea
MECFVQNLELNISDESAGIIELNQNYKKKIGKSYFKNNLENIIELSITPNRPDCLGIRGIARDLAASGFGKLIDNKKNIIRKNGNQKLKVKIEKNKNQACTIFGSCFIKNIKNKESPDWLKRRILSLGLRPISAVVDITNYVMYDLNRPLHAYDADKISKGIIVRNSKKGEHFKALDNKDYKLDDGMCVISDNEGVLGLGGIIGGTRSGTEITTKNILLESAYFDPVITRKTAKKLDLNSDAKFRFERGIDPNSISIGLEIASKMIVKICGGEVSKLDIKSTKKIDIKKISF

SEQ ID NO: 160651 - protein, 310 aa, Unknown
  Bacterial polypetide isolated from the Sargasso Sea
LKITNKLQHFDSQVRKLDSNDLVITDNDKPIALAGVMGGLETEVSETTTNLLIESAYFDKVSIMKTSRKLNLISDASIRFERGIDYKIQRYGLEQFLMELKDNQSINYSKINVDDKGNLKNNKVVLKYSEIKKLLGIHLKESFIKKVLKFLMIESEVDKESVKFTPPSWRYDLDRPVDLIEEFAKHYGFNNFESTLPQGVHKNYKGSYWDLKSYLSNVLTSNNFQEVQTLSFVNKDKNLLFNPEKKYIQVFNAIDQSSEFMRSNLMSSLIDVYKLNDEQNNLSNSYFEINTVFDTSKNKIYEDVPNQNIV

SEQ ID NO: 160652 - protein, 181 aa, Unknown
  Bacterial polypetide isolated from the Sargasso Sea
MIEAGYDKQSFFIRDKSPTYYHPGKSGSVYLDKDDIDPVAYFGELHPNIIKKLDIKTEGVVCFEIYLDYLKDNKIKLKDQKSNFEYSDYQKSERDFAFVVDKNYKAQDLIEIISSIDKNLIRSIKIFDIYEGENIPDGKKSIALNVTIQSSEKTLEENDLEKINKLIISTVETKSGAKIRS

SEQ ID NO: 160653 - protein, 291 aa, Unknown
  Bacterial polypetide isolated from the Sargasso Sea
NAREGMKGIFAPENSFIPGTGVKLKKSKIRGVVSSGMLVSEREMGISDEHDGIIEVDSKHSLGEKFIEVFDLDDPVIEINITPNRGDCLSIRGVARDLAAAGLGKLKENTLIKNIEGTFESPVKWEKDFNGDIEYICPGVSGRYFKNVTNKESPAWLQQRLKAIGLRPISALVDITNYITYDLGRPLHVYDADKINGNLKMRYAKENEDCLTLDEEKRKCTKDMIVISDDNQLHGIGGVMGGLDSGCSLDTKNVFLEVALFDPISVTKTGRHLKLQSDARYRFERGIDPTS

SEQ ID NO: 160654 - protein, 230 aa, Unknown
  Bacterial polypetide isolated from the Sargasso Sea
MKFTVDWLKNHLETKFNNNQIIDKLTNIGLEVESFENSTSELDTFIVAKIINAKTHPNADRLKLCDVDIGSDKTIEVVCGAPNAKNGLLTVYAPPGSIIPKNQMKLSVSKIRGVTSYGMLCSESELLLSNESDGIIELKNNKYANKIGEKYFKNTSEKVIDLSITPNRPDCLGVRGIARDLSAAGAGKLKINKKSNLKYRGNQSINVTIKKEKVQGCTTFGSCLIKGCNK

SEQ ID NO: 160655 - protein, 60 aa, Unknown
  Bacterial polypetide isolated from the Sargasso Sea
VKVNPSKYQGYAFGIGIDRLGMLKYGINDLRAFFETDYRWLSHFGFDPLDVPSNYRGLSR

SEQ ID NO: 160656 - protein, 167 aa, Unknown
  Bacterial polypetide isolated from the Sargasso Sea
MKFTLSWLKTHLATDADLTTILKKLNAIGLEVDGVDNPADKLAAFKIARVLTADPHPQADKLQVLTVDQGDGTPLQVVCGAPNARAGLIGVFGTEGAVVPSNGMVLKKTAIRGVDSNGMMCSSRELELGDDHDGIIELPGDAPVGQGYADWAGLNDPVIDVSITPNR

SEQ ID NO: 160657 - protein, 227 aa, Unknown
  Bacterial polypetide isolated from the Sargasso Sea
MKFTLSWLKDHLDTNKDLDTIVDTLTNIGLEIESVVDKSKDFNDFTVAEVLKAEKHPDADRLKVCTVKSIDGTYQVVCGAPNAREGMKGIFAPENSFIPGTGVRLKKSTIRGVESCGMLVSEREMGISDEHDGIIEVDSKYSLGEKFIEVFKLDDPVIEINITPNRGDCLSIRGVARDLAAAGLGKLKENTLIQNIEGTFDSPVHWEKEFTGDEEYICPGVAGRYFK

SEQ ID NO: 160658 - protein, 239 aa, Unknown
  Bacterial polypetide isolated from the Sargasso Sea
MSGTISPLDMFRDLVGLRPDSVLERKESIFPKGNKKIVYLTDVTTSYNELISKSSTWDKIVSKLELITSNFKGNIALFFPSYKLLESALQGIKIKKPIYKEYLGMEQEELMQTVESFKSDSSAVLAGVMGGRLAEGIDYPSTTLEMAIIVGIPYPAPGVRQNALQHYYDISFSGQGWKFAVEAPAVRKLLQAAGRVVRSETDRGFIVIADSRTGRFLEYIPELEQSDDIVSEIGEFFEA

SEQ ID NO: 160659 - protein, 296 aa, Unknown
  Bacterial polypetide isolated from the Sargasso Sea
MTLRKLFGGAQNARTGLVTVYAPPGSIIPKSKTKLKIAKIRGVESHGMLCSGNELNISDDSEGIIELKNREKDIGKNYFKSKGEKSIDISVTPNRPDCLGVRGIARDLASAGLGKFSNLKKIKIKQNFKQPIKISITKEKNQGCLNFGACYIKNIQNKESPEWLKEKIISLGLKPISAVVDITNYVMFDLNRPLHAYDADKIDKEIIVRNSKSGETFAALDGKNYKLGNNMCVISDRTGPLGLGGIIGGSRSGTEFDTKNILLEAAYFHPSSIRKTASNLGVDTDAKYRFERGIDP

SEQ ID NO: 160660 - protein, 277 aa, Unknown
  Bacterial polypetide isolated from the Sargasso Sea
MSSEQLALRKLKNGFIENGFNEVLSYSLVPEDDEKLIKISNPLLLETSCLRDNIWKEHLEIVNRNIKAGQSSCYIFEIGNVFQKKTEFIQEEILNGAIYGNKKFGKWINSGKVNDLNYYQARGKLKEALSSLNIKIDDKPTDSIDFLHPGRTAKLVIEGKDAGYFGEIHPKLILEKKSLKKVYLFSINVSNLLGASTRKNKWIPIYKQYPIVPKIERDINFVFSKKFLISEITSQIRKTGKNLLEDVNLLDVFEDTKFGDDHISYTFRLSYRDKEKH

SEQ ID NO: 160661 - protein, 134 aa, Unknown
  Bacterial polypetide isolated from the Sargasso Sea
LDNSTKVGTPLKKIIKSETDHIFEIGLTPNRSDAMSHMGIARDLKAVFDFNKTKYKSKKIEKDLFKIDTNSKIIPIEILNPKKCHNYHGITISNVIVKESPDWLKNKLTSIDISPKNNIVDITNYVLHHLGQPL

SEQ ID NO: 160662 - protein, 103 aa, Unknown
  Bacterial polypetide isolated from the Sargasso Sea
MQQLTEIVEQALVIIDQASDLKALDDIRVDYLGKKGKITDMMKMMGSLSPEEKPAFGQAVNDAKQAIQQKLTERIDGLKSAELEAKLIAEKIDVTLPGRTIDI

SEQ ID NO: 160663 - protein, 240 aa, Unknown
  Bacterial polypetide isolated from the Sargasso Sea
QPSPFNWPEQALCYLPEGLPDPAARGFGTALIQTLRPVLQASQGRAFLLFASHRALREAAEALRDGPWPLFVQGEAPRATLLQRFRESGNGVLLGSASFREGVDVVGEALSVVMIDKLPFAAPDDPVYEARLEAIRSQGGNPFRDEQLPQAVIALKQGVGRLIRSESDRGVLVLCDPRLLNRGYGRVFLDSLPPFRRTRSLADVQSFFTPQWAPVSDDAAAPVAVATGPEPAPGATFPLF

SEQ ID NO: 160664 - protein, 112 aa, Unknown
  Bacterial polypetide isolated from the Sargasso Sea
MSSNKDILPPEIARDKGSLHPINHMKDSIMSLLVSFGFEIVDGPEIETEEFNFDMLNIKKTHPARQMHDTFYVQKKLNLLRTHTSPVQIRGMLEKKPPLAFISGGKVYRKDD

SEQ ID NO: 160665 - protein, 284 aa, Unknown
  Bacterial polypetide isolated from the Sargasso Sea
FTELIPKLYKPGINYFSYDIEESIDISITPNRGDCLGVNGLARELNASGIGKLKKKPPVKIKQNFKQPIKVSIKKEKNQGCGIFGSVYIKNIKNKESPPWLKSKLLSIGLRPISAIVDITNYIMFDLNRPLHAYDADKIKENIIVRNSKKGESFEALDNKKYTLQDNMCVISDKSGVLGLGGIIGGTRSGTELDTKNILLESAYFNPKSIRKTSKLLTIDTDAKFRFERGIDPDSIEEGLFKAATLIQKICGGEISKFNVQKNETFLKTKIKFPIALFQSITGF

SEQ ID NO: 160666 - protein, 251 aa, Unknown
  Bacterial polypetide isolated from the Sargasso Sea
MKFTIGWLKEHLDTKYKDNKIIEKLTDVGLEVESFENVNSELDSFKIAKIINAEQHPNADRLRVCDVDIGEKNTIKVVCGAPNAKKDLITVYAGPGSIIPKNNMKLTVSKIRGITSYGMLCSESELNLSSENEGITELKKEKYSDQIGKNFYRNNSEKVVDLSITPNRPDCLGVRGIARDLAAAGLGKLKKISNKKIKKEDSQNIKVSITKDKNQGCTKFGSCLITGVTNKESPKWLKDKIQSLGQKPISA

SEQ ID NO: 160667 - protein, 192 aa, Unknown
  Bacterial polypetide isolated from the Sargasso Sea
MKFTISWLKEHLDTQKKDNELIEKLTDIGLEVESFENVSSGLDSFKVAKIINTEQHPNADRLRICDVDIGLDNIVKVVCGAPNAKKDLLTIYAGPGSIIPKNNMKLSVSKIRGVTSYGMLCSESELNLSNESEGITELTASKYSDKIGKNFFKSNTEKVVDLSITPNRPDCLGVRGIARDLAAAGVGKLKKI

SEQ ID NO: 160668 - protein, 247 aa, Unknown
  Bacterial polypetide isolated from the Sargasso Sea
MKFTLNWLKDHLDTSKNLDTIVETLTNIGLEIENVEDKSKTFNDFTVAEVLKAEQHPDADRLKVCSVKTIDGTFQVVCGAPNARTGMKGIFAPENSFIPGTGIKLKKSKIRGVESCGMLVSEREMGISDEHDGIIEVDAKHKLGEKFIEVFNLDDPVIEINITPNRGDCLSVRGVARDLAAAGLGTLKENALTKSIPGTFESPIKWEKAFSGDEEYLCPGVAGRYFKNVTNKESPAWLQQRLKSIGL

SEQ ID NO: 160669 - protein, 64 aa, Unknown
  Bacterial polypetide isolated from the Sargasso Sea
NPKVLENCNIDSSVYQGFAFGMGIERLSMLKYGITDMRGLFDLNIKWLDHYGFSPLDLRNRAEV

SEQ ID NO: 160670 - protein, 276 aa, Unknown
  Bacterial polypetide isolated from the Sargasso Sea
FKYKKNVGKSFFSKSNTNLIDLSITPNRPDCLGMKGIARDLAASGFGKFIDFKEKEIKSSTKQTLKVRINREKNQGCTAFGSCLIKDVKNTESPQWLKDKLISVGQKPISAIVDITNYVMLDINRPLHAYDADKIEKGIIVRNSKPGEEFTALDNKNYKLEKNMCVISDQKGVLGLGGIIGGTRSGTELSTKNILLESAYFDPRSIRNTAKKLNLDTDAKFRFERGIDPLSIEAGLKKASLLIQKICGGEISKIDVQKIENYKTKTIKFDYNLFEN

SEQ ID NO: 160671 - protein, 263 aa, Unknown
  Bacterial polypetide isolated from the Sargasso Sea
SDLDVLRSSLYSNLIISIKKNIHRNFEDLMMFEIGPVFKSSKPGEQATIIGAIKTGKYSRKNWIEKERNFDVYDIKNDALRTLNEIGIKHDKIVVSNKTKKWYHPGRSGLLSLGSFDGPELAYFGEIHPLIVKKLDLRTDTVLGFEIFLDNIPESRKKIRESKPQFTISDYQKVVRDFAFVIDEKYSSGAIVNLVKQIDKELIKDVRIFDIYKGDNIEQGKKSIAFNVTLEPKDKTLSDHDIDQVSTKIISTVQENTGATLRS

SEQ ID NO: 160672 - protein, 141 aa, Unknown
  Bacterial polypetide isolated from the Sargasso Sea
MIITLPWLKEHLKTNAKENEIINKLTNIGLEVESVKENSGELSEFKIAKIIKAEKHPNADKLKVCDVNIGGKEILKVVCGAPNARDGLVTIYAPPGAIIPKTKFQLKIVKIRGVESRGMLCSESELNLSDESDGIIELNAK

SEQ ID NO: 160673 - protein, 288 aa, Unknown
  Bacterial polypetide isolated from the Sargasso Sea
DITNYVMMELGQPLHAFDYDKLIKRANGGKPKIIIRRAKEGESLIALDNIERKLDSNMLMISDQVGHIGIAGIMGGADSEVTDATTKILLEAANFEFINNRRTAQILKLRTEASERFGKQVDPEGTLRAALRAAQLMIAHCSGKLEKTAGDLYKRPKDALALEINPEYVERLLGVKIPIDQIKKILRALDFKVSGKEILKVIVPGHRMDISIPADLVEEIVRVYGFENLTPTLIKDELPPQHENQNLDGTELVRDILVASGMDEIITYSIMDPMDEARLCMENNIDLD

SEQ ID NO: 160674 - protein, 241 aa, Unknown
  Bacterial polypetide isolated from the Sargasso Sea
MESSTAPAQISGVSSSVQTTSSITLTWSAPTAEGAGQEATGYIVYRNDGLGGTSMSTVGYDGRGVDVPTGVISGLVGGREYEFVVSGLSAGGEGDVSAVLHQSTSPAAPTALRSTLQTTSSIALAWSAPVTEDGASAVTGYVVYRNDGSVEGDASQVAYEGAARTAVVDNLVGGHQYAFTVAAVSDAGVGDRSVALVTLGGIEVSAEELHRASTAPGIPGAPTSTQQTASSISLSWSAPIV

SEQ ID NO: 160675 - protein, 233 aa, Unknown
  Bacterial polypetide isolated from the Sargasso Sea
MALKNNKTYLENLQLEATNSIKMISSEEEIENWRIDYIGRKGKISNFFQTFKDLKSEEKNELGSLANKLKNTLEKLYKEKLKIIADSKSNIQTEFFDFTLPGTPFSSGSIHPTNQMMQEICAAFNKLGFNIFEGPEIESENYAFDKLNIPTNHPARDIWDTIYVNDIENIKSLVLRPHTSPMQIRIMENNQPPIRVVIPGKCYRYEATDNTHEWHFHQIEGLVIDKNINFLNM

SEQ ID NO: 160676 - protein, 298 aa, Unknown
  Bacterial polypetide isolated from the Sargasso Sea
EELTRIKGYDKVPLINPKKENVKDTLNYRQKIFHFAQRSVASKGYTEAVTWSFTDSKTNILFSDLKNEIKLSNPISADLDVLRSSLYSNLIIGAKKNIHRNFEDLMLFEIGPIFKGNKPGEQSTMIGAIKTGKYSRKNWIEKERNFDVFDIKNDALRTINEIGIDNSKIITSNKSKKWYHPGRSGLLSLGSTNGPELAYFGEIHPSIIKKLDLRTDNILGFEIFLDNIPESRKKIRETKPQFIVSDYQKVVRDFAFVIDEKYSSGEIISFVKKIDKGLIKNVKIFDVYQGENITTGKK

SEQ ID NO: 160677 - protein, 280 aa, Unknown
  Bacterial polypetide isolated from the Sargasso Sea
VVCGAANAKEGLITIYAPPGVIIPKTKTKLVVAKIRGVTSHGMLCSESELNLSDASDGIAELSKSKYEKKIGMNYFSKSKSNLIDLSITPNRPDCLGVKGIARDLAASGFGKLRDIKEKKINSKTKQSLTIKINKEKVQGCSTFGSCLITNLKNTESPQWLKDKLISVGQKPISAIVDITNYVMLDLNRPLHAYDADKIEKGIIVRNSKFGEEFTALDNRKYKLENGMCVISDRKGILGLGGIIGGTRSATELYTKNILLESAYFNPKNNKKNCKKIKYR

SEQ ID NO: 160678 - protein, 96 aa, Unknown
  Bacterial polypetide isolated from the Sargasso Sea
MQFSKNWLKDFIDIELSTETICSQLTMAGLEVEGYEDITSKITGKDSIIKLDITPNRGDCFSILGVARELSVINNLKFSLANISPIDGSFRDMIKV

SEQ ID NO: 160679 - protein, 283 aa, Unknown
  Bacterial polypetide isolated from the Sargasso Sea
MGANLEKIIEKLTDIGLEVEGIKENQAELSYFKIVKVLKAEKHPNADKLKLCQVSLGNSKTINVVCGAKNARDGLVSVYAPPGSVIPKNKMKLKVAKIRGVESHGMLCSESELNISNESDGIIELANREKDIGKNYFKSKGEKSIDLSITPNRPDCLGVRGIARDLASAGLGKLSKLKKIKIKQSFSQPIKISITKEKNQGCMSFGACYIRNIKNRESPKWLKEKIVSLGLKPISAVVDITNYVMLDLNRPLHAYDADKIDKEIIVRNSKAGESFEALDGKKY

SEQ ID NO: 160680 - protein, 261 aa, Unknown
  Bacterial polypetide isolated from the Sargasso Sea
MSVRGIARDLAAAGVGKLKDLKLKKIKDTFKSPMKWKKEFKNNKLCPGVAGRYFKNVKNVESPIWLQQRLKAIGLRPISALVDITNYVTFDLGRPLHVYDADKVSGNLTMRLAHNKEECMALNEVNYKCDDEMIIISDDDKKLHGIGGVMGGLNSGCSMDTKNVFLEVALFDPISVTKTGRKLNLQSDARYRFERGIDTESIYWGVEAASQMINDLCGGEASEYVSSETHIETREIISFNTNMVKTFGGIEIEIKDQVKIL

SEQ ID NO: 160681 - protein, 43 aa, Unknown
  Bacterial polypetide isolated from the Sargasso Sea
GIDSEKWTGFAAGLGVERFCMVRHQIDDIRKFYTNDIRFLEQF

SEQ ID NO: 160682 - protein, 193 aa, Unknown
  Bacterial polypetide isolated from the Sargasso Sea
DVFDIKNDALRTLNEVGIDGSKIVVSNKTKKWYHPGRSGLLSLGSSSGPVLAYFGEIHPSIIKKMDLRTDNVLGFEIFLDNIPEARKKIREAKPKFTVSDYQKVVRDFAFVIDEKYSSGEIINFVKKIDRELIKEVKIFDVYKGDKIVSGKKSIAFNVTLEPKNKTLSEKDIEIISKKIISTVIETTNATLRS

SEQ ID NO: 160683 - protein, 299 aa, Unknown
  Bacterial polypetide isolated from the Sargasso Sea
TIVNQARKYGLATDASHRFERGVDPEIQQLALERYVCLLNEIAIYDLAELYRSLTEKTQKKNVQLSIERFNNFSGLNMNANQAILILSNLGFEIAAKGSKRLLLNVPSHRFDISLEEDLYEELLRCYGYDNIPISKPKAGPIIKNKEDNALENLRIGFVHAGFKELMHMPFVSRESFQQLNSEEWTAAELQNPINENEPCLRGSLFKSLFSAINNNVKKGYSSIKVFEAGNVFKKEKRGFTQSLHLSGITYHHEPNQTWSKKQFTYDFFSIKAEILKLLQTLGIHNAEFKKASFVSPFS

SEQ ID NO: 160684 - protein, 270 aa, Unknown
  Bacterial polypetide isolated from the Sargasso Sea
MKFTISWLKEHLDTKFKDSELIDKLTDVGLEVESYERASSDLDNFKVAKIINAEQHPNADKLKVCDVDIGEKNPVKVVCGAPNAMKGLFTVYAGPGSVIPKNNMKLTVSKIRGVTSYGMLCSESELNLSDESNGITELKSNNYSEKVGKNFFKNNIEKVLDLSITPNRPDCLGVRGVARDLAAAGVGKLKNTPNIKIKNNGSQKIKVSITKDKNQGCTIFGSCLIKDVTNKESPKWLKDKIISVGQKPISAIVDVTNYVMLDLNRPLHAY

SEQ ID NO: 160685 - protein, 43 aa, Unknown
  Bacterial polypetide isolated from the Sargasso Sea
DRLAMLKYGINDLRAFFETDYRWLNHFGFDPLDVPSNYRGLSR

SEQ ID NO: 160686 - protein, 165 aa, Unknown
  Bacterial polypetide isolated from the Sargasso Sea
MSDFQKKILDYKNKLNNTKDLEEIESIRTEIFGKSGFINSEFKKIGSLPIDEKKNIASNINIAKQALLEIFKLKSLDVLDKDLNEKINKEKIDVTLPEHEFKVGKVHPVSQVIDEISCIFSEIGFSVEEGPDVENDYNNFTALNTPENHPAKDMHDTFYLDENMK

SEQ ID NO: 160687 - protein, 224 aa, Unknown
  Bacterial polypetide isolated from the Sargasso Sea
MKFTIDWLQEHLDTKYNDKKIIDKLTNIGLEVESFENQSSEQNQFIIAKIVKVEQHPNADRLSVCDVDIGKKETVKVVCGAPNAKKDLITVYAPPGAIIPKNQMKLSISKIRGVTSYGMLCSESELKLSDESEGITELSSKYNNQIGKKYFKNNSSKVIDLSITPNRPDCLGVRGIARDLAAAGAGKLKNYSQSKIKFKGSQKIKVKIIKEKNQGCDVFGSCLI

SEQ ID NO: 160688 - protein, 250 aa, Unknown
  Bacterial polypetide isolated from the Sargasso Sea
VVRFSPTDTVTLRFTGQTTFRAPHPDETSRTRVTALQYVNQTGAFKAVDLTGNTNLEPEEATTYNIGLITDFGTDNWTATLDYYNFEFDNPIINENHQQLANAYGAGGAGKAAIQSQIFGGTNLVNDGSFGVGDIARIQSNYVNGPKTETDGLDLFIKYDTDVGNGTLSTGLEANAILGYSVADYNVGGALVAAAYECAGFFNINNTCRPMPEQKGKGFVNYVDAKHNFYGAVNYISSYYNRRDSGRVAE

SEQ ID NO: 160689 - protein, 285 aa, Unknown
  Bacterial polypetide isolated from the Sargasso Sea
ETQILNSLDGVVVARVADLRPHPKADRIQLVDVEIDNGEPMQVCCGAFNMSVGDLIPFATIGTVMPDGMEIAQRKMRGEMSNGMCCSAAELGLGADHDGIMILPDNLETGAPLMQELGLVGDVLWDLEINPNRPDAMSIAGVARDLAARLNVPFQIPERSVTPTGSDQGLASIEIADGDLCPRFTGRVLTGVSVGESPLWMQMRLTLLGMRPINSVVDVSNYVMLELGTPNHTYDLSLLPNGHIGVRRATAGEKITTLDDQERTLQSNDGVIVNEADEPIGIAGV

SEQ ID NO: 160690 - protein, 244 aa, Unknown
  Bacterial polypetide isolated from the Sargasso Sea
MITVLTEEEVLDKSFSRGKKAADRVDDPVKVFRVRKQLVRMVQTSSDVAAQYLEDTMKAWPSLDQMPLFDKSMVEACVGCDDYRHHLSMLGWGCKQIRKISKQNSAKIIRTARFEIMHDARKEAYGRISSILRRVGPSLDWLHESRMILRKLPVIDSLCPTIVVCGAPNVGKSAFISALSSGNMEINHYPFTTKRLHVGHFTHRRVPHQMVDTPGLLDRPMHDRNAIEMQAIAAIEHIGTICIF

SEQ ID NO: 160691 - protein, 282 aa, Unknown
  Bacterial polypetide isolated from the Sargasso Sea
MEVDSHKKLGNDYVIDIDLTPNRSDCLSIYGVARDLNASTYNYKFKKTQSCKPVKLNTVKSNYVEIKDLDACPNFNYLILDCCDKAPKTPKYIIEKLKSSDIDSIHYVVDILNYIMLEVGQPMHAYDLDKLSGKLRISTSIKKEIFQGLNNEEYKLEKGFLTIKDNEHIQCLAGILGSKNSMVTKKTKKVLIESAFFNPKSIINRARSLKLQTESSYRFERGVDYLLPNSALDKFVNYIKDTDIKILERKSLGKNSSLPKNKKLNINLEAINSTIGTNLSKN

SEQ ID NO: 160692 - protein, 227 aa, Unknown
  Bacterial polypetide isolated from the Sargasso Sea
VFRGSKPGEQSKMIGAIRTGKYSRKNWIEKERNFDVFDIKNDALRTLNEIGIDLSKIAVSNKTKKWYHPGRSGLLSLGSMSGPPLGYFGEIHPSIIKKLDLRTDNVLGFEIFLDNIPESRRKIREAKPQFIFSDYQRVVRDFAFVIDAKYSSGEIVNLVKKIDNELIKNVKIFDVYQGDNIESGKKSVAFTVTLEPKDRTLNEKDIEHITKKIISTVQEKTGATLRS

SEQ ID NO: 160693 - protein, 292 aa, Unknown
  Bacterial polypetide isolated from the Sargasso Sea
YFKNKNNNNVIELSITPNRPDCLGIRGIARDLYACGYGNLKKIKKIKFNKKSKHNLKIKIEKSKNQACSIFGSCLIKNISNKQSPSWLKERILSLGLRPISAVVDITNYVMFDLNRPLHAYDLDKIKKSITVRNSKKGETLEALDNKTYVLKENMCVISDDEGALGLGGIIGGVRSGTELDTKNILIESAYFDPGITRKTSKELEINSDAKFRFERGIDPQSVKEGLEMAAKLITEICGGEVSNFDIQETQKFRKKIIKFNSNLVSKTIGIKINEKNIIKILTRLGLKQKRK

SEQ ID NO: 160694 - protein, 153 aa, Unknown
  Bacterial polypetide isolated from the Sargasso Sea
GKSYFSKPSSNLIDLSITPNRPDCLGVRGIARDLSAAGFGNLKPEKDKKIKSNKKQTLKVKITKEKNQGCLSFGSCLITNVKNTESPKWLKDKLISIGQKPISAIVDITNYVMIDINRPLHAYDADKIDKGIIVRNSKSGEKFTALDNKNYKL

SEQ ID NO: 160695 - protein, 321 aa, Unknown
  Bacterial polypetide isolated from the Sargasso Sea
PRKFITDKLIKSDITPVNIIVDISNYVMMEVGQPTHAFDIDKINGKLSIIKSKKDLAFIGMNNKQYNINKGTPVIVDDDDVIHALPGVIGSKESMVDNDTKNILFESAFFLPNTVRSLSTKYRIQTDSSYRFERGVDYKLQEFALSRIHLILSSYISIGKCNLNKISYKSPLTKTNSFKFDYKLFKRILGIELQSNKVKAILSNLGFIFKSDKVIVPSFRFDVTSNYDLVEEVSRIIGYDNIPESPLSTKISLTNKRYTFQDRLITLGYKEAINFTFIAKNYSHNNAQLELKNPISKDKSVMRDSLIPGLLKNIQYNHNRK

SEQ ID NO: 160696 - protein, 169 aa, Unknown
  Bacterial polypetide isolated from the Sargasso Sea
MQELDDLKKFSDDLAEQIKSAQDLPELENLRVTVLGKKGKLTEQLKELGKLPKELRPQAGQEINKIKAKLHTLIAQQQGVIKDKLLSEKLSSEKIDVSLAGRNDNIGARHPLKLVMQGFIDFFRLRGFDLASGPDIETDYYNFQALNVPEHHPARASQDTFYFHAKTIL

SEQ ID NO: 160697 - protein, 98 aa, Unknown
  Bacterial polypetide isolated from the Sargasso Sea
MTNKDRLVIHLPSDQSIGSFHPISSTLREISLLLSNLGFSQASGPEIESEKFNFDMLNIKESHPARQMHDTFYVNNKLGVLRTHTSPVQIRAMLKISH

SEQ ID NO: 160698 - protein, 285 aa, Unknown
  Bacterial polypetide isolated from the Sargasso Sea
MKITFDWLKNHLQTKNSENQLLDKLTDIGLEVEGIENKSSGLEKFIVAKILKAEKHPNADRLKVCDVDIGNKKAIKVVCGALNAKVGLLTIYAPPGAIIPKNNMKLSVTEIRGVTSYGMLCSESELNLSDESDGICELKQKQFKNKIGKKYFNKNASKLIDLSITPNRPDCLGVRGIARDLATAGFGKLKANKINKIISKGKQKISVKILKEKNQGCTSFGSYLLKNVKNTESPKWLRDKLISVGQKPISAIVDVTNYIMLDLNRPLHAYDADKIQKGIIVRNSK

SEQ ID NO: 160699 - protein, 196 aa, Unknown
  Bacterial polypetide isolated from the Sargasso Sea
MKITYDWLKDHLQTKNSENQLLQKLTDIGLEVEGVESSTSDLDEFIVAKILKVEKHPNADRLKVCEVNIGKNDLIKVVCGAPNANKGLLTIYAPPGSIIPKNKMKLEVTKIRGVTSYGMLCSESELNLSNESDGIVELNQNKYQNKIGKKYFTKSKSNLIDLSITPNRPDCLGVRGIARDLATAGFGKLKNIEFGK

SEQ ID NO: 160700 - protein, 199 aa, Unknown
  Bacterial polypetide isolated from the Sargasso Sea
MKFTLDWLKDHLDTSKELKTITDTLTNIGLEIESVEDKSEDFKNFTVAKVLKAEKHPDADKLKVCQVKTINGDFQVVCGASNAREGMLGIFAPENSYIPGTDLHLKKTKIRGVESCGMLVSEREMGISDEHDGIIEIKDDYKIGDQFSKIFKLDEPIIEINITPNRSDCLSVRGIARDLAAAGLGKLKELKFKKIKDSL

SEQ ID NO: 160701 - protein, 96 aa, Unknown
  Bacterial polypetide isolated from the Sargasso Sea
SAEMDVAYTKVNNKIKIGEGNNWLEILGCGMVNPIVLENCKIDSKKYQGFAFGMGIERLSMLKYGISDLRSFFDPNYRWLDHYGFSILDSQTRSGL

SEQ ID NO: 160702 - protein, 243 aa, Unknown
  Bacterial polypetide isolated from the Sargasso Sea
MFGGAKNAREGLLTVYAPPGAIIPKNKTKLIVAKIRDVTSYGMLCSESELNLSDESDGIIELSYSKNIKNVGKSFFSKSISNLIDLSITPNRPDCLGVRGIARDLSAAGFGSLKLKKENKIRSNKKQTLKVKITKEKNQGCLSFGSCLITNVKNTESPQWLKDKLISIGQKPISAIVDITNYVMIDINRPLHAYDADKIEKGIIVRNSKLGEEFTALDNKNYKLDDGMCVISDDKGVLGLGGI

SEQ ID NO: 160703 - protein, 305 aa, Unknown
  Bacterial polypetide isolated from the Sargasso Sea
LKSLKYSKKIGENFFKNNAEKVVDISITPNRPDCLGVRGIARDLAAAGAGKLKNISHNNIKKNGSQKIKVSISKDKNQGCTKFGSCLITDVTNKESPKWLKDKIETLGQKPISAIVDITNYVMLDLNRPLHAYDADKIDQEIIVRNSKKGETFEALDNKQYKLEDDMCVISDKSGILGLGGIIGGTRSSTEISTKNILLESAYFTSRSTRKTSKLLNIDTDAKFRFERGIDPQSIELGLSKAAQLIIEICGGKISKFDIQKIAKTKKNKIKFKTSLFEKITGFKVKDNEIVKILSDLGFEISKRN

SEQ ID NO: 160704 - protein, 264 aa, Unknown
  Bacterial polypetide isolated from the Sargasso Sea
FKPSVIRGRARRLGFQTDASIRFERGVDHEIQKLAVDRASEILCETVGGEFGTIQESKLHKELPKLKKVSIDINRANKILGTNITSSKAKKYLKGLGMSPKGSTSNLEITSPSWRYDIEIEADLIEELARLEGYDSLPAISLDPNFKINTKSKEKVISSSLVSQGFSEVINYSFISEDDERIFGESKTMVELENPISQNMRFMRSSLFPGLINTFIHNLNNGMESQKLFEIGSVFTHKKSDNPAEKTRVSGLIFGDAAPNHWVG

SEQ ID NO: 160705 - protein, 274 aa, Unknown
  Bacterial polypetide isolated from the Sargasso Sea
SNEHDGIIRLEEKETIGTSFSEIYGLNDIVIEIGITPNRQDCLGVKGIARDLASAGMGELLERKISREKGSFKSPIRIEIQDNKICSAFAGRYFRNVKNTESPEWLKNKLKSIGLRPISALVDITNFVMYDENRPLHVYDADKIDGKIIVRSANDGECFLALDEKDYQLKNGMCVIADEKKVLGLGGIMGGESTGCSTETKNVLLESALFDEINTAKTGRNLSILSDARYRFERGIDPNSTLKGIDLATQLILEICGGECSEVELAGNIKENKN

SEQ ID NO: 160706 - protein, 318 aa, Unknown
  Bacterial polypetide isolated from the Sargasso Sea
CLGVRGIARDLAAAGAGKLKKISLKNIKKNASQKIKVSIKKDKNQGCTVFGSCLIKGVTNKESPQWLKEKIISLGQKPISAIVDITNYVMLDLNRPLHAYDADKIDKEIIVRNSKKGETFEALDNKEYKLGDDMCVISDKSGVLGLGGIIGGTRSGTEINTKNILLESAYFIPRSIRKTSKLLNIDTDAKFRFERGIDPQSIELGLLKAAELISEICGGKISNFDIQKTDKHEKNKIKFNVSLFEKITGFKVNDNEIIKILIDLGFEVSKKKLELDLKIPTWRPDITQPIDIVEEIVRIKGYENIETLKPEKTKIKDT

SEQ ID NO: 160707 - protein, 263 aa, Unknown
  Bacterial polypetide isolated from the Sargasso Sea
NNMKLSVSKIRGVTSYGMLCSESELNLSNESEGITELTTGKYSDKIGKNFFQSNTEKVVDLSITPNRPDCLGVRGIARDLAAAGVGKLKKISLKNIKKNGSQKIKVSITKDKNQGCTVFGSCLIEGVTNKESPQWLKEKIISLGQKPISAVVDITNYVMLDLNRPLHAYDADKIDKEIIVRNSKKGETFEALDNKEYKLDDDMCVISDKSGVLGLGGVIGGTRSGTEINTKNILLESAYFIPRSIRKTSKLLNIDTDAKFRLK

SEQ ID NO: 160708 - protein, 202 aa, Unknown
  Bacterial polypetide isolated from the Sargasso Sea
KFGKWVNSGKDNDLNYYQARGKLKEALSCLNIKINDKPTDSIDFLHPGRTAKLIFEGKDSGYFGEIHPKLILEKMSLKKVYLFSINVSNLLGASTRKNKWIPIFKQYPIVPKMERDINFVFSKKFLISDITSQIRKTGKNLLEDVYLIDVFEDIKLGEDYISYTFRLSYRDKDKTLLDSEIKTIHSSIISKVEKSFNTKLRN

SEQ ID NO: 160709 - protein, 311 aa, Unknown
  Bacterial polypetide isolated from the Sargasso Sea
ITGTNEFGMFNRGHELTVDTYSDRPMTNQFQGNMADICPVGAITEKEFRFKRRVWKLKKTPSICVGCSTGCNVTIEYDKNEVFRLKPRDNPDVNKWWMCDQGRLTYKDLNIRENRIAHPLGKTAEGFQEISWENAFSAIQEKISELQPTSNEVIGLVDTHASNEELYLFKKLLKEGFDSDQLFFPDVEWEQPVSDFFINSLITSDKNPNRAGARMLGLKGAKSSKEVTSKIPTGTKVLLVFGKPFEDENLLSQAGNISLVINIAAWQSGWSETADVTLPGRLHSEKDATYTNKAGRVQRVSTAIRAFTRPV

SEQ ID NO: 160710 - protein, 306 aa, Unknown
  Bacterial polypetide isolated from the Sargasso Sea
ADRLKVCDVDVCDKEIKKVVCGAANAREGLLTIYAPPGAIIPKTKTKLVVAKIRDVTSYGMLCSESELNLSDESDGITELSSSKYSKNIGKSYFFKPSSNIIDLSITPNRPDCLGVRGIARDLSAAGFGNLKPEKDKKIKSNKKQTLKVKITKEKNQGCLSFGSCLITNVKNTESPKWLKDKLISIGQKPISAIVDITNYVMIDINRPLHAYDADKIDKGIIVRSSKSGEEFTALDNKNYKLDDKMCVISDNKGVLGLGGIIGGTRSGTELETKNVLLESAYFDPRSIRKTAKKLNIDTDAKFRLK

SEQ ID NO: 160711 - protein, 263 aa, Unknown
  Bacterial polypetide isolated from the Sargasso Sea
SKMKLKIAKIRGVESKGMLCSESELNLSKESDGIIELKNMSNKIGKSFFKNSSEKVIDLSITPNRPDCLGIRGIARDLSAAGLGKLLDLKKNKINQKKNQSIKISITKEKNHGCLTFGSCLITGIKNQESPKWLRDKINSLGLKPISAVVDITNYVMFDLNRPLHAYDADKIDKEIIVRNSKKGESFTALDDKKYTLQKDMCVITDKSGVLGLGGVIGGTRSGTEIETKNILLESAYFHPSSIRKTSKLLGLETDAKYRLKEE

SEQ ID NO: 160712 - protein, 236 aa, Unknown
  Bacterial polypetide isolated from the Sargasso Sea
FTVYAPPGAVIPKTKMKLKVAKIRGIESFGMLCSGSELNQSSDKDGIVELNEKEKNIGKKYFKNSAEEVIDIAITPNRPDCLGVRGIARDLAASGLGQLRKQPPIKINQKFKQPIKISISKEKNQGCAVFGSVYIKNVENKESPEWLKNKIISLGLKPISAIVDITNYIMFDLNRPLHAYDADKINKEIIVRNSKKGETFQALDNKKYTLGNNMCAITDKSGVLGLGGIIGGNQIW

SEQ ID NO: 160713 - protein, 93 aa, Unknown
  Bacterial polypetide isolated from the Sargasso Sea
MTVMADEKRPEALAGVMGGELSGCTGDTKNVFLEAAYFDPIRTAITGRKLNLQSEARFRFERGIDPLFQRPGAELASQKILDLCGGQASDLIV

SEQ ID NO: 160714 - protein, 288 aa, Unknown
  Bacterial polypetide isolated from the Sargasso Sea
YYVTKGSVLRCHTSAHQLELLKHGHKRFLVTGDVYRRDTIDATHFPVFHQVEGVRVFEPHEWESQNLSSLELASTELKTTLEGLVRHLFGECEMRWVDAYFPFTEPSYELEIFFKGEWLEVLGCGVMQSSILDAAELDGHRAWAFGLGLERLAMILFDIPDIRLFWTPDPRFSQQFKSGMFRAGGVGMKKFSSYSKYPPCYKDVSFWLPQDKNFTENSLCELVRSIAGTLVEEVKLIDEFENKKLKRTSHCYRFTYRSMERSLTDDEVNEIQNEVRQRLETDLHVVLR

SEQ ID NO: 160715 - protein, 144 aa, Unknown
  Bacterial polypetide isolated from the Sargasso Sea
MKDFNKLEAEIAEARDKLINIESINEFRIKYIGKKGIISLEMKELASLSGNERKKQAEKLNKIKDIILKIIDTKTEDFNNIELDKKLNSETLDITLSTSNSSGTIHPISQVIEEVITIFGELDFFVAEGPEVETDYNNFTALNT

SEQ ID NO: 160716 - protein, 269 aa, Unknown
  Bacterial polypetide isolated from the Sargasso Sea
DCLGIRGIARDLASSGLGQLKKQPPIKIDQKFKNPIKISIKKEKNQGCGIFGSVYIKNVQNKESPEWLKKRIISLGLNPISAIVDITNYVMFDLNRPLHAYDADKINKEIIVRSSKKGESFEALDNKKYTLQNNMCAITDKSGILGLGGIIGGTRSGTELSTKNILLESAYFFPSVIRKTSKILNIDTDAKYRFERGIDPNSIKLGLELGMCMILDICGGKASKLSIVGKIKDERKLIDLESEKFEKVIGFSITESEIKKILTSLGCSL

SEQ ID NO: 160717 - protein, 164 aa, Unknown
  Bacterial polypetide isolated from the Sargasso Sea
MKIAYPHLLNFLKEKPSLDELSDKLLQLGHEHEIEGDIIDLEITPNRGDCLSLKGIARDLNYFYKAELDRDTYDENIPKSDFSFQNKAKDLCPNISFVEIEIDGSISGYKPYLENYFKDLKINKNNFFTDVSNYLAYETGQPTHCYDASKINDTLVLKREIKRK

SEQ ID NO: 160718 - protein, 309 aa, Unknown
  Bacterial polypetide isolated from the Sargasso Sea
KKTKIRGVESCGMLVSEREMGISDEHDGIIEVKGNFKVGDQFSKIFKLDEPIIEINLTPNRSDCLSVRGIARDLSAAGLGKLKELKFKKIKESFKSPMKWNKEFKDNKLCPGVAGRYFKNVKNVESPTWLQKRLKAIGLRPISALVDITNYVTFDLGRPLHVYDADKVSGNLKMRLANNKEECIALNEVNYQCDEEMIIISDNDEKIHGIGGVMGGLKSGCNMDTKNVFLEVALFDPISVTKTGRKLNLQSDARYRFERGIDTESIYWGVEAASQMINELCGGEASEYVSSELHIEKRAKIFFNTNMVK

SEQ ID NO: 160719 - protein, 247 aa, Unknown
  Bacterial polypetide isolated from the Sargasso Sea
SAKKNIHRNFEDLMLFEIGPVFKGSKPGEQSTMIGAIKTGKHSRKNWIEKERNFDVYDIKNDVLRTLNEVGINNDNITTSNKTKKWYHPGRSGLLSLGSSSGPELAYFGEIHPFIIKKLDLRTDNVLGFEIILDNVPESRKKIRETKPRFIVYDYQKVVRDFAFVIDEKYSSGEIINLVKRIDKELIKNVKIFDVYKGDNIASGKKSIAFNVTLEPKDKTLSDNDIEKISKKIISTVQDTTGATLRS

SEQ ID NO: 160720 - protein, 230 aa, Unknown
  Bacterial polypetide isolated from the Sargasso Sea
MRISIDWLKNFVETNESAANIADTLTMLGLEAENSVELHGLNDIIVGEVIDRIKHPNADRLNLCKVFDGQNTLPIVCGAPNVDKGQKIAFAPVGAILPGEFKINKAKIRGELSEGMICSEKELNISNEHEGIMVLSKEAIPGQSFLEYLANDTQVLELDITPNRADCFSHYGVARDYAAKKNIKLNPLKYKPLSFKENHASSEISISIDNAQECRRYIAGIVKNVKVKDS

SEQ ID NO: 160721 - protein, 59 aa, Unknown
  Bacterial polypetide isolated from the Sargasso Sea
MLIPDKYQGYAFGIGIDRLGMLKYGINDLRAFFETDYRWLNHFGFDPLDVPSNYRGLSR

SEQ ID NO: 160722 - protein, 110 aa, Unknown
  Bacterial polypetide isolated from the Sargasso Sea
MLRQLPPLPMKPLLRGWWCRSDLGQRQFTGQVAAAGGCQFIVVIAQRQQQLVVLEQTQQGLPLTGADHRSGVVQQLAGQLPPLRVTKVNQASSFPVCRTYCNELNNLAIR

SEQ ID NO: 160723 - protein, 274 aa, Unknown
  Bacterial polypetide isolated from the Sargasso Sea
RVCYCSSDAVPPSSPPSTPPAAPPAAPPLVPGAGWQVASQMGMDCNAVCALAGRMCYDEENRAHKGELDSEAEMRSLLTGLLGSDPCTGFAFGADWMGDVPNYRGTCPDHDSHPDFSWCITGECYSFPTGQTSFSCSTSSDYATRVCYCSSDAVPPSSPPSTPPAAPPAAPPLVPGAGWQVASQMGMDCNAVCALAGRMCYDEENRAHKGELDSEAEMRSLLTGLLGSDPCTGFAFGADWMGDVPNYRGTCPDHDSHPHFSWCITGECSSFPTG

SEQ ID NO: 160724 - protein, 213 aa, Unknown
  Bacterial polypetide isolated from the Sargasso Sea
RVFSSSIDIDLSKDNSEFDLKMKRGQFKISNTSFSSTPGKQYEDQSSVSLPELLLEANDLVLNGTITDTPVIHRGKGKFRIRNFEIKIPKGIKEEPEIESMLKTLGIWNNSLMIRLIEFDINLINEFTGDLLFRFQTPFMKISVDGDFSLRQGNSIPGVVLHNAEVRIHPISLGIRKWLREWEQKNGRMFTRQGATIVLKINGPIDDPVIQGY

SEQ ID NO: 160725 - protein, 222 aa, Unknown
  Bacterial polypetide isolated from the Sargasso Sea
YFFEIQDISQVFSSSIDIHLSKDNSEFDLKMKRGQFKISNTSFSSTPGKQYEDQSSVSLPELLLEANDLVLNGTITDTPVIHRGKGKFRIRNFEIKIPKGIKEEPEIESMLKTLGIWNNSLMIRLIEFDINLINEFTGDLLFRFQTPFMKISVDGDFSLRQGNSIPGVVLHNAEVRIHPISLGIRKWLREWEQKNGRMFTRQGATIVLKINGPIDDPVIQGY

SEQ ID NO: 160726 - protein, 365 aa, Unknown
  Bacterial polypetide isolated from the Sargasso Sea
MKITFDWLKDHLKTNLKEKNLLEQLTNIGLEVESIESLSADNELFKVAEIIKTEKHPNADRLKVCDVNIGKNEIKKVVCGAANAKEGLLTIYALPGAIIPKTKTKLVVAKIRGVTSYGMLCSESELNLSNESDGITELTKDFKKNIGKSYFSKSKSNLIDLSITPNRPDCLGIRGIARDLAASGFGKLIDLKEKKIHSKNKHTLKVKINKEKGQGCTVFGSCLIKDVKNSESPKWLKDKLISIGQKPISAIVDITNYVMLDINRPLHAYDADKIEKGIIVRNSQSGEEFTALDNKNYKLESGMCVITDNKGVLGLGGIIGGTRSGTEFNTKNILLESAYFEPGSIRNTAKKLNLDTDAKFRLKEV

SEQ ID NO: 160727 - protein, 423 aa, Unknown
  Bacterial polypetide isolated from the Sargasso Sea
AFDLSKIYGNKIYVRKSKSKEKITTLDGENRELPENSIVIADEKNSIGLAGIMGGSNSEIDDKTTSIFLESANFNPSLIRNTSKRLNLSTEASIRFERNLNPELTEYALSRAIDLILKIAGGKIRNHIEDIYKYPKNNEYIILSKEKIKNHLGLEIDDEKISQTLENLDFQFEINSDKSKWYVNKPFWRSDINISEDLHEEIARIIGYDEIPLSFLSGQIPKWEPNLEYDTKIFLQDILVGIGLSETISYSATSEKLIKLTPDIHNNGDFIKLDNPISNEHSYLRQSLIPSLLLNASRNTHNWKKPIKLFEIGNVFFKNKSEVHEKTMVSGILTGYRNELNWNKKEEYVDYYDVKGIVEFISKKFNIDIQTKDYDSQIFLNNRSAKLYNKKIGKDIGFIGEISSELLEDLDFNFKNASILKLI

SEQ ID NO: 160728 - protein, 294 aa, Unknown
  Bacterial polypetide isolated from the Sargasso Sea
MTPGKKFRDAIKNSSPLIIPGAINAYSAKLAKKANHKAIYLSGSGVAAASYGLPDLGVTSLDDVIIDAKRITDATDLPLLVDIDTGWGGSEEISNTIEEMEKAGVAAVHIEDQVYDKRCGHRPNKQIVSVAEMQDRLKAAVDAKKDESFFIMARTDALASEGIEKAIERCGEYLKVGADGIFFEAALSLDEYKEFKKNFSFPLLANITEFGKTPLFTQKELSDVGVDIVLYPLTAFRAMSLSAEKIYNSIIKDGTQEPLLDIMQTREELYEVLDYYNFEKQLDEQFENTKKEGS

SEQ ID NO: 160729 - protein, 365 aa, Unknown
  Bacterial polypetide isolated from the Sargasso Sea
DIKDIEVSRTLKSLGMKIKPTKSSEKILVFIPSWRFDISIEEDLVEEIARLIGYDKLPSSSLSSSSRKKVDFLNENIVSNLVSLGYNEVITYSFVDEKEALLFDKKNKMIFVKNPISQNMSVMRTTLLTGLLSSFRYNYNRGQESIKIFEIGSIFSKGKKIIQKEKLAGLVSGKISDIHWSDENRSFNFFDIKGDLEVLLNNDFSFKTGQLSFLHPGKTAIISLKNKEVGFIGALNPKISDSLGIKQEAYYFEIDLNSLPKNKTKKFSNYSKFPVAQRDLAFLVDKQVPVSLILELAEEKSGRNLKEVKLFDIYQGKGIPEDKKSIAFSLFWQSMKGTLTDEEVDSIIEDISEHLSRQIQAELRS

SEQ ID NO: 160730 - protein, 517 aa, Unknown
  Bacterial polypetide isolated from the Sargasso Sea
KGETFEALDNKEYKLDDGMCVISDQSGVLGLGGVIGGIRSGTELETKNILLESAYFIPRSIRKTSKLLNIDTDAKFRFERGIDHQSVELGLQKASQLISEICGGKISKFDIQKIKQYKKIEIKFNTSLFEKITGFKVKENEIIKILKDLGFEVSKKKSELNLKVPSWRPDISQPIDIVEEVVRIKGYENIETIEPKKNRLKDTLNKQQKLFHFLQRSVASKGYLETITWSFTDSRINNFFKENLKEIKIVNPISSDLDVLRNSIFSNLAFYLKKNLDRGFKDISLFEIGPIFKNKQPGEQLTVIGAIKSGKISRLNWNEKDRLVDIFDVKKDLIQTLMEAGYDKQSFFIRDKSPSYYHPGKSGSVYLDKDDIDPVAYFGELHPNIVKKLDIKTEGVVGFEIYLDYLKDNKIKLKDQKSNFEYSDYQKSERDFAFVVDKNYKAQDLIEIISSIDKNLIRSIKIFDIYEGENIPDGKKSIALNVTIQSTKKTLEENDLEKINKLIISSVESKSGAKIRS

SEQ ID NO: 160731 - protein, 413 aa, Unknown
  Bacterial polypetide isolated from the Sargasso Sea
KHNLKIKIEKNKNQACSIFGSCIIKNIKNTESPGWLKNRILALGLRPISAVVDITNYVMFDLNRPLHAYDLDKIKNKITVRNSKKGESFKALDNKNYTLDKDMCVIADDEGVLGLGGIIGGERSGTETNTKNILLESAYFDPTLIRKTAKKLDLNSDAKFRFERGVDPQSVTAGLDSAVELILEICGGEVSKLDLQQTKKFKDLEIKFDPKMVTKTVGTNINTNELKKILSNLGFTIKTKGKFLNVKVPSWRPDIFGEIDLVEEVIRIIGFEKIKSIEPEKKRTKPTLNFFQKHFHLAQRSVASKGYLETITWSFTDEKINNKFKEKLESVKIVNPISSDLNVLRNSLYPNLIFYLEKNLNRGFGDQALFEIGPTFTGKKPGQQITVVCGIKKQFIDEDNNLKKNDLVDVFHI

SEQ ID NO: 160732 - protein, 496 aa, Unknown
  Bacterial polypetide isolated from the Sargasso Sea
GASTLNKELATIYDLNIADFFLVVREVVEQACCWGIRCSGRGSAANSIVAYLLGITQVDPIEHGLLFERFLHRGRKGTPDIDIDFDSERRDEIIGWIESRFGIEHTAMTATIVKFRLRLALREVLKVYGFTNNEISNITKLVPHSEPNSIREFTDILEKKIDSMKLELVLGAVELLQDCPRHLGLHSGGMVLSELPLSHFTPIQISKNGVKVIQFDKDDLDCLGLIKLDVLGLRMLASITEAEEMINTHYRENISLNTIPYDDKKVYSYLQSGQSLGTFQIESQGQMHLLALHQPKCFKDIISQIALFRPGPLQGGMVHPYIRRRNGLESVSYDHPDLEPILKDTYGIILFQEQILEIANRFAGMSLAEADDFRSEMSKRRSQEKLSEMRNNFITGAAHKGIEESIAFNVFEKIANFVGYGFCRSHAAAFAKIVYQSVWLKLYFPAAYMAAIMQHHPGMYPLQTLEEEAKRLGVRILTPDINKSHVRYTLEIFDHK

SEQ ID NO: 160733 - protein, 490 aa, Unknown
  Bacterial polypetide isolated from the Sargasso Sea
MIDEWSTEILTAQDFSKKAEAADLCPYELNKLLLKEAQVVIVPYVYFFEEFVRKYVLGWMGTSIDKIITIIDEAHNLPDWARSAASESLSLESINRAVSEVRDYGYLLPNNQDPVQFLNFVEASIEKLAEEHILDEEAEGHLPSHIVSPDSEVATFETEMMSLGKMTLFKLKQSSTEIAKMGQLTRQYLLDHGKRPRSYLGSVGDFLCRWLDSIESHTIRLVGKEPLRLEKVCLDPRVMTGFLEDTAGVVSMSGTISPLDMFRDLVGLRPDSVLERKESIFPKNNKKIVYLTDVTTSYNELNRKSSTWDKIVSKLELIISNFKGNIALFFPSYKLLESALQGIKIKKPIYREYLGMEQEELMQTVDSFKSDSSAVLAGVMGGRLAEGIDYPSTTLEMAIIVGIPYPAPGVRQNALQHYYDISFSGQGWKFAVEAPAVRKLLQAAGRVVRSETDRGFIVIADSRTGRFLEYIPELEQSDDIVSEIGEFFEA

SEQ ID NO: 160734 - protein, 643 aa, Unknown
  Bacterial polypetide isolated from the Sargasso Sea
VIDLSITPNRPDCLGVRGIARDLAAAGVGKLLNLKKSKINQKKSQSIKISIAKEKNQGCLAFGSCLIKGIKNQESPKWLKDKINSLGLKPISAVVDITNYVMFDLNRPLHAYDADKIEKQITVRNSKKGESFTALDDKKYTLQKDMCVITDKRGVLGLGGVIGGTRSGTEIDTKNILLESAYFLPSSIRKTSKLLGLETDAKYRFERGIDPNSMIDGLKIATDLILKICGGEASKFNITGKKEYKNKSIDLEVGKFEKIIGFAITASEIKKILNSLGFSTKSGKKTLKVIIPTWRPDINQEIDLIEELIRIKGFDRINLIEPEKSRNKETLNFQQKLFHLGQRSVSNKGYYEAVTWSFTDQKIDDLTNSSTNPIFIINPISKELNVLRRSIFSNLLFYLKKNHDRGFHDISLFEIGPVFYGKKPGEQQTVIGAVKSGQINKKSWSEKTRNVDIFDMKTDVIKTLIEMGISEDHLIVSDKSETCYHPGRSGSVNLKTNNGILLAQFGEIHPSIISNLDYKEKNIYGFEIFIDNIPKPNKKLRVLKENFKFSDFQISERDFAFVIDKNYQVGRLNKIIKELDRNIRSVNIFDVFEGGNLPPEKKSIAINVSLQAEDKTLSDNDLNQISEKIIKEVENKTGGNIRS

SEQ ID NO: 160735 - protein, 422 aa, Unknown
  Bacterial polypetide isolated from the Sargasso Sea
NSSEGLDLFKVAKIVKTEKHPNADRLKVCDVDIGNKQIKKVVCGAANAREGLLTVYAPPGAIIPKNKTKLVVAKIRDVTSYGMLCSKSELNLSDESDGIAELSSSKYAKNIGKSYFSKPSSNIIDLSITPNRPDCLGVRGIARDLSAAGFGNLKPEKDKKIKSNKKQTLKVKITKEKNQGCLSFGSCLITNVTNTESPQWLKDKLISIGQKPISAIVDITNYVMIDINRPLHAYDADKIDKGIIVRNSKSGEEFTALDNKNYKLDDGMCVISDNKGVLGLGGIIGGTRSGTELDTKNVLIESAYFDPRSIRKTAKKLNIDTDAKFRFERGIDQLSIEDGLNKAGFLIKEICGGEISKIDIQKIESYKNKVIKFEPKTFEKITGFKISTKEMTIILEKLGFKLKKEKKFIKLSVPSWRPDIVQ

SEQ ID NO: 160736 - protein, 350 aa, Unknown
  Bacterial polypetide isolated from the Sargasso Sea
MSLVLITGSCGLVGSESAEFFSKKGFEILGIDNNSRKLFFGKDGDINWIKNRLNKNLNNYKHFNVDITNYNRLEKIFKKYKKNIKMVIHAAAQPSHDWAKNNVIKDFDINAKGTINLLELTKKYCYDSPFIFMSTNKVYGDNPNKLPLIEKKTRWEINGNHLYANGITEKMSIDDCVHSFFGASKSYADLVVQEYGRNVGLKTVAFRAGCITGPNHSGAKLHGFLSYLVKVAMDKKRYYIFGYKGKQVRDNIHSFDVVSCFWEFFKKPRSGEIYNMGGGRKSNCSILEAFNIIQKLTNIRGKKMIKRENRVGDHIWYISNMKKFKKHYPKWKQTYNTEDIIDQLLSNSKF

SEQ ID NO: 160737 - protein, 627 aa, Unknown
  Bacterial polypetide isolated from the Sargasso Sea
LSVRGIARDLAAAGIGNLKELKFKKIKDTFKSPIKWKKEFKDNKLCPGVAGRYFKNVTNVESPKWLQQRLTAIGLRPISALVDITNYVTFDLGRPLHVYDADKVSGNLTMRLAYNKEECMALNEVSYKCDEDMIVISDDDKKLHGIGGVMGGLNSGCSMETKNVFLEVALFDPISVTKTGRKLNLQSDARYRFERGIDTESIYWGVEAASQMINDICGGEASEYISSEVDIEKKEIISFNTDMIKTFGGIEIEIKDQVNILKSLGFNVKELKSNLEIEVPTFRPDIVGEADIVEEIIRIYGFDKIPLKNINYEEVKKEILNNSVKTFHKIKKIIASKGYSEVVTWSFMDENKAKIISNEIIGLKNPISSDLNTMRPSTIPNLLDAINQNKARMYSSAKIFEVGPNFSKSYSDLQENVATSISYGLADELNWLSNKKNIDVYFTKADLFSVLTSINVPTDNLLYEKINGQIYHPGKSSTLRLGKNKIANFGEIHPILLKNMDINFKVFGFEIYLENISQFQENKSSSRGAFINNPYQMVERDFAFLFPKEIQANEIIKKVQRVDKNLIQKVTIFDVYEGNKLPNDKKSIAFRVLMQPQDKTFSDQEIENLSKQIIDVVTKSFEASIRN

SEQ ID NO: 160738 - protein, 383 aa, Unknown
  Bacterial polypetide isolated from the Sargasso Sea
MKITYDWLKDHLKVSAKEDKLLEKLTDIGLEVESVENLSEGLDLFKVAKIVKTEKHPNADRLKVCDVDVGDKEIKKVVCGAANAREGLLSVYAPPGAIIPKNKTKLVVAKIRDVTSYGMLCSESELNLSDESDGITELSPSKYAKSIGKSYFSKSSSNLIDLSITPNRPDCLGVRGIARDLSAAGFGNLKTEKDKKIKSNKKQTLKVKITKEKNQGCLSFGSCLITKVKNTESPQWLKDKLISIGQKPISAIVDITNYVMIDINRPLHAYDADKIDKGIIVRNSKSGEKFTALDNKNYKLDDGMCVISDNKGVLGLGGIIGGTRSGTELDTKNVLLESAYFDPRSIRKTAKKLNIDTDAKFRFERGIDQLSIEDGLNKSSFFN

SEQ ID NO: 160739 - protein, 486 aa, Unknown
  Bacterial polypetide isolated from the Sargasso Sea
MTRIKKDHDFKTITNKQINIKESDLVFTLKETPINLAGVMGGFSTGCTQNSKTVLVECAYFEPESIIGKSIKYDLNSEAAFKFERGTDPDIIEMALRRFIKIVEDHTTLKDLKIYKEDNFKKDPRFIEYDLKKINSILGVEVIEEDFNRYINNLGFQIKNGLIFIPSHRHDIQNYNDIAEEIARLIGYDNLKKSDIKLPLNNNSSDLSLEDKVRSFLVEEGFSEVINFPFSENDNTGSVEIDNPLDSNKRFFRKNITESIVQNVIYNERRQKDSIKLFEISDIYRFDKKNKVFKSTKKLALILSGRKDYNFRDFNIMMDKKLLDTILSNLTNETNIEVNQISRENLDSKIKHPIYSAEIELKLIDEALISDKSTQLPRFKEVKYSQISEFPLIKRDLSFQVDDINEINELCRLIDSFRHELLRDSFIFDFYQDEKRNRCKVGFRFSFQSMKKTLIDAEVDEIIDDIVKSLSSLKNTEIPGYDYQDS

SEQ ID NO: 160740 - protein, 403 aa, Unknown
  Bacterial polypetide isolated from the Sargasso Sea
MKFTLGWLKEHLDTKYKDNKIIEKLTDIGLEVESFENVGSELDNFKVAKIINAEQHPNADRLKVCDVDIGEKNTIKVVCGAPNAKKNLLTVYAGPGSIIPKNKMKLSISKIRGVTSHGMLCSESELNLSNESEGITELKQEKYSKQIGKNFFQNNVEKVVDLSITPNRPDCLGVRGVARDLAAAGVGKLKNIQNKNIKKEGSQNIKVSITKDKNQGCTIFGSCLIKGVKNKESPKWLKDKIVSLGQKPISAIVDITNYVMFDLNRPLHAYDADKIDKEIIVRNSKKGEIFEALDKKQYKLDDSMCVISDKSGVLGLGGIIGGTRSGTEFNTKNILLEAAYFIPRSIRKTSKLLNIDTDAKFRFERGIDPKSIEEGLTRAAQLITKICGGKISRFDVQKTEKDK

SEQ ID NO: 160741 - protein, 158 aa, Unknown
  Bacterial polypetide isolated from the Sargasso Sea
MIGKLDEHISYIKNFKSKDIDEIESLKIKFLGRKGIINDLFSEFKNVPSDQKKEYGQKINELKNLAQIKYDELKSFNSKSNKSISEDLTKPGFPISNGTLHPITLIKNQIIEIFSKVGFELSEGPEIEDDWHYFTALNFTKHHPAGDMQDTFFIQQDP

SEQ ID NO: 160742 - protein, 290 aa, Unknown
  Bacterial polypetide isolated from the Sargasso Sea
MKITYDWLKDHLKVSAKEDKLLEKLTDIGLEVESIENLSEGLDLFKVAKIIKTERHPNADRLKVCDVDVGNKEIKKVVCGAANAREGLLTVYAPPGAIIPKNKTKLVIVKIRDVTSYGMLCSESELNLSDESDGITELSPSKYAKSIGKSYFSKSSSNLIDLSITPNRPDCLGVRGIARDLSAAGFGNLKSEKDKKIKSNKKQTLKVKITKEKNQGCLSFGSCLITNVKNTESPQWLKDKLISIGQKPISAIVDITNYVMIDINRPLHAYDADKIDKGIIVRNSKSGEEF

SEQ ID NO: 160743 - protein, 783 aa, Unknown
  Bacterial polypetide isolated from the Sargasso Sea
MQTNSSIDEITKNLTEIGLEVEEIINPKKDLENFVVGKILTSEKHPNADRLSVCKVDIGNETMEVVCGASNAKEGLLTIYAPIGSIIPKSKMVIQKTKIRDIVSYGMLCSGDELNINNENEGIIEIKKAKAGDKASNVLDDLDPIIEIAITPNRPDCLGVFGIARDLAAKGLGELKVTKINTFKSHSESIPVYTKSTKNNNFCNIFAGRLIEGIENKESPDWLKNRLEKIGLRSINAVVDITNFLTYDRGRPLHAYNSDLISKNIGARLAKAGEKIKALDGKEYILNEETCVIADDEKTLGIGGIIGGEEFGSDLETKNIFLESAYFDPIHIARTGRKLNINSDARYRFERGTDPNFVLEGLDIATKMILDICGGKASKTSVATYEDFKNKKINFDIKLIEKVSGIKISSKDIKKILLSLGFEIDKNFKITVPSWRPDVSLPIDIVEEVIRIYGLNNVESVPLKNSDQPSKPILTHAQKNINLVRRNLASRGLIENISYSFVSSEFSDLSPKGRKPIKLLNPISEDLSDMRSSPLISLLNNFRENKNRGFNDIGIYEIGPGFIGPKPGEQISIAAGLRTGIYKSTGTERHWQGNEKIDIFDVKSDIFSYFDMINISDDLITHSIPGTDWYHPGRSANIIFKKDKILATFGEIHPKILSKLNIPSCVGFEIYLDEILNVMNITNANEEFKFYNLQAVKRDFSFDIPIDINSSILIDAINSCKIDLIDDIKLFDQFILENSKKSLALEITIQPKKETLKDSEIESICEKVIQAVEKATSGKLRSI

SEQ ID NO: 160744 - protein, 714 aa, Unknown
  Bacterial polypetide isolated from the Sargasso Sea
MKFTIGWLKDHLDTKKKDNELIEKLTNVGLEVESFENLSSDLDNFKVAKIINAEQHPNADRLRVCDVDIGGQNTVKVVCGAPNAKKDLLTVYAGPGSIIPKNNMKLTISKIRGVTSYGMLCSESELNLSDESEGITELKSSNYSDKIGKNFFKSNTEKVVDLSITPNSPDCLGVRGVARDLAAAGAGKLKKISLKNIKKNGSQKIKVSISKDKNQGCTVFGSCLIEGVTNQESPQWLKEKIVSLGQKPISAIVDITNYVMLDLNRPLHAYDADKIDKEIIVRNSKKGETFEALDNKEYKLENDMCVISDKSGVLGLGGIIGGTRSGTEINTKNILLESAYFLPRSIRKTSKLLNIDTDAKFRFERGIDPQSIEIGLTKAAQLISEICGGKISKFDIQKISKHEKNKIKFKISLFEKITGFQIKDNEIIEILTDLGFEVSKKKFELDLKIPSWRPDITQPIDIVEEIVRIKGYENIETLEPEKTKIKDTLNKQQKLFHFLQRSVASKGYFETVTWSFTDSKINNLFKENLKEIKIVNPISSDLDVLRNSIFTNLTFYLKKNLDRGFKDISLFEIGPIFKNNKPGEQLTVIGAIKSGKVSRLNWNEKDRIVDVFDVKKDVIQTLVEAGYDRQSFFVRDKSPSYYHPGKSGSVYLDKDEIDPVAYFGEIHPNILKKLDIKTEGLVGFEIYMDYLRENKIKLKDLKTNFEYSDYQKSE

SEQ ID NO: 160745 - protein, 470 aa, Unknown
  Bacterial polypetide isolated from the Sargasso Sea
MGRCTVSQVFHDIEKKILETLQKTPNQSPEQLSKNTELSIDQIRRGIEWLRLKDLALVNESEKITFSLGPNGLDSFKNGLPERKLINMLKEEPKTFEQIRSVLSGAGFNVAIANAKKNGWIKIEKNNSDSLVSIKEKPIETPEEKLLSFIGEKTISQEEITNPLAMKILLSRPNYIVQTSEKSKIISLTDAALSLDTSISSSGAIDVEADVPSIFAARTHPLQDTIDEIREIFVNLGFSEILGNMTQSSFWNFDALFTPQDHPARELQDTFYLENLESKNPASSSQIKNVSSSHKKNWKYDWKLSESQKMVLRTHTTCVTIKYLAEQKPENARIFSVGRVFRNEKVSYKHLVEFNQIEGIVIGNNTTLRDLMGIQKEFYKKLGLTKIKFWPTFFPYTEPSLQTMVYNEKLGKWIELFGMGIFRPEVTKPLGIDKPVLAWGGGIERIAMLKYELDDVREFYNNNLSWLRSA

SEQ ID NO: 160746 - protein, 46 aa, Unknown
  Bacterial polypetide isolated from the Sargasso Sea
SNVGYDNEKYQGFAFGMGIERIAMIKYGIKDIRLFYQNDKRFLEQF

SEQ ID NO: 160747 - protein, 173 aa, Unknown
  Bacterial polypetide isolated from the Sargasso Sea
MKFTLSWLKKHLETSANLDEILSALTDLGLEVENVENPVESLKEFTIGKVVSAEQHPNADKLRVCQVQTDEGELQIICGAPNARKGILVVVAKPGVFVPGIETTIGVGKIRGIESFGMMCSEREMQLSDEHDGIIELSSGQIGERFVDWLASNKPSKVETTIEIAITPNRPDA

SEQ ID NO: 160748 - protein, 445 aa, Unknown
  Bacterial polypetide isolated from the Sargasso Sea
ERFGKRLNADGTMTAALRAAELCVSIAGGTLELQAADLYPGKLADESVKLDLEYLERVLGIKVEKNEVNRILEALGFTVQNKTDQLLEVTVPHHRLDIAIPADLVEEIARVYGYNRMPSTLIRDALPPQRENFQLQGVEAIRDILVASGMDEVITYTMTNPLDESNLLLQEGFDQKNYVPVKNPLSNERSHLRRKLLPGALHTARQNLRFDDQVQIFEAGGVFIPQENQVLPDEPMELCLLMTGKREINSWHQAEQGDMDFFDLKGVIENLFSSLHIQEVEWKKARELPYHPGRSSEIMVNGVSIGFIGELHPDVRRLYELPDRPVVCAELQLSELLNASSSYYLMEEISTYSPIFEDLAFIVDRSVEVETLIPFILKTGKPLLKRVQLFDVYQGKGMEVGKKSLGFSLTYQASDRTLNDKDVEQVRNRIIKKVNQNFQATLRES

SEQ ID NO: 160749 - protein, 132 aa, Unknown
  Bacterial polypetide isolated from the Sargasso Sea
MRISIDWFKEFVKTNDSTEDIANTLTMLGLEAENPVDIAQLEDIIIGEVVECKKHPNADRLKQCKVSDGKLELPIICGAPNVDKGQKIALAPVGASLPGGINIKKAKIRGEESRGMICSEKELGISDEHEGI

SEQ ID NO: 160750 - protein, 327 aa, Unknown
  Bacterial polypetide isolated from the Sargasso Sea
MNFTIALLKEHLDTKYKDNKIVEKLTDVGLEVESFENVSSELDSFKVAKIINAEQHPNADRLRVCDVDIGEKNTIKVVCGAPNAKKNLLTVYAGPGSIIPKNKMKLSVSKIRGVTSYGMLCSESELNLSNDSEGITELKQAKYSDQIGKNFFKNNSEKVIDLSITPNRPDCLGVRGVARDLAAAGVGKLKNISNKNIKKEGSQNIKVSITKDKNQGCTIFGSCLIKGVTNKESPKWLKDKIESLGQKPISAIVDITNYVMFDLNRPLHAYDADKIDKEIIVRNSKKGETFKALDNKEYKLYDNMCVISDKSGVLGLGGIIGRYTIRN

SEQ ID NO: 160751 - protein, 149 aa, Unknown
  Bacterial polypetide isolated from the Sargasso Sea
CDSDSTHSPMFHLVEGLFINENANMGDLKGTLIEFCKQFFNVQNLKVRFRPSYFPFTEPSAEMDIAYEIVNNKIQLGQGDRWLEILGCGMVNPIVLENCNVDANIYQGFAFGVGLDRITMLKYGLTDIRSFFSGNLNWIASNGFTIGDF

SEQ ID NO: 160752 - protein, 566 aa, Unknown
  Bacterial polypetide isolated from the Sargasso Sea
MKDKLISIGQKPISAIVDITNYVMIDINRPLHAYDADKIDKGIIVRNSKSGEEFTALDNKNYKLDDGMCVISDNKGVLGLGGIIGGTRSGTELYTKNVLLESAYFDPRSIRKTAKKLNIDTDAKFRFERGIDQLSTEVGLNKAAFLIKEICGGEISKIDIQKIKSYKNKVIKFEPKTFEKITGFKISTKEIINILEKLGFKLKKENKFFKLSVPSWRPDIVQEIDIVEELVRISGYEKIKTENPIKDRSKNTLNPTQKLFHFLQRAVASKGYLEAITWSFTDSKYNDHFKEGGKDIKIINPISSELGVLRSSIFSNLAMNMSKNLDRGIKDLSIFEIGPIFYGPQPGEQNTVVCGLSAGKKSRLSWIEKERNIDVFDIKRDVIQTLVEVGYDTEKFYIDDESPNYYHPGKSGRIFLNKGKDKVAAHFGEIHPNIIKTLDIKTESLVGFEIFLDNLKLPKKSLKDQKTKYSVSDFQKSERDFAFIVDKKISAQDIASVISNIDKNLISNVKVFDVYQGENIPENQKSVAISVTIQSLEKTLTDNDLEKTNNLIIETVENKTGAKIRS

SEQ ID NO: 160753 - protein, 177 aa, Unknown
  Bacterial polypetide isolated from the Sargasso Sea
MSDIKKIKDEYFNKLSTDLDLESINRIKTELFGKNGRISNSFKKISSSASEEKKKLASELNFIKDELQKKINNKLQEIENKEINSKLQNEKVDITLPERDINQGKIHPVSQVIDEISSIFSEIGFSVEEGPDVEDEHYNFTALNTPDNHPARDMHDTFYLNKNKKLLLRTQYFSQFK

SEQ ID NO: 160754 - protein, 374 aa, Unknown
  Bacterial polypetide isolated from the Sargasso Sea
MATLNNVLKDRVSFEKTKSEIVFPDLLDVQIEAFQSFIQNNIPEDERLNVGLEEVFNNVFPLEDSHKNYVFEYKSYFLGLAKYTPEECMDRGLTYSVPLKVRLILHITNEDDRSKYDQSIEQEVYFGNIPNMTKKGTFVINGAERVIVSQLQRSPGVFFDQSIHPNGTKLFQGRIIPFRGSWVDFTTDINDSIFCIIDRRRKFPVTMLLRALGFSTNADIFKAFNCIEKIKIKSKSIDSFIGSTVVEDVIDEATGEIFIEGGSELLNENIEDLKKAKIESIEIVNQNKDFHSMMLLNTMQKDPSKNTEEALSIVYQLLRSGEPPNLETAQKFIDRIFFNPKKYDLGEVGRYRLNQQFNLEVPVEDTVLTMDDII

SEQ ID NO: 160755 - protein, 299 aa, Unknown
  Bacterial polypetide isolated from the Sargasso Sea
MKITFDWLKDHLKTNLKEKDLLEQLTNIGLEVESVETLSSDNQLFKVAKIIKTEKHPNADRLKVCDVNVGEKELKKVVCGATNASEGLITIYAPPGAIIPKTNTKLEIAKIRGVTSYGMLCSESELNLSDESDGITELSKKYEKNIGKSYFSKSKSNLIDLSITPNRPDCLGVKGIARDLAASGFGRLTTSKEKKIKLKTKQTLKVKINKEKGQGCSAFGSCLIKNVKNTESPQWLKDKLISVGQKPISAIVDITNYVMLDINRPLHAYDADKIEKGIIVRNSKSGEEFTALDNKIYKL

SEQ ID NO: 160756 - protein, 313 aa, Unknown
  Bacterial polypetide isolated from the Sargasso Sea
MLQLGHEHEIEGNIIDLEITPNRGDCLSLKGIARDLNYFYKAELDRDSYEGDIPKLDFSFQNKAKDLCPNISFIEIEINGQVSGYKPYLEDYFKDLKINKNNFFTDVSNYLAYETGQPTHCYDASKINDTLVLEKRNKKEKFKTLLGSEIELEGENLVFTIGGVAVDLAGTMGDESTACNNKTTKVLVECAYFKPEEILGKAREYNLNSEAAYKFERGVDYLAQESVLRRFLAIVSDHTKIKSLSMYSERNKTDLQQINFDSNKLNSILGTNIEEKDQLKYLESLGFKSGKSMMVPSHRSDLEHTNDLAEEVP

SEQ ID NO: 160757 - protein, 155 aa, Unknown
  Bacterial polypetide isolated from the Sargasso Sea
MSDLKKIKDKFLSKLSVKLDISEINQIKSDLFGKSGLISTQFKKIGTIAESERKKFASDLNIIKDELQDLINSKTNELKSAKINEKLEKEKIDITLPERSFVRGKIHPVSQTIDEISSIFSEIGFSVEEGPDVENEYNNFTALNTPENHPARDMH

SEQ ID NO: 160758 - protein, 534 aa, Unknown
  Bacterial polypetide isolated from the Sargasso Sea
GLKPISAVVDITNYVMLDLNRPLHAYDANKIDKEIIVRNSRPEESFEALDGKKYKLKNNMCVISDKSGALGLGGIIGGTRSGTEFETTNILLESAYFYPSSVRRTANSLDIDTDAKYRFERGIDPNSIKEGLELATGLIIKICGGEASKFSLVGKTNIKKRIIEIDSNKFKKVIGIPISPSETKKILNSLGFKTKVSKKNFKIEIPSWRPDVKQDIDIIEELIRIKGFDKISLIHPERKRSRETLNFKQKLFHLSQRAVASKGYLEAVTWSFTDSRIDKQFSQGKKEIEILNPISSDLNVLRRSIFSNLIIYLKKNQDRGYPDLSLFEIGPTFSGNKPGEQQIVLGGLKSGVANRKSWDSKARDIDVFDVKADAIKTLVELGINEDDLFISNNTQDYYNPGRSGSVNLKSLNGPQLAFFGEIHPGIVSNLDLKEGNICGFEIFLKNIPEPKKKYRLNKRNYSVSEFQKSERDFAFVIDKNYKAGDVEKIISEADKNLIKKVLIFDVFEGGNMPEGKKSIAVNVTIQSMEKTLSE

SEQ ID NO: 160759 - protein, 484 aa, Unknown
  Bacterial polypetide isolated from the Sargasso Sea
MLSDSAREWTLGQLLSETGWEDQVHVAGAGKKLEEEGLLELSESSSRMVSLGDEGQRASENGLLESRLWGWMSELDGEKRTMKSLMSSDFERAETGPGIGILKGLGIEIESGIFIISDDSKISQEIDRRSEFIRSLSEGAVESSNLDSEMLSHFSSRSGLLDFEDVTIRTWKLTKSGSSLDSSSLEETELIGEVTPEMLQTESWIGAEFKPFDVEAPAPMPTGGRRHPMQSLIERIRSVFLEMGFSEIEGDYVQSAGWNMDSLFIPQSHPARTMQDTFYLNQPRKVEVDEEYLDLWARVHEHGHDTGSKGWGGSFDKEESQRALLRTHTTVNTVRHIADNPNTPSRVFGIGRVFRQETIDRTHMPEFHQIEGIIHEPDASLPMLISTLKTFYSKMGYPDVRVRPAYFPYTEPSAEVDILWKGEWLELGGSGIFRPEVTEPLGTEWPVCAWGMGLERLAMLVLGLDDIRQLYQPDLERLRKMPLL

SEQ ID NO: 160760 - protein, 468 aa, Unknown
  Bacterial polypetide isolated from the Sargasso Sea
EALDNKEYKLDDDMCVISDRSGVLGLGGIIGGTRSGTEFNTKNIFLESAYFIPRSIRKTSKLLNLDTDAKFRFERGIDPKSIEIGLTKAAQLITEICGGKISKFDVQKNQKDIKNKIKFKLSLFEKIAGFKIKDKDVVKILTDLGFEISKKKKELELKIPSWRPDITQPIDIVEEIVRIKGYNNIKTLEPEKTRIKDTLNKQQKLFHFLQRSVASKGYYETITWSFTDSKINQLFKESKNEVKIVNPISSDLDVLRNSILPNLIFYLKKNLDRGFKDISIFEIGPIFKGSQPGQQLTVIGAIKSGKISRLNWNEKERLVDVFDAKKDAIQTLNEAGYDKNNFFIRDKSPSYYHPGKSGSIYLDKDDIEPVAYFGEIHPNIIKKLEINTEALVNFEIYLDHLKDNKLKLKDRKSNFEYSDYQKSERDFAFVVDKNIKAQDLIEIITAIDKNLIKSVKVFDVYEGENIPS

SEQ ID NO: 160761 - protein, 356 aa, Unknown
  Bacterial polypetide isolated from the Sargasso Sea
MSIEQSIPFAKVEIYDTTLRDGAQLEGISLTVDDKLRIANQLDRLGVHYIEGGWPGANPKDEEFFARASKELDLKTSQLVAFGSTRRVNGDVEDDQTLRNLLDANTEVVCIVGKASAYHVTEALRTSLEEGIAMVEESVRFLKGKDLKVFFDAEHFFDGYKENPDFSLDVLEGAARGGADCVVLCDTNGGSLPHEVEKIVKEVSGKIDCEIGVHLHNDTGCGVANAIAGVMGGATQVQGTINGYGERVGNCDLVPVIANLSLKLGFETISKEHLENLTSVSRHIAELANFASDPQQPYVGTKAFAHKAGLHTSAIARRKDAYEHIDPESVGNGTRFLVSEMSGRSTIEMKVKEIGI

SEQ ID NO: 160762 - protein, 149 aa, Unknown
  Bacterial polypetide isolated from the Sargasso Sea
MTKYKNIESLIEKEKSEVSDLDTLEKFRLNFLGKKGENSLLMKELSKLGADERKQKAEELNIIKDSVLKFVKDKTVELQNVAMQGQLTSESLDLSLPVSSQNGTIHPVTQVIEEVIAIFGDLDFFVAEGPEVETDYNNFTALNTSEHHP

SEQ ID NO: 160763 - protein, 138 aa, Unknown
  Bacterial polypetide isolated from the Sargasso Sea
MKLEQLKEQISEQEISNTQELESFRVMFLGSKGLIKQQYALLKEVPNDQKKSFGKQINDLRQLAEKRLNEEKAKLSSAENQIEDAIDLSRPPEPIQIGSHHPLSIVRKEIIKIFSNIGFDVSNGPEIEDDWHNFTALN

SEQ ID NO: 160764 - protein, 421 aa, Unknown
  Bacterial polypetide isolated from the Sargasso Sea
MCVISDKSGVLGLGGIIGGTRSGTELNTKNILLESAFFLPRSIRKTSKLLNIDTDAKFRFERGIDPQSIELGLKKASKLITEICGGKVSKFDVQKIKKDKKNKIKFKISLFERIAGFKVKDKEIIKILIDLGFEVSKKKLELELKIPSWRPDITQPIDIVEEIVRIKGFNNIRTLEPDKTRFKATLNKQQKLFHFLQRSVASKGYFETVTWSFTDSKLNSLFKENYKEIKIVNPISSDLDVLRNSIFSNLTSYLKKNLDRGFKDVSLFEIGPIFKDNKPGEQLTVIGAIKSGKISRLNWNEENRSVDLFDAKKDVIQTLVEAGYDRQNLFVREKSPSYYHPGKSGSVYLNKDDIDPVAYFGEIHPNIIKKIDIKTEALVGFEIYLDYLKDKKIKLKDLKSQFKFSDYQKSDRDFAFVVDKH

SEQ ID NO: 160765 - protein, 163 aa, Unknown
  Bacterial polypetide isolated from the Sargasso Sea
MSDIIKIKEEYLNKLKDNLDLNNVNQLKSELFGKNGIISNEFKKMGSVSAEDRKKFASDLNSIKNELQSLIEKRIQDIEINEINLKLQNEQVDVTLPERSFNRGKIHPVSQVIDEISSIFSEIGFSVQEGPDVENEYNNFTALNTPDNHPARDMHDTFYLDNK

SEQ ID NO: 160766 - protein, 328 aa, Unknown
  Bacterial polypetide isolated from the Sargasso Sea
PSTLIRDALPPQRENFQLQGVEAIRDILVASGMDEVITYTMTNPLDESNLLLQEGFDQKNYVPVKNPLSNERSHLRRKLLPGALHTARQNLRFDDQVQIFEAGGVFIPQENQVLPDEPMELCLLMTGKREMNSWHQAKQGDMDFFDLKGVIENFFTSLHIQEVEWKKARELPYHPGRSSEIMVNGVSIGIMGELHPDVRRFYELPDRPVVCAELQLSELLNASSSYYLMEEISTYSPIFEDLAFIVDRSVEVETLIPFILKTGKPHLKRVQLFDVYQGKGMEVGKKSLGFSLTYQSSDRTLNDKDVKQIRNRIIKKVNQNFQATLRES

SEQ ID NO: 160767 - protein, 223 aa, Unknown
  Bacterial polypetide isolated from the Sargasso Sea
MKFTLSWLKEHLETNSSLDEITNNLTEIGLEVEDIINPEKDLEDFIVGKILTSEKHPNADRLSVCKVDIGNEIKEVVCGAPNAKEGLLTIYAPLGSIIPKSKMVIQKTKIRDVVSYGMLCSGDELNIDNENEGIIEIKKAKAGDKACTALGDLDPIIEIAITPNRPDCLGVYGIARDLAAKGLGRLKVTKMNTLKSHEESIPVYTKSTKNNNFCNIFAGRLMK

SEQ ID NO: 160768 - protein, 237 aa, Unknown
  Bacterial polypetide isolated from the Sargasso Sea
VTSLDDVVIDAKRITDATNLPLLVDIDTGWGGSKEISNTIEEMENAGVAAVHIEDQVYDKRCGHRPNKQIVSVTEMQDRIKAAVDAKKDESFFIMARTDALASEGIEQAIERCGEYLKVGADGIFFEAAISLDQYKEFNKNFSVPLLANITEFGKTPLFTQKELSDVGVDIVLYPLTAFRAMSLSAEKIYNSIIKDGTQEPLLDIMQTREELYEVLDYYNFEKQLDEQFENTKKEGS

SEQ ID NO: 160769 - protein, 500 aa, Unknown
  Bacterial polypetide isolated from the Sargasso Sea
ILALGLRPISAVVDITNYVMFDLNRPLHAYDLDKIKNKITVRNSKKGESFKALDNKNYTLDKDMCVISDDEGVLGLGGIIGGERSGTEIHTKNILLESAYFDPSTTRKTAKKLDLNSDAKFRFERGVDPQSVTVGLDSAVELILEICGGEVSKFDVKQTKKFKNLEIKFDPKMVSKTVGTSINTNEIKKILSNLGFTVKTKGKFLNVKVPSWRPDIFGEIDLVEEVIRIIGFEKIKSIEPDKKRTKPTLNYFQKHFHLAQRSVASKGYLETITWSFTDEKINNKFKEKLESVKIVNPISSDLNVLRNSLYPNLIFYLEKNLNRGFGDQALFEIGPTFTGKKPGQQITVVCGIKKQSIDEDSNLKKNDLVDVFHIKKDLVQSLTELEIRKEDFKVEENTPSYYHPGISGSIVSKDGNLVLGYFGALHPKIISNTFGFEIFLENLVEYKAKNKKTKESLAFSDYQKSDRDFAFLVNKDTKAQDLTEVIQNIDKKFNQRNKNF

SEQ ID NO: 160770 - protein, 525 aa, Unknown
  Bacterial polypetide isolated from the Sargasso Sea
MHQKIVIFLVQTYILKKTKIRGVESCGMLVSEREMGISDEHDGIIEIKDNYKIGDLFGKIFKIDEPVIEINLTPNRSDCLSVRGIARDLAAAGIGKLKDINFKKVKESFKSPITWKKEFQNNNLCPGVAGRYFKNVKNVESPKWLQDRLTAIGLRPISALVDITNYITFDLGRPLHVYDADKVSGNLTMRLAKKNEKCLALNEINYQSDSDMIVISDDENKLHGIGGVMGGLDSGCSMETKNVFLEVALFDPVSVTKTGRKLNLQSDARYRFERGIDTDSIYWGVDAATQMILELCGGEVSELVSSEINLEKTKPFMFDTNKVKTFGGIEINNKEQEKILVSLGFSVNEKKSKFEIQSPSFRPDIVGEADIVEEIIRIYGYNKIPLKKITNKEEKKQILNTKIKTFYKSKKTIALNGYSEVVTWSFMDENNAKIISDEIISLKNPISNDLNTMRPSTFPNLLEAINQNKARMYLKGKIFEVGPNFSKSLPNQQENVATAIAYGSSDEQNWLSIKKNVDVFSIKAD

SEQ ID NO: 160771 - protein, 113 aa, Unknown
  Bacterial polypetide isolated from the Sargasso Sea
MKFTLDWLKDHLDTSENLNTITDTLTNIGLEIESVEDKSEIFKNFTVAKVLKAEKHPDADKLKVCQVETINGNYQVVCGAPNARQGMLGIFAPENSYIPGTDLHLKKNQNKRS

SEQ ID NO: 160772 - protein, 39 aa, Unknown
  Bacterial polypetide isolated from the Sargasso Sea
KYSGLAFGLGIERIAMLKYGVNDIRDFYKSNLDFLRQFK

SEQ ID NO: 160773 - protein, 289 aa, Unknown
  Bacterial polypetide isolated from the Sargasso Sea
MQAGQKFRDAINKNKPLIIPGTINAYSAKLAEKSGHSAIYLSGSGVAAASYGLPDLGVTSMNDVLIDVKRITSATSLPLLVDIDTGWGESDQIAETITEMGNAGCAAVHIEDQVFDKRCGHRPNKQLVSIDEMRSRLNTAINSKVDDSFFIMARTDAIASEGIDGAIKRCESYIEEGADGIFLEAVTSIEQYKELKNHCSVPVLANITEFGKTPLFTQEQLKEVGVDMVLYPLTAFRAMSQSAEKIYNSIIKDGTQEPLLDIMQTREELYEVLDYYNFEKQLDDKLSNN

SEQ ID NO: 160774 - protein, 443 aa, Unknown
  Bacterial polypetide isolated from the Sargasso Sea
KKISGKNYFKSKGEKSIDISVTPNRPDCLGVRGIARDLASAGLGKFSNLKKIKIKQNFKQPIKISITKEKNQGCLNFGACYIKNIQNKESPEWLKEKIISLGLKPISAVVDITNYVMFDLNRPLHAYDADKIDKEIIVRNSKSGESFTALDGKNYKLENNMCVISDRTGPLGLGGIIGGSRSGTEFDTKNILLEAAYFHPSSIRKTASNLGVDTDAKYRFERGIDPNSIIEGLEIATNLILKICGGEASKFSVEGKSKVKNKILEIDQTKFKKVIGIPMPAGEAKKILNTLGFDTKTKKNKFLVKIPTWRPDIYQDVDIVEELIRIKGFDKISLIHPERSRNKDTLSFEQKLFHLSQRAVASKGYMEAVTWSFTDSRIDKHFSQGKKEIEITNPISSDLNVLRTSIFSNLILYLKKNQDRGYLDLSLFEIGPTFYGKNQENNK

SEQ ID NO: 160775 - protein, 665 aa, Unknown
  Bacterial polypetide isolated from the Sargasso Sea
LKTNKYSDKIGKNFFKNKSEKVVDLSITPNRPDCLGVRGIARDLAAAGAGKLKNISNKIIKKNGSQTIKVSITKEKNQGCTVFGSCLITGVTNKESPKWLKEKIISLGQKPISAVVDITNYVMLDLNRPLHAYDADKIDKEIIVRNSKKGETFEALDNKEYKLGDNMCVISDKSGVLGLGGIIGGTRSGTEINTKNILLESAYFIPRSIRKTSKILNVDTDAKFRFERGIDPQSIELGLSKAAELISEICGGKISNFDIQKTDKHEKNKIKFNVSLFEKITGFKVNDNEIVKILTDLGFEVSKKKLELDLKIPTWRPDIIQPIDIVEEIVRIKGYNNIETLEPEKTKIKDTLNKQQKLFHFLQRSVASKGYFETVTWSFTDSKINNLFKENLKEIKIVNPISSDLDVLRNSIFTNLTFYLKKNLDRGFKDISLFEIGPIFKNSKPGEQLTVIGAIKSGKVSRLNWNEKERPVDIFDVKKDVIQTLVEAGYERKSFFIRDKSPSYYHPGKAGSVYLDKDDIEPVAYFGDIHPNIVKKLDIKTEGLVGFEIYLDHLKENKIKLKDQKPNFEYSDYQKSERDFAFIVDKNFKAQDLIEIISSIDQNLIRSIKIFDIYEGENIPDNKKSIAINVIIQSFEKTLEESDLEKINKLIISTVETKSGAKIRS

SEQ ID NO: 160776 - protein, 188 aa, Unknown
  Bacterial polypetide isolated from the Sargasso Sea
MKFTVDWLKNHLDTKFNNNQIIDKLTNIGLEVESFESSTSELDTFIVAKIINAKTHPNADRLKLCDVDIGSDKTIEVVCGAPNAKNGLLTVYAPPGSIIPKNQMKLSVSKIRGVTSYGMLCSESELQLSNESDGIIELKNNKYENKIGEKYFKNTSEKVIDLSITPNRPDCLGVRGIARDLSAAGAGK

SEQ ID NO: 160777 - protein, 127 aa, Unknown
  Bacterial polypetide isolated from the Sargasso Sea
ERCGEYLQVGADGIFFEAAISLDQYKEFNNNFSVPLLANITEFGKTPLFTQKELSDVGVDIVLYPLTAFRAMSLSAEKIYNSIIKDGTQEPLLDIMQTREELYEVLDYYNFEKQLDEQFENTKKEGS

SEQ ID NO: 160778 - protein, 216 aa, Unknown
  Bacterial polypetide isolated from the Sargasso Sea
MKFTISWLKEHLDTQKKDNELIEKLTAIGLEVESFENLSSGLDSFKVAKIINAEQHPNADRLRICDVDIGLDNTVKVVCGAPNAKKDLLTIYAGPGSIIPKNKMKLSVSKIRGVTSYGMLCSESELNLSNESEGITELTTSKYSDKIGKNFFKSNTEKVVDLSITPNRPDCLGVRGIARDLAAAGIGKLKKISLKNKKKNASQRIKVSITKDKNQG

SEQ ID NO: 160779 - protein, 294 aa, Unknown
  Bacterial polypetide isolated from the Sargasso Sea
MTPGKKFRDAIKNNSPLIIPGAINAYSAKLAERANHKAIYLSGSGVAAASYGLPDLGVTSLDDVVIDAKRITDATNLPLLVDIDTGWGGSKEISNTIEEMENAGVAAVHIEDQVYDKRCGHRPNKQIVSVTEMQDRIKAAVDAKKDESFFIMARTDALASEGIEQAIERCGEYLKVGADGIFFEAAISLDQYKEFNKNFSVPLLANITEFGKTPLFTQKELSDVGVDIVLYPLTAFRAMSLSAEKIYNSIIKDGTQEPLLDIMQTREELYEVLDYYNFEKQLDEQFENTKKEGS

SEQ ID NO: 160780 - protein, 267 aa, Unknown
  Bacterial polypetide isolated from the Sargasso Sea
MKITYDWLKDHLNTSAKEDKLLAKLTDIGLEVESIKNLSEGLDLFKVAKIVKTEKHPNADRLKVCDVDVGNKEIKKVVCGAANAREGLLTVYAPPGAIIPKNKTKLVVAKIRDVTSYGMLCSESELNLSDESDGITELSSYKYAKNIGKSYFSKPSSNLIDLSITPNRPDCLGVRGIARDLSAAGFGNLKPEKDKKIKSNKKQILKVKITKEKNQGCLSFGSCLITNVKNTESPQWLKDKLISIGQKPISAIVDITNYVMIDINRPL

SEQ ID NO: 160781 - protein, 202 aa, Unknown
  Bacterial polypetide isolated from the Sargasso Sea
MIVSLDWLKEFVDIQESPDELAELLSGIGLEAEVTSVPTEIPGVVIGKVESAEKHPDADKLKLCTVNDGKQVHQVVCGAPNVDAGQTIAFATVGSVLPGNLKIKKAKIRGVESSGMICSERELNLSDEHEGIMVLPDDIEAGTDFVSSYGYKYISVELDITPNRPDAFSHQGVARDIACKTDREFTQLSVTEVVSKGNDTID

SEQ ID NO: 160782 - protein, 481 aa, Unknown
  Bacterial polypetide isolated from the Sargasso Sea
TGLVRDLSPFYGIINLDIYNDNIGNWDFNFENKLKKSCPNISFLKIDIDEEVKEFSGQISEYFKELNIKRNNFFTDVSNYLSYEIGIPTHCYDSRLFKNSTLVLEEIHDNIEFETLIDKKIILKDKNAVFTLNSNVINLAGVMGGKSSACAEDTRSVIVECAYFKPENIIGKTIKYDLQSDAAYKFERGVDPMGQEKALRRFIMIVEKYATIKNIQIYQQIHANFRRSFQYDPKKINSITGLNLSKKEQTEYLEKLGFSFQEDQISIPSYRHDIFTNNDLAEEIARIIGYDNIPRQEIKICNAKSKGRKELEDTVKLLLVDNGFNEVINDPFTKENTISSIELDNPLDSNKSYLRQSLKSSLVSNLVYNERRQKDSIKLFEISDIYKNYNSKVSSKKILGVIASGRLGNNYRDFSKNIDLDYLTNTFKKITDIDLNFEILDRKYIDSKSKFPIIYLEIELDKLFDNLKKYKSLNKLSYQNE

SEQ ID NO: 160783 - protein, 389 aa, Unknown
  Bacterial polypetide isolated from the Sargasso Sea
MLCSESELLLSNESDGIIELKNNKYANKIGEKYFKNTSEKVIDLSITPNRPDCLGVRGIARDLSAAGAGKLKINKKSNLKYRGNQNINVTIKKEKAQGCTIFGSCLIKGVTNKESPKWLKDKILSLGQKPISAIVDITNYVMFDLNRPLHAYDADKIDNEIIVRSSSKGESFEALDNKKYILENDMCVISDRSGVLGLGGIIGGTRSGTEYSTKNILLESAYFLPRSIRKTSKQLNIDTDAKFRFERGIDPLSIEEGLIKASELIKQICGGEISNLDVKKIENYKKTIINFDPFLFEKTTGFNVENKELIKILKKLGFNVSKNKKILKLAIPSWRPDITQPIDIVEEIVRIKGYEHINTSEPIKTRLKPTLNYYQKLFHFLQRSVASKG

SEQ ID NO: 160784 - protein, 793 aa, Unknown
  Bacterial polypetide isolated from the Sargasso Sea
MKVSLHWLKRFVDFDLTATELADMLTMRGFESEVVTDFDNIDNLVVGDVLTAKKHPNADKLKLCSVSDGSETFSVVCGAPNVDSGQKIVFAKVGAILPGDFKIGKAKIRGVESFGMICSEKELGISEEHDGIMVLDSSLKAGTPIKKVLGPIFNAIDIEVTPDKAFGLSHRGIAREVATMVNAKLKTPISAVKLNSKSKDVISVELDKKNGCTRYIAGVMKGVKVGPSPQWLADYLKSVGQKSINNLVDISNFMLLEIGHPTHIFDLNKLAKPAIKVSWAKKGEKFDALDEETYELSNDHMVITDTKNTIALAGIIGGMDSSVTDTTTEVLIESAYFDPVVIRKGSKKLNLLSEASRRFERGTDPNAASEAFNMIVQLMQEVAGGTLESIITDECSMNLSNSKVELSSEKLLKYAGQEIPSKNVESILKGLHIDIKKSKKGWSCSIPTFRTDLSSETDLIEEVFRCYGYDNIKSSFNYSSIMQFANDEESTIFSLKHHLSSLGFHQSYNNSLEDLEEVKLFGKDPISVMNPSSERMNTLRTTLHLGLLKNLDFNYRNGSSNTMIYEYGTIFEGKSEKLESITQNSSLSCLVHGDLFSKNVHFDSISASFAFLKGIALNIFEDKKLNINIKLLEEKHHYCETYFAILDGRKQKIGGIGVISKTLLNKLDIAHKHDVVVLDIDPTIFIDYRNFKIKVNDVVPYPAVARDLNFKMDSSISVGDVTTAIKSVNQSILQTVLPVDIYISKKDKSSKDVLFSLTFQSPKKTLEDNDVNTVITEIINVVSKKFNAKLRDN

SEQ ID NO: 160785 - protein, 148 aa, Unknown
  Bacterial polypetide isolated from the Sargasso Sea
MKDFRELETEIKKASDKFTNIESINEFRIKFLGKKGIISLEMKELASLSGDERKQHAEKLNKIKDTVLEIIASKTEELNSEELEKKLNSETLDITLSTSKSYGTIHPISQVIEEVITIFGDLDFFVAEGPEVETDYNNFTALNTSEHH

SEQ ID NO: 160786 - protein, 238 aa, Unknown
  Bacterial polypetide isolated from the Sargasso Sea
MPLVTNLNLDAFVADLEELRSEAERALVDAVDMQGLEAARVVFLGAKNGRLKAVQKGLGKLDREDKPVGGQQFNAVKKSVEALFLQASQRVESLSKNTKGVEPVDVTLPGNPVRFGRVHPITQTIRRVSSIMANLGFEAVDGPEVEDQWHNFEALAIPDEHPARDPLDNFYIAVANADRPLLLRSQTSTVQIRVMEQRKPPLRIVSLGRVYRPDTADATHYPMFHQVEGLLVEPGTTM

SEQ ID NO: 160787 - protein, 356 aa, Unknown
  Bacterial polypetide isolated from the Sargasso Sea
SLKSKEYGWDVAVIPNRSQDLIREIDLIEEIARLIGYDRFDLNLPNPIKPGKLSSEQLALRKIKNGFIENGFNEVLSYSLVPEDKDTLIKISNPLLLETSCLRDNIWKEHLDIVNRNIKAGQNSCYVFEIGNVFYKNSDLIQEEILNGVIFGIKKFGKWVDSGKDNDLNYYQARGKLKEALSCLNIKIDDKPSDSIDFLHPGRTAKLFIEGKEAGYFGEINPKLILEKKSLKKVYLFRINIINLLGASTRKNKWIPLFKQYPIVPKMERDINFVFSKKYLISEITSQIRKTGKNLLEDVYLKDVFEDIKLGEDFISYTFRLSYRDKEKTLLDSDIQSIHSNIISNIEKSFNTKLRN

SEQ ID NO: 160788 - protein, 81 aa, Unknown
  Bacterial polypetide isolated from the Sargasso Sea
MQFSKNWLKDFIDIDLSTEIICSQLTMAGLEVDGYEDVSSKITGKDSIIKLDITPNRGDCFSVLGVARELSVINNLELSLP

SEQ ID NO: 160789 - protein, 104 aa, Unknown
  Bacterial polypetide isolated from the Sargasso Sea
MSKEEHSLIEPKSDLGGFHPISSMLYEISNLLQGLGFREIDGPEVETEKFNFDMLNIKESHPARQMHDTFYTNNKSHVLRTHTSPVQIRALLENEPPLAFFSAG

SEQ ID NO: 160790 - protein, 708 aa, Unknown
  Bacterial polypetide isolated from the Sargasso Sea
MDFCSENSYIPGTDLHLKKTKIRGVESCGMLVSEREMGISDEHDGIIEIKDNYKIGHLFSKIFAIDEPVIEINLTPNRSDCLSVRGIARDLAAAGIGKLKDLNYKKVKESFKSPITWKKEFQNKNLCPGVAGRYFKNVKNIESPKWLQDRLTAIGLRPISALVDITNYITFDLGRPLHVYDADKVSGNLTMRLANKNEECLALNEVNYKCDNDMIVISDDENNLHGIGGVMGGLNSGCSLETKNVFLEVALFDPVSVTKTGRKLNLQSDARYRFERGIDTDSIYWGVDAATQMILELCGGVVSEFVSSEINIEKSKPFMFDTNKVKTFGGIEIINEEQEKILVSLGFAVNKKKSKFEIQSPTFRPDIVGEADIVEEIIRIYGYNKIPLKKVNNQEEKKQILNTKTKTFYKSKKTMALNGYSEVVTWSFMDENNAKIISDEIISLKNPISTDLNTMRPSTLPNLLEAINQNKSRMYLRAKLFEVGPNFSKSLPDQQENVATAIAYGSSDEQNWLSNKKNIDVFSIKADLFSILADLNVPTDNLLYEKLEGKIYHPGKSSSLRLGKNKIANFGELHPILLKTMNVNLKVFGFEIYLENISQFQENKSSSKGGFANNPYQMVERDFAFLFPKEVEAGEIIKKVKKIDKNIIQNVTIFDVYDGDKLPENNKSIAFRVLLQPQDKTFNDQEIDELSQKIIDEISQSFDASIRN

SEQ ID NO: 160791 - protein, 233 aa, Unknown
  Bacterial polypetide isolated from the Sargasso Sea
MKFTVDWLKNHLDTKFNNNQIIDKLTNIGLEVESFENSTSESDSFIVAKIINAKTHPNADRLKLCDVDIGSDKTIEVVCGAPNAKNGLLTVYAPPGSIIPKNQMKLSVSKIRGVTSYGMLCSESELLLSNESDGIIELKNNKYANKIGEKYFKNTSEKVIDLSITPNRPDCLGVRGIARDLTAAGVGKLKINKKSNLKYRGNQNINVTIKKEKVQGCTIFGSCLIKGVTNKES

SEQ ID NO: 160792 - protein, 220 aa, Unknown
  Bacterial polypetide isolated from the Sargasso Sea
MKFTIGWLKEHLDTKKKDRELIEKLTNIGLEVESFQNLNSDLDNFKVAKIINAEQHPNADRLRVCDVDIGQENNVKVVCGAPNAKKDLLTVYAGPGTIIPKNNMKLTISKIRGVTSYGMLCSESELNLSDESEGITELKTNKYFDKIGENFFKNKNEKVIDLSITPNRPDCLGVRGIARDLAAAGAGKLKNISKKNIKEKGSQTIKVSITKEKNQGCTVF

SEQ ID NO: 160793 - protein, 179 aa, Unknown
  Bacterial polypetide isolated from the Sargasso Sea
MSDKLLQLGHEHEIEGDIIDLEITPNRGDCLSLKGIARDLNYFYKAELDKNTYDENIPKSDFSFQNKAKDLCPNISFVEIEIDGRISDYKPYLENYFKDLKINKNNFFTDVSNYLAYETGQPTHCYDASKINDTLVLEKRNKKEKFKTLLGSEIELEGENLVFTINGIAVDLAGTMGDE

SEQ ID NO: 160794 - protein, 154 aa, Unknown
  Bacterial polypetide isolated from the Sargasso Sea
RLNTAINSKVDDSFFVMARTDAIASEGIDGAIKRCESYIEEGADGIFLEAVTSIDQYKEFKNHCSVPVLANITEFGKTPLFTQEQLKEVGVSMVLYPLTAFRAMSQSAEKIYNSIIKDGTQEALLDIMQTREELYEVLDYYNFEKQLDEKLSKN

SEQ ID NO: 160795 - protein, 452 aa, Unknown
  Bacterial polypetide isolated from the Sargasso Sea
MKITFDWLKDHLKTNLKEKNLLEQLTNIGLEVESVESLSGDDELFKVAEIIKTKKHPNADRLKVCDVNIGENEIKKVVCGAENAKEGLLTIYAPPGAIIPKTKTKLVVAKIRGVTSYGMLCSESELNLSNESDGITELSKEFRKKIGKSYFSKSKSKSNLIDLSITPNRPDCLGVRGIARDLAASGFGKLVDLEEKKIHSRNKHTLKVKINKEKGQGCTAFGSCLITNVKNSESPKWLKDKLTSIGQKPISAIVDITNYVMLDVNRPLHAYDADKIEKGIIVRNSKSGEEFTALDNKNYKLESGMCVISDNKGILGLGGIIGGTRSGTEFDTKNILLESAYFEPGSIRNTAKKLNLDTDAKFRFERGIDPLSIEDGLNKAAKLIKEICGGEISKIDIQKIETYKTKKISFDPNIFEKISGFKISLKEMIKILENLGFGVKSDKKRLKLDVPS

SEQ ID NO: 160796 - protein, 186 aa, Unknown
  Bacterial polypetide isolated from the Sargasso Sea
MQIPQDLIETAALKLKFVKSEAEFFQLRAKYLGKKSFVVTAFSKLKKLQSDEKVNAAKELNLLKNNLINLFETFIEDVEGKNNHEKLDVTLPADPFLVGSEHPITKISQRIINYFSLLNYQIFSGNEIETDFYNFEALNFPENHPARQMHDTFYLNSNSKLEYLLRTHTSNTQVHAMLNEDLPLYI

SEQ ID NO: 160797 - protein, 294 aa, Unknown
  Bacterial polypetide isolated from the Sargasso Sea
MKPGQKFRNALKNNKPLIIPGTINAYSAKLAELANHNSIYLSGSGVAAASYGLPDLGVTTLENVLIDAKRITSATSLPLLVDIDTGWGDFDAISNTIIEMGNANVAAVHIEDQIFDKRCGHRPNKQLVSIDEMQDRLKAALDAKIDDSFFIMARTDALASEGIEKAIERCGKYLDVGADGIFFEAAVSIEEYKEFKNNFSAPLLANITEFGKTPLFTQKELSDVGVDMVLYPLTAFRAMSLSAEKIYNSIIKDGTQEPLLDIMQTREELYEVLDYYNFEKQLDEQFENNNKESS

SEQ ID NO: 160798 - protein, 252 aa, Unknown
  Bacterial polypetide isolated from the Sargasso Sea
MIITLPWLKEHLKTKASENEVINKLTNIGLEVENVKENSGELSEFKIAKIIKAEKHPNADKLKVCDVSIGGKELFKVVCGAPNARDGLITIYAPPGAVIPKTKLELKIAKIRGVESQGMLCSESELNLSDESNGIIELNSRKKEIGKSYFKGKSEKVIDIAITPNRPDCLGIRGIARDLSSTGIGKLISLKKKKLTQTSKHHIKTSITKDKHQGCLTFGSCYIRDIANKESPEWLKNKLHSLGLKPISAVVD

SEQ ID NO: 160799 - protein, 362 aa, Unknown
  Bacterial polypetide isolated from the Sargasso Sea
PIFRRWVDITNLVTVELGRPLHVFDAAKVKGNVYARMAREGEELLALDGKTYAMDAEMCVIADEAKAEALGGIMGGEESGCTETTTDVFIECAYFDPIRTAMTGRKLNLQSDARFRFERGVDPAFVEPAMEIATRLVMDLCGGEPSHVVVAGGEPDWQKTISLRRERLRTLGGVALDAMEVSRILDVLGFSHARNGDIFETQVPSWRPDIVGEACLVEEVVRIHGYDKIPAVPMSLMDALPHSARTVDQTRRADARRVLASRGMTEAVTYSFLAEKDAALFGKVVDAIKLANPISADLDVMRGSILPNLINAAVRNGARGIADTALFEVGPQFTGDQPNDQSIAATGIRTGNNGIRHWARKP

SEQ ID NO: 160800 - protein, 40 aa, Unknown
  Bacterial polypetide isolated from the Sargasso Sea
MRNGLGFAAGLGVERFCMVRHQIDDIRKFYTNDIRFLEQF

SEQ ID NO: 160801 - protein, 28 aa, Unknown
  Bacterial polypetide isolated from the Sargasso Sea
APGRVYRSDQLDATHSPGFSSNRRFGRR

SEQ ID NO: 160802 - protein, 156 aa, Unknown
  Bacterial polypetide isolated from the Sargasso Sea
MSDLDKISSVFNAKIDSVKTKDDLQNIKTEFFGKNGQITQQFKTLGSLDPEKRKEFASNLNKIKDNLTNQLDQKIVEIEANEINEKLKNEKVDVTLPVRPARQGKIHPVSQVIDEISSIFSEIGFSVAEGPDVETEYNNFTALNTPEDHPARDMHD

SEQ ID NO: 160803 - protein, 418 aa, Unknown
  Bacterial polypetide isolated from the Sargasso Sea
MKLEVSKIRGETSYGMLCSESELKLSNESEGIIELNQKFNRSVGKPYFKNKSNNNVIELSITPNRPDCLGIRGIARDLFASGYGDLKEIKNVKFKKTLKHNFKIRIEKNKNQACSIFGSCLIKNITNKESPSWLKERILALGLRPISAVVDITNYVMFDINRPLHAYDLDKIKNSIQVRNSKKGEILKALDNKTYTLKENMCVIADDEGPLGLGGIIGGIRSGTEMDSKNILIEAAYFDPGITRKTARILEINSDAKFRFERGIDPQSIKEGLTMASKLILEICGGEVSNFDIQETIKFKKKKIKFDPKLVSKTIGINVKEKEVTNILNKLGFETKKKGKNIETTIPSWRPDIFGGIDLVEEVIRILGFENVKSIEPERVREKSTLNFYQKHFHLAQRSVASKGYYETITWSFTDETI

SEQ ID NO: 160804 - protein, 285 aa, Unknown
  Bacterial polypetide isolated from the Sargasso Sea
MKFTKDWLKDHLKTKKTEAQIIEKLNSTGLEVESVEPVKNELSDFVIAKVIKAEKHPNADRLKLCHVDIGKKQLVKVVCGGPNAKDDLITIYAPPGSIIPKNKMKLEVSKIRGETSYGMLCSESELNLSNESEGIIELNQKYQSKIGKSYFNNNSENVIELSITPNRPDCLGIRGIARDLSASGYGKLIDNGNIQVKKNGKHNLKVKIEKNKNQACTIFGSCLIRNIKNQESPEWLKKRILSLGLRPISAVVDITNFVMFDLNRPLHAYDLDKIKKGIIVRNSKK

SEQ ID NO: 160805 - protein, 347 aa, Unknown
  Bacterial polypetide isolated from the Sargasso Sea
EKNDSGSLVSLKEKPIETPEEKLLAFIGEKTVSQDEITNSLALKILLSRPNYIIQTSEKSKTISLTDTAMSLDTSISSSGAIDVEADVPPVFAARTHPLQDTIDEIREIFVNLGFSEILGNMTQSSFWNFDALFTPQDHPARELQDTFYLEKLESKNPATSSQIKNVSSSHTKNWKYDWKLSESQKMVLRTHTTCVTIKYLAEQKPDNARIFSLGRVFRNEKVSYKHLVEFNQIEGIVIGNNTTLRDLMGIQKEFYKKLGLTKIKFWPTFFPYTEPSLQTMVYNEKLGKWIELFGMGIFRPEVTKPLGIDKPVLAWGGGIERIAMLKYELDDVREFYNNNLSWLRSA

SEQ ID NO: 160806 - protein, 382 aa, Unknown
  Bacterial polypetide isolated from the Sargasso Sea
GAHWWHLGLGWGLQLAALQAQRRGDATAWLEIRRSLEDNRYLRDGATLLERHDPEGMAWSWLNNDPSNDQQWTVHHAPESWLQRPMLLIGGWWDPHLVGLLDLWHRSQAAGGQPSLHIGPASHLQWWPETQQLMLQFFQQHLQNRPPQEPQPSHQLWNITQHQWNAIPAPATGRSASWGLRSHGLACIDPSEGALVADGEGEGSVVIVHDPWRPVPAIGGHLGTNPGPAERTAVDQRSDVATFTTAPLVDELLLSGQPHLLLDAEADQPGFDLCISLSRLPAETNSVDQLSTGVVRIRGEEALQPARRSVILQPLHASLACGDRLRISVAAAAWPAIGVNPGHDAVACGAPSPEHRVVTLTLKLAGSTLQLNPFDSGRLKLD

SEQ ID NO: 160807 - protein, 619 aa, Unknown
  Bacterial polypetide isolated from the Sargasso Sea
KTKLVIAKIRDVTSYGMLCSESELNLSEESDGITELSSSKYNKSIGKSFFTQSSSNLIDLSITPNRPDCLGVRGIARDLAASGFGKLKQIKEQKIKSKKSQTIKVKITNEKNQGCFSFGSCLVTNVKNTESPKWLKDKLISIGQKPISAIVDITNYVMIDINRPLHAYDADKIEKGIIVRNSKSGEEFTALDNKNYKLEDDMCVISDDKGVLGLGGIIGGTRSGTEMGTQNVLIESAYFDPRSIRRTAKRLNIDTDAKFRFERGIDQLSIEEGLNKAAFLIKEICGGEISKIDIQKISTFKNQIIKFDPNSFEKVTGFKILTKDMLKILDNLGFTCKKDKKVFKLTIPSWRPDITQEIDVVEELVRIVGYDKIKIEEPIKERKKSTLTQTQKLFHFLQRSVASKGYLEAITWSFTDAKYNDHFKGQNDELKIVNPISSELGVLRNSIFSNLIMYMSKNIDRGFKDLSIFEIGPTFFGKQPGEQNIVVCGLAAGKKSCLSWLEKERNFDVFDIKKDVVQTLVEAGYDSEKFFIDDETPDYYHPGKSGRLFLNRGRENVAAYFGEIHPNIIKQIDMKTESLVGFEIFLDNLKLPKKSLKDQKNKYSVSDYQKSERDFAFIV

SEQ ID NO: 160808 - protein, 254 aa, Unknown
  Bacterial polypetide isolated from the Sargasso Sea
MKFTYSWLKEHLETEHQYNEVVDKLTAIGLEVESVQDTGLAYKDFIVGQVLEEEKHPNADKLKLCKVDIGREKVDVVCGAPNVTKGMKVVYAPVGSVIPVNQMKIKAAKIRGVESYGMMCSEYELGISNEHDGIISLEQDKEVGSPFADSSGMNDILIEIGITPNRQDCLGVLGVARDLAAAGVGKLKNREFKTEKGSFESPIKIEIQDNDMCPAFAGSYIKNVKNVASPDWLQKKLKSIGLRPISALVDITNY

SEQ ID NO: 160809 - protein, 626 aa, Unknown
  Bacterial polypetide isolated from the Sargasso Sea
CFSYKGDHPRNQCFLDNAKIKYEDLLNPEIHHKECMKVEVQSKEDCPVFMTRVIKSINKDANTPKWLKKRLEQSGYKSINAIVDIANFVMLETGQPLHTYDLKKINEKIIVRRANDKEAIDILDGSRKLLDSDFLVIADSKKALGIAGIMGSLDSGISDDTENIVLESAYFNYETIMGRARSLSLHSEASMRFERGVDPMIQEYAIQRFTSLINEIAGGSNGPIHSSISKKALPKNKFITLRKDKIKQILGITIPNQTIKSILNRLDMEIKEKDFGYIGWSVKAPSYRFDINEECDLIEEISRVYGFDQIPENVEQQNMMLMNKSSRQLKRERIDSIFHQLGYNEVVNYSFVSPSMNSLSDSKADMIDLQNPISIEMSVMRNSLWPGLLNNLSHNIKRQHKDIKIFEVGKHFSSRKRRPIETNVIAGLIYGNRRLESWAYSKVAVDFYDLKGHLEDLFSVFNLENVKFEPVSHPMLCPGVAAEIKLKNKKIGIIGMLNPELSRDMKIEQDPFLFELDYDCLELPALTSFTSSEYYPSSRRDLSFVLPNKDRISNVTEEIRGLDIKELKDIVVFDLFDKENGENTQKSISIGLIFQAKSRTLKDTEIDGFMSKVIKMLETNFQITIR

SEQ ID NO: 160810 - protein, 745 aa, Unknown
  Bacterial polypetide isolated from the Sargasso Sea
NSFAQDEKQQGHTNINKFRQLYDEFASPNIYRTASGAPGPAYYQQRADYKINVELDDKNKKIYGDETITYTNNSPETLSYLWVQLDQNVRKKDSPSLDIDSEGVSIAYIPDSFDKEYLKNPFDGGFNIEYVKGVDNKPLDYIINQTMMRIDLPNPISTGQSFAFKIKWWYNINDHVKQDGRSGYETFPNDTNRAYIIAQFFPRMCVYNEVEGWQNYQFWGDGEFALPFGDYEVNITVPSDHILEATGELVNRKDVYTKEMMKRYNQAKKSYDKPVIIVSQDEAIEAEKTFSNDKKTWKFAAKNVRDFAFATSRKYILDMMAVKIGSEDVMAVSIYPREGNPLWEEYSTITVVEALKSFSKYTFDYPYHKAVSVHAHQIGMEYPMICFNFGRPNIDGSYSDDEKFGMIGVIIHEIGHNFFPMIVNSDERQWAWMDEGLTTFVQYLAEQEFGEKYPDAIYPNKNFPSDRGPANMITDYMSVDQNYLAPIMSNPENVYSLGPNAYGKPATALNILRETIMGKELFDYAFKTYSQRWMFKHPTPEDFFRSMEDASAVDLDWFWRGWFYTTDYVDISIKELNQYYVSPNPGEEMKEFMKERGLVRNRLRPLIFFEKFENDVDNNRDKNPLENSKLLNNYLKENYSTEEINDLEIPKYFYEVVFEKPGGLVMPIIVDIKYEDGEVVRKKYPAQVWRKNDKEVRKVIATNKKISEIILDPDEETADIDTRNNSWPKKEESTDFDKFKSRIQG

SEQ ID NO: 160811 - protein, 449 aa, Unknown
  Bacterial polypetide isolated from the Sargasso Sea
MALNRPNLLYNILKYTILSLVLPLSAQSDESLNANIFETGLYSKNLYFEWKPLDKELDLYSAKIAEINFRFSDIDLQYKGNTNERTANIQFIGPNFSLKQLGLKFNIHSENWVTKEKIERLEKREAIPKASIESIANSVDLYMVDHNTLPRTVNELVVKQYLDMDTPPLNDYSWKYDLKLPEQIIAKPTQINVHPSSHALYYDWQSRTFQLSPEKDSLINVPIVDWEYIFEIQDISQVFSSSIDIDLSKDNSEFDLKMKRGQFKISNTSFSSTPGKQYEDQSSVSLPELLLEANDLVLNGTISDTPVIHRGKGKFRIRNFEIKIPKGIKEEPEIESMLKTLGIWNNSLIIRLIEFDINLINEFTGDLLFRFQTPFMKISVDGDFSLRQGDSIPGVVLHNAEVRIHPISLGIRKWLREWEQKNGRMFTRQGATIVLKINGPIDDPVIQGY

SEQ ID NO: 160812 - protein, 108 aa, Unknown
  Bacterial polypetide isolated from the Sargasso Sea
MKIAYPHLLNFLKEKPSLDELSDKLLQLGHEHEIEGDIIDLEITPNRGDCLSLKGIARDLNYFYKAELDRDTYDENIPKSDFSFQNKAKDLCPNISFVEIEIDGSISG

SEQ ID NO: 160813 - protein, 318 aa, Unknown
  Bacterial polypetide isolated from the Sargasso Sea
LKEHLDTQKKDNELIEKLTDIGLEVESFENLSSGLDSFKVAKIINAEQHPNADRLRICDVDIGLDDTVKVVCGAPNAKKDLLTVYAGPGSIIPKNNMKLSVSKIRGVTSYGMLCSESELKLSNESEGITELTTSKYSDKIGKNFFQSNTEKVVDLSITPNRPDCLGVRGIARDLAAAGVGKLKKISLKNIKKNGSQKIKVSITKDKNQGCTVFGSCLIEGVTNKESPQWLKEKIISLGQKPISAVVDITNYVMLDLNRPLHAYDADKIDKEIIVRNSKKGETFEALDNKEYKLDDDMCVISDKSGVLGLGGVIGGTRS

SEQ ID NO: 160814 - protein, 168 aa, Unknown
  Bacterial polypetide isolated from the Sargasso Sea
MAFAENKKDIKNKIKGTSTFEDLEKIRLYYLGKKGLIPEALKGLGSLSIEEKKSKGQELNTTKKFIEETIKDQKTQIENIEISKKITQESIDVTLPPNITEQGKIHPISQTIFNIIEIFGNLNYSVETGPDIETDFNNFTALNIPEHHPAREMQDTFYIEDGKDNNVL

SEQ ID NO: 160815 - protein, 306 aa, Unknown
  Bacterial polypetide isolated from the Sargasso Sea
MIISLDWLKEFVDIDESPDELSDLLSGIGLEAEATSVPTEISGVVIGKVETAEKHPDADKLKLCTVNDGKQVHQVVCGAPNVDAGQTIAFATVGSVLPGKLKIKKANIRGVESSGMICSERELNLSDEHEGIMVLPDDLEPGDDFVSSYGYKYISVELDITPNRPDAFSHQGVARDIACKTNRDFKQISVEPIAVKGNESINISMEDHQDCPRYIGGIVKNVKVGPSPDWLVERLKASGQRSINNIVDISNYVLMEMGHPTHIFDHDSLKNKSIYVRRAEKGETLTTLDDQKHKLDKTHLLITDGI

SEQ ID NO: 160816 - protein, 220 aa, Unknown
  Bacterial polypetide isolated from the Sargasso Sea
MTLSGIESEIEKSKGEEILDISLTPNRADCFSYKGIVQEVSALDNAKIISVKQAVPEIHHNLTMEVDVQSKEDSPVFMTRVIKSINRNAKSPKWLKEKLDQSGYKSINAVVDIANYVMLEMGQPLHTYDLKKIKKTILVRRAKKKEAIDILDGSRKILDPNYLVIADVEKPLGIAGIMGSLESGISEDTEDIVLESAYFNFETIMGRARALSLHSEASMR

SEQ ID NO: 160817 - protein, 301 aa, Unknown
  Bacterial polypetide isolated from the Sargasso Sea
EHLETKANINQIAETLTNIGLEVEGIQNKEQDYKNFSIAKVLSAEKHPNADRLKVCSVQTVNGDFQVVCGAPNAKAGMMGVFAPVDTYIPGTELNLKKSEIRGVESCGMLLSERELGISDEHDGIIEVKGKYKVGDPIAPIYGFDDPVIEINITPNRSDCLSVRGIARDLAAAGVGTLKDFKINKTKGKFKSDVKWLRKFEDGENHLCPGVSGRLFTNIKNSESPDWLKRRLTLIGLRPISVLVDITNYVTYDLGRPLHVYDADKLNGNLVMRKAKKGEQCKTLDEKEYKLSEEMIVISDD

SEQ ID NO: 160818 - protein, 167 aa, Unknown
  Bacterial polypetide isolated from the Sargasso Sea
MSSNKDIFSPELIKDKGSIHPINHMKDTIMGLLVSFGFEIIDGPEIETEEFNFDMLNIKKTHPARQMHDTFYVEGKSNLLRTHTSPVQIRGMLEKRPPLAFISGGKVYRKDDDATHLPMFHQIEGILVDKNISFAHLKDLIYKIVHSLFGKDIELRFRPSYFPSQNH

SEQ ID NO: 160819 - protein, 81 aa, Unknown
  Bacterial polypetide isolated from the Sargasso Sea
DMGCVFCGGKGCRICSHSGWIEVLGCGMVHTEVFRQVCIDNETYTGYAFGLGIERLAMLRYGVDDLRLFFENEVSFLRQFA

SEQ ID NO: 160820 - protein, 96 aa, Unknown
  Bacterial polypetide isolated from the Sargasso Sea
VDIGYEMKDGKIIIGEGNQWLEILGCGMVHPNVLKNVKVDPSKFQGYAFGIGIDRLAMLKYGINDLRAFFDCDYRWLNHFGFDPLDVPTNYRGLSR

SEQ ID NO: 160821 - protein, 362 aa, Unknown
  Bacterial polypetide isolated from the Sargasso Sea
SQIIDKLTDVGLEVESFENISSDLDNFKVAKIINAEQHPNADRLRVCDVDIGQQNIVKVVCGAPNAKKGLLTVYAGPGSVIPKNNMKLTVSKIRGVTSYGMLCSESELKLSDESEGITELKPSKYSNKIGKNFFKNNTEKVVDLSITPNRPDCLGVRGIARDLAATGAGKLKSISHKNIKKDGSQNIKVSITKDKNQGCTIFGSCLIKGATNKESPKWLKEKIESLGQKPISAIVDITNYVMLDLNRPLHAYDADKIDKEIIVRDSKKGETFEALDNKEYKLDDGMCVISDKSGVLGLGGVIGGIRSGTELKTKNILLESAYFIPRSIRKTSKLLNIDTDAKFRFERGIDPQSIETGLVKAS

SEQ ID NO: 160822 - protein, 281 aa, Unknown
  Bacterial polypetide isolated from the Sargasso Sea
FVDPKVQETLFPGQAALVLPNPISVDMSAMRLNLWPGLLQAVQYNQNRQQNRIRLFEYGLKFIPDANAEGGVRQVPVLGGVIVGSYGNEHWTIAERAVDFYDIKGDVEALLSCTSATECFTFATGQHSALHPGQTAQLNRDGKAVGVLGALHPEAERKLGIKGKAFLFEIELEAFGDKHIVLAQETSKYPANRRDLAIVVKSDVRFSDILATIRKVGGNQLVDLKLFDVYTGQGVADGYKSLAIALTLQDKARTLEDKDIQQVISSVVEVLSKEFNATLRD

SEQ ID NO: 160823 - protein, 303 aa, Unknown
  Bacterial polypetide isolated from the Sargasso Sea
MQLGHENEVDGDIIDLEITPNRGDCLSLFGISRELKNFYDINSNVEIFESHIEKFEFDFVNQAEDKCERIAFLELEIENLPTKYKPYLESYFTDLDVKKNNFFTDISNYISYELGQPTHCYDSDKLGTKLILEELKDKSSFTTLSNKEITLSPKDLVFSNGTEILNLAGIMGGISSSCSTNTKKVLIECAYFHPPAIIGKSIKYDLNSDAAYKFERGVDPLMLETSLRRFIYIVADHVRIKNLKISNNIYKEHDKKFVTNNKSKIEKIIGIDLDDLSFKNILSNLGFQISEKILVPSFRHDIE

SEQ ID NO: 160824 - protein, 179 aa, Unknown
  Bacterial polypetide isolated from the Sargasso Sea
MGLEVDTVTKLKRDIVINIDMTPNRADCLSVFGIARDLSAVYKKKIMQPKRVRLSKKDNSFIKSVNRKISTSYGLLLIENFDNTIKTPKYISDRLDLSGISRINFIVDVLNYVMIDIGQPMHVFDKDKIKGKLSVRFAKKGEKVKALDNNEYILSSDVPVIADDNGPQAIAGVIGSNNS

SEQ ID NO: 160825 - protein, 374 aa, Unknown
  Bacterial polypetide isolated from the Sargasso Sea
AGECSQFRLRQAREGEAFIGLDDRELSLDSRAQVVTCHDLPIALAGVMGSKASGVTAATGRIWLESAMFSPAAVRTTARSVGLRTDASARFEKGLPKEMTLACSIRALELLKELFPCEAKGLWVCGDSAADASSVLLRRDALHQLLGPIEDEEGSSDLADAVVEQCLTALGCELSPSDEGWNVIAPPSRRLDLAREIDLIEEVARLAGFDRFGAHLPDPLAPGALTPAQQAERRLRTLFCGAGLQEITTLSLVSASDSDPRIAISNPLLAETSHLRTNLWEEHLAVCVRNLKASQPGCWIFELGTTYAGSADAVEESRLLSGVICGEQRLERWTTSGKPAPPDYYAARGRLTEVMQALKLDVSDRRLTDDSRLH

SEQ ID NO: 160826 - protein, 49 aa, Unknown
  Bacterial polypetide isolated from the Sargasso Sea
AFGIGIDRLAMLKYGINDLRAFFETDYRWLNHFGFDPLDVPSNYRGLSR

SEQ ID NO: 160827 - protein, 279 aa, Unknown
  Bacterial polypetide isolated from the Sargasso Sea
MKFTQEWLKDHLKTNKTESQIIEKLNNTGLEVEKVEPIKNELSDFVVAKIVKTEKHPNADRLKLCHVDIGKKELVKVVCGGPNAKDNLLTIYAPPGSVIPKNNMKLEVSKIRGETSYGMLCSESELNLSDESEGIIELKHIYKSKIGKSYFNNNSKNVLELSITPNRPDCLGIRGIARDLSASGFGKLKPVKISRIKKLGKQYLKVKIEKNKNQACTIFGSCLITNIKNQESPAWLKKRIISLGLRPISAVVDITNYVMFDLNRPLHAYDLDKINKRII

SEQ ID NO: 160828 - protein, 49 aa, Unknown
  Bacterial polypetide isolated from the Sargasso Sea
AFGIGIDRLAMLKYGINDLRSFFESDYRWLNYYGFDPLDVPTNYRGLSK

SEQ ID NO: 160829 - protein, 309 aa, Unknown
  Bacterial polypetide isolated from the Sargasso Sea
HKDIQIIDKLTDIGLEVESFENISSDFDNFKVAKIINAEQHPNADRLRVCDVDIGQQNIVKVVCGAPNAKKGLLTVYAGPGSVIPKNNMKLTVSKIRGVTSYGMLCSESELKLSDESEGITELKLSKYSDKIGKNFFNNKTEKVVDLSITPNRPDCLGVRGIARDLAAAGAGKLKSISHKNIKKNGSQNVKVSITKDKDQGCTIFGSCLIKGVTNKESPKWLKEKIESLGQKPISAIVDITNYVMLDLNRPLHAYDADKIDNEIIVRNSKKGETFEALDNKEYKLDDGMCVISDQSGVLGLGGIIGGTR

SEQ ID NO: 160830 - protein, 159 aa, Unknown
  Bacterial polypetide isolated from the Sargasso Sea
MTLSGIESEIEKSKGEEILDISLTPNRADCFSYKGIVQEVSALDNAKIISVKQALPKIHHNLTMEVDVQSKEDSPVFMTRVIKSINRNAKSPKWLKEKLDQSGYKSINAVVDIANYVMLETGQPLHTYDLKKIKKTILVRRAKKKEAIDILDGSRKILD

SEQ ID NO: 160831 - protein, 46 aa, Unknown
  Bacterial polypetide isolated from the Sargasso Sea
MGIDRLAMLKYGINDLRSFFESDYRWLNYFGFDPLDVPTNYRGLSR

SEQ ID NO: 160832 - protein, 302 aa, Unknown
  Bacterial polypetide isolated from the Sargasso Sea
MLVKGLQKIKNLDAKKRNFIDSAGIPLIHPLVDLGNYVMLEIGAPMHVFDLNKLDLPINVRFPKSNNNSLEVIGGDLKDIQSSTLTIQDQSGIQAIAGIIGSERSAVSSNTANIAVEAAFFKPETIVNQARKYGLSTDASHRFERGVDPEIQQLALARYLFLLNEIAVYESVKLYYSKSKKTKKKNVHLDIKRFNDFSGLSMKTSQASSILRNLGFDIVTKNSKSLLFNIPSHRFDIALEEDLYEELLRCYGYDNIPVSIPKAGPIIKNKRDDVSDKLRIGLVHAGFKELMHMPFVSKESFE

SEQ ID NO: 160833 - protein, 250 aa, Unknown
  Bacterial polypetide isolated from the Sargasso Sea
YFDYKSIKSRINLPSISSFESVNIEEDFTLIVKDKDKCPFYSGIIIKDIEVKKSSEIIQNKLKSIGLKPINNIVDITNFVMHEIGQPLHAFDFDKLNNINVKSLKAGTKFKTLDDEIIELSKDDLMICSEDIPLCLAGIYGGLESGVLDSTKNLFLESAIFDSVTIRKSSKRHQLFTDASYRYERGVDPEKVIYSLKRAANLIKKDNPDCVISAVFSEDNLKLVKKDIYLRYEKVADLCGKEINHETITQ

SEQ ID NO: 160834 - protein, 283 aa, Unknown
  Bacterial polypetide isolated from the Sargasso Sea
EKIKISKSKIRGVVSNGMVCAEDEIGLGDSHDGIMILDNKVKSGTPLSQIYKIEKDSILEIGLTPNRSDAMSHYGVARDLKAFFEHNNENITLKLPSTSDFTYDDFKIETKINVKDTTLSPLYAGIIIKDVEVKESQTWIKNKLKSIGHEPINNIVDITNYVLHEIGQPLHAFDLDKITNIEVKNLPSKTKFKTLDGNEISLNEEDIMICSEDDPLCLGGIFGGLDSGVTSNTKNIFLESAIFNPVSIRKSSKRHSIYTEASFRFERGIDPEMVLYALKRASI

SEQ ID NO: 160835 - protein, 308 aa, Unknown
  Bacterial polypetide isolated from the Sargasso Sea
MCAPNVSIGKKVPVAPVGSVLYPKNGKKLKIKESTIRGEKSQGMICAEDELGIGNSHDGIMVLDNSLEIGKPFKEVLKINDDYVYDIGLTPNRADSMSHMGVARDLKAYFIQNKIQYSWNSPIIENLPTPTNTKNINVQVNEPELVPYYFGVTLTDIEISSSPDWIQNNLKSIGIMPKNNVVDITNFVLHDMGQPLHSFDAEKIEGDIIVKKSTKGTFFTTLDKNKIKLSDEDLMICDESKPLCLAGIYGGDHSGVSESTTSIFLESAYFDPKTIRKSSKRHGFTTDASYRFERGIDPDMSLIALKRA

SEQ ID NO: 160836 - protein, 204 aa, Unknown
  Bacterial polypetide isolated from the Sargasso Sea
MKFTLNWLLDHLDTDKSLDEIVEKLSMIGLEVEDVTDKSERLKNFIIAKVIDCKPHPNADRLKILSVDDKSGDTYQVICGAPNAKKGLIGVFAKPGMYIPGINLNLEVGNIRGEKSFGMMCSERELEISDEHDGIIELDQNAEIGTSFLEWSGLNDPVITIGITPNRADCLGVRGIARDLAASGFGVLKPLNIKNIKGTFKSPK

SEQ ID NO: 160837 - protein, 64 aa, Unknown
  Bacterial polypetide isolated from the Sargasso Sea
NPRVLENCGLDPNEHQGFAFGMGLERIAMLKYGIPDLRPFFENDLRWMKHYGFFPFEQYSIHQG

SEQ ID NO: 160838 - protein, 108 aa, Unknown
  Bacterial polypetide isolated from the Sargasso Sea
FAEMKGTLEYFAKEMFGKDTKMRFRPSYFPFTEPSAEVDIWNEKLNQWMEILGCGMVNPNVLENVGYDSERYQGFAFGMGIERIAMIKYGIRDIRLFYQNDKRFLEQF

SEQ ID NO: 160839 - protein, 123 aa, Unknown
  Bacterial polypetide isolated from the Sargasso Sea
ILFLKEFFEIDNLKYRFRPSYFPFTEPSAEMDVAYTKKNNVLKIGEGDDWLEILGCGMVNPKVLENCNIDSSVYQGFAFGMGIERLSMLKYGITDMRGLFDLNLKWLDHYGFSPLDLKTRSEI

SEQ ID NO: 160840 - protein, 252 aa, Unknown
  Bacterial polypetide isolated from the Sargasso Sea
MIITFPWLKEHLKTNANEKEIISKLTNIGLEVESIKENPGDLGEFKIAKIIKAEKHPNADKLKVCDVNIGGKENLKVVCGAPNARDGLVTVYAPPGAIIPKTKFQLKIAKIRGVESRGMLCSENELNLSDESDGIVELNVREKEIGKSYFKRRSEKAIDISITPNRPDCLGVRGIARDLSSTGIGKLITLKRKKIKQSSKHQVKTSITKDKHQGCLTFGSCYIKDIVNKESPEWLKNKLFALGLKQFQLLLI

SEQ ID NO: 160841 - protein, 51 aa, Unknown
  Bacterial polypetide isolated from the Sargasso Sea
GFAFGMGIDRLAMLKYGINDLRAFFETDYRWLSHFGFDPLDVPTNYRGLSK

SEQ ID NO: 160842 - protein, 243 aa, Unknown
  Bacterial polypetide isolated from the Sargasso Sea
MKFAVDWLTDHLDTKLNDHKIIDKLTNIGLEVESFENQTSEFDDFIVGKIVSAEKHPNADRLRLCDVDIGKSETVKVVCGAPNAKNNLYTVYAPPGTIIPKNQMKLSVSKIRGVTSYGMLCSESELNISNESEGIIDLNVKKYGNQIGKKYFKNSSPKVIDLSITPNRADCLGVKGVARDLAAAGAGKLKQKKVHKIKFSGLQNIKVKITKEKNQGCTSFGSCLIKGIKNTESPKWLKDKILS

SEQ ID NO: 160843 - protein, 112 aa, Unknown
  Bacterial polypetide isolated from the Sargasso Sea
DQNISFSDLKGTIIGFIDYFFNQNVDVRFRPSYFPFTEPSAEVDIRFGKKGWLEILGCGMVHPNVLRNCNIDARKYRGFAFGVGVERLAMLYYGVEDIREFYASNSEFLNQI

SEQ ID NO: 160844 - protein, 198 aa, Unknown
  Bacterial polypetide isolated from the Sargasso Sea
MKLTINWLKEHLDTKLNEDKIIDKLTDIGLEVESFKNQETEQDNFIIAKVINSEKHPNADRLKICEVDIGLKDAVKVVCGAANAKKNLITVYAFPGSIIPKNQMKLAVSKIRGVTSYGMLCSESELNISNESEGIIELSSTKYLNQIGKKYFNKNNIKVIDLSITPNRADCLGVRGIARDLSAAGAGKLKKIDKKKIK

SEQ ID NO: 160845 - protein, 314 aa, Unknown
  Bacterial polypetide isolated from the Sargasso Sea
FQLGHEHEIENNIFDMELTPNRGDCLSINGLLRDLSVFYEITPNNEIYTDDIKSLDINFVNNSQEACPSISFLKIKIQGEVSAYKGIFQDYFDDLDVNKNNFFTDISNYISYETGQPTHCYDAEKVTSLISLETSVEEYEFKTLLDKTIKLEDENLVFVQNDEVINLAGVMGGSGTACSKDTKSVIVECAYFNPENVIGQSIKYDIKSDAAHKFERGVDPLCHEKVLRRFLKIVDEHATIKNVEIFKRDYISHNSTEIPFSIERINKILGLSCNSEELQDYLTKLGFNIDKNKIIAPSYRSDIKTENDIAEEVA

SEQ ID NO: 160846 - protein, 277 aa, Unknown
  Bacterial polypetide isolated from the Sargasso Sea
YKHPNADKLKVCEVKSDNGTFQVVCGAPNARTGMLGIFAPENSFIPGTKLKLKKTKIRDVESCGMLVSEREMGISDEHEGIIEVDKKYNIGDSFSEIYGLNDPIIEINITPNRSDCLSVRGIARDLQAAGAGRLKELKIKNVKGSFVSSIKWLRKFDKKDENLCPGVSGRFFKNVKNTESPDWLKKKLLAIGLRPISTLVDITNLVTFDLGRPLHVYDADKLEGDLCMRLAKEGEKCKTLDEKEYVLSSDMIVIADKKKLHGIGGVMGGLDSGCSLK

SEQ ID NO: 160847 - protein, 295 aa, Unknown
  Bacterial polypetide isolated from the Sargasso Sea
SYNPKNQMKLSISKIRGVTSYGMLCSESELKLSNESEGITELPNKFKTKIGTKYFSNKSPKVLDLSITPNRADCLGVRGIARDLAAAGTGKLKDLKNTKIKINNKQIFKVKILNEKPLGCSSFGSCFIKGVKNRESPNWLKEKIISLGQKPISAIVDITNYVMMDLNRPLHAYDADKIDKMIIVRNAKEDESFKALDNKIYKLEKDMCVIADKSNVLGLGGIIGGASSGTEFSTENILLESAYFNPRFIRKTSKHFNIDTDAKFRFERGIDPNAILSGLQKAAELIQKIWEEKSV

SEQ ID NO: 160848 - protein, 111 aa, Unknown
  Bacterial polypetide isolated from the Sargasso Sea
NISFGDLKGTLEYFVKRVFGNKVTMRFRPSFFPFTEPSAEVDIWDEKRGQWLEILGCGMVDPAVFENVGYDPKVWHGYAFGLGIERIAMLKYGISDIRLFFQNDKRFLDQF

SEQ ID NO: 160849 - protein, 282 aa, Unknown
  Bacterial polypetide isolated from the Sargasso Sea
MKFTIGWLKEHLITKYKDNKIIEKLTDVGLEVESFENIKSELDSFKVAKIINAEQHPNADRLRVCDVDIGEKNTVKVVCGAPNAKKDLITVYAGPGSIIPKNKMKLAVSKIRGVTSYGMLCSESELNLSDESEGITELKHVKYANKIGKNFFKNNGEKVVDLSITPNRPDCLGVRGIARDLAASGVGKLKNISNKKIKKAGSQNIKVSIVKDKIQGCTIFGSCLIKGVTNKESPKWLKDKIESIGQKPISAIVDITNYIMFDLNRPLHAYDADKIDKEIIVR

SEQ ID NO: 160850 - protein, 83 aa, Unknown
  Bacterial polypetide isolated from the Sargasso Sea
FRASYFPFTEPSAEVDVQWKGKWLEVMGCGMVDPKVLEKLGIDSEKWTGFAAGLGVERFCMVRHQIDDIRKFYTNDIRFLEQF

SEQ ID NO: 160851 - protein, 272 aa, Unknown
  Bacterial polypetide isolated from the Sargasso Sea
IKTSKHPDADKLKVCQVETKNGEFQVVCGAPNAREGMLGIFAPENSYIPGTELYLKKTKIRGVESCGMLVSEKEMGISDEHDGIIEVDRKHKIGEKFSEIFKLDEPVIEINLTPNRSDCLSVRGIARDLAAAGIGKLKDLKFKIINETFKSPIKWKKEFKDQNICPGVSGRYFKNVKNVESPKWLQDRLTAIGLRPISALVDITNYVTFDLGRPLHVYDADKISGNLTMRLANKDEECLALNEVNYKCSEDMIVISDDNNKLHGIGWCYGRS

SEQ ID NO: 160852 - protein, 285 aa, Unknown
  Bacterial polypetide isolated from the Sargasso Sea
HVNVGKKELVKVVCGGPNAKDNLLTIYAPPGSVIPKNNMKLEVSKIRGETSYGMLCSESELNISDESEGIIELNQNYKNKIGKSYFKNNLDNVLELSITPNRPDCLGIRGIARDLSASGFGKLINKKSIKIKKTYKQSLKVKIEKSKNQSCKIFGSCLIKNIKNQESPKWLKKRIISLGLRPISAVVDVTNYVMFDLNRPLHAYDLDKINKEIIVRNSKKGESFKALDNKEYKLDDGMCVISDHEGVLGLGGIIGGIRSGTELNTKNILLESAYFDPEITRKTAK

SEQ ID NO: 160853 - protein, 270 aa, Unknown
  Bacterial polypetide isolated from the Sargasso Sea
LGLEVEKIESFESIKGGLEGVVAGKVIECVKHPNADRLKLTSIDLGNNEISEIVCGAPNIEKGQMVPVAVVGSKIYTNEGVEIKIKKSKIRGVVSNGMVCAEDEIGLGDSHDGIMVLDKKIKPGTPLSQIFNVNSDSILEIGLTPNRCDAMSHFGVARDLKAYYDYKSIKSRINLPSISSFESVNIEEDFDLIVEDKHKCPFYSGIIIKDIEVKKSSESIQNKLKSIGLKPINNIVDITNFVMHEIGQPLHAFDFDELSNIKIKSLKTGT

SEQ ID NO: 160854 - protein, 274 aa, Unknown
  Bacterial polypetide isolated from the Sargasso Sea
EESEGIIELKNKEKEIGKSYFKSSSQKAIDISITPNRADCLGVRGIARDLSSAGVGKLIPINRKKFKQNTKHQIKTSITKEKNQGCEIFGSCYIKNITNKESPEWLKKKLTALGLKSISAVVDITNYVMFDLNRPLHAYDADKIKKEIIVRNAKEGEMFEALDNKKYKLKKNMCVISDKSGVLGLGGIIGGTSTSTELDTKNILLEAAYFSPSSIRKTARVLNINTDAKYRFERGIDPNSIKEGLELAIELILKICGGEVSKFQIIERRTKKIR

SEQ ID NO: 160855 - protein, 252 aa, Unknown
  Bacterial polypetide isolated from the Sargasso Sea
MGHENEIVKDLIDIEITPNRGDCLSLFGLARDLDNFFTLKKDIDLYNKDLDIFDFNFLNLAKEDCPKISFLLVEVEYLPTNYKNYLEEYFSELGIKKNNFFTDISNYLSYELGQPTHCYDYSKVCGGLQLKRIKENQVFKTITNKEINLQESNLVFTLNETPINLAGIMGGASTGCLPDTKTILLECAYFSSESIIGKSTKYDLGSEAAYKFERGTDPEAIEIAIRRFIKIVEDHTKIRDLKIFREDNIKKT

SEQ ID NO: 160856 - protein, 232 aa, Unknown
  Bacterial polypetide isolated from the Sargasso Sea
MKFTIDWLKQHLDTNYSDEKIIDKLTNIGLEVESFKSQSSEYDEFIIARIVNAEQHPNADRLMVCDVDIGKEETVKVVCGAPNAKKNLLTVYAPPGSIIPKNQTELSVTKIRGVTSYGMLCSEAELKLSDESEGITELPLKKYKNYIGKKYFKNNNLKVVDLSITPNRADCLGVRGVARDLAAAGAGKLKKYNQSKIKLKGPQKIKIKIAKEKNQGCASFGSCLIKGIKNTE

SEQ ID NO: 160857 - protein, 69 aa, Unknown
  Bacterial polypetide isolated from the Sargasso Sea
MVHPNVLKNVKVDPSKFQGYAFGIGIDRLAMLKYGINDLRAFFETDYRWLNHFGFDPLDVPSSYRGLSR

SEQ ID NO: 160858 - protein, 272 aa, Unknown
  Bacterial polypetide isolated from the Sargasso Sea
MKFTKEWLKDHLKTNKSELQIIEKLNQTGLEVEKVEPIKNELSDFVIAKIVKSEKHPNADRLKLCHVDIGKKELVKVVCGGPNAKDNLLTIYAPPGSVIPKNKMKLEVSKIRGETSYGMLCSESELNLSNESEGIIELGKKYKNKVGKSYFDNNSDNVIELSITPNRPDCLGIRGIARDLSASGFGKLLDIKNFKLKKNGKQNLKVKIEKSKNQACTLFGSCLIKNIKNKQSPQWLKKRIISLGLRPISAVVDVTNYVMYDLNRPLHAYDAD

SEQ ID NO: 160859 - protein, 264 aa, Unknown
  Bacterial polypetide isolated from the Sargasso Sea
MKFTWKWLLDHLETDKNLSEILETLPKLGLEVASIVNLAEDLKSFISVEIIDVKKHPNADKLNVCKVFDGNNTFNVVCGAPNVKLGMKSVFANVGTFIPGLNLKLKKGKIRGEESFGMLCSEKELTISENHNGIIELETSSELGLSVSDIMDLNDPIIEIEITPNRGDCLGVRGIARDLASAGLGNLKDLDVIINDGEFDSIINWHVDLDEDEKYLCPKVFGRSFTNLKNDESPLWLKNRLIAVDQRPISSIVDITNYIMIDIG

SEQ ID NO: 160860 - protein, 162 aa, Unknown
  Bacterial polypetide isolated from the Sargasso Sea
MSDLEKINSIFNAKIDSVKSKEELQNLKTEFFGKNGQITNQFKNLGSLSPEDKKEFASSLNKLKDSLSNQILEKNLEIETKEINEKLKSEKIDVTLPIRSYRQGKIHPVSQVIDEISSIFSEIGFSVAEGPDVETEYNNFTALNTPEDHPARDMHDTFLFRK

SEQ ID NO: 160861 - protein, 239 aa, Unknown
  Bacterial polypetide isolated from the Sargasso Sea
PVIEIAITPNRPDALGIHGIARDLAARGLGTLKTTGYTPVEGQYESPIKVTIDEDTLDGCPLFTGRMIRGVKNGPSPKWLQDRLTAIGLRPISALVDITNFFTFDQNRPLHVFDAAKVTGNLRVHRAAGGEELLALDEKTYTMQAGQMVISDDNGAESIAGIMGGEETGCTDETVDVFLESAFWDHVQIATTGRALKINSDARYRFERGVDPEYTYEGLERATQMILDLCGGEPSNVVS

SEQ ID NO: 160862 - protein, 163 aa, Unknown
  Bacterial polypetide isolated from the Sargasso Sea
MSDIKKIKDDYIDKLNTENNVDKVNNIKSELFGKNGIISNEFKKLGSISVEERKKLASDLNNIKDELQNKISIKIQEIETKEINLKLEKEKIDVTLPERDIQIGKIHPVSQVIDEISSIFSEIGFSVEEGPDVENEYNNFTALNTPDNHPARDMHDTFYLDNN

SEQ ID NO: 160863 - protein, 126 aa, Unknown
  Bacterial polypetide isolated from the Sargasso Sea
MGDNLSDLSNSAIQEINECSSSNDLESIRVKYLGKKGAVTTALKSLSKIDPKDRPAHGKKINEIKTLIQERLSERKATIQKEEINQNIENKMIDVTLPGRVNFQGHRHPVTKTLLEIEEIFYGAGF

SEQ ID NO: 160864 - protein, 292 aa, Unknown
  Bacterial polypetide isolated from the Sargasso Sea
MKFTRDWLKEHLKTNKSEAQIIEKLNHTGLEVEKVEPVKNELSDFVVAKIIKSEKHPNADRLKLCHVDIGKKELVKVVCGGPNAKENLLTVYAPPGSVIPKNNMKLEISKIRGETSYGMLCSEAELNLSNESEGIIELNQNYKKKVGKNYFESNSDNVIELSITPNRPDCLGIRGIARDLSASGFGKLIENKNIKIKKNGKQTLKVKIEKSKNQACSLFGSCLIKNIKNKESPDWLKERIISLGLRPISAVVDVTNYVMFDLNRPLHAYDVDKIKKGIIVRNSKKGEKFKAL

SEQ ID NO: 160865 - protein, 286 aa, Unknown
  Bacterial polypetide isolated from the Sargasso Sea
MKFTWHWLLDHLQTDKNLNEILETLPKLGLEVASVVNLAEDLKEFITAKVLEVKKHPNADKLNLCKVFDGNNTFSVVCGAPNVKAGMIGVFANVETYVPGINSILKKTKIRGESSEGMLCSEKELTLSDNHEGIIELPKDSKIGFPIIDIMDLNDPIIEIEITPNRGDCLGVRGIARDLAAAGMGVLKDLEVVEIEGDFESIINWKIDLNEDKKNLCPKIFGRSFQNVVNVDSPSWLKKRLLAVDQRPISSLVDITNYIMIDIGRPLHAYDADKIVGNTLTIKESK

SEQ ID NO: 160866 - protein, 262 aa, Unknown
  Bacterial polypetide isolated from the Sargasso Sea
INLLVDLTNYILLEQGQPLHAFDKDKLSNLIGKEVSPEDFSVRKGKDNESLICLDGKEYDLNDNITVITCCDIPVAIAGVIGGLETSVTNTTSSIYLEGAVFNPVTIRKSSKAVGIRTESSSRYEKGISSKNTISAVTRAINLLDEHFSINSPIINTSNLISNEDIFIKLRRNRIHKILGPLIINDQFEKRNLSDNEIVDKLTLIGCTLKNKEYGWDVAVIPNRSNDLIREIDLIEEIARLIGYDRFDLNLPNPIKPGKLSS

SEQ ID NO: 160867 - protein, 73 aa, Unknown
  Bacterial polypetide isolated from the Sargasso Sea
ENKGCRLCKNTGWLEVAGAGMVHPTVLINGGYDPENWTGFAFGMGVERPALLKHNIDDIRYFYNNDLRFLHQF

SEQ ID NO: 160868 - protein, 72 aa, Unknown
  Bacterial polypetide isolated from the Sargasso Sea
VDIGYELKDGKIVIGEGDKWLEILGCGMVPPNVLKNVKINPDKYQGYAFGIGIDRLAMLKYGINDLRAFFET

SEQ ID NO: 160869 - protein, 293 aa, Unknown
  Bacterial polypetide isolated from the Sargasso Sea
YVYVATVGAKLNAVDLTIKRSEIRGVMSEGMICSLQELGLEDSSEGIEIIDNDLALKHELGTPGSDLLQLNDFIYDLAITANRPDGMSVMGIAREISALLESTLNFPELNHKYNTHLLKGIKLCPEAVESNCIYTISCIDGVNGEKLSPNWLKDRIEKSGIKSINLLVDLTNYILLEQGQPLHAFDKDKLSNLIGKEVSPKDFSVRKGKYNESLICLDGKEYDLNSNITVITCCDKPVAIAGVIGGLETSVSNTTSSIYLEGAVFNPVTIRKSSKAVGIRTESSSRYEKGIHQ

SEQ ID NO: 160870 - protein, 131 aa, Unknown
  Bacterial polypetide isolated from the Sargasso Sea
MVDLKSTLVKFLEEFFEVKNLQYRFRPSYFPFTEPSAEMDVAYTKVNNKIKIGEGNDWLEILGCGMVNPVVLDNCKIDSKIYQGFAFGMGIERLSMLKYGITDLRSFFDLNYRWLNHYGFSVLENQTRSGL

SEQ ID NO: 160871 - protein, 210 aa, Unknown
  Bacterial polypetide isolated from the Sargasso Sea
VLRRGAEPSCSSTDDGFQPLHAAAADGHVPVAEHLVASRSSALLISSTDNDGCQPLHIAAFRGQCAVAEHLLSRGAEASSTMNDGRQPLHAAAQEGHRVVAEHLLSRGGAEASSTMNDGRQPLHAAAQEGHLTVVEYLLSRGAEPSSTSNDGRQPLYVAAESGHVTVQEHLTSRGAAEASSTSNDGRQPLYVVAESGHVTVEEHLASLAT

SEQ ID NO: 160872 - protein, 107 aa, Unknown
  Bacterial polypetide isolated from the Sargasso Sea
INNVVDITNYVMHEIGQPLHAYDLDKIKSGKIEIKTLNNEKSFITLDGVEIKVGKDDLMVCDGDVPMCIAGVYGGQDHSVNNETKTIFLESAFFNPVSVRKTSKKHN

SEQ ID NO: 160873 - protein, 267 aa, Unknown
  Bacterial polypetide isolated from the Sargasso Sea
MKFTLSWLKEHLETKAKIDVITDTLTNIGLEVENIEDKENDYKDFTIAKVISADKHPNADRLKVCKVETSKGNVQVVCGAPNAKSGMFGVFAPSDTYIPGTNINLKKSEIRGVESNGMLLSERELGISDEHDGIVELEGKHKIGDSIASIYGFDDPVIEINLTPNRSDCLSVRGIARDLVAAGLGTLKELKIKKIKGSFKSNIKWVRKFKKDEEYLCPGVAGRLFKNVKNSQSPEWLKRRLTLIGLRPISALVDITNYVTFDLGRPL

SEQ ID NO: 160874 - protein, 287 aa, Unknown
  Bacterial polypetide isolated from the Sargasso Sea
PKFIIERLNKSDIASINIIVDISNYVMLEIGQPTHAFDLDKINGKLSIEKLQKKNNFIGIDNKEYIVAKGTEVIVDEKNIIHALPGVIGSNISKVDIETKNILFEGAFFLPDVVRALSRKYRIQTDSSYRFERGVDYNLADFALSRVHYLLSQVTDLDKCKIIKISHKHKLTKMKSFDFDAKLFKRILGIDIGIKKIKSILIDLGISFKAKKVIIPSYRFDITNNYDLVEEVSRIYGFDNIPEVPLDAHYSKPCNKLNINEKLVTLGYKEVINFTFISRNYMKNTRE

SEQ ID NO: 160875 - protein, 198 aa, Unknown
  Bacterial polypetide isolated from the Sargasso Sea
MVDFTKLEQEITNSLSKVTDLESLNECRIKYLGKKGEISLLMKELANLSGEDRKKQAEILNTLKNKTLSLIEDKTEELNDRNLNEKLSSEKLDVTLPVSSSLGSIHPITQVIEEVVTIFGDLDFYVAEGPEVETDYNNFTALNTSEHHPARQMHDTFYVETQTDNMQNVLRTHTSPVQIRSMLEHKPPIRLIAPGKTF

SEQ ID NO: 160876 - protein, 115 aa, Unknown
  Bacterial polypetide isolated from the Sargasso Sea
RFRPSYFPFTEPSAEVDIGCKKDADGSLSIGSGEDWLEILGSGMVHPRVLEGVGIDPSIYQGFAFGMGLERLTMLKYGIPDLRPFYDSDLRWLKHYGFIPVDNPSLHSGLNGVFL

SEQ ID NO: 160877 - protein, 89 aa, Unknown
  Bacterial polypetide isolated from the Sargasso Sea
MSKHAHLKPPKINQDKGARHPITTTKNFILDFLEELGFQVIEGPEVETEKYNFDLLNIKKHHPARQMHDTFYLNNKTSLLRTHTSPVQI

SEQ ID NO: 160878 - protein, 288 aa, Unknown
  Bacterial polypetide isolated from the Sargasso Sea
GEEILDISLTPNRADCFSYKGIIQEISALDNAKIKYEDLLNPEIHHKEFMNVEVQSKEDCPVFMTRVIKSINKDANTPKWLKKRLEQSGYKSINAIVDIANFVMLETGQPLHTYDLKKINEKIIVRRANDKEAIDILDGSRKLLDSDFLVIADSKKALGIAGIMGSLDSGISDDTENIVLESAYFNYETIMGRARSLSLHSEASMRFERGVDPMIQEYAIQRFTSLINEIAGGSNGPIHSSISKKALPKNKFITLRKDKIKQILGITIPNQTIKSILNRLDMEIKEKG

SEQ ID NO: 160879 - protein, 231 aa, Unknown
  Bacterial polypetide isolated from the Sargasso Sea
MFGVFAPSDTFIPGTNTNLKKSEIRGVESNGMLLSERELGISDEHEGIIELTGKHKIGDSIASIYGFDDPVIEINLTPNRSDCLSIRGIARDLAAAGLGTLKDLKIKKIKGTFKSNIKWVRKFKKDEEYLCPGVAGRLFKNVKNNQSPEWLKRRLTLIGLRPISTLVDITNYVTFDLGRPLHVYDASKLNGNLVMRKSQNKEKCKTLDDKEYTLSDEMVVISDDKSLHGIG

SEQ ID NO: 160880 - protein, 45 aa, Unknown
  Bacterial polypetide isolated from the Sargasso Sea
GLGVERFAMLKYGITDLRMFYENDHRWLKHYSFRPTGFPNTLKGS

SEQ ID NO: 160881 - protein, 260 aa, Unknown
  Bacterial polypetide isolated from the Sargasso Sea
PEEAPVGVLLNEYLGDVILHFDIKGGFSHLLSVLGIGREIAALTEENLDRSVIPDVSKIKVVEKPPFVDLEINDPDICSRYSALLIRNVKITSSPFWMQQRLLRLGMRPINNIVDITNYVMMELGQPLHAFDYDMLIKRANGGKPKIIVRRAKEGEHLITLDKIERKLDSDMLMITDQVGPIGIAGIMGGGDSEVSSKTTNILLEAANFEFLNNRRTAQILKLRTEASERFGKQVDPEGTLRAALRAAQLMVEYGSGILE

SEQ ID NO: 160882 - protein, 84 aa, Unknown
  Bacterial polypetide isolated from the Sargasso Sea
DIYWGLNSEADHRITKGTGWLEILGCGMVDPNVLENCKIDPKKFSGYAFGMGIERITMLLYQIEDIRTFYENDVRFLQQFKSSI

SEQ ID NO: 160883 - protein, 174 aa, Unknown
  Bacterial polypetide isolated from the Sargasso Sea
MSDIIKIKEEYLNKLKKNLDLNSVNQLKSELFGKNGKISNEFKKMGSISAENRKKFASDLNSIKDELQSLIEKKIKDIEINEINLKLQNEKVDVTLPERNFIRGKIHPVSQVIDEISSIFSEIGFSIQEGPDVENEYNNFTALNTPDNHPARDMHDTFYLDNDKEFLLRTHTSP

SEQ ID NO: 160884 - protein, 303 aa, Unknown
  Bacterial polypetide isolated from the Sargasso Sea
EKLFQLGHEHEIDGDIFDMEFTPNRGDCLSLIGLARDLNIFFGKSENIDIFEDNIESLEINFENNSPNDCPKISFLEFEVKETEYKYKPYLERYFKLVGNNRTNLFSDISNYISYELGQPTHCYDAELINGKLVFENKESNSSFKTLLGSEIKLDDHNCVFSINNEIVNLAGVMGGMSTACSPHSKRVLVECAYFNPESVIGKSVKYNLISDAAYKFERGVDIELQEYVLRRFLKVASEHANIKKAKIKTFISRNLEEKFIEIDYKNINKILGTQLEKDEYLSYLKKLSFDVKDKIKVLHSGA

SEQ ID NO: 160885 - protein, 229 aa, Unknown
  Bacterial polypetide isolated from the Sargasso Sea
MKFSFSWLKDYLETELTADEVGDVLTDTGLEVESIIDPKMRLGQLSVGEILKVEKHPNADKLKVCQVKSSTGILNIVCGAPNVKNGMKVVVARPGDFIPGLNVHLKASKIRDVKSEGMMCSERELEISDEHDGIIELPSETEVGTLFSELVGDEKTVFEIAITPNRPDALGVYGIARDLSASGVGKLRISDTPNVEGDFKSKLTIDLDAKVSSKECPLFVGRIFSRCRK

SEQ ID NO: 160886 - protein, 52 aa, Unknown
  Bacterial polypetide isolated from the Sargasso Sea
QGFAFGMGIDRLAMLKYGMPDLRSFFDNDMRWLRHYGFAAERSSNLYDKLSG

SEQ ID NO: 160887 - protein, 225 aa, Unknown
  Bacterial polypetide isolated from the Sargasso Sea
MKFTRNWLFDHLETDRSLAEILDVLPMLGLEVESTVDRAATLAPFIIAEVISAEQHPNADKLRVCMVNIGRGDPIQVVCGAPNARSGMKGVFAPVGAYVPGIDLMLKVGEIRGELSNGMLCSEREMEISDNHDGIIDLDDDAPIGIPFATYAGLDDPMIEIAITPNRADCLGVRGVARDLAAAGYGRLKDIDTSPLEGSFDSPISWQLDLTPADEHLCPMVSGRA

SEQ ID NO: 160888 - protein, 301 aa, Unknown
  Bacterial polypetide isolated from the Sargasso Sea
GISISNVTVKESPVWLKNRLKSIAVTPKNNIVDVTNYILHEIGQPLHAFDSKKINKGIIVKKIKKQKKFKTLDGIERELDQNDLMICDHKKPLCIAGVIGGEESAVGNKTKDIFLESACFNSISVRKSAKKFGLNTDASFRFERGVDPEIGIYAIKRAAILIQELAGGDLGQITSFENEKDKKEVILKFNYINKLVGQKIEKKQIIQILTSLDMTIDKIGQDAIKVNIPRYRVDVNRPADLIEEILRIYGYDNIEIPKKFNSNSYDYESNKIHNFNDNISQVLVNQGFYETISNSISSPKN

SEQ ID NO: 160889 - protein, 265 aa, Unknown
  Bacterial polypetide isolated from the Sargasso Sea
MTLSGIESEIEESKGEEILDISLTPNRADCFSYKGIVQEVSALDNAKIISVKQAIPEIHHNLTMEVDVQSKEDCPVFMTRIIKSINRKAKSPKWLKEKLDQSGYKSINAIVDIANYVMLETGQPLHTYDLKKIKKTILVRRAKKKEAIDILDGSRKILDPNYLVIADLEKPLGIAGIMGSLESGISEDTEDIVLESAYFNFETIMGRARALSLHSEASMRFERGVDPAIQENAIQRFTNLINEIAGGENGQIHLSINKKEMPKNK

SEQ ID NO: 160890 - protein, 247 aa, Unknown
  Bacterial polypetide isolated from the Sargasso Sea
KDLLTIYAPPGAVIPKNSMKITISKIRGVTSYGMLCSGSELKLSDDSDGIIDLSSKNYKNLIGKKYFKSFNQKVIDISITPNRPDCLGVRGIARDLAASGIGKLKKLNSKKIKLIGNQNIPVKILNEKNQGCMIFGSCLISGVKNNKSPKWLKDKIIALGQKPISAIVDITNYVMLDLNRPLHAYDAEKIDTEIIVRNSKKGETFQALDNKEYTLDDGMCVISDKSGVLGLGGIIGGARSGTEISTK

SEQ ID NO: 160891 - protein, 278 aa, Unknown
  Bacterial polypetide isolated from the Sargasso Sea
EKKHPNADKLKLCKVDIGKEKVDVVCGAPNVEKGMKVVYAPVGSTIPVNQIKIKAAKIRGIESYGMMCSEYELGISNEHDGIIRLEEKETIGRSFSEIYGLNDIVIEIGITPNRQDCLGVKGIARDLASAGMGELLERKISREKGSFKSPVKIEIQDNKICSAFAGRYFRNVKNTESPEWLKNKLKSIGLRPISALVDITNFVMYDENRPLHVYDADKINGKIIVRAANDGESFLALDEKDYHLKNGMCVIADEKKVLGLGGIMGGESTGCSTETKNV

SEQ ID NO: 160892 - protein, 247 aa, Unknown
  Bacterial polypetide isolated from the Sargasso Sea
MKFTIDWLKEHLVTKFTDQKIIDKLTNVGLEVESFENQKSDLDEFLVAKIITAEKHPNADRLSLCDVDIGQDKTVKVVCGAPNAKSNLFTVYAPPGAVIPKNQTKLSVSKIRGVTSYGMLCSESELKLSDESEGIIDLPSKQYSKKVGKKFFVNRSPKVIDISITPNRADCLGVKGVARDLAAAGAGKLKIKKISKINFSGSQNIKVQISKDKNQGCAAFGSCLIKGIKNKESPKWLKDKIISLGQK

SEQ ID NO: 160893 - protein, 58 aa, Unknown
  Bacterial polypetide isolated from the Sargasso Sea
VNPSMYQGYAFGIGIDRLAMLKYGINDLRAFFETDYRWLNHFGFDPLDVPSNYRGLSR

SEQ ID NO: 160894 - protein, 102 aa, Unknown
  Bacterial polypetide isolated from the Sargasso Sea
DLIYKICYSLFGEEAKLRFRPSYFPFTEPSAEVDVLFGDKWLEILGCGVVNPKVLENCKIDSKKYSGLAFGLGIERIAMLKYEVNDIRDFYKSNLDFLRQFK

SEQ ID NO: 160895 - protein, 178 aa, Unknown
  Bacterial polypetide isolated from the Sargasso Sea
MSEIKNIRDQFISRLENDLSIDQINEIKTELFGKNGLISSKFKTIGSIPETDRKKFASDLNQAKDELQNLITSKINEIERRKINEKLEKEKVDITLPERSFVRGKVHPVSQTIDEISSIFSEIGFSVEEGPDVENEYNNFTALNTPNNHPARDMHDTFYLDENKEVLLRTHTSPVQIR

SEQ ID NO: 160896 - protein, 251 aa, Unknown
  Bacterial polypetide isolated from the Sargasso Sea
QLVDKLTAIGLEVEEYEDYAASYSDFRVAKVVDAVKHENSDKLSICKVENCKGEVLQIVCGAKNVRAGIKIALAPIGSIIPANKMVIKKAKVAGVESHGMICSASELMVGDDGDGIIEIDDKYEVGTLISEIYGLNDAIIDVNITPNRGDCLGVYGIARDLAAAGFGELITPEVNVVESQFALDFNAKITADKGCEMALFRKIKNVKNCQSPDWLRNKLEKVGINSISAIVDITNYVMMFLNRPMHAYDAD

SEQ ID NO: 160897 - protein, 185 aa, Unknown
  Bacterial polypetide isolated from the Sargasso Sea
MISAIDKGADVNQADNRGVTPLLMAVYNGHIEPVEALIDKGADVNQADKIGITPLWMAAQDGYIELVKALIDKAADVNKADNRGITPLWMAAQNGHIELVKALIDKGADVNQADNIGITPLWKAAQHGHIELVKALIDKSADVNIADEYGQTALHLAAIKGQTELVKALIDKSADVNIADEYGQT

SEQ ID NO: 160898 - protein, 305 aa, Unknown
  Bacterial polypetide isolated from the Sargasso Sea
INEVSDKLFQLGHEHQIENDIFDLEITPNRGDCLSLNGILNDLNIFYNVNKNDNVYDGVIEEFKFDFENLSPEFCQKISFLKLEITKEVSEYKGKLNDYFNDFQLTKNNFFTDVSNYLMFEMGQPTHCYDGDKIKGRIVLKRINHELNFETLLGKTLKLTENNNVFFIDKDPINLAGIMGGMNTSCSRDTTSILLECAYFSPDEIMGKSLKYDINSDAAHRFERGVDPQSHDKVIRRFIQIVKEHADIESIMLFSDEYNECKPINIPLDHNKINKIIGTNISKSEYINFLDRLGFRINNNFITVP

SEQ ID NO: 160899 - protein, 281 aa, Unknown
  Bacterial polypetide isolated from the Sargasso Sea
ICSLEELGIEDSSEGIAIIDEKIATKHELGSSAAQLLNLNDFIYDLAITANRPDGMSVVGIAREISALLETKFSFPEIKNNYKIDLIKDFLLCPEAITNSCLYSISLIESVNGMKLSPQWLKDRLDKSGIKSINLLVDITNYILLEQGQPLHAFDKDKLKNLIGREVLPKDFSVRKANSNESLLCLNGENYSLNEKITVIACDNKPVAIAGVIGGLETAVNEETSSIYLEAAVFNPVTIRKSSKEIGIRTESSSRFEKGISHKNTLDSVKRAINIIEEYFN

SEQ ID NO: 160900 - protein, 287 aa, Unknown
  Bacterial polypetide isolated from the Sargasso Sea
DITPNRGDALSLRGLEREFYAYQSKKPSRKIETSSLKLIQDKKIINHIDVSACGNYHLMLVKGLQKIKNLDSKKRGFIESAGIPLINPLVDLGNYVMLELGAPMHVFDLAKLVLPINVCFPKDKNNSLTVIGGDEKDVQSSSLTIQDQSGIQAIAGIIGSELSSVSSNTNKIAVEAAFFRPEAIVNQARNYGLATDASHRFERGVDPELQQLALERYLFLLDQIAEYDSTELYHSCSHKTKRKNVKLDIARFNQFSGLSLKASKAILILKNLGFKVHARSQKNVTFN

SEQ ID NO: 160901 - protein, 300 aa, Unknown
  Bacterial polypetide isolated from the Sargasso Sea
SEDFKKFTVAKVLKATKHPDADKLRVCQVKTINGNFQVVCGAPNAREGMLGIFAPENSYIPGTEVHLKKTKIRGVESCGMLVSEREMGISDEHEGIIEIKSSYKIGDQFSKIFKIDEPIIEINLTPNRSDCLSVRGIARDLAAAGVGKLKDLKFKKINESFKSPMKWTKQFTDNSLCPGVSGRYFKNIKNVESPQWLQKRLKAIGLRPISALVDITNYVTFDLGRPLHVYDADKVTGNLTMRLANNNEQCLALNEVNYKCSDDMIVISDDDKKLHGIGGVMGGLNSGCSMNTKNVFLEVA

SEQ ID NO: 160902 - protein, 144 aa, Unknown
  Bacterial polypetide isolated from the Sargasso Sea
MGDNLSDLSNSAIQEINECSSSNDLESIRVKYLGKKGTVTAALKSLSEIDPRDRPAHGKRINEIKTLIQEKLSERKASIQKQEINQNIENKMIDVTLPGRVNFQGHRHPVTKTLLEIEEIFYGAGFVVEDGPEIEDEYHNFTAL

SEQ ID NO: 160903 - protein, 165 aa, Unknown
  Bacterial polypetide isolated from the Sargasso Sea
MDDIESLLAEALQAITDSKDEESLDELRVNYLGKKGTFTTLLKSLGQLPSQDRPAAGESINIAKRELQEALDLRKTCLLEESLEEKLRSERIDVSLPGRRKNRGGLHPITTTIDRITDIFATAGYEIAIGPEIEDDYHNFEALNIPAHHPARAMHDTFYVNEDHC

SEQ ID NO: 160904 - protein, 290 aa, Unknown
  Bacterial polypetide isolated from the Sargasso Sea
VESVNQHPNADRLSICEVNNGKDILQVVCGAEVIHVGGHYPFAGVGVTLPDGLKLKRVKIRGEYSNGMLCSEKELGLGPDQQGIMHLKGKVHLGQILTEALAIDDVCLDVEVTPNRGDLLSHLGVARELAPGGDREIVLPEIPGAPVFDFEVKTEQSEVSHAEVSIRIDEPELCQRFLGVIVRGLKVGPSPEWLVSRLHSVGQKSINNVVDATNYVMLEMGNPMHAYDLKKLEGSQLIVRRAKDGETIQALDGLDYELNNMGGTMLLISDVSASQNIAGIVGGMQSAVTE

SEQ ID NO: 160905 - protein, 77 aa, Unknown
  Bacterial polypetide isolated from the Sargasso Sea
WLEILGCGMVHPNVLRNVKVDPSKYQGYAFGIGIDRLAMLKYGINDLRAFFDCDYRWLNHFGFDPLDVPSNYRGLSR

SEQ ID NO: 160906 - protein, 229 aa, Unknown
  Bacterial polypetide isolated from the Sargasso Sea
MQLGHENEVDGNIVDLEITPNRGDCLSLYGISRELKNFYDINTNLEIFESHIEKLEFDFINQVEDKCERIAFLELEVENLPTKYKPYLESYFTDLDVKRNNFFTDISNYISYELGQPTHCYDADKLGTKLILEELKDQSSFTTLSNKEITLSPKDLVFSNGTEILNLAGIMGGISSSCSTNTKKVLIECAYFHPPFIIGKSIKYDLNSDAAYKFERGVDPLLLETSLRR

SEQ ID NO: 160907 - protein, 294 aa, Unknown
  Bacterial polypetide isolated from the Sargasso Sea
LGEDASNILGIDDPVIEIEITPNRGDCLGVRGVARDLSAYGLGNLKKISLCEEKGDFETLVKWNLNLPGNKSDLCNKIYGRTFTNLKNFSSPIWMKNRLQSIGLRPISPLVDITNYIMIDIGRPLHAYDIKKISGNTLTVRLAKTGEKFEALNGKVYDLNNEMLVISDEHGPDDLAGIMGGKRTGVDENTTEMFLESAIFLPNSVSNTGRKLNINSDARYRFERGLDFNSPEFGIKYASNFIQQICGGKMSFITFETTDIKLREIDFSTDVVKRLIGIEIEENRILQILNDLGF

SEQ ID NO: 160908 - protein, 242 aa, Unknown
  Bacterial polypetide isolated from the Sargasso Sea
TLPWLKEHLKTKANEKEIINTLTNIGLEVERTKESKSELNDFKIAKIIKVEKHPNADKLKICDVNIGGTEKIKVVCGAPNARDGLITIYAPPGATIPKTKLQLKVAKIRGVESKGMLCSESELKLSEESEGIIELNNREKEVGKSYFKSKSEKIIDISITPNRADCLGVRGIARDLSSSGIGKLIPIKKKKLKKNSKHLTKISISKDPNQGCITFGSCYIKDIKNKESPEWLKNKIIALGLK

SEQ ID NO: 160909 - protein, 112 aa, Unknown
  Bacterial polypetide isolated from the Sargasso Sea
MILYFTNSMFGKSKLRFRPSFFPFTEPSAEVDIYWGLETETDYRITKGTGWLEIMGCGMVDPQVLENCNIDSEKYTGYAFGLGIERIAMLIYQIPDIRLFFENDVRFLNQFK

SEQ ID NO: 160910 - protein, 283 aa, Unknown
  Bacterial polypetide isolated from the Sargasso Sea
IIPKNGMKLEVSKIIGETSYGMLCSESELKLSKESEGIIELGQKFNRSIGEPYFKNKNNNNVIELSVTPNRPDCLGIRGIARDLFASGYGDLKEIKNVKFKKTLKHNLKVKIEKNKSQACSIFGSCLIKNITNKESPSWLKERILALGLRPISAVVDVTNYVMFDLNRPLHAYDLDKIKNSIIVRNSKKGEILKALDNKTYTLKENMCVIADDEGPLGLGGIIGGVRSGTEINTKNILIESAYFDPGITRKTAKALQVNSDAKYRFERGIDPQSVKEGLVMAA

SEQ ID NO: 160911 - protein, 303 aa, Unknown
  Bacterial polypetide isolated from the Sargasso Sea
DGTFQVVCGAPNAREGMKGIFAPENSFIPGTGVKLKKSKIRGVESCGMLVSEREMGISDEHDGIIEVDSKHPLGEKFIEVFNLDDPVIEINITPNRGDCLSIRGVARDLAAAGLGKLRENTLIKNIEGTFDSPVKWEKDFSGDMEHICPGVAGRYFKNLTNKESPVWLQQRLKAIGLRPISALVDITNYITYDLGRPLHVYDADKINGNLKMRFAKENEDCLTLDEEKRECTKNMIVISDDNQLHGIGGVMGGLDSGCSFDTKNVFLEVALFDPISVTKTGRHLKLQSDARYRFERGIDPTSL

SEQ ID NO: 160912 - protein, 100 aa, Unknown
  Bacterial polypetide isolated from the Sargasso Sea
PSAEVDIGYEIKDEKIIIGEGDKWLEILGCGMVHPNVLKNVKVDPTKFQGYAFGIGIDRLAMLKYGINDLRAFFDCDYRWLNHFGFDPLDVPTNYRGLSR

SEQ ID NO: 160913 - protein, 307 aa, Unknown
  Bacterial polypetide isolated from the Sargasso Sea
GEEILDISLTPNRADCFSYKGVIQEISALDNAKIKYEDLLDPEIHHKECMKVEVQSKEDCPVFMTRVIKSINRDTKTPKWLKKRLEQSGYKSINAIVDIANFVMLETGQPLHTYDLKKINEKIIVRRAHDKEPIDILDGSRKLLDSNFLVIADSKNALGIAGIMGSLDSGISDDTENIVLESAYFNYETIMGRARSLSLHSEASMRFERGVDPKIQEYAIQRFTSLINEIAGGLNGPIHASISKKALPKNKFITLRKDKIKQILGITIPNQTIKNILNRLDMEIKEKDFGYIGWSVKAPSYRFDINE

SEQ ID NO: 160914 - protein, 80 aa, Unknown
  Bacterial polypetide isolated from the Sargasso Sea
GDKWLEILGCGMVHPNVLKNVKVDPSKFQGYAFGIGIDRLAMLKYGINDLRSFFDCDYRWLNHFGFDPLDVPTNYRGLSR

SEQ ID NO: 160915 - protein, 122 aa, Unknown
  Bacterial polypetide isolated from the Sargasso Sea
GLDGSIFVFELSLDVLQNGMLPRAQALSKFPEVSRDLAIVVSSEVPAAEILANVRQNAGDYLSNFRIFDVYQGDGVEKGKKSIALGLTWQHPSRTLSDDEINKIISSCVKGLHEQFNANLRD

SEQ ID NO: 160916 - protein, 47 aa, Unknown
  Bacterial polypetide isolated from the Sargasso Sea
GIGIDRLAMLKYGINDLRSFFECDYRWLNHYGFDPIDVPTNYRGLSR

SEQ ID NO: 160917 - protein, 286 aa, Unknown
  Bacterial polypetide isolated from the Sargasso Sea
TNIGLEVESVKKNSGELSEFKIAKIIKAVKHPNADKLKVCDVNIGGKETLKVVCGAPNARDGLVTIYAPPGAIIPKTKFQLKIAKIRGVESWGMLCSESELNLSDERDGIIELNVKEKEIGKSYFKSKSEKVIDIAITPNRPDCLGIRGIARDLSSTGIGKLITLKRKKIKQSAKHHVKTSITKDKHQGCQTFGSCYIKNIVNKESPEWLKNKIHALGLKPISAVVDITNYVMFDLNRPLHAYDADKIDREIIVRDSKEGEEFEALDNKKYKLKKGMCVITDKSSV

SEQ ID NO: 160918 - protein, 103 aa, Unknown
  Bacterial polypetide isolated from the Sargasso Sea
FTEPSAEVDIGYKIQDGKISIGEGDKWLEILGCGMVHPNVLKNVKVNPQQYQGYAFGVGIDRLAMLKYGINDLRAFFESDIRWLEFYGFDPLDVPTNYRGLSR

SEQ ID NO: 160919 - protein, 251 aa, Unknown
  Bacterial polypetide isolated from the Sargasso Sea
MKVAYKHLISCIPSKPNIDEISERFFQLGHEHEIEDEIFNMELTPNRGDCLSVHGLVRDLAPFYEIDLTSDIYEKELKELELGFVNHAPEACSHISFLKIEIEGEIAAYRGKLKEYFKDLSINKNNFFTDISNYISYEMGQPTHCYDAKKISNLFSLEIIEEDKKFHTLLEKEVVIKGRNLVFLEDGNVINLAGVMGGKSTSCSTNTKSVIIECAHFNPEEIIGKSVKYDIKSDAAHKLKEVSIHFVMKRF

SEQ ID NO: 160920 - protein, 32 aa, Unknown
  Bacterial polypetide isolated from the Sargasso Sea
GLGVERIAMLKYGVNDIRDFYKSNLDFLNQFK

SEQ ID NO: 160921 - protein, 188 aa, Unknown
  Bacterial polypetide isolated from the Sargasso Sea
MQDYDKLKNEVLIKIKEANSLDDLESLRVQVLGKKGSITSLMKQLGSLEPDKRREAGQILNSLQKNIIVSIDNKKSSLEETYLNQKLKNEALDITLPTRPENIGRIHPLSKTMDEVVSIFAQMGFTVAEGPDIESDFYNFTALNIPQEHPARQEHDTFYFNEDENGERKVLRTHTSPVQIRTMEKLKP

SEQ ID NO: 160922 - protein, 117 aa, Unknown
  Bacterial polypetide isolated from the Sargasso Sea
MRVSLQWLRELVPFRSDVDSLAEQLSMAGFEVEEQDDLAARAAGVVVGKVLSKTPHPDANKLNVCSVSVGAGAEPLQIVCGAANVREGMAVAVATVGSHLPAVDLTIKPAKLRGVES

SEQ ID NO: 160923 - protein, 258 aa, Unknown
  Bacterial polypetide isolated from the Sargasso Sea
MKFTLDWLKDHLDTSENLNTITDTLTNIGLEIESVEDKSEIFKNFTVAKVLKAEKHPDADKLKVCQVETINGNYQVVCGAPNAREGMLGIFAPENSFIPGTDLHLKKTKIRGVESCGMLVSEREMGISDEHDGIIEVKDNYKIGDLFSKIFVIDEPIIEINLTPNRSDCLSVRGIARDLAAAGIGKLKDLNYKKSKESFKSPIMWKKEFQNNNLCPGVAGRYFKNVKNVESPKWLQGRLTAIGLRPISALVDITNYIA

SEQ ID NO: 160924 - protein, 291 aa, Unknown
  Bacterial polypetide isolated from the Sargasso Sea
VNIADSSLCHRFCGLIIKDVKIKPSTKKIINKLNSIGLKSINNIVDITNLVMHEVGQPLHAYDLDKIKSGKVEIKRLKSGVKFKTLDGDDIDLHKDDLMICDGNTPMCIAGVYGGKNHSVSENTTTIFLESAFFNPITVRKTSKRHNINTDSSYRFERGVDIELLEHSLKRAASLIVEDCNAEIICDIIDEYPNKSDEKNVVINFKKINSLIGHEIDKLKIKSILNSLDFKINNVNDISAGVTIPQYRHDVNRECDVVEEILRIHGYNNIPIDKNVKFSISSLLNKTHKYQ

SEQ ID NO: 160925 - protein, 103 aa, Unknown
  Bacterial polypetide isolated from the Sargasso Sea
MGDNLSDLSNSAIQEINECSTSNDLESIRVKYLGKKGTVTAALKSLSKIDPKDRPAHGKRINEIKKLIQEKLSERKASIQKQEINQNIENKIIDVTLPGRGNF

SEQ ID NO: 160926 - protein, 56 aa, Unknown
  Bacterial polypetide isolated from the Sargasso Sea
GAGMVHPHVLRRAGYDPERYSGFAAGMGVERVAMLKHGIDDIRHFYANDMRFLSQF

SEQ ID NO: 160927 - protein, 152 aa, Unknown
  Bacterial polypetide isolated from the Sargasso Sea
HQIEALVIDKGITLGHLKWTLETFLKAFFEREDIVLRLRPSYFPFTEPSVEVDVGYTLTNGQRVIGGDGDAPDGGWLEVLGSGMVNRRVIESCGLNPDEWQGFAFGTGVDRLAMLKYGMNDLRAFFDGDLRWLKHYGFSALDVPTLSGGVGA

SEQ ID NO: 160928 - protein, 152 aa, Unknown
  Bacterial polypetide isolated from the Sargasso Sea
MTDLRELILKISQAKDKLELQNFKTQFLGKNSQINQEFKKLGSLSEDERKIKASSLNKEKQKITEAINNRFKDLEKSEISQKLQKNKVDVTLPGREQPNGKIHPVSQVIDEISSIFSEIGFSVAEGPDVETEYNNFTALNTPESHPARDMHD

SEQ ID NO: 160929 - protein, 296 aa, Unknown
  Bacterial polypetide isolated from the Sargasso Sea
ITPNRADCLGVRGVARDLAAAGAGKLKEYNHNKIKFKGNQKIKVKITKEKNQGCTKFGSCLIKGIKNVESPKWLRDKILALGQKPISAIVDITNYVMFDLNRPLHAYDADKINEGIIVRNSKKGESFEALDKKKYTLQDNMCVISDTSGVLGLGGIIGGTRSGTELDTKNVLLESAYFNPTSIRKTSKILNIDTDAKFRFERGIDPDSIEEGIFKAATLIQKICGGEISKLDVQSNKSFKKITIKFPINLFQSITGFKVSEKEIIKILTDLGFNIKKKNNNLNLIPPSGGQMYCNQ

SEQ ID NO: 160930 - protein, 222 aa, Unknown
  Bacterial polypetide isolated from the Sargasso Sea
DNLLTIYAPPGSVIPKNKMKLEVAKIRGETSYGMLCSESELKLSNESKGIIELSQNYKKKIGQKYFQSNSKNVIELSITPNRPDCLGIRGIARDLSASGFGKLKENKTGKIKKSGKQNIKVKIEKGKNQACTIFGSCLIRNISNKESPEWLKRRIMSLGLRPISAVVDITNYVMFDLNRPLHAYDVDKINKGIIVRNSKKGENFKALDNKHYTLNAWYVCYF

SEQ ID NO: 160931 - protein, 211 aa, Unknown
  Bacterial polypetide isolated from the Sargasso Sea
MSDIKDIENNILDDISKANSSDDLQEIKIRELGKKGRISLLMKSLSKVSNDEKKVLGKSYNELRITILKAFELKEKDIKDEDIINRIKTEKLDVTLPTRPGENNDEGKNHPISRTIDNIIDIFSNFNFTVETGPDIENDFNNFTALNIPDDHPARQDHDTFYVKNKNIEDRKLLRTHTSPVQIRTMINKVPPIRIIAPGRTFRCDDDATHS

SEQ ID NO: 160932 - protein, 214 aa, Unknown
  Bacterial polypetide isolated from the Sargasso Sea
MIITIPWLKEHLKTKANESEIIDKLTNIGLEVEGIKENSGVLSDFKIAKIIKVEKHPNADKLKICQVSVGGKENLRVVCGAANAREGLVTIYAPPGAIIPKTKFQLKIAKIRGVESSGMLCSESELNLSNESNGIIELGNKEKEIGKSYFKSRSEKAIDIAITPNRADCLGIRGIARDLSSTGIGKLIPIKMRKFKQSAKHLIKTSITKDLNQG

SEQ ID NO: 160933 - protein, 271 aa, Unknown
  Bacterial polypetide isolated from the Sargasso Sea
VSLGDDRITKVVCGASNARDGLITIYAPPGAIIPKTKFQLKIAKIRGVESKGMLCSENELNLSDESAGIIELKHKEKEIGKSYFKTKSEKALDISITPNRADCLGVRGIARDLASSGLGSLLKLKKKSFKQTLKQPIKVSILKEKNQGCLSFGSCYIKNITNKESPLWLKNKILALGLKPISAVVDITNYVMFDLNRPLHAYDAKKIDKEIIVRNSKEGEEFEGLDNETYKLKKGMCVIADKSSILGLGGVIGGTKTSTEFDTKNILLESA

SEQ ID NO: 160934 - protein, 267 aa, Unknown
  Bacterial polypetide isolated from the Sargasso Sea
MKFTFSWLQKYLKTNQSLDSICERLTMLGIEVSEVIDNQNFFKQFKIVEVKEVQDHPNADRLKLCKINDGQSNLNIVCGAPNVKKGMKAVLAPVGTKMLEDDFIIQKSKIRDIESEGMLCSEKEIGLGENSDGIINLEENAKVGKLLSSLYPSEKIIDVEITPNRSDCLGVYGIARDLSASGYGTLIEKKIPKIKNNFKSKINVKITNDAKSICPVFYGRYIKNVKNCESPDWLKKQLKAIGLKPISALVDITNYLTIDFNRPLHVF

SEQ ID NO: 160935 - protein, 156 aa, Unknown
  Bacterial polypetide isolated from the Sargasso Sea
MRVSLSWLKQLVQVDESVEELSQRLSMAGFEDEEIEDLNARAKGVVVGFVKEREKHPNADKLSVCRVDIGAEETLQIVCGAANVRAGIHVPVATVGAVLPAVDLTIKAGELRGVTSAGMICSLSELGLATDSEGIAVLDDLSKDLPALGSPSGSRC

SEQ ID NO: 160936 - protein, 282 aa, Unknown
  Bacterial polypetide isolated from the Sargasso Sea
DFTYDDFKIETKINVKDPTLSPLYAGIIIKDIEVKESQTWIKNKLKSIGYEPINNIVDITNYVLHEIGQPLHAFDLDKITNIEVKNLPSKTKFKALDGNEISLNEEDIMICSEDDPLCLGGIFGGLDSGVTSNTKNIFLESAIFNPTSIRRSSKRHSIYTEASYRFERGIDPEMVLYALKRASILIKNDCPESISSNIIQENNLKLDEKKIFLRYNQINTISGKEIDKDVIVSILNSLDVTVEAATDDGLNVISPHYRADVNREIDLIEEILRVYGYDNIES

SEQ ID NO: 160937 - protein, 108 aa, Unknown
  Bacterial polypetide isolated from the Sargasso Sea
PSHFPFTEPSAEVDIGYEIKDGKIVIGEGNKWLEILGCGMVHPNVLKNVKVNPDKYQGYAFGIGIDRLGMLKYGISDLRAFFETDYRWLNHFGFDPLDVPSNYRGLSR

SEQ ID NO: 160938 - protein, 268 aa, Unknown
  Bacterial polypetide isolated from the Sargasso Sea
HENDFVNGIFDIEVTPNRGDCLSLLGIARDLNVFYTLKNNTQIMNEPIESFDLNFVNNAANDCPSISFLNIEIEGEIKEYKPYLSNYFKDMGINKNNFFTDVSNYLAYEVGQPTHCYDFSKLDEPIEFNKIEKDFEFKTLLGKKINLTGKNCVFISNGQVINLAGVMGGIATACDKNTKNVLVECAYFRPEAIIGKTVKYDINSDAAYKFERGVDPDMQEFSLRRFIQIVDDHSQIKRLGLYRNKFADIPSKKINFNVENINNILGIN

SEQ ID NO: 160939 - protein, 307 aa, Unknown
  Bacterial polypetide isolated from the Sargasso Sea
KNQKIGGVESCGMLVSEREMGISDEHDGIIEIDKKYKIGDSFAEIYGLNDPVIEINITPNRSDCLSVRGIARDLQAAEIGKLKNIEISEVKGSFASPIKWLREFDDKNEKLCPGVSGRLFKNVNNVESPEWLKKRLTAVGLRPISALVDITNYVTFDLGRPLHVYDADKITGNLKMRLAKKGEKCKTLDEKEYTLESDMVVIADEKKLHGIGGVMGGLDSGCSMETKNVFLEVALFDPISITKTGRKLNLQSDARYRFERGVDPTSIDWGVNKATQMILNLCGGEVSEITKDQIPTQPKKILAFDYQ

SEQ ID NO: 160940 - protein, 259 aa, Unknown
  Bacterial polypetide isolated from the Sargasso Sea
KSYFKTNSEKVLDIAITPNRADCLGVRGIARDLASSGLGSLLKLKKKSFKQTLKQSIKVSISKEKNQGCLSFGSCYIKNITNKESPEWLKNKILSLGLKPISAVVDITNYVMFDLNRPLHAYDANKIDKEIIVRNSVEGEEFEGLDNEKYKLKKGMCVITDKSSILGLGGVIGGTKTSTEFDTKNILLESAYFSPSSIRKTGRELNINTDAKYRFERGIDPNSIKEGLEIATELIIRICGGEASKFSITGQASQKNKII

SEQ ID NO: 160941 - protein, 122 aa, Unknown
  Bacterial polypetide isolated from the Sargasso Sea
MSESKDIIKSKNQLDLGTRHPINQILKHIINFLQSNGFEIVNGVEVETEEYNFDMLNIKESHPARQMHDTFYIQEKSFLLRTHTSPVQIRGMLEKKPPLAFISGGKVYRKDDDSTHLPMFHQ

SEQ ID NO: 160942 - protein, 248 aa, Unknown
  Bacterial polypetide isolated from the Sargasso Sea
NQLLEKLTDIGLEVEGIGNTSLDLDKFIVSKIVRTEKHPNADRLKVCDVDIGEKKIIKVVCGAPNAKEGLLTIYAPPGAIIPKNKMKLVVTQIRGVTSHGMLCSDSELELSDESDGITELKYSKYKDKIGKKYFNKNNLNLIDLSITPNRPDCLGVRGIARDLATAGFGKLKINKIDKIKSKTKQKIKIKILKEKNQGCTTFGSCLVNNVQNRESPKWLKDKLISIGQKPISAIVDITNYVMLDLNRP

SEQ ID NO: 160943 - protein, 276 aa, Unknown
  Bacterial polypetide isolated from the Sargasso Sea
ITKACNKFEGLFVSEVRSVKKHPNADRLNICEVDVGEKDLLSIVCGAPNVKKGMRTVLAKVGAQLANQPKLKPVKLKGIESCGMLCSSSEIGLSDDSSGIIELSKHEPIGKPLDELIDSDNNIIDLSLTPNRGDCLSIYGIARELAVINQSNFSEYEKKTIEVSTENASQVKLSAKEACPKYVCRIVENVDLSVKTPLWMSEKLRCSGIQSINIVVDIANFVMLELGQPLHMFDNDLLTGGIEVRFPKGKEKLKLLDETEIEIKDKTLLIADKSGP

SEQ ID NO: 160944 - protein, 174 aa, Unknown
  Bacterial polypetide isolated from the Sargasso Sea
MIVSIDWLREFLEIKESPNELADMLSNSGLEAELNEVPFSIPGVIIGKVENTEKHPDADKLKICIVNDGQQTHQVICGAPNVNSGQMIPFATVGSILPGNLKIKKAKIRGVESNGMICSERELNISDEHEGIMVLPKDLPLGKDFMEAYGKKFLSLELDVTPNRPDAFSHQGVA

SEQ ID NO: 160945 - protein, 283 aa, Unknown
  Bacterial polypetide isolated from the Sargasso Sea
KISKVVCGGPNAKDNLLTIYAPPGSVIPKNNMKLEVSKIRGETSYGMLCSESELNLSNESEGIIELNQSYKTKIGKSYFKNNLENVIELSITPNRPDCLGIRGIARDLSASGFGKLIDNKNIKIKKKFKQSLKVKIEKNSNQACKIFGSCLIKNIKNQESPKWLKERILSLGLRPISAVVDVTNYVMFDLNRPLHAYDLDKINKEIIVRNSKKGESFKALDNKEYKLDDGMCVISDHDGVLGLGGIIGGTRSGTELNTKNILLESAYFDPEITRKTAKKLGIK

SEQ ID NO: 160946 - protein, 77 aa, Unknown
  Bacterial polypetide isolated from the Sargasso Sea
TEPSAEVDILSKDKKWLEILGCGVINPIVLENCNIDPKSFSGLAFGLGVERIAMLKYGVKDIRDFYKSNLDFLKQFK

SEQ ID NO: 160947 - protein, 211 aa, Unknown
  Bacterial polypetide isolated from the Sargasso Sea
MPKEINIETVSSYLFQLGHEHEIDNDTFDIEFTPNRGDCLSLMGLSRDLNSLCESGFPYSVYEEEILDFNFNFENNDSNTLDKVTFLYVEINQNKIKEYENYLQSFFSDFDIKKNNFFTDISNYLTYETGLPTHCYDYEKIYGKFSFESSLVNSEFETVLDTKIQLTGTNSYFKIDNDIVNLAGVMGGKATSCSKNTHKVLIECAHFNPEA

SEQ ID NO: 160948 - protein, 102 aa, Unknown
  Bacterial polypetide isolated from the Sargasso Sea
ILEFFVKRMFGDNTKMRFRPSFFPFTEPSAEVDIWSEQRHQWLEILGSGMVDPEVFKSVNIDPDVWHGFAFGMGIERICMLKYGIDDIRLLYQGDMRFLEQF

SEQ ID NO: 160949 - protein, 160 aa, Unknown
  Bacterial polypetide isolated from the Sargasso Sea
MSDIKKIKDNYIDKLNTENNVDKVNNIKSELFGKNGIISNEFKKLGSISVEERKKLASDLNNVKDELQNKISIKIQEIETKEINLKLEKEKIDVTLPERDIKIGKIHPVSQVIDEISSIFSEIGFSVEEGPDVENEYNNFTALNTPDNHPARDMHDTFLP

SEQ ID NO: 160950 - protein, 306 aa, Unknown
  Bacterial polypetide isolated from the Sargasso Sea
SSIGLEAEDCKIFEGLEGIVIGKVKSVTKHPNADRLSVCSVYDGEIDHQVVCGAKNVAKDQTIAYAKVGSVLPGGFKLKKINLRGVESNGMICSAKELNINDDHEGIIILPNSCKVGANFIEEYGNKFLKVELDITPNRPDAFSHYGIARDISVSKERKLSKIQINKKEVSKNPTISISTEDVNDCPRYVGGLVTEVSVGPSPIWMQERLVAAGQRPINILVDISNFVLLEFGQPTHIFDYDKLGNNKIHVRRAVKGDSITTLDQNQYKLNNDHLLITNGKVPVALAGIMGGYDSAVDDDTKKYFN

SEQ ID NO: 160951 - protein, 288 aa, Unknown
  Bacterial polypetide isolated from the Sargasso Sea
MTLSGIESEIEKSKGEEILDISLTPNRADCFSYKGIVQEVSALDNAKIKSVKQALPEIHHNLTMEVDVQSKEDSPVFMTRVIKSINRNAKSPKWLKEKLDQSGYKSINAVVDIANYVMLETGQPLHTYDLKKIKDRILVRRAKKKEAIDILDGSRKILDPNYLVIADVEKPLGIAGIMGSLESGISEDTEDIVLESAYFNFETIMGRARALSLHSEASMRFERGVDPAIQEHAIQRFTNLINEIVGGENGPIHSYINKKEMPKNKFIALRKDKIKQILGITIPNQTVK

SEQ ID NO: 160952 - protein, 133 aa, Unknown
  Bacterial polypetide isolated from the Sargasso Sea
PIHLRCRCARCEATEPPVRIIVPGRTYRSDHDATHSPMFHQCEGLVIADGIHMGHLKGCLIDFCRAFFGVDDLPVRFRPTYFPFTEPSAEVDIGCTREGGGLKIGAGDDWLEILGSGMVNPRVLANCGYDPDK

SEQ ID NO: 160953 - protein, 267 aa, Unknown
  Bacterial polypetide isolated from the Sargasso Sea
AVIPKTKIKLEVAKIRGVTSYGMLCSEYELNLSDDSDGIIELSTKFEKNLGKSYFLKSKSNLIDLSVTPNRPDCLGIRGIARDLSASGFGKLLNVKEKKINSKIKQTLKVKINKEKGQGCSIFGSCLITNVKNIESPQWLKDKLISVDQKPISAIVDITNYIMLDINRPLHAYDADKIEKGIIVRNSKTGEEFTALDNKKYKLEKGMCVISDNKGVLGLGGIIGGTRSSTEFNTKNILLESAYFDPSSIRNTAKKLSLDTDAKFRLK

SEQ ID NO: 160954 - protein, 269 aa, Unknown
  Bacterial polypetide isolated from the Sargasso Sea
VRGIARDLAAAGVGKLKKISLKNIKKNGSQKIKVSITKDKNQGCTVFGSCLIKGVTNKESPQWLKEKIISLGQKPISAIVDITNYVMLDLNRPLHAYDADKIDKEIIVRNSKMGETFEALDNKEYKLDDDMCVISDKSGVLGLGGIIGGTRSGTEINTKNIFLESAYFIPRSIRKTSNLLNIDTDAKFRFERGIDPQSIELGLSKAAELISEICGGKISNFDIQQTDKHEKNKIKFNFSLFEKITGFKVNDNEIIKILTDLGFEVSKEK

SEQ ID NO: 160955 - protein, 122 aa, Unknown
  Bacterial polypetide isolated from the Sargasso Sea
LFLKEFFEIDNLKYRFRPSYFPFTEPSAEMDVAYTKKNNVLKIGEGDDWLEILGCGMVNPKVLENCNVDSSVYQGFAFGMGIERLSMLKYGITDMRGLFDLNLKWLDHYGFSPLDLKTRSEI

SEQ ID NO: 160956 - protein, 293 aa, Unknown
  Bacterial polypetide isolated from the Sargasso Sea
RISALLESTLNFPELNHKYNIHLLKGIKLCPEAIESNCLYSISCIDGVNGDKLSPKWLKDRIEKSGIKSINLIVDLTNYILLEQGQPLHAFDKEKLSNLIGKEVAPEDFSVRKAKDNESLVCLDGKKYELNENITVVTCCDKPVAIAGVIGGLETSVSNTTSSIYLEGAVFNPVTIRKSSKAIGIRTESSSRYEKGISSKNTISAVTRAINLLEEYFSINSPIINTSNLEKNEDLFIKLRRNRIHKILGPLIINDKFEKRNLSDNEIVDKLTLIGCTLKNKEYGWDVAVIPNR

SEQ ID NO: 160957 - protein, 227 aa, Unknown
  Bacterial polypetide isolated from the Sargasso Sea
MKITFDWLKDHLKTKSNENKLIEKLTDIGLEVESVEASSGLDSFIVSRIIKSEKHPNADRLKVCDVDIGGELKKVVCGALNARKGILTIYAPPGAIVPKNQIKLTVSKIRGVTSYGMLCSESELNLSNESSGIIELDNKKFKNKVGKKFFSKKQSNLIDLSITPNRADCLGVRGIARDLASTGFGKIVDFKEKKISSKLKQKINVKITKDKNQGCIAFGSCLITGIK

SEQ ID NO: 160958 - protein, 72 aa, Unknown
  Bacterial polypetide isolated from the Sargasso Sea
GCGMVHPNVLKNVKVDPLKFQGYAFGMGIDRLAMLKYGINDLRAFFETDYRWLNHFGFDPLDVPSSYRGLSR

SEQ ID NO: 160959 - protein, 213 aa, Unknown
  Bacterial polypetide isolated from the Sargasso Sea
MKSIENQIDKIFQDGQAAIVDVQDKDALQAWRSQYTGRSSELAGILKNLKDIPQENRKDIGQKINSIKQELETLFDNKSNELVHNFSQASSDSSIDVSLPGTYKKNGHLHPITLALRETLNVLSRLGFSTVEGPEAESSYYNFDRLRIPDDHPARDMWDTFWLDSEQSNDPLLLRTHTSPMQIRFLEKNDPPIRIAVPGKCYRYEATDATHEW

SEQ ID NO: 160960 - protein, 215 aa, Unknown
  Bacterial polypetide isolated from the Sargasso Sea
METEVEKIKFLDLIKEAKSVNDLEKVRISLLGKKGEITNLLRSLGQMEAKERQIKSPQYNNLKQILEEAIKESREILLNKEIEARMDAEWLDISQDPREINSGLIHPVSRVTEEIVSIFSDLGFSVAEGPQIESDWYNFDSLNIPPDHPARQEFDTFYIKPDDEGLKENVSPNVLRTHTSPVQVRFMEKHGAPCRIIAPGRVYRSDYDLTHTPMF

SEQ ID NO: 160961 - protein, 285 aa, Unknown
  Bacterial polypetide isolated from the Sargasso Sea
SFVDNAFQTLIDPENDPIRLANPISSEMGVMRTTLWPGLLKALIYNRNRQQERVRLFEVGLRFLQPANQDGIDLATVLQEKTIAGVATGPRNAQNWADSAKLMDFFDLKGDVESLLALTGADGFRFEAATHPALHPGQCASVLRGDTEVGIFGMLEPRVQLELDVVEPVFAFEFRVEALTRRGIPTFAELSRFPEVRRDIAVLLPVEVTAEALMKRVTDATDDTLVNLKLFDVYQGEGIDPTRKSIAVGLTFQASSRTLTDSEVSDSVERIVASLIDGLGASLRN

SEQ ID NO: 160962 - protein, 109 aa, Unknown
  Bacterial polypetide isolated from the Sargasso Sea
NLTFSDLKGTLEYFVQEFFGKDLKTKFIPHFFPFTEPSAEVLVSWKDGEWLEILGCGMVDPNVFKHVGYDTDSQGFAFGVGVERLAMIRYGIDHIKNFYENDLRFLRQF

SEQ ID NO: 160963 - protein, 145 aa, Unknown
  Bacterial polypetide isolated from the Sargasso Sea
MDNIEPPSIKKVTGTLHPINQTKDFLLNLLNQFGFKEVQGPEIESEEFNFDMLNIKKSHPARQMHDTFYVENKNKVLRTHTSPVQIRSMLKSKPPFAFSSAGKVYRKDDDATHLPMFHQVEGIYVDKDVNFCNLKDLIHKILVKF

SEQ ID NO: 160964 - protein, 127 aa, Unknown
  Bacterial polypetide isolated from the Sargasso Sea
MSKPKELFLPSLDREIGAIHPINQVKFDLIKLLTSFGFEVAEGPEIESEEYNFDMLNIPATHPAREMHDTFYVDGMKNVLRTHTSPVQVRCMLEKKGPMAFVSPGKVYRKDDDATHLPMFINLKVFY

SEQ ID NO: 160965 - protein, 88 aa, Unknown
  Bacterial polypetide isolated from the Sargasso Sea
DGKINIGEGDKWLEILGCGMVHPNVLKNAKVNPLQYQGYAFGVGIDRLAMLKYGINDLRAFFESDIRWLEFYGFDPLDVPTNYRGLSR

SEQ ID NO: 160966 - protein, 93 aa, Unknown
  Bacterial polypetide isolated from the Sargasso Sea
KTFFGDIPVRFRASYFPFTEPSAEVDVQWKGKWLEVMGCGMVDPKVLENLGIDSEKWTGFAAGLGVERFCMVRHQIDDIRKFYTNDLRFLEQF

SEQ ID NO: 160967 - protein, 298 aa, Unknown
  Bacterial polypetide isolated from the Sargasso Sea
NTISAVTRAINLLEEYFSINPPIINTSNLITNEDIFIKLRRNRIHKILGPLIINDQFEKRNLSDNEIVDKLTLIGCTLKNKEYGWDVTVIPNRSHDLIREIDLIEEVARLIGYDRFDLELPNPIKPGKLSSEQLALRKVKNGFIENGFNEVLSYSLVPEDNEKLIKISNPLLIETSCLRDNMWKEHLEIVNRNINAGQASCYIFEIGNVFQKKTEFIQEEVLNGVIYGNKKFGKWINSGKDNDLNYYQARGKLKEALSSLNIKIEDKPTDSIDFLHPGRTAKLVIEGKDAGYFGEIHP

SEQ ID NO: 160968 - protein, 285 aa, Unknown
  Bacterial polypetide isolated from the Sargasso Sea
CGAPNARDGLVSVYAPPGSVIPKTKMKLKIAKIRGVESHGMLCSENELNISDESDGIIELKNREKDIGKNYFKSRGEKSIDVSITPNRPDCLGVRGIARDLASAGLGKLSNLKKTKVKQNFSQPIKISITKENSQGCMSFGACYIRNIQNKESPAWLKEKIISLGLKPISAVVDITNYVMLDLNRPLHAYDADKIDKEIIVRNSKPGESFEALDGKHYKLKNKMCVISDKSGPLGLGGIIGGTRSGTEFETKNILLESAYFYPTSVRKTSSILDINTDAKYRLKE

SEQ ID NO: 160969 - protein, 134 aa, Unknown
  Bacterial polypetide isolated from the Sargasso Sea
MGHLKGCLNYFIKEFFEVNKIQMRFRPSHFPFTEPSAEVDIGYELKDGKIVIGEGDKWLEILGCGMVHPNVLKNVNVNPEKYQGYAFGIGIDRLGMLKYGINDLRAFFETDYRWLNHFGFDPLDVPSNYRGLSR

SEQ ID NO: 160970 - protein, 76 aa, Unknown
  Bacterial polypetide isolated from the Sargasso Sea
TEPSAEVDIEGKDGWLEVLGCGMVHPNVLNNVGIDPEKYSGLAFGMGVERLAMLYYGVDDLRLFFDNDLQFLEQFR

SEQ ID NO: 160971 - protein, 147 aa, Unknown
  Bacterial polypetide isolated from the Sargasso Sea
MGDNLSDLSNSAIQEINECSSSNDLESIRVKYLGKKGTVTAALKSLSEIDPRDRPAHGKRINEIKTLIQEKLSERKASIQKQEINQNIENKMIDVTLPGRVNFQGHRHPVTKTLLEIEEIFYGAGFVVEDGPEIEDEYHNFTALNIP

SEQ ID NO: 160972 - protein, 274 aa, Unknown
  Bacterial polypetide isolated from the Sargasso Sea
FNGGIKELVLVNPISSELTHMRPSVIPTLLLAAQRNLNAGIDTLSFFEAGPIFKGNKPHDQISTISGLRLGSKVKRDWKNSSEDFDFYDVKLDVLKTLEAIGVNINSLQTYENTTSYFHPGRSAILKIGQKLIANMGEIHPRITDFYGFEKSILAFEIFHENIPMPKKVKVSKPMLKMSPLQSVTREFAFVIDETTPAEKLAKIAKSTNKDFIKDVLIFDVYRGENIPDGKKSIAIKVIIQPVNENLTDEDLEKISSNLIITIKKKTDGFLREQ

SEQ ID NO: 160973 - protein, 293 aa, Unknown
  Bacterial polypetide isolated from the Sargasso Sea
CLSFYGIARELSSILNLSIKNNYLNYTNNAYKLSDSIDSLALLIDSKDVKRYTAIKISNITVNDSPSWLKVLLFKLKQKPINNVVDLTNYLMFLTGQPLHAFDFDKISGTKILINDVTKESITVLDGSLQKTNSHLTISDAKGPIALAGIIGGTRTAVDKNTKNILLECASFNPSKIRRSSKILNLSTDSSYRFEREVPQYTTQSSLLYCADHISKFTNGIVSKNYLDTNSDIVDERVITIDLRKIAKLLGVNIKNDEILRIYESLSIELISSENSIYKFRPPQFRLDLSSRC

SEQ ID NO: 160974 - protein, 48 aa, Unknown
  Bacterial polypetide isolated from the Sargasso Sea
DIESDFYNFTALNIPQEHPARQEHDTFYFNEDENGERKVLRTHTSPVQ

SEQ ID NO: 160975 - protein, 88 aa, Unknown
  Bacterial polypetide isolated from the Sargasso Sea
TKLRFRPSYFPFTEPSAEVDVLFGDKWLEILGCGVVNPKVLENCKIDSSKYSGLAFGLGIERIAMLKYGVNDIRDFYKSNLDFLRQFK

SEQ ID NO: 160976 - protein, 135 aa, Unknown
  Bacterial polypetide isolated from the Sargasso Sea
HCIFHQVEGIYVDENVSFADLKQMILYFTKSMFGKSKLRFRPSFFPFTEPSAEVDIYWGLETETDYRITKGTGWLEIMGCGMVDPQVLENCNIDSEKYTGYAFGLGIERIAMLIYQIPDIRLFFENDVRFLNQFK

SEQ ID NO: 160977 - protein, 287 aa, Unknown
  Bacterial polypetide isolated from the Sargasso Sea
MKVSYNWLKDFIDFDVSPDHLSEILTNLGLEVEKIKKIESIKGGLKGIFVGHVIECYKHPNADRLKLTKVKIDKDNILQIICGAPNVSSNQKVAVATVGTILYDQSGKEFKITKSKIRGELSMGMICSEKELGISDNHDGIFVLKSSIKAGTPLKEIIKSETDHVFDIGLTPNRSDAMSHMGIARDLKAVFDFKNINYKNKKYEVNAFKIDNNSTNIPIEILNPKKCYNYHGLTISNVIVEESPEWLKNRLTSIDITPKNNVVDITNYALHHLGQPLHAFNADIIKN

SEQ ID NO: 160978 - protein, 294 aa, Unknown
  Bacterial polypetide isolated from the Sargasso Sea
KIINAEQHPNADRLRICDVDIGLDDTVKVVCGAPNAKKDLLTVYAGPGSIIPKNNMKLSVSKIRGVTSYGMLCSESELNLSNESEGITELTTSKYSDKIGKNFFQSNTEKVVDLSITPNRPDCLGVRGIARDLAATGVGKLKKISTKNIKKNGSQKIKVSITKDKNQGCTVFGSCLIEGVTNKESPQWLKEKIISLGQKPISAVVDITNYVMLDLNRPLHAYDADKIDKEIIVRNSKKGETFEALDNKEYKLDGDMCVISDKSGVLGLGGIIGGTRSGTEINTKNILLESAYYS

SEQ ID NO: 160979 - protein, 403 aa, Unknown
  Bacterial polypetide isolated from the Sargasso Sea
MKFTKDWLDVHLKTNKSESQIIQKLNSIGLEVEKVEPVKNELSDFIVAKIIKANKHPNADRLKLCDVDIGKKDTLKVVCGAPNARDGLLTIYAPPGSVIPKNGMKLEVSKIRGETSYGMLCSESELKLSNESEGIIDLNDKYKTKIGKSFFDEKKGKNVIELSITPNRPDCLGVRGIARDLSASNFGKLKELRKSKVKKNIKHNLKIKIEKNKNQACSIFGSCIIKNIKNTESPGWLKNRILALGLRPISAVVDITNYVMFDLNRPLHAYDLDKIKNKITVRNSKKGENFKALDNKNYTLDKDMCVISDDEGVLGLGGIIGGERSGTEKHTKNILLESAYFDPAIIRKTAKKLDLNSDAKFRFERGVDPQSVNAGLDSAAELILEICGGEVSKFDVQQIKKLK

SEQ ID NO: 160980 - protein, 531 aa, Unknown
  Bacterial polypetide isolated from the Sargasso Sea
NNKIIKVVCGALNAKKDLITIYAPPGSVIPKSKMKLVVAQIRGVISYGMLCSESELNLSDESDRITELNYNKYKKKIGKKYFTKNTSNFIDLSITPNRPDCLGVRGIARDLSAASFGKLKRNGIDKIKFEGKQKIRVKILKEKNQGCTSFGSCLVTNVKNTESPKWLKDKLISIGQKPISAIVDITNYVMMDMNRPLHAYDADKIQKGIIVRNSKKGEKFTALDNKEYKLDHGMCVISDNSGVLGLGGIIGGTKTATELETKNVLIESAYFDPRSIRKTANQLTIDTDAKFRFERGIDPLSIEEGLIKSAKLVKEICGGKINKIDIQNISNFKKTDINFEIKLFEKISGFKISNKKVLKILNDLGFEVKSNKDTLKLKVPSWRPDITQSIDVIEELLRIYGYDKIKMVDPIKIRRKPTLSKSQKLFHFLQRSVATKGYQEAITWSFTDSKINDLFKSNIKNIEIVNPISSDLNVLRNSIFSNLIMYINKNLDRGIKDLSLFEIGPVFYGSKPGDQKIVVGGLRSGKISRLS

SEQ ID NO: 160981 - protein, 310 aa, Unknown
  Bacterial polypetide isolated from the Sargasso Sea
LFGLRGIARDLSASGFGKLINNQSVKIKKTGKQSLRVKIEKSKNQACTIFGSCLIKNIKNKESPEWLKKRILSLGLRPISAVVDVTNYVMFDLNRPLHAYDVDKINKGIIVRNSKKGENFKALDNKDYILDDDMCVISDHQGVLGLGGIIGGTRSGTELNSKNILLESAYFDPEITRKTARRLELNSDAKFRFERGIDPNSISIGLEKASEMIVKICGGEVSKSDIQFTKKIKKKKILFDPFLASKTIGIQINTNEIIKILENLGFKIKNKGKALIVEVPSWRPDVHGQIDLVEEIIRIKGFNKIQSIEP

SEQ ID NO: 160982 - protein, 340 aa, Unknown
  Bacterial polypetide isolated from the Sargasso Sea
MKFTISWLKEHLETNASDQEIVAKLTELGLEVEEYHDTRKAFSDFIVGQVLEEGKHPNADKLKVCKVDIGTAKVDVVCGAPNVEKGMKVVYAPPGSTIPINQMKLKATKIRGIESSGMMCSEYELGISDNHEGIIRLNDDSKIGQSYSEIAGLDDVVIEIGITPNRQDCLGVFGIARDLAASGLGKLKIRKNSSQKGSFKSPIDIETKNTDLCPIFAGRYFKGVKNVQSPDWLQQKLKSVGLRPISALVDITNFVMLDLNRPLHVYDADKIDGKIIVRESKEGESFNALDEKSYDLKDGMCAIADERKVLGLGGIMGGESSGCNESTENVLLESALFNPI

SEQ ID NO: 160983 - protein, 628 aa, Unknown
  Bacterial polypetide isolated from the Sargasso Sea
SDAMSHYGVARDLKAFFELNNEKTTLKLPSTSNFTYDDFKIETKINVKDTNLSPLYAGIIIKDIEVKESQTWIKNKLKSIGYEPINNIVDITNYVLHEIGQPLHAFDLDKITNIEVKNLPSKTKFKTLDGNEISLNEEDIMICSEDNPLCLGGIFGGLDSGVTSNTKNIFLESAIFNPISIRKSSKRHSIYTEASFRFERGIDPEMVLYALKRASILIKNDCPESISSNIIQENNLKLDEKKIFLRYNEINSISGKIIDKDVIVSILNSLDVTVEAATDDGLNVISPHYRADVNREIDLIEEILRVYGYDNIESSSRLILSSKDYSIDNYKIIDNLLSKSLIGVGFNEIMTNSICSPEANQLNNEHTPIEIINPQGIELSNLRVSLLPGMIDTIAFNINRQSKDLKLFEIGNTYQKVDKNNNETRTLSIALCGEVFEESWLVNYNTDNFFYLKGIVDKLFNDLSLEVNYNAANDSNYSQKLLIRKGKETIGFMCELNKKMINKYSLDTKVYYAEIDISKIDVSKINTKYKEVSKFPSSRRDVSMILDSKINFDEIKRLSFSVDKNILKEINLFDVYKDKSIGNKKKSYAVSFIFNDLRKTLTDRHIDQIMKKIMDKFIKELNAQIRDK

SEQ ID NO: 160984 - protein, 516 aa, Unknown
  Bacterial polypetide isolated from the Sargasso Sea
PSTDQLVADFNRIGFEIEDVLHKGQGLSNIVVGHIKEFRPHPDADRLRIAQVDIGSETVQIVTAATNVNDGDKIPVSLPGAILAGGLKIKKGKLRGVESNGMMCSAVECGLTDTSPGVWVLPPNTPVGVDFIEHAQLIDTVLDIAILPNRGDALSLVGLARECQALYGTKKSFNPQPQSASGDVQLTCTIDPSFCNYYRAQKITGVTNQHTPLTHQTRLYYSGYRPLSWLVDVTNIVMIETGQPLHAFDASNITSIEATYGSGETIELLNEKEVTLDSSIPVIKLNNQPSAVAGVMGAQQGEVSHQTQAIILETALFDSVVVRKATKTLGIRSESSNRFEKHVDASSVDLAVARVHELLAAHDTITVHSPVEAGQCQATALDIQVDIARINQFLGTSFSDKDVHVRLEPLGFTVNGTTVTVPSYRANDCTEWPDIAEELCRFSGIEDVTPTPIADMVPINHSAQWCQRQAIQQAALQLGLTEVVPFPLHAPDDSSQPVILNPITPELTVLRSSAIQ

SEQ ID NO: 160985 - protein, 415 aa, Unknown
  Bacterial polypetide isolated from the Sargasso Sea
MKFTIDWLKQHLDTDLNDKEIINNLTNVGLEVESFENAPSELDDFIVAKILNAQQHPNADRLRVCDVDIGKSETVKVVCGAPNAKKGLFTVYAGPGSIIPKNQMKLSISKIRGVTSYGMLCSEAELKLSDESEGITELSEKYKEKIGKKYFDTKTPKVVDLSITPNRPDCLGVRGIARDLAAAGVGSLKKIKDSKLNQNFDQDLKVTIKKEKKQGCTIFGSCLIKGVSNKESPQWLKDKIISLGQKPISAIVDITNYVMIDLNRPLHAYDADKVSKEIIVRNSKKGETFEALDNKKYSLDDDMCVISDQSGVLGLGGIIGGTRSGTELETKNILLESAYFLPRSIRKSSKLLNIDTDAKFRFERGIDPKSIEAGLIKAADLIKEVCGGEVSKFDIQRLEEEKTNKVKFEISLLKK

SEQ ID NO: 160986 - protein, 726 aa, Unknown
  Bacterial polypetide isolated from the Sargasso Sea
QVVCGAPNAKSGMFGVFAPSDTFIPGTNINLKKSEIRGVESNGMLLSERELGISDEHDGIIELTGKHKIGDPIASIYGFDDPVIEINLTPNRSDCLSVRGIARDLAAAGLGTLKELKIKKIKGSFKSNIKWVRKFKKDEEYLCPGVAGRLFKNIKNSQSPEWLKRRLTLIGLRPISTLVDITNYVTFDLGRPLHVYDASKLSGNLVMRKSQNKEKCKTLDDKEYILSDEMVVISDDKSLHGIGGVMGGLNSGCSENTTDVFLEVALFDPISVTKTGRKLNLQSDARYRFERGLDYTSIDWGVDIATQMILDLCGGETSEIVADKLDSPKSKTINFNTTLTKTYGGINISEDQQKIILEKLGFLISGKDKKNFKITIPSFRPDIASSADIVEEILRIYGFDKIEPTSLQKDEGNTDEILSPNLKSFFKSRRLIANRGYLETVTWSFMDAKNADFLNNNSSIKIKNPISVEMDAMRPSTFPNLLNSINFNISKLFTEGKVFEVGPNFHGLEEEDQQMVATGIHYGFDSSISWNKKQRSVDIYDVKSDVFYILDQLNVPVENLQYDKIDNNIYHPGKSTKLRLGKNTIATFGEISPLLLNRFNIKTIVCGFEIYLDELDQFQTKKTSTKKSFDNNSLQKIERDFAFLFPLKIQAIDIINAVRKIDKKIIKNVIIFDVFEGKNLSDSKKSIAFKVIMQPQEKTFTDAEIENLSTNIIDLISKSFDGELRQ

SEQ ID NO: 160987 - protein, 423 aa, Unknown
  Bacterial polypetide isolated from the Sargasso Sea
MKIQYSYLKNFLNTKLSQNRLVDLFTQVGFECESVGDVIEFDITPNRGDMLSLTGLEREFYAYQGRKSNNKLKTSKLNLIKDQKVISQIDGSGCGNYHLMLVEGLQKIKNLDAKKRNFIESAGVPLIHPLVDLGNYVMLEIGAPMHVFDLDKLDLPINIQFPKSNNNSLEVIGGDVKDIQLSSLTIQDQSGIQAIAGIIGSERSSVSSNTSNIAVEAAFFKPETIVNQARKYGLATDASHRFERGVDPEIQQLALERYVFLLNQISTYDSIELYHSKSIKTREKNVHLNIERFNNFSGLSMKASQASLILKNLGFDVVSKNSKSLVFNIPSHRFDICLEEDLYEELLRCYGYDNIPISIPKAGPIIKNKEDDVLDKLRLGFVYAGFKELMHMPFVSIKSFKKLNPKNWTAAELRNPINENEPF

SEQ ID NO: 160988 - protein, 268 aa, Unknown
  Bacterial polypetide isolated from the Sargasso Sea
MKFTLSWLKDHLDTNKDLATIVDTLTNIGLEIESVEDKSKDFNDFTVAEVLKAEKHPDADRLKVCTVKSIDGTFQVVCGAPNAREGMKGIFAPENSFIPGTGVKLKKSKIRGVESCGMLVSEREMGISDEHDGIIEVDSKYSLGEKFIEIFNLDDPVIEINITPNRGDCLSIRGVARDLAAAGLGKLKESKLIKNIEGTFDSPVKWEKDFNGDIEYICPGVAGRYFKNVTNKESPAWLQQRLKGIGLRPISALVDITNYITYDLGRPL

SEQ ID NO: 160989 - protein, 103 aa, Unknown
  Bacterial polypetide isolated from the Sargasso Sea
MGSMDLDQIVADAQKAFAEASDVTTLENEKARFLGKSGALTELLKGLGKLDPETRKTEGARINLVKQQVEAALTARRQALADALLNQRLAAEAIDVTLPGRGT

SEQ ID NO: 160990 - protein, 507 aa, Unknown
  Bacterial polypetide isolated from the Sargasso Sea
MKFTLNWLKDHLETSQDLDSIVETLTNIGLEIENVEDKSKIFNDFTVAEVLKAEQHPDADRLKVCSVKTIDGTFQVVCGAPNARTGMKGIFAPENSFIPGTGIKLKKSKIRGVESCGMLVSEREMGISDEHDGIIEVDAKHKLGEKFIEVFNLDDPVIEINITPNRGDCLSVRGVARDLAAAGLGTLKENALTKSIPGTFESPIKWEKVFSGDEEYLCPGVAGRYFKNVTNKESPAWLQQRLKAIGLRPISALVDITNYITYDLGRPLHVYDADKIDGNLTMRFAKKNETCLTLDEEKRECTADMIVISDNQQLHGIGGVMGGLDSGCSLDTKNVFLEVALFDPISVTKTGRHLKLQSDARYRFERGIDSTSIEWGINAATNMISDLCGGEVSEPVKTKVLENKKSKIIFNTNKVKSLGGLEIKNDKQKSILESLGFNIVEKNNFFEITVPTFRPDIEGEADIVEEIMRIYGFDKIPLTDVSDIHNKKNILSPELKSFYKIKRLIAN

SEQ ID NO: 160991 - protein, 547 aa, Unknown
  Bacterial polypetide isolated from the Sargasso Sea
MLTIYAPPGSIIPKNNMKLEVSKIRGVTSYGMLCSEAELNLSDESQGIISLSDKYKNKVGKIYFSSNKENTIELSITPNRPDCLGIRGIARDLAAAGIGKLKPIKKKRLKQNNKKLNVVINKTKNQSCSIFGSCLIKNIKNQESPNWLKERLISVGLRPISAVVDVTNYIMLDLNRPLHAYNLDKINKNIIVRESKKNESINALDNKKYNLSEGMCVISDESGPLGLGGIIGGTSSSTEIDTKNILIESAYFDPSITRNTSNILNLNSDANYRFERGIDPNSIEAGLQKAAEMITEICGGDVSKFQITRIKKISQKEIQLDNNFPTKILGINITVKEIIHILEKLGFKCKKNKNSITAQIPSWRPDITKKIDLVEEIIRIKGLETIKSIEPEKNRINQTLNYEQKHFHLAQRTIATRGYLEAITWSFTNEKTNNYFLNSKKSIKLINPISSDLGVLRSSNFSNLIEKVRENIDRGEENISLFEIGPIFDGNKPGEQTISACAISAGYASSPNWNEKERLLDVFDVKRDLFHTLYELGTDKDQIKIET

SEQ ID NO: 160992 - protein, 478 aa, Unknown
  Bacterial polypetide isolated from the Sargasso Sea
MKVSLHWLRRFVDFDLTATELAEKLTMRGFETEVVSDFDSLENLVVGDVLTAEKHPDADKLKLCSVSDGSETFSVVCGAPNVDAGQKIVFAKVGAVLPGDFKIGKAKIRGVESFGMICSERELGISEEHDGIMVLNDSNKAGTPIKEVLGPLFNAIDIEVTPDKAFALSHRGIAREVATIVGSKLKTPINSVKLNPKSKDVVSIELDKKGGCTRYIAGTMKGVKVGPSPKWLAEYLKSVGQKSINNLVDISNFMLLEIGHPTHVFDLKKLAKPAIKVSWAKKGEKFDALDEETYELSANHMVITDTKNTVALAGIIGGMDSSVTDSTTEVLIESAYFDPVVIRKGSKKLNLLSEASRRFERGTDPNAALEAFNMIVQLMQEVAGGTLESVITDECSMCLDSTSVDLSSEKLLKYAGQEIPSKDVESILKGLHIDTKKTKTGWNCSIPTFRTDLKVETDLIEEVFRCYGYDNIKSYFNY

SEQ ID NO: 160993 - protein, 477 aa, Unknown
  Bacterial polypetide isolated from the Sargasso Sea
MKFTIDWLKQHLDTKYNDKKILDKLTNIGLEVESFESQSSQQDEFVIAKIINAERHPNADRLSVCDVDIGEKEIVKVVCGAPNAKKDLLTIYAPPGAIIPKNKMKLSVSKIRGVTSYGMLCSESELKLSNESEGITELPSKKYNNQIGKKFFTNNSSKVIDLSITPNRADCLGVRGVARDLAAAGAGKLKKYDQNKIKFKGTQKIKVKINKEKNQGCAAFGSCLIKGIKNTESPQWLKDKILALGQKPISAIVDITNYIMFDLNRPLHAYDADKINESIIVRNSKKGESFEALDNKTYTLQDNMCVISDQSGVLGLGGIIGGTRSGTELDTKNILLESAYFNPKSIRKTSKLLNIDTDAKFRFERGIDPNSIEEGLVKAAKLIQEICGGEISKLDVQKSEISKKISIRFPLDLFESVTGFKISVKEIIKILTDLGFIIKKKNNDLNLIAPSWRPDILQPIDIVEEIVRIKGYDQIKT

SEQ ID NO: 160994 - protein, 772 aa, Unknown
  Bacterial polypetide isolated from the Sargasso Sea
MKITFNWLKDHLKTNLIEKNLLQQLTNIGLEVESVECLSADNDLFKVAKITKTEKHPNADRLKICDVNVGGKDIKKVVCGAANAKEGLITIYAPPGAIIPKSKTKLVVAKIRGVTSYGMLCSESELNLSDESDGITELSEKYEKSIGKSYFSKSKSKINLIDLSITPNRPDCLGVRGIARDLAASGFGKLLDLQEKKIKPESKQIIKVKINREKDQGCSAFGSCLITNVKNIESPKWLKDRLVSVGQKPISAIVDITNFVMLDINRPLHAYDADKIEKGLIIRNSKPGEEFTALDNKTYKLEKGMCVISDNKGVLGLGGIIGGTRSGTEFNTKNILLESAYFDPGSIRKTGKKLNLDTDAKFRFERGIDPLSIEAGLKKAASLIKEICGGKIGRIDIQKTETYKTKMIKFDINLFEKISGFKISSTTMIKILEDLGFKCKKNRKYLRLTVPSWRPDILQEVDIIEELVRICGYHKIKAIDPIKERTKSTLTQSQKLFHFLQRAIASKGYLETITWSFTDSKYNNHFKETNKEIKIVNPISSELGVLRNSIFSNLILHMSKNLDRGFKDLSIFEIGPIFTGSNPGQQNTVICGLSAGKKSRLSWIDKEREVDVFDVKRDVIQTLVEAGYNSNKFFIDSETPNYYHPGKSGRLFLNKEKDLVIAYFGEIHPNILKKIDIKTESLVGFEIFLDNFEFSKKTLNDQKIKYEVSDYQKSERDYAFIVNKDVSSQNLISAISSVDKNLISNVRVFDVYEGENIPENQKSIAINVTIQS

SEQ ID NO: 160995 - protein, 281 aa, Unknown
  Bacterial polypetide isolated from the Sargasso Sea
MKAPINWLKKYVDIDLNNIDDLLHKLTLSGTEVDSVQRQGNWEGIVVGEVLEVSKHPNADRLNLVLVNDRGNQVKVVCGANNLYKNQKIAFAPVGSKLFSPKTNQMETLNKTKIRGEISNGMICSALELGLGDDHDGIMDLSNDLKVGQDLKDIYNDIVIDLELTPNRPDCLGMYGIAREIAALTKSTLKESIEIKKIKESKEYSDNLDIKIIDPDLCPRYMGIVISDVKIEDSPSWLKNALISIGENPINNIVDITNYVMFELGQPLHAFDYEKVKNGKI

SEQ ID NO: 160996 - protein, 325 aa, Unknown
  Bacterial polypetide isolated from the Sargasso Sea
MKFTVDWLKNHLDTKFNNNQIIDKLTNIGLEVESFESPTSELDTFIVAKIINAKTHPNADRLKLCDVDIGSDKTIEVVCGAPNAKNGLLTVYAPPGSIIPKNQMKLSVSKIRGVTSYGMLCSESELLLSNESDGIIELKNNKYANKIGEKYFKNTSEKVIDLSITPNRPDCLGVRGIARDLSAAGAGKLKINKKSNLKYRGNQNINVTIKKEKAQGCTIFGSCLIKGVTNKESPKWLKDKILSLGQKPISAIVDITNYVMFDLNRPLHAYDADKIDNEIIVRSSSKGESFQALDNKKYILENDMCVISDRSGVLGLGGIIGGTRS

SEQ ID NO: 160997 - protein, 410 aa, Unknown
  Bacterial polypetide isolated from the Sargasso Sea
MPAPQPVTLRVARAAKVIGMQLTQAQCADALQRLGLPVAQGDGTLTVTPPSFRFDITIEEDLIEEVARMVGYNNLPTTPPLAPITPKLALEATRSPFAVRRSLAALGYQETINFSFVEERWEHELAANPQPIKLLNPIASQMSVMRSTLLGSLLQVLKFNLDRKAERVRVFELGRVFLRDGSVRNTDTTVEGFHQPMRVSGLAYGPNDMLQWGRKEQAIDFFDVKGDVEALLAPLRATFEPGNHPAMHPGRCARVLVGGRAIGFVGELHPQWRQSWDLPQAPVMFELELDAVLQRVVPQFKPVTKHQAVERDVAVVVAERVTHADIMGAVEQAVPGGMLRSAVLFDVYRPKALRAGEEAPAGGLAPGEKSLAVRLTLGRDEATLTEAEIDAAVQSVITQLTQRTGARLRV

SEQ ID NO: 160998 - protein, 328 aa, Unknown
  Bacterial polypetide isolated from the Sargasso Sea
MKFTIDWLKEHLDTNYDDNKIVNRLTDIGLEVESFQGQLSELDNFIVAKILNAEKHPNADRLKVCDVDIGKNQVVKVVCGATNAKKNLLTIYAPPESVIPKNQMKLSITKIRGVTSYGMLCSESELNLSDESEGIIELSSKKYNNQIGKKYFKNNTSKVIDLSITPNRPDCLGVRGIARDLAAADTGKLKKLTLKSVKNSGPQKINIKITKEKNQGCLAFGSCLIKGVKNTESPKWLKDKIITLGQKPISAIVDITNYVMIDLNRPLHAYDADKIDKGIIVRNSKKGEAFKALDNENYSLKEDMCVISDNSGVLGLGGIIGGTRIRVQ

SEQ ID NO: 160999 - protein, 177 aa, Unknown
  Bacterial polypetide isolated from the Sargasso Sea
MANLKKIKEEFILKLNKKLNLSEVNLIKSELFGKNGLVSSEFKKIGTIPEQQRKKFASDLNVIKDELQELINSKINEIEISEINEKLKKEKIDITLPERSFFQGKIHPVSQTIDEISSIFSEIGFSVEEGPDVENEYNNFTALNTPDNHPARDMHDTFYLDKNKEKLLRTHTSPVQI

SEQ ID NO: 161000 - protein, 505 aa, Unknown
  Bacterial polypetide isolated from the Sargasso Sea
ITLLDGEQRVLTPDTLVIADHQKALAIAGIMGGEGSCINVETRHLFLEAAFFAPELMAGRARHYGLHTDASHRYERGVDPELAHQAVERTTQLFLECVGGEAGPVTDVTSSTDLPQREPITLKAISIQRMLGIDLASDEVMRIFKGLGFTVEANVDKGSWRCTAPSWRFDMGREADLLEEIARIHGYDNIPVEPVRGAASAGTVAESATPPSVIKQRLVARGFHEAITFSFVSLELQQLINPDIEPVILKNPISSDLAVMRTSLIPGLLGAAAHNIKRQQTRVRLFETGLRFMPGESLTQLPMLALLLCGRRMPEGWSSNADSVDFYDMKGEIEALLQASDQALTCRSVVRPGLHDGQTAEILLGGEIVGVMGRLHPSTAKTLNLPEETFVAELELASVVGRALPDYEEISKFPEVRRDIAVIVNRDTPSAAVLDTARASAGAALADARIFDVYEGDGVAENAKSLAIGLTFRDQRRTLTDEEINESLSQVIECLGEKLGATLRH

SEQ ID NO: 161001 - protein, 272 aa, Unknown
  Bacterial polypetide isolated from the Sargasso Sea
MKFTMSWLKEHLKTKHKDIQIIDKLTDVGLEVESFENISSDFDNFKVAKIINAEQHPNADRLRVCDVDIGQQNIVKVVCGAPNAKKGLLTVYAGPGSVIPKNNMKLTVSKIRGVTSYGMLCSESELKLSDESEGITELKLSKYSDKIGKNFFNNKTEKVVDLSITPNRPDCLGVRGIARDLAAAGAGKLKSISHKNIKKNGSQNVKVSITKDKDQGCTIFGSCLIKGVTNKESPKWLKEKIESLGQKPISAIVDITNYVMLDFNRPLHAYDA

SEQ ID NO: 161002 - protein, 129 aa, Unknown
  Bacterial polypetide isolated from the Sargasso Sea
DLKSTLILFLKEFFEIDNLKYRFRPSYFPFTEPSAEMDVAYTNKNNVLKIGEGDDWLEILGCGMVNPKVLENCNIDSSVYQGFAFGMGIERLSMLKYGITDMRGLFDLNLNWLDHYGFSPLDLKTRSEV

SEQ ID NO: 161003 - protein, 493 aa, Unknown
  Bacterial polypetide isolated from the Sargasso Sea
MKVSLHWLRRFVDFDLTATELAEKLTMRGFESEVVSDFDSLENLVVGDVLTAEKHPDADKLKLCSVSDGSETFSVVCGAPNVDAGQKIVFAKVGAVLPGDFKIGKAKIRGVESFGMICSERELGISEEHDGIMVLDESHKAGTPIKEVLGPLFNAIDIEVTPDKAFALSHRGIAREIATIVGSKLKTPINSVKLNPKSKNVVSVELDKKGGCTRYIAGTMKGVKVGPSPKWLAEYLKSVGQKSINNLVDISNFMLLEIGHPTHVFDLKKLAKPAIKVSWAKKGEKFDALDEETYELSTDHMVITDTKNIVALAGIIGGMDSSVTDSTTEVLIESAYFDPVVIRKGSKKLNLLSEASRRFERGTDPNAALEAFNMIVQLMQEVAGGTLESVITDECSMSLDNTSVDLSFKKLLKYAGQEIPSKDIESILKGLHIDAKKTKTGWNCSIPTFRTDLKVETDLIEEVFRCYGYDNIKSSFNYSSIMQYANDEESSIS

SEQ ID NO: 161004 - protein, 618 aa, Unknown
  Bacterial polypetide isolated from the Sargasso Sea
MKVSLHWLRRFVDFDLTATELAEKLTMRGFESEVVSDFDSLENLVVGDVLTAKKHPDADKLKLCSVSDGSETFSVVCGAPNVDAGQKIVFAKVGAVLPGDFKIGKAKIRGVESFGMICSERELGISEEHDGIMVLDESCKAGTPIKDVLGPLFNAIDIEVTPDKAFGLSHRGIAREVATIVGSKLKTPINSIKLNPKTKDVISVELDKKGGCTRYIAGTMKGVKVGPSPKWLAEYLKSVGQKSINNLVDISNFMLLEIGHPTHVFDLKKLAKPAIKVSWAKKGEKFDALDEETYELSTDHMVITDTKNTVALAGIIGGIDSSVTDSTTEVLIESAYFDPVVIRKGSKKLNLLSEASRRFERGTDSNAALEAFNMIVQLMQEVAGGTLESVITDECSMSLDNTSVDLSSEKLLKYAGQEIASKDIESILKGLHIDAKKTKTGWNCSIPTFRTDLKVETDLIEEVFRCYGYDNIKSSFNYSSIMQYANDEESTISSLKHHLSSLGFHQSYNNSLEDIEEVKLFGKDAVSVMNPSSERMNTLRTNLHSGLLKNLDFNYRNGSANTLIYEYGTIFEGKTDKLDDITQKSSLSCLVHGDVFSKNVHFDSIPASFSFLKGVASN

SEQ ID NO: 161005 - protein, 626 aa, Unknown
  Bacterial polypetide isolated from the Sargasso Sea
MNISYKWLNELLDFDLNVQETSDLLTDIGLEVEKTIKYETPLTNLSELLIGEIVRCDKHPNADRLKLTEVNVGLNNNLNIICGAPNVAVGQKVIVAPVGSKLITIKNESFKIKKSKIRGIESEGMICAEDEIGVGTDHDGIIVLKNKYKVGDSADKAYKKFEDYIFEIGLTPNRCDAISHFGVARDLRAALSHRNETKNELILPSIVNFTNLRLAPSISVNIADSSLCHRFCGLIIKDVKIKPSPKKIINKLNSIGLKSINNIVDITNLVMHEIGQPLHAYDLDKIKSGKVEIKRLKSGVKFKTLDGDDIDLHKDDLMICDGNTPMCIAGVYGGKNHSVSENTTTIFLESAFFNPITVRKTSKRHNINTDSSYRFERGVDIELLEHSLKRAASLIVEDCNAEIICDIIDEYPNKSDEKNVVINFNKINSLIGHEIDKLKIKSILNSLDFKINNVNDISAGVTIPQYRHDVNRECDVVEEILRIHGYNNIPIDKNVKFSISSLLNKSHKYQNIISDYLSSIGFNEIMNNSLVSENSNTNNKDSVFLKNSLSKDIALMRNDLKSGFLSSISYNLNRKSISNNLYEFGSIYYKSGKSYEEKKVLGVALNGDVISKNWSNNNVKSNLFIS

SEQ ID NO: 161006 - protein, 165 aa, Unknown
  Bacterial polypetide isolated from the Sargasso Sea
MGDNLSDLSNSAIQEINECSSSNDLESIRVKYLGKKGTVTAALKSLSEIDPRDRPAHGKRINEIKTLIQEKLSERKASIQKQEINQNIENKMIDVTLPGRVNFQGHRHPVTKTLLEIEEIFYGAGFVVEDGPEIEDEYHNFTALNIPHNHPARAMHDTFYFNSEY

SEQ ID NO: 161007 - protein, 399 aa, Unknown
  Bacterial polypetide isolated from the Sargasso Sea
MIEISMDDLKDCPRYVGGIIQNVKIKESPDWLKKKLESVGIRSINNLVDISNYVMMEMGQPTHFFDLDKIKNKKILVRRARDGEKITTLDEIERSVNSNVMLITDGESPIAVAGIMGGFDSAINENTKNVLIECAYFNPATIRKSSKTLNMITDASKRFERGVDYNAPVLAFWRIVHLIDELNCGEWIPDIMDTYPEKIETNEIVLKKKLINEIAGVNIPNDFVVKTLSSLGCRIYEKDDLTCSPPSWRPDLTRDIDLIEEVIRVYGYDNIKSSNNYTSIMNFDDFDPHHNLDKINNSLIGLGFYQVFNNSLQTKEEAYFYSNKKDLIEMKNPLSDKMTHLRYSLIHGLMQNIEHNVNNGIHDLMLFEHGNTFSYSDSKRLGIDEVQTLTGILHGNYQE

SEQ ID NO: 161008 - protein, 176 aa, Unknown
  Bacterial polypetide isolated from the Sargasso Sea
MSILEQIDSVRNSFLTDIESFPTNSLEIDAIRSKYIGRKGQVAQLFSQLGKASDEERPLLGQKLNQLKNELSQLFDDKLKQVLTNKQTSEDQNLDLSLPGRKNRIGSLHILEQTLGEIKEIYRSIGFHIAYGPEVDDDYHNFTALNIPEHHPARDMQDTFFINPETVLRTHTSNVQ

SEQ ID NO: 161009 - protein, 319 aa, Unknown
  Bacterial polypetide isolated from the Sargasso Sea
MKFTISWLKEHLDTQKSDQELIDSLTNIGLEVEDVVNASEIFSNFIVAQVVEEKKHPNADKLKVCRVDIGSDIVDVVCGAPNVEKDMKVVYAPPGSTIPSTQMKLKASKIRGVESLGMMCSEFELGISDDHDGIIKLDDSVKVGQPYAEIAGLNDTIIEIGITPNRQDCLGVSGVARDLSAAGLGTLKKRKIKNNKGKLKSPIQIEIVDNRACPAFAGRYIKNVKNIESPDWLKNKLKSIGLRPISALVDITNFVMFDMNRPLHVYDADKINEKIIVRSSQKGESFRALDDKEYHLEDGMCVIADKSKVLGLGGIMGGD

SEQ ID NO: 161010 - protein, 87 aa, Unknown
  Bacterial polypetide isolated from the Sargasso Sea
GKIVIGEGDKWLEILGCGMVHPNVLKNVNVNPDKYQGYAFGIGIDRLGMLKYGINDLRAFFETDYRWLNHFGFDPLDVPSNYRGLSR

SEQ ID NO: 161011 - protein, 337 aa, Unknown
  Bacterial polypetide isolated from the Sargasso Sea
MSCKKHPNADRLKLTSIDLGDQGKFEIVCGAPNIAKGQKVPVATVGSTIYTNSGEKIKISKSKIRGVVSNGMVCAEDEIGLGDSHDGIMILDNKVKSGTPLSQIYKIEKDSVLEIGLTPNRSDAMSHYGVARDLKAFFELNNEKVNLKLPSTSDFTYDDFKIETKINVKDPILSPLYAGIIIKDIEVKESQTWIKNKLKSIGYEPINNIVDITNYVLHEIGQPLHAFDLDKITNIEVKNLPSKTKFKTLDGNEISLNEEDIMICSEGDPLCLGGIFGGLDSGVTSNTKNIFLESAIFNPISIRKSSKRHSIYTEASFRFERGIDPEMVLYALKRASI

SEQ ID NO: 161012 - protein, 234 aa, Unknown
  Bacterial polypetide isolated from the Sargasso Sea
MIITLPWLKEHLKTNAKETEIINRLTNIGLEVESVKENTGELSEFRIAKIIKAEKHPNADKLKVCDVNIGEKETLKVVCGAPNARDGLITIYAPPGAIIPKTKFQLKIAKIRGVESRGMLCSESELNLSDKSEGIIELNAKEKEIGKSYFKSKSEKAIDIAITPNRPDCLGIRGIARDLSSTGIGKLITSKRKKIKQSSKHQVKISITKDKHQGCLTFGSCYIKNIVNKDSPEW

SEQ ID NO: 161013 - protein, 332 aa, Unknown
  Bacterial polypetide isolated from the Sargasso Sea
MILTISWLKEHLDTKYNESKIIDKLTNIGLEVESYENVSSELDSFKIARVVNAEKHPNADRLKVCDVDIGQKDTIKVVCGAPNAKKDLLTIYAGPGTIIPKNKMKLSVSKIRGVTSYGMLCSEAELNLSNESEGIVELSKDKYSNKVGKKFFKNINEKVIELSITPNRPDCLGVRGIARDLAAAGAGKLKDISKSNIKKTGPQNIKVSIKKDKNQACTIFGSCLINGVSNKESPKWLKDKIQSLGQKPISAIVDITNYVMLDLNRPLHAYDADKIDQEIIVRNSKKGETFEALDNKKYELEDNMCVISDKSGVLGLGGIIGGTRSGTEFNTK

SEQ ID NO: 161014 - protein, 453 aa, Unknown
  Bacterial polypetide isolated from the Sargasso Sea
MEVDSQKKLGNDYVIDIDLTPNRSDCLSIYGVARDLNASTYNYKFKKTQSCKPVKLNAVKSNYVEIKDLDACPNFNYLILDCCDKAPKTPKYIIEKLKSSDIDSIHYVVDILNYIMLEIGQPMHAYDLDKLSGKLRISTSVKKEIFQGLNNEEYKLEKGFLTIKDNEHIQCLAGILGSKNSMVTKKTQKVLIESAFFNPKSIINRARSLKLQTESSYRFERGVDFLLPNSALDKFVSYIKHTDIKILERKSLGKNSSFPKNKKLNINLEAINSAIGTNLSKNEIYKIFLNLGCTIEKVKGIVTSPSHRYDLNILSDYIEEVARIYGYNNIDDQDEILPVDYKKIDYFYDNTIKIKNFLKNIGFHECINYSFCDESSFNQVNWKNDSIEKKVKIKNALNENHTTLRSTISNSLIENIKFNLKSNRNDSYKFFEISKIFDRNEELHLSVCLHGQH

SEQ ID NO: 161015 - protein, 211 aa, Unknown
  Bacterial polypetide isolated from the Sargasso Sea
MKFTKDWLDDHLKTKKTESQIIEKLNSIGLEVEKVEPIKNELSDFIVAKIIKANKHPNADRLKLCDVDIGKKETVKVVCGAPNAKDNLLTIYAPPGSTIPKNGMKLEISKIRGETSYGMLCSESELKISNESKGIIDLNDKFQSKIGKSFFQNKKNNNIIELSITPNRPDCLGIRGIARDLSASNFGNLKEIKKSKIKKKITHNVKVKMKK

SEQ ID NO: 161016 - protein, 117 aa, Unknown
  Bacterial polypetide isolated from the Sargasso Sea
ETDKLKMRFRPSHFSFTEPSAEVDIGYTKKGNQLVIGEGDDWLDILGCGMVHPKVLQNVNIDPNSFQGYAFGMGIERLAMLKYGISDLRTFFECDLRWNKHYGFSPLNFPSLIRDLS

SEQ ID NO: 161017 - protein, 286 aa, Unknown
  Bacterial polypetide isolated from the Sargasso Sea
MKFTLDWLKDHLETSKDLKTITETLTNIGLEIESVEDKSEDFKYFTVAKVIKAEKHPDADKLKVCKVKTINGEFQVVCGAPNATEGMLGIFAPENSYIPGTDLHLKKTKIRGVESSGMLVSEREMGISDEHDGIIEVKGDYKVGDQFSKIFKLEEPIIEINLTPNRSDCLSVRGIARDLAAAGAGKLKELKFKKIKDTFKSPMKWKKDFKDKKLCPGVAGRYFKNVENVESPQWLQKRLKAIGLRPISALVDITNYVTFDLGRPLNVYDADKVSGNLTMRLAENKE

SEQ ID NO: 161018 - protein, 129 aa, Unknown
  Bacterial polypetide isolated from the Sargasso Sea
SYKSFCLFNQVEGLVINEDSSFAEMKGTLEYFVQEMFGKNTKMRFRPSYFPFTEPSAEVDIWNEKLNQWMEILGCGMVNPNVLTNVGYDNKKYQGFAFGMGIERIAMIKYGIKDIRLFYQNDKRFLEQF

SEQ ID NO: 161019 - protein, 273 aa, Unknown
  Bacterial polypetide isolated from the Sargasso Sea
MKFTKNWLDIHLKSKKKESQIIDKLNNIGLEVEKIEPIKNELSDFIIAKIIKSDKHPNADRLKLCEVDIGENKIVKVVCGAPNAKDGLLTIYAPPGSIIPKNGMKLEVSKIRGEISHGMLCSESELKLSDESEGIIELNSKNNNKIGKPYFGNSNKNNVIELSITPNRPDCLGVRGIARDLAACDFGDLKELKKKKLNKKIKHNFKVKIEKDKNQACYAFGSCIIRNINNTESPGWLKNRILALGLRPISAVVDITNYVMFDLNRPLHAYDLD

SEQ ID NO: 161020 - protein, 509 aa, Unknown
  Bacterial polypetide isolated from the Sargasso Sea
MKVFYSDLLEFINDNPSMEELSNSLFQLGHEHEIKGESFEMEITPNRGDCLSLIGLARDLSCIYDTNLDLNIYEDKIRDLDLDFTNLSKETCPKISFLEIEIAGPVDIYEDYLESYYKKMGINKNNFFTDISNYLSYELGQPTHCFDKEQLTGNIVFEYKDCSEEFETLLGKKIQLTGKNCVFSNNGKIISLAGVMGGQKTACSKSSTKVLVECAFFNPEAIIGQTTKYNLQSDAAHKFERCTDIDSHEKVLRRFIKIVEDHVEIKSLRISSFEYQEMSEKKIEREVTKINSILGTSISDDFYKINLEKIGFTFDSNITIPSHRNDISNQNDLAEEIARIIGYNNISSQPVAFRNELQDKEKNSLKEVKDFFNHNGFYEVINFPFCSNENKHSISVDNPLDSNRKYLRGNLKDSLIENLLYNERRQKDCIKFFEVSDVYSNKEKIKHDFRLGIIASGRMGHDHNLFSKNIDRNYLEDLLKTIFHQDEFNIEEIQRHNLDTKITNKIFYC

SEQ ID NO: 161021 - protein, 391 aa, Unknown
  Bacterial polypetide isolated from the Sargasso Sea
LTIYAPPGAIIPKTKTKLVVAKIRGVTSYGMLCSESELNLSNESNGITELPKKFRKNIGKSYFSKSKSNLIDLSITPNRPDCLGVRGIARDLSASGFGKLVDLEEKKIHSKNKHTLKVKINKEKEQGCIAFGSCLITNVKNSESPKWLKDKLISIGQKPISAIVDITNYVMLDINRPLHAYDADKIEKGIIVRNSKFGEEFTALDNKKYKLESGMCVISDNKGVLGLGGIIGGTRSGTELFTKNVFLESAYFEPGSIRNTAKKLNLDTDAKFRFERGIDPLSIEDGLNKAAKLIKEICGGEISKIDVQKIETYKTKKISFDPNIFEKISGFKISMKEMIKILEDLGFEVKKDKKKLKLAVPSWRPDISQEVDIVEELVRISGYEKIKYIDP

SEQ ID NO: 161022 - protein, 356 aa, Unknown
  Bacterial polypetide isolated from the Sargasso Sea
MKLPVKWINESFKKDYSAIELSDLLTLSGIESEIEKSKGEEILDISLTPNRADCFSYKGIVQEVSALDNAKIISVKQALPKIHHNLTMEVDVQSKEDSPVFMTRVIKSINRNAKSPKWLKEKLDQSGYKSINAVVDIANYVMLETGQPLHTYDLKMIKKTILVRRAKKKEAIDILDGSRKILDPNYLVIADIEKPLGIAGIMGSLESGISEDTEDIVLESAYFNFETIMGRARALSLHSEASMRFERGVDPAIQEHAIQRFTNLINEIAGGENGPIHSSINKKEMPKNKFITLRKDKIKQILGITIPNQTIKNILNRLDMEIDEKDFGYIGWSVKAPSYRFDINEECDLIEEISRV

SEQ ID NO: 161023 - protein, 423 aa, Unknown
  Bacterial polypetide isolated from the Sargasso Sea
NARDGLITVYAPPGAIIPKSKMKLKIAKIRGVESRGMLCSESELNLSEESAGIIEIENMSNKIGKSFFKSSNEKVIDLSITPNRPDCLGIRGIARDLAAAGVGKLLDLKTNKINQKKNQSIKISITKEKNQGCLAFGSCLIKGIKNQESPKWLKDKINSLGLKPISAVVDITNYVMFDLNRPLHAYDADKIDKEIIVRNSKKGESFSALDDKKYTLQKDMCVIADKSGVLGLGGVIGGTRSGTEIETKNILLESAYFLPSSIRKTSKLLGLETDAKYRFERGIDPNSMIDGLKIATDLILKICGGEASKFNISGKKNYKNKSIDLEVGKFKKTIGFAITDTEIKKILNSLGFSTKSGKKNLKVRIPTWRPDVNQEIDLIEELIRIKGFDKINLVEPEKVRNKETLSFQQKLFHLANDLSPVRA

SEQ ID NO: 161024 - protein, 180 aa, Unknown
  Bacterial polypetide isolated from the Sargasso Sea
MPEVNTEKIFASFLLSVEQVASIDEFNDLEKEYLGKNSLISEERKKLSSMSEISRKKYGKVLQELSTQISERLNQERLSFQSKFFKEKELNDNKDITINWYKDLGSREHVLTSVMNEVVDIFSAIGYTVATGPEAETSWHNFDALNTPDWHPARYESDTLYLDENLEQLLRTQTSTVQVR

SEQ ID NO: 161025 - protein, 387 aa, Unknown
  Bacterial polypetide isolated from the Sargasso Sea
MKIIAQQLLEYFKNKPKVSELSERLFQLGHEHELNKGILDFEITPNRGDCLSLKGLARDLNYFYKAKIEKPIFTKKIQKLNLNFKNKTKDLCPNISFLEVEIAGKTKPYKNYLENYFKSLKINKNNFFTDISNYLAYESGQPTHCFDAEKMNGIFVLEKNKKKSKFLTLLNEEIEIEKNDLVFTLDGKVISLAGVMGGASTSCGKNTYKVLIECAYFKPEEILGQARKYNLNSEAAYKFERGVDFLGQENVLRRFIKIIDDHAEIRSLKFISENKKNNTKSVACDSKKLNEIIGCDINEKEQKAILSSLGFTNGKKVAVPAHRSDIDQINDLAEEITRVVGYNNIPSKALKLPVKAKILNRSFELICRNYLVNNGFFEVINFPFNDN

SEQ ID NO: 161026 - protein, 298 aa, Unknown
  Bacterial polypetide isolated from the Sargasso Sea
MKFTIPWLKEHLETKYKDNKIIEKLTDIGLEVESFGNLSSEIDSFKIAKIINVEQHPNADRLKVCDVDIGQESTVKVVCGAPNARKDLLTVYAGPGSIIPKNKMKLAVSKIRGVTSYGMLCSESELNISEESEGITELKQAKYSNQIGKVFFKSANTKIVDLSITPNRPDCLGIRGIARDLAAAGTGKLKKISSKKIKKNGSQNIKVSIVKDKNQGCTMFGSCLIKGVSNKESPKWLKDKIESLGQKPISAIVDITNYIMIDLNRPLHAYDADKIDKEIIVRNSKKGETFEALDNKEY

SEQ ID NO: 161027 - protein, 72 aa, Unknown
  Bacterial polypetide isolated from the Sargasso Sea
GCGMVHPNVLKNVNVNPDKYQGYAFGIGIDRLGMLKYGINDLRAFFETDYRWLNHFGFDPLDVPSNYRGLSR

SEQ ID NO: 161028 - protein, 76 aa, Unknown
  Bacterial polypetide isolated from the Sargasso Sea
MKFSEKWLREWVNPSLSAHELSEQLSMAGLEVDGVEPVAGDFKGVLVGEVVECGQHPNADKLRVTKINVGGDELLD

SEQ ID NO: 161029 - protein, 782 aa, Unknown
  Bacterial polypetide isolated from the Sargasso Sea
MKFTTEWLKDHLKTNKTEAQIIDKLNSTGLEVEKVETAKNELSDFIIAKIIKAEKHPNADRLKLCHVNVGKKELVKVVCGGPNAKDNLLTIYAPPGSVIPKNNMKLEVSKIRGETSYGMLCSESELNISDESEGIIELNQSYKNKIGKSYFKNNLENVVELSITPNRPDCLGIRGIARDLSASGFGKLINRKSIKIKKTSKQSLKVKIEKNKNQSCKIFGSCFIKNIKNQESPKWLKERIVSLGLRPISAVVDVTNYVMFDLNRPLHAYDSDKINKEIIVRNSKKGESFKALDNKEYKLDDGMCVISDREGVLGLGGIIGGTRSGTELSTKNILLESAYFDPEITRKTAKKLELNSDAKFRFERGIDPQSISIGLEKASEMIVKICGGEVSKSDIQSIKKIEIRKILFDPNLASKTIGIQIKTQEIIKILEDLGFKIKKKSKVLSVEIPSWRPDIYGQIDLVEEIIRIKGFDKIKSFEPEKKRLKPTLNFFQRYFHLAQRAVASKGYLEAITWSFTDEKINNNFRENVEEVKIINPISSDLSVLRNSLYPNLIYYLKKNIDRGFENQSLFEIGPSFTGKKPGEQITIICGIRKEHLLNVFGIKTDVVQTLVELGIDKNETVIETKTPSYYHPGRSGSIITKKDQKLLAYFGEIHPKIINETYGFEIFLENLVKYKSQNKKSKPTISFSDYQKSDRDFAFVVKKDLKAQELIEIISNVDNALIKNVKIFDVYEGKNIPSDKKSIALKVTIQSDFKTLNEKDLNEISNKIISSVEEKASAKLRS

SEQ ID NO: 161030 - protein, 274 aa, Unknown
  Bacterial polypetide isolated from the Sargasso Sea
MSGIESEIEKDKGEEILDISLTPNRADCFSYKGIIQEISALDNAKIKYEDLLNPEIHHKECMKVEVQSKEDCPVFMTRVIKSINKDANTPKWLKKRLEQSGYKSINAIVDIANFVMLETGQPLHTYDLKKINEKIIVRRANDKEAIDILDGSRKLLDSDFLVIADSKKALGIAGIMGSLDSGISDDTENIVLESAYFNYETIMGRARSLSLHSEASMRFERGVDPMIQEYAIQRFTSLINEIAGGSNGPIHSSISKKALPKNKFITLRKDKIKQ

SEQ ID NO: 161031 - protein, 274 aa, Unknown
  Bacterial polypetide isolated from the Sargasso Sea
MRFTKDWLEDHLRTKKSEQEIIDKLNGIGLEVEKVEPVKNELSDFIVAKIIKAVKHPNADRLKLCDVDIGATNTIKVVCGAPNAKDGLLTIYAPPGSTIPKNGMKLEISKIRGETSYGMLCSGSELKLSSETDGIIQLSNKYNNKIGKPYFQGKKNNNVIELSITPNRPDCLGVRGIARDLYASGYGDLKEIKKIKFTKKTKHNLKVKIEKNNNQACSIFGSCLIKNITNKESPSWLKERILALGLRPISAVVDITNYVMFDLNRPLHAYDLDK

SEQ ID NO: 161032 - protein, 502 aa, Unknown
  Bacterial polypetide isolated from the Sargasso Sea
DQNQYKLINDHLLITNGKVPVALAGIMGGYDSAVDDNTKNILIESAYFNPVTVRKGSKALTISTEASKRFERGADPDASLDGFWRVINLVEEYTGGVFEGDFIDYYPEKIKVDPISIRKSELELLLGLKIEDDFITKILKGLGFALTAESSCFNCVPPTNRPDITREIDIIEEIARIYGYDNIPVDNSLYGIYTFHQTDFYSNLQHIRESLSGLGFYQIYSNSLQSENIANISKNNSVPMMNPLSKDMSFLRTSLLPGLLKAADFNIKNSSSSFKLYELGSVHTQLGNKIEDIKENLRLSGIVVGNENSESIHTEITPFDLFSIKGYVYALLKEKLRLKISLEKCENILYDEAYHITFKKGIIGTLGKLSNELFGTLKLDKHDIYGFDLDIDMILSQRETIKYSPINLYPKISRRINLVLDATNSVGPILQLIDKKGGNILIDKYPVEVFEDKENIGENQKSVTFEMVFQDSEKTLEDKDVNPIIDEIIDIADKKFNAKLRV

SEQ ID NO: 161033 - protein, 185 aa, Unknown
  Bacterial polypetide isolated from the Sargasso Sea
MTLSGIESEIEKSKGEEILDISLTPNRADCFSYKGIVQEVSALDNAKIKNVKQALPEIHHNLTMEVDVQSKEDSPVFMTRVIKSINRNAKSPKWLKEKLDQSGYKSINAVVDIANYVMLETGQPLHTYDLKKIKERILVRRAKKKEAIDILDGSRKILDPNYLVIADVEKPLGNCWNHGEAWESG

SEQ ID NO: 161034 - protein, 188 aa, Unknown
  Bacterial polypetide isolated from the Sargasso Sea
MKITSNWLKEHLDTKLDENQIIEKLTDVGLEVESVEKQGGELDEFIVAKILKVEKHPNADKLRVCDVDIGKENPVKVVCGAPNAKEGLFTIYAPPGSVIPKNQMKLVVSKIRGVSSYGMLCSESELNLSDESDGITELSSNDFKNKIGDNYFPKKNSNVIDISITPNRADCLGVRGIAEIWLQQAQVN

SEQ ID NO: 161035 - protein, 205 aa, Unknown
  Bacterial polypetide isolated from the Sargasso Sea
MKFTLKWLLDHLDTTADLKTITDTLTNIGLEIENVEDKSEDFKNFTVAKVTKVEKHPDADKLKVCQVKTKNGDFQVVCGAPNAREGMLGIFAPENSYIPGTELHLKKSKIRGVESNGMLVSEREMGISDEHDGIIEIDSNRKVGDRFSSIFKVDEPVIEINLTPNRSDCLSVRGIARDLAAAGLGKLKDLKFKKIQESFKSPMKW

SEQ ID NO: 161036 - protein, 267 aa, Unknown
  Bacterial polypetide isolated from the Sargasso Sea
MKLTLSWLKEHLDTKYNESKIIDKLTDIGLEVESFENVSSELDSFKIARVINVEQHPNADRLKVCDVDIGQKDTVKVVCGAPNAEKDLLTVYAGPGSIIPKNKMQLTVSKIRGVTSYGMLCSEAELNLSNESEGITELSKNKYSSKIGKNFFKNVSEKVVDLSITPNRPDCLGVRGIARDLAAAGAGKLKNISKNKIKKVGPQNIKVSIKKEKNQGCTIFGSCLIKGVSNKESPKWLKDKIQSLGQKPISAIVDITNYVMLDLNRPL

SEQ ID NO: 161037 - protein, 132 aa, Unknown
  Bacterial polypetide isolated from the Sargasso Sea
HLKGCLNYFIKEFFEVDKIQMRFRPSHFPFTEPSAEVDIGYELKDGKIIIGEGNKWLEILGCGMVHPNVLKNVNVNPDRYQGYAFGIGIDRLGMLKYGINDLRAFFETDYRWLNHFGFDPLDVPSSYRGLSR

SEQ ID NO: 161038 - protein, 625 aa, Unknown
  Bacterial polypetide isolated from the Sargasso Sea
MSDKLLQLGHEHEIEGDIIDLEITPNRGDCLSLKGIARDLNYFYKAELDRDTYDENIPKSDFSFQNKAKDLCPNISFVEIEIDGSISGYKPYLENYFKDLKINKNNFFTDVSNYLAYETGQPTHCYDASKINDTLVLEKRNKKEKFKTLLGSEIELEGDNLVFTIDGIAVDLAGTMGDESTACNNKTTKVLVECAYFKPEEILGKARQYNLTSEAAYKFERGVDYLAQESVLRRFLAIVSDHTKIKSLSMYSEKNKTDLQQINFDSDKLNSILGTNIKEKDQLKYLESLGFSNEKSMMVPSHRSDLEHINDLAEEVARMVGYDNIAAESLALGIKVKSMEQSLEEKCKNLFVSHGFFEVINMPFTADESESSISVDNSLDKQRAKLRTNLMNSLKNNLAYNQNRQKDSIKFFEIADIYTKTRQEKRMAALINGRSNKNFKEFNAQLDYAYLKGLLNTIALELLGEELTYSHDSCDEYEFFEHIDFKGKDIGGIGKLNNSLIDSKSKTPVFAFEISLENLNLSEKKIEKTSDFPAIFRDISMSIDNPEVLKELSETLAKSIRKMPLIKESFIFDYFENKKLNVMKVGYRFKFQTEDKSLTDKEVDALMKVLTDNALSINGVNIEGL

SEQ ID NO: 161039 - protein, 194 aa, Unknown
  Bacterial polypetide isolated from the Sargasso Sea
MSLDKTIKGLKASFSKELSKSKTSSDLEKFRIKYLGRNGKLASLFEEFNKLPASEKPRFGKELNILKNELSSMYQDVVGGSKGSSISSNTDFSLPGYNLPDGNIHPLEQITYEIKSIFQSIGFSVAYGPEIDDDYHNFEALNVPKHHPARDMQDTFFINPITVLRTHTSNVQIHLMENQDPPLRHICCGRVYRN

SEQ ID NO: 161040 - protein, 199 aa, Unknown
  Bacterial polypetide isolated from the Sargasso Sea
MKFTLSWLKEHLETKAKIDVITDTLTNIGLEVENIEDKENDYKDFTIAKVISADKHPNADRLKVCKVETSKGNVQVVCGAPNAKSGMFGVFAPSDTYIPGTNINLKKSEIRGVESNGMLLSERELGISDEHEGIVELEGKHRIGDSIASIYGFDDPIIEINLTPNRSDCLSVRGIARDLAAAGLGTLKDLKIKKIKGQF

SEQ ID NO: 161041 - protein, 103 aa, Unknown
  Bacterial polypetide isolated from the Sargasso Sea
YFPFTEPSAEMDVAYTKKNNVLKIGEGDEWLEILGCGMVNPKVLENCNIDSSVYQGFAFGMGIERLSMLKYGITDMRGLFDLNLKWLDHYGFSPLDLKTRSEI

SEQ ID NO: 161042 - protein, 236 aa, Unknown
  Bacterial polypetide isolated from the Sargasso Sea
MKFTLSWLKDHLDTNKNLEIIVDTLTNIGLEIESVEDKSKEYNDFTVAEVLKAEKHPDADRLKVCTVKSIDGTFQVVCGAPNAREGMKGIFAPENSFIPGTGLKLKKSNIRGVESCGMLVSEKEMGISDEHDGIIEVESKHSLGEKFIEVFNLDDPVIEINITPNRGDCLSIRGIARDLSAAGLGKLKDNTLIKNIEGTFDSPVKWEKDFNGDMEYICPGVAGRYFKNVTNKESPA

SEQ ID NO: 161043 - protein, 561 aa, Unknown
  Bacterial polypetide isolated from the Sargasso Sea
GAGKLKDISKKNIKKNGPQNINVSITKDKNQGCTIFGSCLIKGVTNKESPKWLKDKIESLGQKSISAIVDITNFVMLNLNRPLHAYDSDKIDKEIIVRNSKKNETFKALDNKEYKLEDDMCVISDKSGVLGLGGIIGGTRSGTELNTKNILLESAFFLPKSIRKTSKQLNIDTDAKFRFERGIDPNSIELGLTEAANLITEICGGTISKFDIQKTQKYKNNKIKFKISMIEKVAGFKVSEKNIIKILKDLGFEISKKKLELELKIPSWRPDITQPIDIVEEIVRMKGYNNIQTLEPEKNRIKDTLNKKQKLFHFLQRSVASKGYYETVTWSFTDSKINELFKENYKEIKIVNPISSDLNVLRNSIFPNLMFYLKKNLDRGFKDISLFEIGPIFKNNQPGEQLTVIGAIKSGKIFRNNWNEKERNVDVFDAKKDVFQTLVESGYNKRSFFMRDKSPNYYHPGKSGSLYLDKDDIDPVAYFGEIHPNVVKKLDIKTEALVSFEIYLDNLKNNKIKLKDQKLNFEYSDYQKSERDFAFVVDKNFKAQDLTEIIYSVDKQLIRSV

SEQ ID NO: 161044 - protein, 780 aa, Unknown
  Bacterial polypetide isolated from the Sargasso Sea
ANFEEIEKKLTSIGLEVENMQDMGKAYQDFIVGQILEEKKHPNADKLKLCKVDIGKEKVDVVCGAPNVEKGMKVVYAPVGSTIPVNQMKIKAAKIRGVESYGMMCSEYELGISNEHDGIIRLEEKETIGRSFSEIYGLNDIVIEIGITPNRQDCLGVKGIARDLASAGMGELLERKISREKGSFKSPIKIEIQDNKICSAFVGRYFRNVKNTESPEWLKNKLKSIGLRPISALVDITNFVMYDENRPLHVYDADKIDGKIIVRKANDGESFLALDEKDYQLKNGMCVIADEKKVLGLGGIMGGESTGCSTETKNVLLESALFDEINTAKTGRNLSILSDARYRFERGIDPNSTLKGIDLATQLILEICGGECSEVELAGNIKENKNEISTSSSYISRRLGFEVSDKELISILSSLGIETSQTGDVIKCSIPSWRQDIHGEADISEEVIRIKGYENIPTSNIRLKSKINKNILNYAQKKLMKARHFIASIEYDELVTFSFTDSKNCEVFGDINKLKIVNPISEELDILRPNLLPNLLQAIKKNKNRNFDSFSIFEIGSQYRSTSPEDQLNVACGIKSGIKTEKSWKNMQTEFDIYDVKQDLTSLIDYLMPGNKKISVSNDCPSWYHPGRSGSIKINNSVIAGYFGELHPRVANQFKIKNKTNIFELYLDELPNTEKKTTNKPVLNLSDFQIVTRDFAFVIDKKVKSEEVVTSAFKVDKELIRNVEIFDLFEDDSLGKDKKSIAIKVTLQSNEKTLAENDISEISSKIIKSVEKSTSGTVRS

SEQ ID NO: 161045 - protein, 127 aa, Unknown
  Bacterial polypetide isolated from the Sargasso Sea
MQLTHQVFHQIEGLAVDENLTFSDLKGTLEYFVQEFFGKGIKTKFIPHFFPFTEPSAEVLVSWKDGEWLEILGCGMVDPNVFQHVGYDKNSQGFAFGVGVERLAMIRYKIDHIKNFYENDLRFLRQF

SEQ ID NO: 161046 - protein, 642 aa, Unknown
  Bacterial polypetide isolated from the Sargasso Sea
DLSITPNRPDCLGVRGVARDLAAAGAGKLKKISFKDIKKNGSQKIKVSIRKDKNQGCTVFGSCLIEGVSNQESPQWLKEKIVSLGQKPISAIVDITNYVMLDLNRPLHAYDADKIDKEIIVRNSKKGETFKALDNKDYKLDDDMCVISDNSGVLGLGGIIGGTRSGTEINTKNILLESAYFLPRSIRKTSKLLNIDTDAKFRFERGVDPQSIEIGLTKAARLISEICGGKISKFDIQKTAKHEKNKIKFNISLFEKITGFKVKDKEVIEILTDLGFEISRKKFELDLKIPTWRPDITQPIDIVEEIVRIKGYSNIETLEPEKTRIKDTLNKQQKLFHFLQRSVASKGYFETVTWSFTDSKINTLFKENLKEIKIVNPISSDLDVLRNSIFSNLSFYLKKNLDRGFKDISLFEIGPIFKDRKPGQQLTVIGAIKSGKISRLNWKEKERLVDVFDVKKDVIQTLVEAGYNKQSFFIRDKSPTYYHPGKAGSVYLDKDDIEPVAYFGEIHPNIIKKLDIKTEGLVGFEIYLDHLKDNKIKLKDQKSNFEYSDYQKSARDFAFVVDKNYKAQDLIEIISSVDKNLIRSIKIFDVYEGENIPNDKKSIALNVTIQSSQKTLEESDLEKINKLIISTVESKSGAKIRS

SEQ ID NO: 161047 - protein, 307 aa, Unknown
  Bacterial polypetide isolated from the Sargasso Sea
MIDHNTLPGNINELAVKQYLDMSIPPIDDYSWSYTLDLPEQIIAKPTHINIKPNAHAIYYDWQTRSFQLDPEKDSLYNVPITDWEYIFEIEKISQVFSSNIDLEISEDKSEFDLKMKRGQFKISKTSFSATPGKQLDDRSSLSLPEFLLEANDLVLNGSFSGTPIIHRGKGKFRIRNFEIKIPKGIKEEPEIDAMLKTLGIWNNSLMIRLIEFDINLINEFTGDMGFRFQTPFLKISVDGDFSLRQTDSIPKLVLHDTEVRIHPISLGMRKWLREWEQKNGKDFDRQGATIVLKINGPIENPIIQGY

SEQ ID NO: 161048 - protein, 462 aa, Unknown
  Bacterial polypetide isolated from the Sargasso Sea
RYKRFLQIKFRLSKSVQMKILLENIFENINKDVSKDNLSSAFFQLGHEHLMEDDYIDFELTPNRGDCLSVQGLLRDLNVLYETNHNYPIYENEITKLNINFKNFSEEDCPSISFLRLEIEDETKKYKDYMENYFSKLGVKKNNFFTDVSNYVLYELGQPTHCYDAKKINNEIIFDKINKNIKFTSLLNDEIELDGENCVFISEGEVINLAGIMGGLSSACSRDTKTVLVECAFFNPKAIIGKSTKYKLNSDAAYRFERGVDIDFQEYTLRRFIKIVEDHAHIKKLEMTSFNYKKKKEVKIENNFKKINSILGTNITQLDYQEILKKLNFSFEENIIPPSYRNDITNQNDIAEEIARSIGYNSIKNERFELKKSQSNKLISKISSLKSYLASKNFNEVINIPFESKGCRDAIIIDNPLDSSKKYLRTSLKESLVENLLYNERRQKDSIKLFEVSNVYRKVDNK

SEQ ID NO: 161049 - protein, 164 aa, Unknown
  Bacterial polypetide isolated from the Sargasso Sea
MVRGLDYYTGFVFEAISSELGAQDAYLGGGRYDELCSQLGGKDLPAIGMAIGIERLASIANTNEINKTLVSFIILSNKVEQKAYKIAHDLRSVNKKLNLDIQLSDGSLKSKLRRANKDNASYALIVGEEELKSNTVIVKSLLDENSEQSNMNINELHDFIKSIV

SEQ ID NO: 161050 - protein, 167 aa, Unknown
  Bacterial polypetide isolated from the Sargasso Sea
EYYTGVIFEVNLKFDVTNNKGQVIKFGSIGGGGRYDNLVNNFGNFEAPATGISIGLDRLVYALIQKKEFKVKQSKPVVICVFDKNSMKEYINIQTILRKADISAEIYPGESKLKKQMEYANKIKSPAVILYGEDEIKSGKLTLRNLSSGKERSIKISELVYEIKKNI

SEQ ID NO: 161051 - protein, 331 aa, Unknown
  Bacterial polypetide isolated from the Sargasso Sea
IGSFLAEDENNPMSDVFTFDDGEKNITLRYDLSSPLARFVAQNNQKLPSIYKRYAIQNVFRNEKSGNARYREFTQADCDIVGNVNPAQANAELCNLISNTLVDCGLKKDQFTINVSNRKIVQGLIEDLKIEKDKQIKVMRAIDKLDKPGFGLKGVEELLKEERKDKSGAITKGANLSDDQALKILNFLKIKDLKKLKENFKNPVTQEGIKELEELFEVLNFGNYSDQVKTNFTIVRGLDYYDGFCVETNLNFKAKNIKGKEVDIGSICSGGQYNKLISRFKGVDIPGTGISIGVDRLLFVMMQLNQIEVDTQNPVIVCVMDEKYLINYYEI

SEQ ID NO: 161052 - protein, 142 aa, Unknown
  Bacterial polypetide isolated from the Sargasso Sea
FGSIGGGGRYDNLVSNFGNLDCPATGISIGIDRLVYALMQKKDFKMQSTRPVVICVFDKSNIEKYVEILKNLRSSNISSEIYPGEGKLKKQMEYANKIKSPCVIFYGDDEIKKAQVKLRNLKTGEESSIKIKNLVNEIKKII

SEQ ID NO: 161053 - protein, 209 aa, Unknown
  Bacterial polypetide isolated from the Sargasso Sea
SKAFGSNNPEQDVEIIAIAWKILSLCGLAKDTTLNLNSIGSKECRNNYRKALKNYIDPYIKDFSKTSQHRFETNPLRILDTKSEKEQEILNDAPKISDYHNETDSTHFESLKEFLKDIDLPFSINHKLVRGLDYYTGTVFEFNSVNLGAQDALLGGGRYNGLVETLGGKPTPGIGFAAGMERFLIAMEQSNFNIKKSNPDIYFICADKK

SEQ ID NO: 161054 - protein, 48 aa, Unknown
  Bacterial polypetide isolated from the Sargasso Sea
MSFNIPRGTQDILPDEVTKWQHIENTARQLFKAYHFQEIRTPILKIQM

SEQ ID NO: 161055 - protein, 230 aa, Unknown
  Bacterial polypetide isolated from the Sargasso Sea
EGRKDKSGDYTKGANLSNEQIKTIESTLRGKIPDSDDILEILKIFEAYNFKNYKFDPSVIRGLEYYTGPIFEVNLNFQVKNSKGQTIQFGSIGGGGRYDNLISNFGNLDCPATGISIGLDRLVFALMQKKDFKIKSTRPVIICVFDKDKAKEYIGILNKLRASNISSEIYPGEGKLKKQMEYANKLGSPAVILYGDNEIKSGKVTLKNLESGNESSVKIEEIANEIKKLL

SEQ ID NO: 161056 - protein, 245 aa, Unknown
  Bacterial polypetide isolated from the Sargasso Sea
KIDRLGWDEAKKLLGEGRKDKSGDYTKGANLSNDQIKTIESTLRGKIPDSEDILEILKIFEFYNFKNYKFDPSVIRGLEYYTGPIFEVNLNFQVKNSKGQTIQFGSIGGGGRYDNLVNNFGNLDCPATGISIGLDRLVFALMQKKDFKIKSTRPVIICVFDKNNVKEYVDILNKLRASNISSEIYPGEGKLKKQMEYANKLGSPAVILYGDNEIKLGKATLKNLESGNESSVKIEEIVNEIKKLL

SEQ ID NO: 161057 - protein, 290 aa, Unknown
  Bacterial polypetide isolated from the Sargasso Sea
TKNLQADAELCVLISEILEKCGLDKKDYTVKISSRKLTDKLFKKLKITSKEQISTTLRALDKIDRLGWDEVKKLLGEGRKDKSGDYTKGANLSNDQIKIIESTLWGKIPDSEDILEILKIFEFYNFKNYKFDPSVIRGLEYYTGPIFEVNLNFQVKNSKGKTIQFGSIGGGGRYDNLVNNFGNLDCPATGISIGLDRLVFALMQKKDFKIKSTRPVIICVFDKNNVKEYVDILNILRASNISSEIYPGEGKLKKQMEYANKLGSPAVILYGDNEIKLGKATLKNLESGNE

SEQ ID NO: 161058 - protein, 163 aa, Unknown
  Bacterial polypetide isolated from the Sargasso Sea
KILVRGLDYYCHTAFEFITNELGSQGTVLAGGRYDGLSKMLGGVDVAGVGWAAGIERLALMVQSKYVSKPDVVLIGLSENINYLLLTMMNQLVKEGLKVEIIYTGNISKKFKRAHKIQASYALILGEDEVNKRIIKLKNLSSGHEELMSLSKATKIMKNKLQV

SEQ ID NO: 161059 - protein, 147 aa, Unknown
  Bacterial polypetide isolated from the Sargasso Sea
GQVIQFGSIGGGGRYDNLVNNFGNYDAPATGISIGLDRLVYALMQKKEFKIKQSKPVVICVFSKNSMKEYIDLQKLLREAGVSTEIYPGEGKLKKQMEYANKINSPAVILYGEDEIKSGKPTLRNLSSGDERSIEIKELVNEIKKII

SEQ ID NO: 161060 - protein, 290 aa, Unknown
  Bacterial polypetide isolated from the Sargasso Sea
FREFMQCDIDVVDTREVPLHFDVEIPAIMNQTLKSIDAGPVFTKINNRKILEGYYSGLDMENTSAAIRLIDKVDKIGFDGVADLLRIELGLNTKTIDKIFQLTQICGSGQQVADQIQNLGVHSELLDQGLTELTFVMQELEHIDNKAFSVDLSIARGLAYYTGTVYETRFAEYPAYPSICGGGRYDNLVGDFVSKRLPGIGISIGLSRIFAKLLKEKRIKTDKKSPTEILVIHSRGAPYRLVNKTAQTLRQRGFNVEQYHEDRKLNAQLKYAEVKGIPWIWFPPVNIDGE

SEQ ID NO: 161061 - protein, 283 aa, Unknown
  Bacterial polypetide isolated from the Sargasso Sea
QLKITDQKQKQKVLRAIDKLDKKNFGILGVTDLLREKRTDESGAVTVGAKLSETQTSEIISFLKIKDLKKLKSNLKDSLSQEGIKETEDLLENLRYGEYADLINFSGKICRGLDIYTGFIVETNLTFDVKNSKGKVIAPGSVASGGEYLVSKFKGDNFLGSGISIGITRLNYCVEQLNQIEADESKPVLICVMDENLLPKYYELLKLLRNNNINSEIFLDPKKNLTKQLTYANKRQLQLAIIVGENEVQNNTVTIKNLLGVKGEENQFNVSMKDLVDEIKKLI

SEQ ID NO: 161062 - protein, 203 aa, Unknown
  Bacterial polypetide isolated from the Sargasso Sea
MNLELNSIGLDKKPSDTKVIVAMSGGVDSSTVAGLMKMQGYNVTGITLKLYNDSKEVVKSKVCCSGQDVIDAKRVAHKLDIDHKILYYQDKFKQGVIDNFVESYLKGETPIPCVQCNQTVKFKDLYEVAKDLNADALITGHYVKNITINEKNNMYRAVDENRDQSYFLFNTTREQLNYLRFPLGGMLKKETRDIAKKLNLNVA

SEQ ID NO: 161063 - protein, 283 aa, Unknown
  Bacterial polypetide isolated from the Sargasso Sea
NVFRNEKSGNARYREFTQADCDIVGNVNSAQANAELCNLVASTLIECGLKKDQFIINVSNRKIVQGLIEDLKVEKDKQIKVMRAIDKLDKPGFGLKGVEELLKKQRKDKSGAITKGANLSDEQATKILNFLKVKDLKELKENFKNPITQEGIKELEELFEVLNFGNNSDQVKTNFTIVRGLDYYDGFCVETNLNFKTKNMKGKEVDIGSICSGGQYNKLISRFKGVDIPGTGVSIGVDRLLFAMTQLNQVKIDLQNPVIVCVMDVRYLKNYYEILDNLRKNGY

SEQ ID NO: 161064 - protein, 122 aa, Unknown
  Bacterial polypetide isolated from the Sargasso Sea
MKLRSVRGTHDIFGKEIDKFNRISNIVSKNANLKEYKEIQTPIFEFSDLFAKPLGEHSDVVLKEMYSFEDRNNEYLTLRPEYTTPMIRAAITNNLLNDLPLKIYGIGPMFRRERPQKGRYRQ

SEQ ID NO: 161065 - protein, 183 aa, Unknown
  Bacterial polypetide isolated from the Sargasso Sea
ITLKNYKFDPSVIRGLEYYTGPIFEVNLNFEVKNSKGQAIQFGSIGGGGRYDNLVSNFGNLDCPATGISIGLDRLVFALMQKKDFKIKSTRPVIICVFDKDKIKEYIDILNKLRASNVSSEIYPGEGKLKKQMEYANKINSPAVILYGDDEMKSGKATLKNLETGKESSVKIEDLANEIKKLL

SEQ ID NO: 161066 - protein, 138 aa, Unknown
  Bacterial polypetide isolated from the Sargasso Sea
GGGGRYDNLVSNFGNLDYPATGISIGLDRLVFALMQKKDFKLKSTRPIMICVFDKNNNKQYVEILNKLREANISSEIYPGEGKLKKQMEYANKTECPGVIFYGDDEIKKAEVKFRNLKTGEETSIRVENLSNEIKKLI

SEQ ID NO: 161067 - protein, 245 aa, Unknown
  Bacterial polypetide isolated from the Sargasso Sea
FKNESKKYSYFGKMFRYENPQKNRYREFVQAGAEIVGTIDEYSNLQILKTSIRFLKLLKVNSKLNINTIGTKEEREEYISELDKYFNKNKKELSKESVDKIGKNTLRILDSNDPFDKQIIDLAPVIYDFLNDDTLTQYETFKKELTKEGIDFVENPKLVRGLDYYNDLTFEFVANGTVVGGGGRYDSLSEILGLGKLSGVGVAFGVDRLINIVKSIPSKTRVMLIAQNLTDLNLVSSKLDKAGIG

SEQ ID NO: 161068 - protein, 182 aa, Unknown
  Bacterial polypetide isolated from the Sargasso Sea
FDELCVLLDTLNIKYEVDSFLVRGLDYYSRTTFELLSPSLGAQNAICGGGRYDKLVEMIGGKPTPGIGFAAGIERIMMTLQNYPDNNSIDIYVVGIGPKVKQTVFALTDELRQSNLSTECDMLRRSIKSQLREANKIGAKYAIIIGDKEFENKLVEVKNLKNGEQEKVAIKSIIGHMTSLSF

SEQ ID NO: 161069 - protein, 161 aa, Unknown
  Bacterial polypetide isolated from the Sargasso Sea
MSRLQPARGTADILPNNMAKHRLVIEAARTAASRYGFQEMATPIFEFSEVFSRPLGETSDIVTKENYSFTDRGGEMLTLRPENTAGVVRAVISGGLTQNLPLKYFYAGPMFRYERPQKGRLRQFHQVGIEYLGPDHSLADAEIIACGARLLAALGVLDDCV

SEQ ID NO: 161070 - protein, 294 aa, Unknown
  Bacterial polypetide isolated from the Sargasso Sea
QSNLIDAELCVMVVNILRRLGLNDSQFKIKYSNRKIWTSLFEKINASKEVESKILRAVDKKDRLGDEGVKELLCEGRKDKSGDFMEGVGLDSEQASMILDFMNDQKQTSDDIDEFNSYLENFADYPISFDPSIVRGLDYYTGMIFEAELLIDVKNTKGETIVFGSVAGGGRYDKLISRFGKEDVPATGISVGVDRLIVALEQLDLIKAKSRPLVIVANLGDNNLSEYIRIASEIRDAGMACEISFGSKNLAKQLKYCDRKQADAVVIAGDDEIKNNKISLKDLKEGSEISKNIT

SEQ ID NO: 161071 - protein, 111 aa, Unknown
  Bacterial polypetide isolated from the Sargasso Sea
MEKINSLTGMTDLIETKADENVLANKVFQTEKILKGIFTNYAMSEIRTPALENTNLFKRSVGDTSDIVNKELYTFSDKNDKSITLRPEGTASVMRSIIEKKLDGETHKLWY

SEQ ID NO: 161072 - protein, 262 aa, Unknown
  Bacterial polypetide isolated from the Sargasso Sea
EIPKPFKRYQLGSVWRNEKPGPGRFREFLQFDADYVGTKNLQADAELCVLISEILEKCGLDKKDYTVKISSRKITDKLFEKLKITSRDQVSTTLRALDKIDRLGWEEAKKLLGEGRKDKSGDYTKGAKLSNDQIKTIESTLQGKSSDSEDILEILKIFEAYNFKNYKFDPSVIRGLEYYTGPIFEVNLNFQVKNSKGQNIQFGSIGGGGRYDNLVSNFGNLDCPATGISIGLDRLVFALMQKKDFKIKSTRPVIICVFDKDK

SEQ ID NO: 161073 - protein, 183 aa, Unknown
  Bacterial polypetide isolated from the Sargasso Sea
DDKKISYIQNSNLVRGLDYYNKTVFEYIDNTENSQNTICAGGRYDYLFESLCGKEVPALGFAIGIERLMDFINLPITNNQIVQFYLIVLDEENHSYSQTVAKIIRSTSEKFTVLHSYSYKNLKTQLKKADKLSLDYCVIIGNEERKKNICQIKKMNSGEQEDICIDKLTDFLKEKIIAGIQDE

SEQ ID NO: 161074 - protein, 327 aa, Unknown
  Bacterial polypetide isolated from the Sargasso Sea
LPDKDRPDQGVFSFKDERIWLSLRYDLTAPLARYVAKNYLELAKPFKRYQLGTVWRNEKPGPGRFREFLQFDADYVGTKNLQSDAELCVLISEILEKCGLDKKDYTVKISSRKFTDKLFEQLKVKSKEQISTTLRALDKIDRLGWEEAKKLLGEGREDKSGDYTKGANLNKEQIKVIENALNNKTSESEDVLEIIEIFKGYNFKNYKFDPSVIRGLEYYTGPIFEVNLNFEVKNSKGKAIQFGSIGGGGRYDNLVSNFGNFDCPATGISIGLDRLVFALMQKKDFKINSIRPVMICVFDKNKIYDYIKILKSLRASNISSEIYPGEG

SEQ ID NO: 161075 - protein, 263 aa, Unknown
  Bacterial polypetide isolated from the Sargasso Sea
FTIKFSSRKILEGLLDRYEIKTKERRLKVLRSLDKVDRLGWKEVKKLLSSGRKDESGDFTEGADLTKDMIDDLQSQLKYDDDGTFAYDEWDKKVNESAYNDVKKLKENFDFYGLKNIKFDPTIIRGLEYYTGPIFEVNLNFEVKNIKGENINFGSIGGGGRYDNLVSNFGNFDYPSTGISIGIDRLVYALTQKKDFNLKPSRPVVICIFDQKNIKNYFDILNKLRLSNISSEIYPGEGKLKKQMEYANKIKSPCVIFYGDDEI

SEQ ID NO: 161076 - protein, 143 aa, Unknown
  Bacterial polypetide isolated from the Sargasso Sea
NLSHIKLCDMKMVYDLNELEETHKTYVEEGYEGLIIRSQDGKYEPDHRSSSLLKLKSFKDDEFEIVGFKEGKGNDKKTIIFTCQTMSDKKLFEVRPRGTRDERMKMFKNGNSYIGKNLTVKYFELTDEGIPRFPVGIAVRDYE

SEQ ID NO: 161077 - protein, 226 aa, Unknown
  Bacterial polypetide isolated from the Sargasso Sea
DLKDISLHINSLGSTDERAKYSTKLKDYFNKYSNSFNNQQINTINRNPLRLLDNKDSKLEDVINNSPVISDYLGKSSLSRFEDITNSLSILGIDFTLDTRLVRGLDYYNDLVFEWKTDKLGTQDAICAGGRYDSLSKSISDIEIPAVGFAMGVDRIVELININNIEHVIGLSVITDNKADLHKVSSQLRQTNTKFRLVQMDIDKSLSKQIKSAVKHNCDILIIVGS

SEQ ID NO: 161078 - protein, 176 aa, Unknown
  Bacterial polypetide isolated from the Sargasso Sea
FDPSVIRGLEYYTGPIFEVNLNFEVKNIKGQTIQFGSIGGGGRYDNLVSNFGNLDYPATGISIGLDRLVFALMQKKDFNIKATRPVVICVFDQNNTKQYVGILNKLRSSNISSEIYSGEGKLKKQMEYANKIQSPCVIFYGDNEEKKAEVKLRNLKTGEELSVKIENLINEIKKII

SEQ ID NO: 161079 - protein, 306 aa, Unknown
  Bacterial polypetide isolated from the Sargasso Sea
SLRYDLTAPLARYVAKNFNEIPKPFKRYQLGTVWRNEKPGPGRYREFLQFDADFVGTTSLQADAELCVLISEILEKCGLDKADYTVKISSRKFTDKLFEKLKIKSKVQISTILRALDKIDRLGWEEAKKLLGDGRKDKSGDYTKGANLINEQIKIIENALKSDVPDSEDVLEIIKIFEAYNFKNYKFDPSVIRGLEYYTGPIFEVNLNFDVKNLKGQTIQFGSIGGGGRYDNLVSNFGNLDCPATGISIGLDRLVFALMQKKDFKIKSTRPVVICVFDQNKTKQYIDILNKLRSSNISSEIYPGER

SEQ ID NO: 161080 - protein, 220 aa, Unknown
  Bacterial polypetide isolated from the Sargasso Sea
TKGANLSSQNIDVIEKELKKKTPETEDLKEVLKIFKDYNFNNFEFDPSIIRGLEYYTGVIFEVNLKFDVTNNKGQVIQFGSIGGGGRYDNLVNNFGNYDAPSTGISIGLDRLVYALMQKKDFKIKRSKPVVICVFNKNSMKEYINVQTILRKADISVEIFPGENKLKKQMEYANKIKSPAVILYGEDEIKLGKPTVRNLASGSEQSIEIKELVNEIKKII

SEQ ID NO: 161081 - protein, 244 aa, Unknown
  Bacterial polypetide isolated from the Sargasso Sea
MKLLKVNSKLNINTIGTKEEREEYISELDKYFNKNKKELSKESVDKIGKNTLRILDSNDPFDKQIIDLAPVIYDFLSDETLAQYETFKKELMKEGIDFVENPKLVRGLDYYNDLTFEFVANGTVVGGGGRYDSLSEILGLGKLSGVGVAFGVDRLINIVKSIPSKTRVMLIAQNLTDLNLVSSKLDKAGIGYLLPVRDSKENTQYKEAIKNNVDYVINCSENTIKNINNNESIKFNISNLRKLL

SEQ ID NO: 161082 - protein, 330 aa, Unknown
  Bacterial polypetide isolated from the Sargasso Sea
KEVMIKYVFQYLETPSFEYSDSIGKFYPDKERPDSGVFSFKDENKWMSLRYDLTAPLARYVAKNYLEIPKPFKRYQLGAVWRNEKPGPGRFREFLQFDADYVGTKNLQADAELCVLISEILEKCGLDKKDYTVKISSRKLTDKLFQNLKITSKDQISTTLRALDKIDRLGWNEAKKLLGEGRKDKSGDYTKGANLSNDQIETIETTLKDKIPDSEDILQIIKIFEAYNFKNYKFDPSVIRGLEYYTGPIFEVNLNFQVKNLKGQTIQFGSIGGGGRYDNLVSNFGNLDCPATGISIGLDRLVFALMQKKDFKIKSTRPVIICIFDKDKIK

SEQ ID NO: 161083 - protein, 128 aa, Unknown
  Bacterial polypetide isolated from the Sargasso Sea
MVKVEKINLGDYTKGANLKNDQIKIIENALKSTAPDSEDVLEIIKVFQAYNFKNYKFDPSIIRGLEYYTGPIFEVNLNFEVKNSKGQPIQFGSIGGGGRYDNLVSNFGNLDCPATGISIGLDRLVFAL

SEQ ID NO: 161084 - protein, 202 aa, Unknown
  Bacterial polypetide isolated from the Sargasso Sea
LKNFLSSQSSDIFSEFKDNCKELKIPIVVDDNLVRGLDYYNNICYEFVSKDIGSQDSFLAGGRYDGLIKKMGGPDYPGCGFAAGVERIRLLCSKNFKLPVDINYVAIAIGNKNKIRAMKIINKFRDEFEFNKYFSIDFICRDDLSKGLRYASEKKADFALILGDDEILKKEITIKELKSRKQIKINISNLFNYLLEPKKIKF

SEQ ID NO: 161085 - protein, 178 aa, Unknown
  Bacterial polypetide isolated from the Sargasso Sea
YKFDPSVIRGLEYYTGPIFEVNLNFEVKNSKGQAIQFGSIGGGGRYDNLVSNFGNFDCPATGISIGLDRLVFALMQRKDFKIKTIRPVVICVFNKKQNKEYVAILNTLRMSNISSEIYPGEGKLKKQMEYANKIGSPAVILYGDDEIKAGKATLKNLKSGKETSVTIESLSDEIKKII

SEQ ID NO: 161086 - protein, 77 aa, Unknown
  Bacterial polypetide isolated from the Sargasso Sea
EICLKTFKSFNYKEFRTPLLENSALFSRSIGLTSDIVQKEMYEFKDKKGERLCMRPEGTAGLVQALITNGLDDEQIK

SEQ ID NO: 161087 - protein, 292 aa, Unknown
  Bacterial polypetide isolated from the Sargasso Sea
SEILEKCGLDKKDYTVKISSRKFTDKLFEQLKIKSKEQISTTLRALDKIDRLGWGEAKKLLGGGRKDKSGDYTKGANLNNDQIKIIENALKSKTSDSEDVLEIIRIFEDYKFENYKFDPSVIRGLEYYTGPIFEVNLNFEVKNSKGQAIQFGSIGGGGRYDNLVSNFGNFDCPATGISIGLDRLVFALMQKKDFKIKTTRPVVICVFDKNRNKEYVGILNKLRMSNISSEIYPGEGKLKKQMEYANKIGSPAAILYGDDEIKSGKATLKNLKSGKETSVTIESLSDEIKKIL

SEQ ID NO: 161088 - protein, 287 aa, Unknown
  Bacterial polypetide isolated from the Sargasso Sea
GFSAVTELLGKGRKDKSGDFTKGAELKNEQIDKIINFLKQGDKSQKTDRKSALEKLEKDFCDSDKFSDAVIELLAISDILDGAGYNEDRVAIDPSVVRGLGYYTGPVYEADLIFPKNNDLQNFGAVGGGGRYDSLVERLKGVKVPATGISIGVSRLMTALKLLDQKVNNKSEIDVVVLLMNKDDQVYYFNLASKLRDQGLLADLYVGDGSMKAQLKYADKRNAKIALIIGDDEKQNNTVTIKDLNKGKQLSKDISKNEEWRSSKDTQVNVPQEEMIKTIKSILSKSS

SEQ ID NO: 161089 - protein, 294 aa, Unknown
  Bacterial polypetide isolated from the Sargasso Sea
MPKGFKDNDEITISVRKKVSKTIEEVCQNFGFRELETPAFEFTEALGKFLPDIDRPSGGVFSIQDEDNQWISLRYDLTAPLARFVAANYQNIVKPFKRYQSGNVWRNEKPGPGRYREFRQFDADVIGVQSANIDAELCVMVAKIFEKLGLSSKDYRIKYSNRMIWNDLFNETDIPLNQISDVLRAIDKLDRFGEDGVRELLTTGRKDQSGDVMSGVGLSDEQAESIVQFIKNGDKSNEQILDFENYLSNFPNLSIDFDPSVVRGLDYYTGMVFEAELLFKVKNNKGVDVVFGSV

SEQ ID NO: 161090 - protein, 137 aa, Unknown
  Bacterial polypetide isolated from the Sargasso Sea
MGGGRYDNLSKQLGGKDMHSIGFAIGAERIIELVNMDDSNEKIKVGFIVSEQQINQKTYKIADDLRSANSSIILDTFLSGGSMKSQLRKANKCGCSYAIIIGEEELKSNQAIWKDLREDGGQELLSLQELINQYINL

SEQ ID NO: 161091 - protein, 289 aa, Unknown
  Bacterial polypetide isolated from the Sargasso Sea
GYDLIELPTIEHKELFDKSIGENSEIVTKQMYEFKDKGNRDLVLRPEATASVVRFHNEFFKNESKKYSYFGKMFRYENPQKNRYREFVQAGAEIVGTIDEYSNLQILKTSIRFLKLLKVNSKLNINTIGNKEEREDYISELDKYFNKNKRELSKESVDKIGKNTLRILDSNDPFDKQIIDLAPVIYDFLSDETLAQYETFKKELTKEGIDFVENPKLVRGLDYYNDLTFEFVANGTVVGGGGRYDSLSEILGLGKLSGVGVAFGVDRLINIVTSIPSKTRVMLIAQKFV

SEQ ID NO: 161092 - protein, 228 aa, Unknown
  Bacterial polypetide isolated from the Sargasso Sea
MNKEKQIKATLPSGFKDRSGDELALKKKLLDIIEKNFIKFGFSPLETSPMELSSVIGNSLAEDDDNPMADIFTFDDSGTDISLRYDLSQGCIRYYSQNYLKLPNPYKRYQVGETVYRREKPGNGRFKSFGQCDVDIIGKFDVKQANAELCNIIASTFIECGLKKSEFVINVSNRKVIQGLMDELKIVDEKQKQKVLRAIDKLDKEGFGIKGVEELLKTERKDSSGAIT

SEQ ID NO: 161093 - protein, 250 aa, Unknown
  Bacterial polypetide isolated from the Sargasso Sea
LRALDKIDRLGWGEAKKLLGEGRKDKSGDYTKGANLNSDQIKIIENTLKSKTPDSEDVLEIIKIFKDYNFKNYKFDPSVIRGLEYYTGPIFEVNLNFDVKNSKGQAIQFGSIGGGGRYDNLVSNFGNFDCPATGISIGLDRLVFALMQKKDFKIRTTRPVVICVFDKSKNKEYFEILNKLRMSNISSEIYPGEGKLKKQMEYANKIGSPAVILYGDDEIKSGKATLKNLESGKESLVKTEDLANEIKKLL

SEQ ID NO: 161094 - protein, 167 aa, Unknown
  Bacterial polypetide isolated from the Sargasso Sea
PKLVRGWIYYTKTVFEITSSELGSQNALLGGGRYDNLVANLGGKPTPGIGFAAGMERILLLINEKQQKENKPSPDIYFICLEKSGLPRALSLSNKLRMNGFKIISDSLRRSMKAQMRDANKSGAKYVLILGEKELSENTILFKNLENSHQKIIEQKKIIKFFDNLTN

SEQ ID NO: 161095 - protein, 193 aa, Unknown
  Bacterial polypetide isolated from the Sargasso Sea
MVEIFKIFKDYDFDNFEFDPSVIRGLEYYTGATFEVSLKFEVRNNKGQVIQFGSIGGGGRYDNLVNNFGNFDAPATGISIGLDRLVYALMQKKDFKVKKSKPVVICVFDKNSMKEYIKVQMILRKAGISTEIYPGENKLKKQMEYANKIKAPAVILYGEDEIKSGKPTLRNLSSGKEQSIKINELINEIKKII

SEQ ID NO: 161096 - protein, 99 aa, Unknown
  Bacterial polypetide isolated from the Sargasso Sea
VVFEVNFFFDVKNSKGQVVQFGSIGGGGRYDNLVSNFGNIDCPATGISIGIDRLVYALMQKKDFDIKPTRPIVICVFDQNKIKEYIKILKILRSANISS

SEQ ID NO: 161097 - protein, 308 aa, Unknown
  Bacterial polypetide isolated from the Sargasso Sea
VRDFVISNIKEVMIKYGFQYLETPSFEYADSIGKFLPDKERPDEGVFSFKDEKKWLSLRYDLTAPLARYVAKNYLELPKPFKRYQLGSVWRNEKPGPGRFREFLQFDADYVGTKNLQADAELCILISEILEKCGLAKSDYTVKISSRKFTNELFEKLKIKSKDQISTTLRALDKIDRLGWSEAKKLLKEGRKDKSGDYTKGASLKDEQIKIIENAMKSKTSESKDVLEIIKIFKAYNFDNYKFDPSVIRGLEYYTGPIFEVNLNFEVKNLKGQSIQFGSIGGGGRYDNLVSNFGNFECPATGISIGLI

SEQ ID NO: 161098 - protein, 137 aa, Unknown
  Bacterial polypetide isolated from the Sargasso Sea
DTLLGGGRYDGLIKVLGGPDIPGIGWAAGIERIALLMESEKKISSTIHIAVTNEKFIDYFLHLQKYLSENRISYYWNYKYNLKKSFTKANTSSASHIIIIGENEFDGNFFTIKNLMTGEQRELKLNQIFNHLNDKSR

SEQ ID NO: 161099 - protein, 221 aa, Unknown
  Bacterial polypetide isolated from the Sargasso Sea
FTKGANLKLKDIKTIEETLQKNSPETEDLVEMLEIFKDYNFNNFEFDPSVIRGLEYYTGAIFEVNLKFDVTNNKGQVIQFGSIGGGGRYDNLVNNFGNYDAPATGISIGLDRLVYALMQKKEFKVKQSKPVVICVFDKKLMKDYINVQTILREAGVSTEIYPGESKLKKQMEYANKIKSPAVILYGENEIKSGKPTLRNLNSGEEKSIEIKELVNEIKKII

SEQ ID NO: 161100 - protein, 110 aa, Unknown
  Bacterial polypetide isolated from the Sargasso Sea
MEYYTGPIFEVNLNFEVKNSKGQAIQFGSIGGGGRYDNLVSNFGNFDCPATGISIGLDRLVFALMQKKDFKIKTTRPIVICVFDKNKNKEYVGILNKLRTSNISSEIYPG

SEQ ID NO: 161101 - protein, 304 aa, Unknown
  Bacterial polypetide isolated from the Sargasso Sea
NEKPGPGRYREFLQFDADFVGTKSLQADAELCVLISEILEKCGLDKVDYTVKISSRKFTDKLFEQLKIKSKDQISIILRALDKIDRLGWDEAKKLLGEGRKDKSGDYTKGANLKKDQIKIIENALDSKISDSEDILEIIKVFEAYNFKNYKFDPSVIRGLEYYTGPIFEVNLNFEVKNLKGQIIQFGSIGGGGRYDNLVSNFGNLDCPATGISIGLDRLVFALMQKKDFNIKTTRPVIICVFDKSKTKEYVEILNKLRKANISSEIYPGDGKLKKQMEYANKIESSFVIFYGDDEIKKAEVKLR

SEQ ID NO: 161102 - protein, 310 aa, Unknown
  Bacterial polypetide isolated from the Sargasso Sea
DSNKLKREISKKGLRYDLTVPFARYVSMNRDKLTLPFKRYQIQKVWRADRPQRGRFREFFQCDVDYIGTKSILCESEIIELVYTIFDKIQLKNISIKVNNRKILYGISEVLNFEEAFDKFCILIDKIDKIGKEKFNDELEKIQFSKKQIDSINNVLFFNGSNKQKLIFLKDFLSKSNKGSEGLNDIEKLMGLSKKFDFDVSLARGLSYYTSSIFEVVVKDKKIGSLCGGGRYDDLTEIFGYKNISGIGISFGIERIYQIMNEEGLFPKNIVNSKTILVSCLSEEFMTNSLKLASKLRENNIKTDLYPDNP

SEQ ID NO: 161103 - protein, 275 aa, Unknown
  Bacterial polypetide isolated from the Sargasso Sea
NVNPAQANAELCNLISNTLIDCGLKKDQFTINVSNRKIVQGLIEDLKIEKNKQIKVMRAIDKLDKPGFGLKGVEELLKKERKDKSGAITKGANLNDEQASKILNFLKIKDLKKLKKNFKNPITQEGIKELEELFEVLNFGNYSNQVKTNFTIVRGLDYYDGFCVETNLNFKTKNIKGKEVDIGSICSGGQYNKLISRFKGVDIPGTGLSIGVDRLLFAMMQLNQIEVDTQNPVIVCVMDEKYLKNYYEILDNLRKNNINSEIFLDSKKNLGKQLT

SEQ ID NO: 161104 - protein, 220 aa, Unknown
  Bacterial polypetide isolated from the Sargasso Sea
PGPGRFREFLQFDADYVGTKNLQADAELCVLISEILEKCNLDKKDYTVKISSRKLTDKLFEKLKITSKDQISTTLRALDKIDRLGWEEAKKLLAEGRKDKSGDYTKGANLSNDQIKTIETTLQNEIPDSEDILEILKVFEAYNFKNYKFDPSVIRGLEYYTGPVFEVNLNFEVKNSKGQTIQFGSIGGGGRYDNLVSNFGNLDCPATGISIGLDRLVFAL

SEQ ID NO: 161105 - protein, 252 aa, Unknown
  Bacterial polypetide isolated from the Sargasso Sea
LTSDDIVIRISSRKVLEEVLGSLGVEGDLFTKTCVIVDKMDKLSSEIIEEQLSELGHSSDVINKIQTILGIKDMDNLRSSLEDSSSAILELDTLFDLIDAYGMSEWVQFDASIVRGLAYYTGSVFEAHDREGKFRAICGGGRYDNLLSTLGGKDLPATGFGFGDMVIMEVLKEKGLVPELISGVDDIVIPLSPDLRDIAVRVAASLRLSDRTVDLVLEDKKIKWAFKHAERTGAKRLVLLAPDEWSRKMIKV

SEQ ID NO: 161106 - protein, 281 aa, Unknown
  Bacterial polypetide isolated from the Sargasso Sea
GTVEALGKFLPDVDQPNEGVFAWQEDDKDWLALRYDLTAPLARVYAQYRNELPTPYRRYSMGPVWRNEKPGPGRFRQFYQCDADTVGSASIAADSEICMLLCDTLENVGIAEGDYIIKANNRKVLNGVLESMNIQETSNRDAILRTVDKFDKVGESGIRQLLGKGRLDASGAYIDGVGLSDSEADIVLAFLTSKGTDIETTLRNLKNLIGSSEIGLEGVNELETMAELFEAGGYGYNKISIDPSVVRGLGYYTGPVYEAELTFEIFDEKGRTRQFGSVAGG

SEQ ID NO: 161107 - protein, 263 aa, Unknown
  Bacterial polypetide isolated from the Sargasso Sea
KLNITSKDQKSTTLRALDKIDRLGWEEAKKLLSEGRKDKSGDYTKGANLKKDQIKIIENALNSKNASSEDVLEIIKIFQAYDFKNYKFDPSVIRGLEYYTGPIFEVNLNFEVKNLKGQNIQFGSIGGGGRYDNLVNNFGNLDCPATGISIGLDRLVYALMQKKDFKIKSTRPVVICVFDKDKTKEYVNILNQLRSSNVSSEIYPGEGKLKKQMEYANKIGSPAVILYGDDEIKSGKATLKNLETGKESSIKIEDLVKKIKKII

SEQ ID NO: 161108 - protein, 195 aa, Unknown
  Bacterial polypetide isolated from the Sargasso Sea
SPSYTDYLEPDHLSILNNLLDDFGESNITIDPKLVRGLDYYTGFIFEVTSKELGSQDSFIGGGRYDSLFSSLGGKDIPAIGFAIGLERMIYIMPESTKVNKKVFIVNLTSNNSRYPYKIAQNLRSLDTNIVVEDPLLTSSAKSQLRRANKTGATAALIIGDDEVSKNEVIWKDLDDKIEQQSLSLDELINKFKKL

SEQ ID NO: 161109 - protein, 305 aa, Unknown
  Bacterial polypetide isolated from the Sargasso Sea
QILWADIFTFNDNGIDISLRYDLSVPLARFYSQNYLNLPNPYKRFQIGTVFRREKPGNGRFKSFDQCDCDIIGKFDIRQANSELINLIGSTLTSCGLKKSDFKINVSNRKIVQGLMEELKIVDEKQKKKVLRAIDKLDKPGFGIKGVEELLKKERRDSSGAVTKGANLKDNQAQQIIDFLKIRDLKDISKKFYNPLIKEGIKELEDLFKILNYGDFADLVKFDPSKIRGLDIYTGFIVETNLNFEVKNSKGKIIDPGSICSGGEYLVTKYKGEPFLGTGISIGISRLVWCLLQKIKDEIEEQKPV

SEQ ID NO: 161110 - protein, 229 aa, Unknown
  Bacterial polypetide isolated from the Sargasso Sea
DSVLSQLHSLVDGSTLGEAGVESLRSLIKQVHDVGVPDGRITVDPSIARGLDYYTGIVLESFLDELPALGSICSGGRYDNLAGLYTKQQLPGVGASLGIDRLLAGLEELGKLTGIETPAEVFLPYFDKQYLGQYLKIARALRCAGVAVEFFPEPKKLGNQLKNAAKKGVLFALILGSDEFESGSAQLKHLDTQRTDTIHWQGKESNLVKEVQRALASNHQNSIAFRSLQ

SEQ ID NO: 161111 - protein, 327 aa, Unknown
  Bacterial polypetide isolated from the Sargasso Sea
MYEFKDKGDRSLVLRPEATASVVRFHNEFFKNESKKYAYFGKMYRYESPQKNRYREFIQAGAELVGTIDDFSELQILKSSINFLEKLNINAKLNINTIGSIEERKLYINELDNYFKKNKNNLSKESNEKIGKNTLRILDSNDPFDSEIIDLAPVIYQYLDQDTLDRYENLKQNLKNENIGYVENSKLVRGLDYYNDLTFEFVYKATVLGGGGRYDKLAESLKLGNSAGVGVAFGVDRIINCINYVPSTKKIMLIGQNFDDIKSVSKKLDKSGIKYFLPIRKSKENTQYKEAIKNNVDYVINCTEKTIKNPKNSESFEFNIRNLKKLI

SEQ ID NO: 161112 - protein, 462 aa, Unknown
  Bacterial polypetide isolated from the Sargasso Sea
MSKIKNNPKAILPKGFKDSDIEILNLRKKVSKIIEKECLKYGFIELDTSTIEYTESIGKFLPDVDRPSGGIFSFQDDDEKWLSLRYDLTAPLARYVAQNYQDLVKPFKRYQSGLVWRNEKPGPGRYREFFQFDADVVGVDSTLIDAELCVMVCDILIELGLNTSQFEIKFSNREIWTELFSNLDVKEDDLPKILRAVDKKDRLGIEGVNELLQKGRKDVSGDFMEGVGLSETDADKIISFITNSNQSNAQMEEFNSYIKNFPDYPIRFDSSVVRGLDYYTGMIFEAELLVDIKNEKGEKIVFGSVAGGGRYDRLISRFGKEDVPATGISIGVDRLIVALNQLDLLDNKKNPLVVIANLDNQNMPDYISMAKEIRNEGIACEISFGSKNLGKQLKYCDRKGADIVIIAGDEELKKGEISIKDLNKGKEVSKDIVDRDKWKEAKAGQQTINRSDLMTALNEILN

SEQ ID NO: 161113 - protein, 183 aa, Unknown
  Bacterial polypetide isolated from the Sargasso Sea
LQFYIFEFDPSVFRGLEYYTGAIFEVNLKFDVTNTKGQVIQFGSIGGGGRYDNLVNNFGNYDAPATGISIGLDRLVYALMQKKEFKVKQSKPIVICIFDKNSMKDYINVQTILRNAGISTEIYPGESKLKKQMEYANKIKSPAVILYGENEIKSGKPTLRNLSSGEEKSIPIKELVNEIKKII

SEQ ID NO: 161114 - protein, 353 aa, Unknown
  Bacterial polypetide isolated from the Sargasso Sea
PLSRFVQQNLNEITLPFKRFQTQLVWRADRPQKGRYREFLQCDVDIIGEKNFLNEVECIKVYDYVFENLGLPKLVLRINNREILEGISKIMNLGSLSEISSTLDKSDKIGIDGVVEELAKKGISTESIDKLMFFLNIEGSNENKIDIVRKEFNSKNISSHSIDLIEKIINTCNQFKLNNIEIKFDLSLARGLGYYTGTIVEVSSPKDFSLGSVGGGGRYDDLVQKNNPKLSGFGISFGFDRIFLILEELNLFPNLLDSSKSFLFLNFGTDKISNFIDSVNQLRKDGIVCEIYPGDVKIKKQLDYANKKGIDYVVILGDDELKKDIFKVKDMSKGDELTYNQINSLTDKIKEIS

SEQ ID NO: 161115 - protein, 199 aa, Unknown
  Bacterial polypetide isolated from the Sargasso Sea
MRKFALWKPNSGATFINVGAEEAIVPALWSQDTFIQKAGGSEIIGQMWAFPDKKGRACCLIPEATALFQERCSELLGRQRERMLFYIARCYRYERPQAGRYREFSQLGFEYLCPNPESAVKRSQEVAIGFFDSLGLRYEIDDSARRGLSYYLNGRGFEMRCRELGAQQQVVGGGAYQEGAGFGIGAERLLLAMTAQGLV

SEQ ID NO: 161116 - protein, 143 aa, Unknown
  Bacterial polypetide isolated from the Sargasso Sea
CGGGRYDNLVEELGGKSCPATGFSIGMERLILLMKETLELNVGNKKVDIFFVCLSKESIQKAIMYSESLREKVSELGIRINMGLEGAGSQFKKADKSGAMFAFILGDDELKNNTISMKDLRSKSDQETLSYKDLEKRIKETYK

SEQ ID NO: 161117 - protein, 314 aa, Unknown
  Bacterial polypetide isolated from the Sargasso Sea
QFDADYVGTNNLQADAELCILISEVLEKCGLDKDEYTVKISSRKFTDSLFKKLNINSEKQKTTTLRTLDKIDRLGWSEVQKLLGEGRKDKSGDYTKGANLKNDQIKIIENTLKSNEPDTEDVLEIINIFKAYDFKNYKFDPSIIRGLEYYTGPIFEVNLNFEVKNLKGQVIQFGSIGGGGRYDNLVSNFGNLDYPATGISIGLDRLVFALMQKKDFKLKSTRPIMICVFDKNNTKQYVEILNKLRAANISSEIYPGEGKIKKQMEYANKIECPGVIFYGDDEIKKTEVKFRNLKTGKETSVKIENLANEIKKFI

SEQ ID NO: 161118 - protein, 178 aa, Unknown
  Bacterial polypetide isolated from the Sargasso Sea
MFKGVEFEIDKGLVRGLDYYSKTVFEIQPKNSNKAQSSILSGGRYDNLVENIGGPDTPAAGFGSGIERVLLNMNEKEYEELDFTQLLIIPASEEGLILSIKIAQQLRNKKISTSICSSDRSFKAQMRYANQINAKNVIVLGSKEIEGNKISIKNLSSKIEKTIDLTLENILSVLDSNG

SEQ ID NO: 161119 - protein, 399 aa, Unknown
  Bacterial polypetide isolated from the Sargasso Sea
LRFYPLGEKVKKADINSLNDGKLSKFANSISDKALRYDLTVPLSRFVQQNLNEITLPFKRFQTQLVWRADRPQKGRYREFLQCDVDIIGEKNFLNEVECIKVYDYVFDNLGLPKLVLRINNREILEGIAKIMKINSLSEISSTLDKSDKIGIDGVLDELAKKGIDNESIDKLMFFLNIDGSNENKIDIVRKEFSNENISSNAIDLIEKIINTCNKFNLNNIEIEFDLSLARGLGYYTGTILEVSSPKDFSIGSVGGGGRYDDLVQRNNPKLSGFGISFGFDRIFLILEELNLFPDLLDSSKSFLFLNFGTDKIFNFIDSVNHLRNDGIVCEIYPDDVKIKKQLDYANKKGIDFVVIIGDDELKKDIFKVKDMSKGEESTYTEIDSLAQKLKILAKVFIP

SEQ ID NO: 161120 - protein, 444 aa, Unknown
  Bacterial polypetide isolated from the Sargasso Sea
MCGIGGIINTNNSKIDPNIIENIKDSLEHRGPDNSSIKYISESNCFVHTRLSIIDLNDRSNQPFQSSDGRYTLVFNGEIYNYKEIRKDLESIGISFNTEGDTEVLLKGFIEHGEGILEKLRGQFAFAIYDEAEGSVFLARDRVGIKPLYFSTYKDWFVFGSEIKAIEKSGVVPFEPDIDSYVTYLRHLCVPSDRTGNKNILKLQPGEYAIYSPKNGISKKKYWNPFNFEVNNDINEKEAISEVDRLLSESVEYRKVSDVEVGLFLSGGIDSSLIGKLMKENETAGLKGFNIDYEDHFAGYEGEAAEAEFASSNIDIELIKENIKYSDFQDLLNNYSFYQDDLIGDEVGIPLYFLGKSTRSNGMKVVQVGEGADELFYGYDHWLRFIKLNKYIKTINQSRSNFLSFKNHRMNLVSNILFNRTSFSGGAIGFNLSEIDSLIDGGLA

SEQ ID NO: 161121 - protein, 329 aa, Unknown
  Bacterial polypetide isolated from the Sargasso Sea
MKKEQKNPKAVLPKGFKDNDEITISVRKKVSKTIEEVCQNFGFRELETPAFEFTEALGKFLPDIDRPSGGVFSIQDEDNQWISLRYDLTAPLARFVAANYQNIVKPFKRYQSGNVWRNEKPGPGRYREFRQFDADVIGVQSANIDAELCVMVAKIFEKLSLSSKDYRIKYSNRMIWNDLFNEIDIPLNQISEVLRAIDKLDRFGEDGVRELLTTGRKDQSGDVMSGVGLSDEQAESIIQFIKNGDKSNEQILDFENYLSNFPNLSIDFDPSVVRGLEYYTGMVFEAELLFKVKNNKGVDVVFGSVAGGGRYDKLISQLEKKMFPQLVFP

SEQ ID NO: 161122 - protein, 405 aa, Unknown
  Bacterial polypetide isolated from the Sargasso Sea
MNKENKLIPGLPSGFEDRWNKKLLLKKRLLRVIEKNFIKYGFDPLETPSFEISENIGSFLAEDENNPMSDVFTFDDGEKNITLRYDLSSPLARFVAQNNQMLPSIYKRYAIQNVFRNEKSGNARYREFTQADCDIVGNVNPAQANAELCNLISNTLVDCGLKKDQFTINVSNRKIVQGLIEDLKIEKDKQIKVMRAIDKLDKPGFGLKGVEELLKKERKDKSGAITKGANLNDMQASKILNFLRIKDLKELKENFKNPVTQEGIKELEELFEVLNFGNYSDQVKINFTIVRGLDYYDGFCVETNLNFKAKNIKGKEVDIGSICSGGQYNKLISRFKGVDIPGTGVSIGVDRLLFAMMQLNQIEVDTQNPVIVCVMDEKYLKNYYEILDNLRKNNINSEIFLDSKK

SEQ ID NO: 161123 - protein, 368 aa, Unknown
  Bacterial polypetide isolated from the Sargasso Sea
MNKENKQLKASLPKGFQNRWGETLLLKKKLLEVIEKNFIKFGYSALETSPMQLSSIIGNSLSEDEKNPMSDIYTFNDDGTEVSLRYDLSQPLINFYKQNYMDLPNPYKRFEIGTVFRREKPGSNRFKSFGQCDVDIIGNFDVKQANADLCSIIGSIFTEFLKKSEFIINVSNRKIVQGLMDQLKITDQKQKQKVLRAIDKLDKPGFGLKGVEDLLKKERVDQSGAVTKGANLNDEQSSQIIEFLKIKEIQELKKKIDNSLAREGIEELEDLFELLSYGEYLDQVKFNSSIVRGMDMYTGNVIETNLKFEVKNSKGKIIDPGAVCSGGEYLISKFKGDPFLGCGISIGSDRLIWALSQKNNLKIEEKKP

SEQ ID NO: 161124 - protein, 109 aa, Unknown
  Bacterial polypetide isolated from the Sargasso Sea
MKIQPIRGTHDIFGKNLDKYNSICDEVKRVASIFNFSEIKTPIFESTDLFSKQLGESSDVVLKEMYTFQDRNGESLTLRPEYTTPMIRAAISNNLINLLPCKIFGIGQM

SEQ ID NO: 161125 - protein, 303 aa, Unknown
  Bacterial polypetide isolated from the Sargasso Sea
FHNEFFKNESKKYSYFGKMFRYENPQKNRYREFIQAGAEIVGTIDEYSNLQILKSSIRFLSLLNIKSKLNLNTIGTKEEREKYIRELDKYFSKNKRELSKESVDKIGKNTLRILDSNDPFDNQIIDLAPVIYDFLSNETLSLYETFKKQLKTNSIDFVENPKLVRGLDYYNDLTFEFVANGTVVGGGGRYDSLSEILGLGKLSGIGVAFGVDRLINTIRSIPSKTKVMLIAQNLSDLTLVSSKLDKAGINYLLPVRDSKENTQYKEAIKNNVDYVINCSENTIKNINNNESIKFNISNLRKLL

SEQ ID NO: 161126 - protein, 140 aa, Unknown
  Bacterial polypetide isolated from the Sargasso Sea
TSDLGSQDTLIGGGRYDGLTKLLGGPDIPGVGWAGGIERLIMLMDDIKPLQKTIHLIIINESFREYGLKVANQLRQKNINIHFDYKYNLKKSLSYANQLGARYAIIIGEEEVKKNLCTLKDLNKNIQEKKTIENIIKDLS

SEQ ID NO: 161127 - protein, 45 aa, Unknown
  Bacterial polypetide isolated from the Sargasso Sea
MNLELNSIGLDKKPSDTKVIVAMSGGVDSSTVAGLMKMQGYNVTG

SEQ ID NO: 161128 - protein, 212 aa, Unknown
  Bacterial polypetide isolated from the Sargasso Sea
DQIKIIENALKSKTSDCEDVLEIIKIFKDYNFENYKFDPSVIRGLEYYTGPIFEVNLNFEVKNSKGQTIQFGSIGGGGRYDNLVSNFGNFDCPATGISIGLDRLVFALMQKKDFKIKTTRPVVICVFDQNKNKEYVGILNKLRMSNISSEIYPGEGKLKKQMEYANKIASPAVILYGDDEIKSGKVTLKNLESGKENLIKIGDLVNEIKKLF

SEQ ID NO: 161129 - protein, 117 aa, Unknown
  Bacterial polypetide isolated from the Sargasso Sea
MDKISSIRGMPDVFESDTNYLAELNKTLSKIFLSHNLNEVNTPILEQTELFIRSTGITSDIVNKEIYSFNDRNEQSLSLRPEGTAGVVRSVIQKKLDSVEHKLWYQGPMFRYERPQK

SEQ ID NO: 161130 - protein, 342 aa, Unknown
  Bacterial polypetide isolated from the Sargasso Sea
MVRAAVCGTEGRQFESVPVYQKMEKQKKIKPLKELPSGFEDRKEKELLIRDFIILKIKEVMVKYGFQYLETPSFEYTESIGKFLPDKERPGEGVFSFKDENRWLSLRYDLTAPLARYVAKNFNEIPKPFKRYQLGTVWRNEKPGPGRYREFLQFDADYVGTKNLQADAELCVMISEILENCGLTKDDYTVKISSREITDELFKKLKIQSQEKISIILRALDKIDRLGWIEVKKLLGEGRKDKSGDYTKGAELDYDQIKVIESSLNVNSPQSEDLKQIIKIFKDYKFNNYKFDPSVIRGLEYYTGPIFEVNLNFSVKNLKGQVIQFGSIGGGGRYDNLVSNFG

SEQ ID NO: 161131 - protein, 481 aa, Unknown
  Bacterial polypetide isolated from the Sargasso Sea
MWNFSFWFNSKPGYQKMNKENKLIPGLPSGFEDRWDKKLSLKIKLIRTIENNFIKYGFDPLETPSFEISENIGSFLADDNSNPMSDVFSFKDGEKNITLRYDLSSPLARFVAQNNQQLPSIYKRYAIQNVFRNEKAGNARYREFTQADCDIVGNVNPAQANAELCNLIASTILACGLKKDQFVVNISNRKIVKGLIEELKISTEKQVKVMRAIDKLDKPGFGLKGVEDLLKKERIDISGAVTKGADLSDGESSAIINFLKIKNLKELKNNLKNPLSQEGMIELEDLLEVVSYGDYSDQIKTNFTIVRGLDYYDGFCVETNMSSKITNNKGKEIDIGSICSGGQYNKLISRFKGVDIPGTGMSIGVDRLLFVMMQLNQMKVDEKKPVIVCVMDEKYLKNYYEILKILRENNINSEIFLDSKKNLGKQLTYANKRECPVAVICGENEFKENTLTLKNLLGIKGDDNQKTVKKENLVNEIKKLI

SEQ ID NO: 161132 - protein, 290 aa, Unknown
  Bacterial polypetide isolated from the Sargasso Sea
MVQNLKSFDFTYNRNEYKYHHMNLELNSIGLDKKPSDTKVIVAMSGGVDSSTVAGLMKMQGYNVTGITLKLYNDSKEVVKSKVCCSGQDVIDAKRVAHKLDIDHKILYYQDKFKQGVIDNFVESYLKGETPIPCVQCNQTVKFKDLYEVAKDLNADALITGHYVKNITINEKNNMYRAVDENRDQSYFLFNTTREQLNYLRFPLGGMLKNETREIAKKLNLNVADKPDSQDICFVPNGDYSSVIKKFKPDSLKKGNIKNLNGDVIGVHDGIINFTIGQRKGIKVADKEAL

SEQ ID NO: 161133 - protein, 410 aa, Unknown
  Bacterial polypetide isolated from the Sargasso Sea
MWNFKFEFDSQPGYQKMNTENKLIPGLPPGFEDRWNKKLSLKKRLLTVIEKNFIKYGFDPLETPSFEISENIGSFLAEDDSNPMSDVFTFDDGEKNITLRYDLSSPLARFVAQNNQELPSIYKRYAIQNVFRNEKSGNARYREFTQADCDIVGNVNPAQANAELCNLISNTLVDCGLKKDQFTINVSNRKIVQGLIEDLKIEKDKQIKVMRAIDKLDKPGFGLKGVEELLKKERKDKSGAITKGANLSDEQASKILNFLKIKDLKELRENFKNPITQDGIQELEELLGVLNFGNYYDQVKTNFTIVRGLDYYDGFCVETNLNFKAKNIKGKEVDIGSICSGGQYNKLISRFKGVDIPGTGVSIGVDRLLFAMMQLNQVETDLQSPVIVCVMDEKYFKNYYEILDNLRKNN

SEQ ID NO: 161134 - protein, 466 aa, Unknown
  Bacterial polypetide isolated from the Sargasso Sea
MVRAAVCGTEGRQFESALVYQKMQKQKKFKPSKELPSGFIDRQEKELLIRDFVISNIKEVMIKYGFQYLETPSFEYTDSIGKFLPDKERPGEGVFSFEDENRWISLRYDLTAPLARYVAKNYNEIPKPFKRYQLGTVWRNEKPGPGRYREFLQFDADYVGTNNLQADAELCILISEILERCGLDKSDYIVNISSRKFTDNLFKKLNIISDEQKTTTLRALDKIERLGWIEVQKLLGEGRKDKSGDYTKGANLKNDQIKIIEKALKNNEPDTEDVLEIINIFNAYNFKNYKFDPSIIRGLEYYTGPIFEVNLKFDVKNLKGQNIQFGSIGGGGRYDNLVSNFGNLDYPATGISIGLDRLVFALMQKKDFKFKSTRPIVICVFDKNNTKQYVEILNKLREANISSEIYPGEGKLKKQMEYANKIQSPGVIFYGDDEIKKAEVKFRNLKTGEEISVKIENLANEIKKFI

SEQ ID NO: 161135 - protein, 273 aa, Unknown
  Bacterial polypetide isolated from the Sargasso Sea
ILIAKLLFDDLGIKDNKHRLLINSLGSKEDQIKYAYELKKYLSEFKKQLSEISQSRLDKNPLRILDSKDPKDSEILVNAPKISEHLSEESKNYFNQVKKLLNDNKIKFFEDPKLVRGLDYYSHTAFEFQTNEDKRQNAILAGGRYDNLISMISSRDIPGVGWAAGIERLMDLISIKDEKSELDKKILFAVQDESYLNNNRILKQIYSLRYNHEVRVSKNIKKLFSYADKNNFNFILLMGEEEIKNKKIILKDLKNKNQKSFEISKFELKNEIR

SEQ ID NO: 161136 - protein, 121 aa, Unknown
  Bacterial polypetide isolated from the Sargasso Sea
MDKISSIRGMPDVFESDTNYLAELNEVLSKIFLSHNLNEVNTPILEQTELFVRSTGVTSDIVNKEIYSFNDRNEQSLSLRPEGTAGVVRSIIQKKLDNAEHKLWYQGPMFRYERPQKGRFR

SEQ ID NO: 161137 - protein, 248 aa, Unknown
  Bacterial polypetide isolated from the Sargasso Sea
DVDRKKYSQELATYLNSHSDELSDTQRNTLRKNPMRLLDSKDPKLKSIIISAPLISDFLNKESQANFDSIKERLERLKIPYIHDPKLVRGLDYYNDLVFEWKSNKLGSQDAVCAGGRYDNLSKTIGDKIVPSVGFAMGLDRIVELMEYESNALIIGLAVITNSNDESYEILNSLRNIDYTYNLIQMDNDKSLSKQIKQADKSNCDILIIVGNDEISNNTFTVKHLKCDRKDQNIPFEQLIDLITGYKK

SEQ ID NO: 161138 - protein, 282 aa, Unknown
  Bacterial polypetide isolated from the Sargasso Sea
MSKSRYQAPRGTRDILPEEAGRWRWALDSFAELAERFGYGQVISPMFEDLGVFLRLGENTDVVSKEMFTFQDKDPKTPQNLALRPELTASICRAFAQHRPTTPWKVWYEGPQFRYEKPQAGRFRQFVQVGAEIIGENDPAADSEIISLAWRFYEFLGLKHVTLQMNSLGNAETRGVYNQELHSYLSSEATNLSAESRDTLEKNPLRVLDSKREEDLEIISAAPTIQEFLSVEDANHFELVCEGLSSVGIPFVISPRLVRGLDYYTRTTFEFTADKLQTAQNA

SEQ ID NO: 161139 - protein, 315 aa, Unknown
  Bacterial polypetide isolated from the Sargasso Sea
LSLRYDLTAPLARYSAKNFEEIPKPFKRYQIGTVWRNEKPGPGRFREFLQFDADFIGTSNLLADSELCVLASEILNKCGLEKEDYKIKISNRKLSIGLLNFLKINRDEQKSTTLRAIDKLDRVGMNGVKLLLGKGRKDKSGDFTKGALLNEKQISKIIDFLSIKNLEELNNFECDDKDFQSGLNELKEVIENFKLMNFENFKFDATVVRGLEYYTGIIFEVLLTFKVKNEKKETVEFGAVGGGGRYDNLVKRFKNQECPATGISFGLDRLLYALRQKNIFNFKQKKPVLILVLDKKYNDYYFKVLNDLRRNSINS

SEQ ID NO: 161140 - protein, 226 aa, Unknown
  Bacterial polypetide isolated from the Sargasso Sea
GVWRYDEPQKGRYCFFHQWDIEIFGKQNNETDSEIIEFTSKFFSNLGLNNIILSISHRKIVQSYISSIFETEDSEVISDILRAIDKIQKKSEQEIISEYEKKGYQKEKLGKIIEFSKLKGSPQEISKSLDVSQFENWSELTALFESLSNRNVKNIQIDFGIVRGLDYYSGVVFEAFDQTFDIGALVGGGRYDNLPAVFGRNDMGATGVAGGVERIMLALENQKFII

SEQ ID NO: 161141 - protein, 242 aa, Unknown
  Bacterial polypetide isolated from the Sargasso Sea
MYDTEGKENFPEPNKYAPLGQYDFLDPLYDEGQKELSNFFKNTQLSEFKNQIVYSPTLVRGIEYYTGTIFEANLLFKVKNQKGQEVEFGSIGGGGRYDGLVSRFTNNIAPATGVSIGLDRLLVGIQQRDNFWKNNKEIENTGPVVICVFDEKQIAQYNKLLLLLRSSNINSEIYCGDGSLKAQMKYADKRNAPAVILYGDNEIKSGTVTIKNLKLGKEASAKITKREDWTNIEKAEELGKKE

SEQ ID NO: 161142 - protein, 321 aa, Unknown
  Bacterial polypetide isolated from the Sargasso Sea
RPNDGIFAWLDDDDTWLALRYDHTAPLARFYSQYRNDLPNPYRRYSYGPVWRNEKPGPDRFRQFYQIDADTVGTPQIGADAEMCMMVCDALELIGMDAEDYKFKLNNRKILSGIIQIAGIKENQMHPVDDTFFQNICRAIDKFDRLGLEGVRKLLGSGRRDESGDFTEGLNLSTGQIDFFTELLSSKGSRKEFLTNLRNILKKSEIGTQGLSELEEMVDIFLASGYSEDKFSFDPSVVRGLGYYTGPVFEVELNKKIIDKKGNEHSFGSISGGGRYDNLVKRFTGQNVPATGVSIGVDRLIAALKIEEKIKQNTLGPILVT

SEQ ID NO: 161143 - protein, 292 aa, Unknown
  Bacterial polypetide isolated from the Sargasso Sea
LISEILENCGLNKKDYIIKISSRKITEEIFKKIKIESEEQKLATLRALDKVDRLGWDGVKKLLGEGRKDKSGDFTKGANLSLKNIDLLEKELNNNSPETEDLKEILKIFNDYNFNNFEVDPSVIRGLEYYTGPIFEVNLKFDVKNNKGQVVQFGSIGGGGRYDNLVSNFGNYDAPATGISIGLDRLVYALMQKKEFKVKQTKPIVICIFEKSSMKEYISLQTVLRSEGISVEIYPGEGKLKKQMEYANKIKSPAVILYGENEIKTGKPTLRNLVSGNEKSTTIEELANEIKK

SEQ ID NO: 161144 - protein, 281 aa, Unknown
  Bacterial polypetide isolated from the Sargasso Sea
SQRGRYRQFHQIGAEILGSKNIYYEVELIGLALDILKNLQITDFILEINNIGDKISLQQLSQKVFEFANDNKDKINPEDFKIVEKNPLRFLDKAIHKYEFSDIPSSKEFLNNESNERFNELKELLNKNSIKFKVNEQLVRGIDYYNDTVFEIKSSELGSQDTILAGGRYDNLVEKFGGPPTDCIGFAAGIERLILIVNNNVKKASNIKIDFYVIYQSDGVKSYAYNVLDKIRNIGFRSEMDLDGKSFIKQLKSASKNNSLFTAVIGEEEKVNNFVKIKELS

SEQ ID NO: 161145 - protein, 136 aa, Unknown
  Bacterial polypetide isolated from the Sargasso Sea
MDKISSIRGMPDVFESDTNNLAELNEALSKIFLSHNLSEVNTPILEQTELFIRSTGVTSDIVNKEIYSFNDRNEQSLSLRPEGTAGVVRSIIQKKLDNAEHKLWYQGPMFRYERPQKGRFRQFNQAGVELLGFEEG

SEQ ID NO: 161146 - protein, 317 aa, Unknown
  Bacterial polypetide isolated from the Sargasso Sea
LLIRDFIISNIKEVMIKYGFQYLETPSFEYTESIGKFLPDKDRPGEGVFSFKDDTKWLSLRYDLTAPLARYVAKNFNEIPKPFKRYQLGTVWRNEKPGPGRYREFLQFDADYVGTKNLQADAELCVLISEILEKCGLNKTDYIVKISSRKFTDKLFEQLKIKSKDQISIILRALDKIDRLGWSEAQKLLEKGREDKSGDFTKGANLKKDQVKIIENALKNKNPNSEDVLEIIKIFESYNFKNYKFDPSVIRGLEYYTGPIFEVNLNFDVKNLKGQSIQFGSIGGGGRYDNLVSNFGNLDCPATGISIGLDRLVFALM

SEQ ID NO: 161147 - protein, 315 aa, Unknown
  Bacterial polypetide isolated from the Sargasso Sea
RYQLGTVWRNEKPGPGRFREFLQFDADFVGTKSLQADVELCVMISEILEKCGLAKSEYIIKISSRKITEELFKKINVKDNKQKLTALRALDKIDRLGWSGIKELLGAGRKDKSGDFTKGANLKSKDIETIEETLKKKSPETEDLVEILKIFKDYNFKNFEFDPSIIRGLEYYTGAIFEVNLKFDVTNKKGQVIQFGSIGGGGRYDNLVNNFGNYDAPATGISIGLDRLVYALMQKKEFKIKQSKPVVICVFDKKSIKEYIDLLMILRKAGVSAEIYPGESKLKKQMEYANKIKSPAVILYGENEIKSGKPTLRNL

SEQ ID NO: 161148 - protein, 242 aa, Unknown
  Bacterial polypetide isolated from the Sargasso Sea
ADSEICMLLSDTLENAGIPEGDYIIKANNRKVLNGVLESVNIQETPKKDAILRTVDKFDKVGESGIRQLLGKGRLDASGAYIYGVGLSDSEADIVLAFLTSKGTDIETTLRNLKNLIGSSEIGLEGVNELETMAELFEAGGYGSNKISIDPSVVRGLGYYTGPVYEAELTFEIFDEKGRKRQFGSVSGGGRYDGLVKRFTGQSVPATGVSIGVDRLLAALKEKGRIKSSGLGPVVVTVMDRD

SEQ ID NO: 161149 - protein, 236 aa, Unknown
  Bacterial polypetide isolated from the Sargasso Sea
MDKIKTIKGTHDILPEFSHKWQNLEKTIHDSAKLFGYKEIRTPIIEQAKLFNRGIGEGTDIVSKEMYSWLDRDEKAIALRPEMTASVVRSFIQHNLGSQTPLQRLYYMGPSFRRERPQKGRQRQFHQFGVEAIGSNNPEQDAEVIILAWEILSKSGINNLELKLSSIGSDDCRIKYKNALIKFLEPHKNKLTDVSRERLKHNPLRILDTKNEEEINILKAASIIGDFYTNEDREHF

SEQ ID NO: 161150 - protein, 180 aa, Unknown
  Bacterial polypetide isolated from the Sargasso Sea
MTRNGVESYIRLDPRIVRGFDYYTRTVFEAWAKTSLRRALFGGGRYDNLTLQVGGKRQIPGVGLAVGDMAMTELLKELDKLPNGAATGATVLVSIFSEEHMAKSSELADQLRDEGIRTELYLNPKHKLDRQFRHADRKQIRYVAILGPDEAANGTVALKDLTTGKQQTVKPAELPRTLGA

SEQ ID NO: 161151 - protein, 232 aa, Unknown
  Bacterial polypetide isolated from the Sargasso Sea
MPLQAPRGTSDILPESQFQWNYFREAAELIASIHGYEKIDTPIFEYHDVFSRAVGTSTDVMEKETYTFKDRGEELITLRPEGTAPVCRAFIEHGMHNSPLPIRLFYISPIFRYERPQSGRYRQHHQFGMELLGSENPEGDAEVVSAAWQLLKKLGLKNLNLLVNSIGDSNCRPKYMQNLISFYSDKISSLCTDCERRFENNPLRLLDCKNPKCQEIIDQAPKSIENLCKDCA

SEQ ID NO: 161152 - protein, 148 aa, Unknown
  Bacterial polypetide isolated from the Sargasso Sea
MKINPIRGTHDLFGEELKKFNKIVYEVKDKAKKFGFNELITPIFESSELFKKPLGEQSDVVLKEMYTFKDRNEDEITLRPEYTTPMIRAAIFNGLLNNLPAKFFGTGQMFRRERPQKGRYRQFNQINFENFGTDDIFSDIEIINLANT

SEQ ID NO: 161153 - protein, 276 aa, Unknown
  Bacterial polypetide isolated from the Sargasso Sea
IEFTSKFFSNLGLENIILSISHRKITQSYISSLFESENSEIISDILRAIDKIQKKSEQEIISEYEKKGYSKEKLEKIIEFSKLKGSPDEISKKFDLTQFENWNELTSLFESLKNRNVNNIQIDFGIVRGLDYYSGIVFEAFDKNFDIGALVGGGRYDNLPSVFGRDDLGATGVAGGVERIILALENQNSSFLQKTNRVSVLYVNEEMKSNAIKITSILRENSISTDIDLSGRALKKQMEQSTNSKFVIIVGPEEFSKNMVVVRNMSDRTENKILIP

SEQ ID NO: 161154 - protein, 240 aa, Unknown
  Bacterial polypetide isolated from the Sargasso Sea
NLQNFKKILSKYFKDHQNSLSIESKSKIETNPLRILDSKNIQDKEIVLQSPKLIELISQAELKSYEEIKDCLNDLSIPIFEDLNLVRGLDYYCNTVFEFKTNEIGSQDTLIGGGRYNGLIKTLGGKDIPGIGWAGGIERIMLLMKDVIETTEVIHLSIKDSTLKKHGLKIYDHLIKSNLSVYWNYKYNLKKSLSLASEKKAKYIVIVGEEEKNNNNYVLKNLSNGDQKTVNLNNILDHIK

SEQ ID NO: 161155 - protein, 175 aa, Unknown
  Bacterial polypetide isolated from the Sargasso Sea
RSLNILEIDFEENANLVRGLDYYCNTVFEYKSDNLGSQDTLLGGGRYDGLIKVLGGPDIPGIGWAAGIERIALLMEYEKKISSTIHIAVTNEKFIDYFLYLQKYLTENRISYYWNYKYNLKKSFTKANASSASYIIIIGENEFNGDFFTIKNLMNGEQKELKLSQIFNHLNDKSR

SEQ ID NO: 161156 - protein, 138 aa, Unknown
  Bacterial polypetide isolated from the Sargasso Sea
MIKFRNIKGTHDLLPEQVAIWRQVENIIHLIMEQNGFGEIRTPIFENTDLFIRGIGTDTDIVSKEMYSWTDQGNNLLTLRPELTAPVARAYIQHQLSNKNPMHRLYYLDTLFRRERPQKGRQRQFHQFGAEAIGSPKI

SEQ ID NO: 161157 - protein, 242 aa, Unknown
  Bacterial polypetide isolated from the Sargasso Sea
NLYRNNLVKYFLSNESRLSEVSQGRLRLNPLRILDSKEPEDQDIIKKAPLLSSYLNNVSVDHFEKVLKYLKKSNIKFIHNEKLVRGLDYYCHTTFEFITKDLGSQGTVLGGGRYNGLSEMLGGPNIPAVGFAAGVDRLVMMNKSNEILTKLICIIPIEKENFEYCYMILNQLRENEIKSEIYPGGNVKKNLKKINKKGQNFVILIGNNEIQNKTVVFKNLSTGEQTEITNDELFIRLNFIKH

SEQ ID NO: 161158 - protein, 180 aa, Unknown
  Bacterial polypetide isolated from the Sargasso Sea
LSKFHLVRGLDYYTHTAFEITSGTLGSQATVCGGGRYDSLISQMGGAETPAIGFAIGLERLIILCGSEFEETRETDIYIVNKGIHAEILAMELSRKLRNYDLIAELDLSGASFSKQFKKANKLKSKSIIVIGDDEAVKNEFVIRLFNNDNSENKEETISIEDNIKFEKWIKRYLILDKNL

SEQ ID NO: 161159 - protein, 209 aa, Unknown
  Bacterial polypetide isolated from the Sargasso Sea
TLADALSSESRQRFAAVQQGLTALGIPFRLNPRLVRGLDYYGHTAFEITSDQLGAQATVCGGGRYNGLIAQLGGATTPAIGWALGMERLLLVLEAAAKADPDGAAARLVGSAAPDVYVVNRGEQAETMALTLTRGLRAAGLAVELDGSGSAFGKQFKRADRCGARWALVLGDDEATRAEVRLKPLQQQGEESTVALTAIAAMVEALRTP

SEQ ID NO: 161160 - protein, 104 aa, Unknown
  Bacterial polypetide isolated from the Sargasso Sea
MAKLQPVRGTHDLLGDEARSHLAIVEAARDVADRYGYGPMSTPVFEFTDVFQRTLGDTSDIVTKEMYTFEDKGGDSLTLRPEGTAGIARAVISGGLRNELPLKC

SEQ ID NO: 161161 - protein, 294 aa, Unknown
  Bacterial polypetide isolated from the Sargasso Sea
GRFRQFNQMNFEILGSDDALADAELILLANKILANLLLNKKFTLYINSLGDRDTLKAYKKELSNFFDKYKEDLSLDSQSKIKKNPLRILDSKEKNDIKICKDAPLISKLYSYEASKQFDEVKNLLTSSGIEFIQDNFLVRGLDYYCKTVFEFKNSNLGSQDTLIGGGRYNGLVKAIGGPDIPGVGWAGGIERITLLKESKKNENSNCHLILIDEKVKNYGIETLKKLNEENLSIFFDYKYNLKKSLAYANKKQVKFAIIIGEDEAKGNFYTLKNLTDSKQQKFNFNDLILELNK

SEQ ID NO: 161162 - protein, 272 aa, Unknown
  Bacterial polypetide isolated from the Sargasso Sea
MKDFENDEIQKIEFIREKFLSTSNIFGFQLMEPSPIELMSVIEAKSGPTIRDDVYFFNDKGDREVSLRFDFTVGLTRYATEQKSMKLPAKISAFGGVWRYDEPQKGRYRFFHQWDIEIFGKQNTETDSEIIEFTSKFFSNLGLNNIILSISHRKIVQSYISSLFETEDSEVISDILRAIDKIQKKSKQEIISEYEKKGYQKEKLEKIIEFSKLKGSPEEISKSIDVSQFENWSELTTLFASLSNRNVKNIQIDFGIVRGLDYYSGIVFEAFD

SEQ ID NO: 161163 - protein, 61 aa, Unknown
  Bacterial polypetide isolated from the Sargasso Sea
MSKEQIRSIKGTQDILPDQSHKWQNLENRIHSIMKLYNYKEIRTPVFEKTELFNRGVGTET

SEQ ID NO: 161164 - protein, 228 aa, Unknown
  Bacterial polypetide isolated from the Sargasso Sea
SEVSQRRLKKNPLRILDTKNEQEKQILKSAPKIEEFYTDDDKNYFLKVQQYINDLDIPFKIDPLLVRGLDYYTQTTFEISSKDLGAQDALLGGGRYNGLIKALGGKDTPAVGFAAGMERVLIAAEKRKKLKNKNLCIYAICTHNESLGVLQKSSEELRNLGIKVVCDTLRRSMRSQMREANKCNADFAIIVGEEEFTNKTIQIKNLSEGKQESIKYQNLITYFKSLTF

SEQ ID NO: 161165 - protein, 281 aa, Unknown
  Bacterial polypetide isolated from the Sargasso Sea
SDYIIKISSRKITEEFFKKINLIDNKQKLTALRALDKIDRLGWSGVKELLGAGRKDKSGDFTKGANLKSKDIVKIEETLKIKSPKTEDLVELVKIFKDYNFNNFEFDPSIIRGLEYYTGAIFEVNLKFDVTNNKGQVIQFGSIGGGGRYDNLVNNFGNFNAPATGISIGIDRLVYALMQKKEFKVKQTKPIVICVFDKNSMREYINLQTIIRKEGISVEIYPGVSKLKKQMEYANKINSPAVILYGENEIKSGKITLRNLSSGKEQSIEIKEIVNEIKKII

SEQ ID NO: 161166 - protein, 199 aa, Unknown
  Bacterial polypetide isolated from the Sargasso Sea
SKKEEDVEISLSSPKIYEYLTQEAKKHYEDLKRSLNILEIDFEENANLVRGLDYYCNTVFEYKSNNLGSQDTLLGGGRYDGLIKVLGGPDIPGIGWAAGIERIALLMESEKKISSTTHIAVTNEKFTDYFLYLQKYLSKNRISYYWNYKYNLKKSFTKANTSSASYIIIIGENEFNGNFFTIKNLNTGEQKELKLDQIY

SEQ ID NO: 161167 - protein, 308 aa, Unknown
  Bacterial polypetide isolated from the Sargasso Sea
YITDTIRSVFISYGFNEIETPSLEKRDTLYQKYGSEGDKFVFNIINSGEKIKKADIQSFNNEKYNDFISSISEKGLRFDLTVPLARYVSQHQNEITFPFKRFQIQNVWRADRPQKGRYQEFTQCDADVIGSKSVLLEFEMLQLFSTVFKKLKLSSVNIRINHRGVLNEIANRIGLKDNFNEFLIILDKIDKIGVDKAKDEVKNNFKNIKDIDGLFEMISKKMSAKKYIENLKNNVLVQKDNLIFEELETLSKLIENDDSLINIDFDLSLARGLEYYTGLIYEVSLKSDSQIGSLGGGGRYENLTESFN

SEQ ID NO: 161168 - protein, 235 aa, Unknown
  Bacterial polypetide isolated from the Sargasso Sea
MDKISSIRGMPDVFESDINYLAELNETLSRIFLSHNLNEVNTPILEQTELFIRSTGVTSDIVNKEIYSFNDRNEQSLSLRPEGTAGVVRSIIQKKLDNAEHKLWYQGPMFRYERPQKGRFRQFNQAGVELLGFEEGSSDLEIISIVCDIFIELELENSVLKINHLGDKDTKEKFLSELLKYLKTYKDELSDNDKEKLNKNPLRLLDSKDGNLKDFLDKGPKIINFLSSEQLNLLD

SEQ ID NO: 161169 - protein, 166 aa, Unknown
  Bacterial polypetide isolated from the Sargasso Sea
YNLVRGLDYYSGFVFEAISPNLGAQDAYLGGGRYDNLCKQLGGKDLPAIGMAIGIERLALISNIFKKDKTLVSFIIISSNLEQKAYKIAHDIRTINSEIEINVQLSDGSLKSKLRRANKDKSSYAIIVGDEELQTDTVILKSLSNEEFEQKTLDFSELKQFISNLE

SEQ ID NO: 161170 - protein, 259 aa, Unknown
  Bacterial polypetide isolated from the Sargasso Sea
MSLKPSISKGTKDYLPNDLGKRNYLKKILRQTFEIFGFLPIETPSFERIETLTGKYGENGDRLIFKILNSGDKLKKADIKSFVDKDLGKFSNSLSEKALRYDLTVPLARFVSQHRNEISFPFRRYQIQNVWRADRPQKGRFQEFLQCDVDILGNRSILQEVEIILMCEYIFSKLNLKNISVNINHRKILEGIAILIGAKDKFSLLTSSLDKLEKIGKNGVIKDLKTHGFTKKSIDALLPFLQIKGEFKSKIDFLSNRLK

SEQ ID NO: 161171 - protein, 248 aa, Unknown
  Bacterial polypetide isolated from the Sargasso Sea
GSVWRNEKPGPGRFREFTQIDADIVGTRSTYADAEMCMLMANTLLKCGLEKNEFIIKINNRKIFQGILDFFDIQDPKQSLTILRSIDKFQNIGKKGVLELLTKGRLDSSGDFTKGANLKMNIAEEIFELFSAGSITRFDGKYRLTGSSTLYQIDNKIYLEGIKELEEIFNYLKATGEINIANTDTTYVSDKINIQLDYSVVRGLEYYTGPIFEAETAETAFWKEAPEDPKAFKKIKIESIGGGGRYDK

SEQ ID NO: 161172 - protein, 125 aa, Unknown
  Bacterial polypetide isolated from the Sargasso Sea
MFSSIRGTKDILPKDQKYWDYFKHHAFKQSEIYGFERIETPTFEMTDLFLRGIGMGTDIVTKETYSFLDRGKNNITLRPEGTASVCRAYIQNSMHSESQPKKMYYFTSIFRYERPQSGRLREHHP

SEQ ID NO: 161173 - protein, 240 aa, Unknown
  Bacterial polypetide isolated from the Sargasso Sea
KNELPEVDKKKFDVNPIRILDSKEKVTRDLILDSPKPIEFLDNESKQHWEKLQLIINQMIENFDDIDLVIDHNLVRGLDYYSMTVFEIEPVDKSEKSQASILSGGRYDNLISYIGGPETPAAGFGSGIERVMLSMDDDFFEIDCLPQLTIIPLSSKAWIKTNLLSSKLREKNIVVVNSSSNKSFKSQMRYANQIKSKYLMVVGDNELTNNEIELKELSSGLATKMKFNFEEIYSKLIENG

SEQ ID NO: 161174 - protein, 296 aa, Unknown
  Bacterial polypetide isolated from the Sargasso Sea
LPNIEHKDLFTKSIGENSEIVTKQMYEFEDKAGRSLVLRPEGTASVVRYHNEFHKDKSNKYSYFGKMYRYENPQKNRYREFHQAGAELIGTLDNYSDVQLIKSSFRFLNSLELNFKLKINTIGSVDERKEYVSVLKKYFDKNKKDLSKESIEKIESNTLRILDSNIQEDLQIIDLAPLITNYLEDETIQKYEDTKNMLNNINIPYSEDHKLVRGLDYYNDLTFEFVADGVVIGGGGRYDKLSQILNIGQSQGVGVAFGVDRIINQLQLDTHKEQIFLISQDEEEMNDISDELDKNH

SEQ ID NO: 161175 - protein, 221 aa, Unknown
  Bacterial polypetide isolated from the Sargasso Sea
MENPRTVRGVHDILPDVMHKYNYINKIGTFVCNQSCYEQIDTPIFEFADLFIKPLGETSDIVTKENYIFKDKSNNTLMLRPEGTTSVVRAIINAGLTQNMPKRYFYFGPMFRYERPQKGRLRQFNQFGVELLGVDNTFGDVEVINLGYNFLKKLKLLNKVDLVINTLGDQESRSKYRDELVLYFNKYKNDLSEESNIRLKKNPLRILDSKINRDKEIIKNA

SEQ ID NO: 161176 - protein, 193 aa, Unknown
  Bacterial polypetide isolated from the Sargasso Sea
SIKNFLNKTQLEEFKKIKSKLDEIGIQYEENASLVRGLDYYNGLVFEFLSDDLGAQNAILGGGRYDGLIKNLGGRDLSATGFALGIDRLADIVKLSSIKKDLFIGCVDKESRTYAQALGYKIRKDNSLLVVENYLGNANVGKQLKKADSQGFKFAIIVGQDELKSKTLKLKNLREDKPDLELKEKDLLEHFEC

SEQ ID NO: 161177 - protein, 170 aa, Unknown
  Bacterial polypetide isolated from the Sargasso Sea
NVNSKLVRGLDYYNQTVFEWKTNLLGSQDTIIGGGRYDRLVEELGGKSCPAIGFSIGMERLMLLLEEQGGMNIQDDLDIYFICLSESSAQEAIMYSEKLKDNFPSLRIKTNLGIESANSQFKKADKSGAKIALVIGSEELDNNKIGFKDLRTKSNQESLTFEDLLKKFKE

SEQ ID NO: 161178 - protein, 301 aa, Unknown
  Bacterial polypetide isolated from the Sargasso Sea
QFHQFGIECIGDDSPDVDFEVIKIAWDILSNLNFNNVLLNVNSLGDSKDRFIYTEELKKYFSKYINDLPKVDKLRFERSPLRILDSKEDITIKISEEAPKTLDFISSESLVHHENLILNLEELRSHDKKFNYKINNRLVRGLDYYNKTVFEYTSDSLGPQGVLLGGGRYDPLIKILGGQDTPAVGFAMGIERVVNELKKNIDVQKNYVDAVIIVTDENLRIESVQIANNLRNSNIRTIIAPRKSIKAQMRFANNIDSKAAVFIGKNELENQKLSIKLLQIKSEQFEIDIDDMNQLKKILNS

SEQ ID NO: 161179 - protein, 248 aa, Unknown
  Bacterial polypetide isolated from the Sargasso Sea
FNQINFENFGSDDYFADIEIINSANIILKKVIPNSNFILHINSLGTRENLIDYKKILSSFFEENKKSLSLESIDKINSNPLRILDSKNSEDKEIIKKSPKLIELLSKSDLNIYEEIKKCLKDLGISILEDLKLVRGLDYYCNTVFEFKTNEIGSQDTLIGGGRYNGLIKTLGGKDIPGVGWAGGIERIMLLMQDISFENKDIHLAIIEPNYRIHAIKVYDFLIKNNFSVFWNYKYNLKKSLSIANEKN

SEQ ID NO: 161180 - protein, 210 aa, Unknown
  Bacterial polypetide isolated from the Sargasso Sea
DKKLIETSPNILSFLDDESKFFYDSFKETLLKLNINFVENPNLVRGLDYYNHTAFEYIELNQQSNNKTILAGGRYDGLVNAIGGKDICGVGWAAGIERISSIISKNFINKNNFIISIFTLSEELDLILLKVIKKINNHKNISFNIIYSGSVKKKFSRANKIHSKACLIFGPDEYKDGNMIFKDLNSGNQEIFKISKVNDFLMKKSKNLKS

SEQ ID NO: 161181 - protein, 183 aa, Unknown
  Bacterial polypetide isolated from the Sargasso Sea
MTLTRNLDVLSIPYEVDHTLVRGFDYYTRTVFEIVPSVEKSQNTLIGGGRYDGLIKMLGGKPTPGIGFGMGLERVISAINKTSHQSDLNDYMKLLVAHIGDAAKERAVLLSSRIRNAGIPAVLAPTRGIKSQLRYATSISATHTIIIGDKELQTGEVVLRDFSTHSQETISEANLIQVLLNLI

SEQ ID NO: 161182 - protein, 255 aa, Unknown
  Bacterial polypetide isolated from the Sargasso Sea
MFRRERPQSGRLRQFHQVGLEVFDDGNFLNDVEIILIAEKFLELLDIKKKVRLEVNTLGSLESRKKYIDVLLDFLKKKKNRLSVESQKKLDLNPLRILDSKNQEDNDIIKQAPKLIDFLDEKSKLFFNNFIDSLKILKIDFSINYFLVRGLDYYNHTAFEYVTFEDKSQNAVLAGGRYDGLLKSLGGNDLNGIGWAAGIERILLCMEKIKSQRKIISCFSTSDSLNLIMFNIFRKLKINKGYALNFLLAGSFKKK

SEQ ID NO: 161183 - protein, 112 aa, Unknown
  Bacterial polypetide isolated from the Sargasso Sea
MSSKPNTPKGTRDFSSDQIVKRNYILKILVDSFKYFNYSEIQTPSFENLETLIGEYEDDQDGQMFKIISSGEKIKRADIDSLNKGELIKFSNSISDKALRYDLTVPLARYVS

SEQ ID NO: 161184 - protein, 180 aa, Unknown
  Bacterial polypetide isolated from the Sargasso Sea
MDLVSKKADKTEVSNRIFFTEKVIKNIFQSYCLSEIRTPALEDENLFKRSVGDTSDIVNKELYSFLDKNDKRIVLRPEGTAGVIRSIIEKKIDGDAHRLWYLGPMWRYERPQKGRFRQFYQAGIEILGHEEGLAELEMISLICSINTQLEIKNPVIKINHLGNKGCKKLFCKELVSYLKP

SEQ ID NO: 161185 - protein, 148 aa, Unknown
  Bacterial polypetide isolated from the Sargasso Sea
MKKLRSLKGTHDILPEDSYKWRHIESIVHEVCAQFGYQEIRTPIFEQKQLFSRGVGEESDIVTKEMYSWQDREDSFLTLRPELTASVVRAYIQHNLGNLSPVQRFYYIGPLFRRERPQKGRQRQFHQFGIEAFGISFAEQDAETIAIA

SEQ ID NO: 161186 - protein, 172 aa, Unknown
  Bacterial polypetide isolated from the Sargasso Sea
NIPFNINDKLVRGLDYYTRTVFEFNSTKLGAQDAILGGGRYDGLVEILGGKSTPGIGFAAGMERFLIAMDDEKVTNSSIDIYFVCLDEYGLSKTLQLSNQLRSSGLKVISDPLRRSMKSQLRDANRSGARFALILGETEMNDGTVGFKDLEKGIQKTILQSEVLNFFDNLTN

SEQ ID NO: 161187 - protein, 191 aa, Unknown
  Bacterial polypetide isolated from the Sargasso Sea
MSKLQPVRGTADLLPDVMAQHRLVIDTARYVTARYGFQEMATPIFEFSEVFSRPLGETSDIVTKENYSFADRGGEQLTLRPENTAGVVRAMISGGLTQSLPLKYFYAGPMFRYERPQKGRMRQFHQVGIEYLGPNDALADAEVISAGARFLAQLDVLPHCVLHLNSLGDVESRQAYRAALVGFLQTHESEL

SEQ ID NO: 161188 - protein, 92 aa, Unknown
  Bacterial polypetide isolated from the Sargasso Sea
MSKIQTLRGMNDIHPKQVKEWTFVEEVIKSVVESYGYEEIRFPVVEKTELYTRSNEAADIVTKEMYTFSDKSGESISLRPEGTAGCVRAAID

SEQ ID NO: 161189 - protein, 311 aa, Unknown
  Bacterial polypetide isolated from the Sargasso Sea
MRKLKTIRGMPDIFGNTLQKISFVEEVCRKTFHAHNFQEFRTPLLEDKDIFTRSVGETSDIVQKQMYEFQDKKGATLCLRPEGTVGLARALLTNGLDDSEIKKLFYIGPMFRYERPQKGRKRQFNQAGIELIADESYHADLEVIQVGVRILKDLNVKFKLEINYVGDVQTLSVYREHLRDFLLKNKTKIAEEFYQRLQRNPLRGLDSKDENIKAIFSKTKKLSDFLDSNQEQKFKSVINGLEALGIEYTINQDLVRGLDYYTGTVFEFITDKLGTQNALIGGGRYDTLLMDLGGKKLPAVGFALELIGLLN

SEQ ID NO: 161190 - protein, 204 aa, Unknown
  Bacterial polypetide isolated from the Sargasso Sea
ILLEDAPKISDFYSDADEEHFSELRKYLKKMNIPFNIDTHLVRGLDYYTRTTFEITSDILGAQDAVLGGGRYDELVETLGGKPTPAVGFAAGIERIIILMKNKKLLENRNSPDVYFSCLENNGLSIALSLSKKLRDSGIIVQMNTLRKSMKAQLREANKLEAKYAVILGDSEIKNKEVIIKNLEDGKQLKVAQSEMMDNFSDLT

SEQ ID NO: 161191 - protein, 134 aa, Unknown
  Bacterial polypetide isolated from the Sargasso Sea
MKINPIRGTHDLFGEEIKKFNRVLDEVKDTAQKFGFNEIITPIFESSELFKKPLGEQSDVVLKEMYTFNDRNKDEITLRPEYTTPMIRAAISNGLLNYLPAKFFGTGQMFRRERPQKGRYRQFNQINFENFGSE

SEQ ID NO: 161192 - protein, 238 aa, Unknown
  Bacterial polypetide isolated from the Sargasso Sea
MLKYLKSYKGDLNDNDKEKLNKNPLRLLDSKDVDLKEFLDKGPKIIDFLSSEQLNLLDKIQSIFGKYVEIELDSSLVRGLDYYTGLVFEAASSNLGAQDSFLGGGRYDGLSTDLGGKEMPAIGFAIGLERLNLIKKHKNIKSNKVISFVTTSSKMNALAFKIAQLLRSHNYDIRLETNFTDASLKAKLRKASKLGAKFVFIMGEEEFESDTITVKSFDEDGYQVNMSFDEILDFYKDI

SEQ ID NO: 161193 - protein, 244 aa, Unknown
  Bacterial polypetide isolated from the Sargasso Sea
YLLSLKTYYSNHLELLCNDCNNRMENNPLRLLDCKQKQCQPFLEDAPHSIDSLCQECRDHHEKLLGYLDSLQLAYIINSKLVRGLDYYNKTVFEIQPETEGSQNTIIGGGRYDGLIEQIGGQSTPGIGFGCGIERLILNLKSNNIEPPEIYEKPVVICHMGEDALNIAVPLSKKLRSNNIHTIIAPYGKSIRSQMRYASSNDSDYVVIIGEEEIKQKTYRVKDMNKSTEYDLNESDLINLILKI

SEQ ID NO: 161194 - protein, 50 aa, Unknown
  Bacterial polypetide isolated from the Sargasso Sea
MSKNQIRSIKGTQDILPGETEKWQRLEQLVRSTMDTYNYKEIRTPVFEKT

SEQ ID NO: 161195 - protein, 276 aa, Unknown
  Bacterial polypetide isolated from the Sargasso Sea
EVGMRFDLTVPFARFAAQHISKLGAPFKRYHMGTVWRGENTQRGRYREFMQCDFDTIGTTSAISDLETVLVVHDLLTAIGVDKFTIRINDRRILSGILEVLGLTGKTTHVLRCLDKTGKIPRDTLANELQEQGVSVPSVDCLLGLGELAGSATDVLSELHNLVGESAVGVQGVEAVGALLNGLAEVGVVDDRIAIDPSIARGLDYYTGIVLESFLDELPDLGSVCSGGRYDNLAELYTKQSLPGVGASLGIDRLLAGLEELDKLKSSETPASIFLV

SEQ ID NO: 161196 - protein, 203 aa, Unknown
  Bacterial polypetide isolated from the Sargasso Sea
FQADAELCVMISEILENCGLNKKDYIIKISSRKITEEIFKKIKIESEEQKLATLRALDKVDRLGWDGVKKLLGEGRKDKSGDFTKGANLSLKNIDLLEKELNNSSPETEDLKEILKIFNDYNFSNFEVDPSVIRGLEYYTGPIFEVNLKFDVKNNKGEVVQFGSIGGGGRYDNLVSNFGNYDAPATGISIGLDRLVYALMQKK

SEQ ID NO: 161197 - protein, 115 aa, Unknown
  Bacterial polypetide isolated from the Sargasso Sea
MSKITTLRGMNDLPPEEVRVWNLAEEAIQKVFNSYGYEEIRFPIVEKTELFTRSNESADVVTKEMYTFEDKGGDSISLRPEGTAGCVRAAIDNDLIRVDSPRLWYQGPMFRYERP

SEQ ID NO: 161198 - protein, 490 aa, Unknown
  Bacterial polypetide isolated from the Sargasso Sea
MAKEKKQNRPKAITPKGFRDYFGSEVTERNQMLKKIAEIYHSYGFEAFESSAVENVEALGKFLPDVDQPNEGIFAWQEDDQDWLALRYDLTAPLARVYAQYRNELPTPYRRYSMGPVWRNEKPGPGRFRQFYQCDADTVGSASIAADAEICMLLSDTLQNVGISDGDYIIKANNRKVLNGVLESMNIQETPKRDAILRTVDKFDKVGESGIRQLLGKGRLDSSGAYIGGVGLSDSEADMVLAFLTSKGTDIGTTLKNLKNLIGSSGVGLEGIDELETMAELFEAGGYSSNKISIDPSVVRGLGYYTGPVYEAELTFEIFDEKGRKRLFGSVSGGGRYDDLVKRFTGQSVPATGVSIGVDRLLAALKEKGRKQASGLGPVVVTVMDRDRISDYQKIVSELRNAGIRSEVYLGNPKNFGNQLKYADNRGSPAAIIEGTEERESGMIQVKDLILGKKLSEEATLEQWKDRPSQFTVKRDELVQKIIEILNSYK

SEQ ID NO: 161199 - protein, 93 aa, Unknown
  Bacterial polypetide isolated from the Sargasso Sea
MQSLRGMVDLLPEALQCWQAVEAVAREHFRRSGFGEIRTPLLETTDLFCRGIGEGTDVVGKEMYSFTDRGERACTLRPEGTASVVRAALQHGL

SEQ ID NO: 161200 - protein, 261 aa, Unknown
  Bacterial polypetide isolated from the Sargasso Sea
KNINLINNITLYINSLGDNQSRNNYRNVLVSYLKKFEKDLSTESKIRLQSNPLRILDSKNKTDQAILKNSPKYFDYLNNESRSYYENVCNSLTKLGIPFKQDEKLVRGLDYYSHTTFEFKTSLLGAQDTVVAGGRYDGLSKMISNYSLPGVGWAAGIERLALMTINKYNSSPKVTLVSQSNELNSTILKYYKFLIDNDIKTEMIYSGTINKKLKRANKTSSEYAIIIGENELENNLVQLKNLRNGKQLKLNINDVLDEIKK

SEQ ID NO: 161201 - protein, 258 aa, Unknown
  Bacterial polypetide isolated from the Sargasso Sea
MIEKTCKEVFLGFNYSEVRTPLIEYKSLFERSVGESSEIIQQKEVFELDDRKGEMLCLRPEGTAGLVRSLITNGLDDEEIKKFFYIGPMFRYERPQKGRKRQFFQAGVELIGNAIYGDLEVIQVAKMILDKLGIESNLEINFLGDNESLEAYNKYLDDYLSRSNEVPEYVKKNPIRALDSKDEKVKILMSEAKSIESFLNEKQKNKFLDIKNKLNELKINFRENKNLVRGLDYYNGLVFEFTSSELGAQNAIIWGRKI

SEQ ID NO: 161202 - protein, 256 aa, Unknown
  Bacterial polypetide isolated from the Sargasso Sea
LKLNSIGSENCRDKYKGELKKFLKPYLKDLSASSQKRFETNPLRILDTKSPSDIEIIKDAPRISNFWSNDDEVHFDELCELLDTLNIKYEVDSNLVRGLDYYSRTTFELISPSLGAQNAICGGGRYDKLVEMIGGKPTPGIGFAAGIERIMMTLKNYTDKNSIDIYVVGIGPKVRQTVFALADELRQSNLSTECDMLRRSIKSQLRDANKIGAKYAIIIGDKEFENKLVEVKNLNNGEQEKVAIKSIVSHMTSLSF

SEQ ID NO: 161203 - protein, 243 aa, Unknown
  Bacterial polypetide isolated from the Sargasso Sea
MDKIKTIKGTHDILPEFSHNWQYLEKTIHDSAKLFGYKEIRTPIIEQAKLFNRGIGEGTDIVSKEMYSWLDRDEKAIALRPEMTASVVRSFIQHNLGSQTPLQRLYYMGPSFRRERPQKGRQRQFHQFGVEAIGSNNPEQDAEVIILAWEILSKSGINNLELKLSSIGSDDCRNKYKNDLIKFLEPHKNKLTDVSRERLKYNPLRILDTKNEEEINILKAAPIIGDFYTNEDREHLKIYRNTK

SEQ ID NO: 161204 - protein, 233 aa, Unknown
  Bacterial polypetide isolated from the Sargasso Sea
MSRLQPARGTSDLLPSTMAAHRRVIDTARNAAGLYGFQEMSTPIFEFAEVFSRPLGDSSDVVTKETYNFNDRGGETLTLRPENTAGVVRAMISNGLTQSLPLKFFYAGPMFRYERPQKGRMRQFHQIGIEYLGPRDGLADAEIIACGARVLAGLGVLDHCRLHLNSLGDAESRQAYRAALLAFLQSHASELSVDSQSRLQTNPLRILDSKDAGDRAILENAPRLDGYINDASK

SEQ ID NO: 161205 - protein, 364 aa, Unknown
  Bacterial polypetide isolated from the Sargasso Sea
WLSLRYDLTAPLARYIAKNYLEIPKPFKRYQLGTVWRNEKPGPGRFREFLQFDADFVGTKSLQADAELCVMISEILENCGLNKEEYIIKISSRKITEEIFKKIKIDNIEQKLTVLRALDKIDRLGWDSVKKLLGEGRKDKSGDFTKGANLSSKNINFLEKELKNKSPETEDLKEILKIFSDYNFNNFEVDPSVIRGLEYYTGPIFEVNLKFDVKNNKGQVIQFGSIGGGGRYDNLVRNFGNYDAPATGISIGLDRLVYALLQKKELKVKQTKPIVICILDKNLMKEYISLQMILRSAGISTEIYPGEGKLKKQMEYANKIKSPAVILYGENEIKTSKPTLRDLVSGNEKSITIKDLANEIKKII

SEQ ID NO: 161206 - protein, 500 aa, Unknown
  Bacterial polypetide isolated from the Sargasso Sea
MINRCRRTFIMAKDKKQNRPKAITPKGFRDYFGSEVTERNQMLQKIAEIYQSYGFEALESSAVETVEALGKFLPDVDQPNEGVFAWQEDDQDWLALRYDLTAPLARVYAQYRNELPTPYRRYSMGPVWRNEKPGPGRFRQFYQCDADTVGSASIAADSEICMLLSDTLQNVGISEGDYIIKANNRKVLNGVLESMNIQETPKRDAILRTVDKFDKVRESGIRQLLGKGRLDASGAYIDGVGLSDSEADIVVAFLTSKGTDIETTLRNLKNLIGSSEIGLEGVNELETMAELFEAGGYGYNKISIDPSVVRGLGYYTGPVYEAELTFEIFDEKGRTRQFGSVSGGGRYDDLVKRFTGQSVPATGVSIGVDRLLAALKEKGRIKAAGLGPVVVTVMDRDRISDYQEIVAELRNAGIRSEVYLGNPKNFGNQLKYADNRGSPAAVIEGTEERESGTIQIKDLILGKKLSEEATLEEWKDRPSQFTVQRDELVQKIKEILNSYK

SEQ ID NO: 161207 - protein, 211 aa, Unknown
  Bacterial polypetide isolated from the Sargasso Sea
MKQIRSIKGTHDILPKDSYKWHQLESIVHDVCARFGYQEIRTPIFEESTLFSRSVGEESDIVTKEMYSWNDKSNTVLTLRPELTASVVRSYNQHNLGNLAPIQRFYYIGPLFRRERPQKGRQRQFHQFGVEAFGSKFAEQEAETIAVAWHILSKCGLTENTTLLLNSIGTSECRSAYQEALKHFLEPHLNDLSETSRKRLHHNPLRILDTK

SEQ ID NO: 161208 - protein, 74 aa, Unknown
  Bacterial polypetide isolated from the Sargasso Sea
YTTPMIRAAITNNLLNDLPLKIFGIGPMFRRERPQKGRYRQFNQINFEILGTRDFLADVELISLSNNILKHTFT

SEQ ID NO: 161209 - protein, 185 aa, Unknown
  Bacterial polypetide isolated from the Sargasso Sea
MTSDNKKKIKAERPRGFEDLSGEDLLLLEKIISTIEKTYQFYGFEKLETSIIELSNVIGSFLPDQDRPNEGVFSLEDDDSRWLSLRYDLTSGLARYVAENYDALPKPYRRYQSGWVFRNEKPGPGRFRQFMQVDADTVGSKNPLADAEMCMMFSDVFENIGIERNDYLIRLNNRNLLDALLDQSD

SEQ ID NO: 161210 - protein, 143 aa, Unknown
  Bacterial polypetide isolated from the Sargasso Sea
MKKLHSIKGTHDILPKEIYKWKALESIVNQTCEQFGYQEIRNPIFEETRLFSRSVGEETDIVTKEMYSWEDVDGASLTLRPELTASVVRSYIQHNLGTLSPIQRLYYSGPLFRRERPQKGRQRQFHQFGVEAFGSNNPEQDVK

SEQ ID NO: 161211 - protein, 183 aa, Unknown
  Bacterial polypetide isolated from the Sargasso Sea
MSDLKTIRGMPDLYGENIEAISMVEEICLKTFKSFNYKEFRTPLLENSALFSRSIGLTSDIVQKEMYEFKDKKGERLCMRPEGTAGLVRALITNGLDDEEIKKFFYIGPMFRYERPQKGRKRQFFQAGIELIGDRSIDSDIEIILVAKKILDELNIKYNLQVNYLGSVAEIEEYSAYLEEFMQ

SEQ ID NO: 161212 - protein, 154 aa, Unknown
  Bacterial polypetide isolated from the Sargasso Sea
MKRNISLVKGTHDIHGAEMEKFEFIIEKFYSICRNFNFKSIQTPILEQQDLFSRTVGEQTDIVSKEMYSFLDKGEAYICLRPEATSSLARFAASNYQSGLLKLITHGPMFRRERPQKGRYRQFHQINIESIGEKSPYVDFELNSIAKLLLMILE

SEQ ID NO: 161213 - protein, 150 aa, Unknown
  Bacterial polypetide isolated from the Sargasso Sea
MKLRSVRGTHDIFGEEIDKFNFISNIVSKNANLKEYKEIQTPIFEFSDLFAKPLGEHSDVVLKEMYSFEDRNNEYLTLRPEYTTPMIRAAITNNLLNDLPLKIFGIGPMFRRERPQKGRYRQFNQINFEILGTKDFLADVELISLSNNIL

SEQ ID NO: 161214 - protein, 183 aa, Unknown
  Bacterial polypetide isolated from the Sargasso Sea
LEEFKKIKSKLDEIGIQYEENASLVRGLDYYNGLVFEFLSDDLGAQNAILGGGRYDGLIKNLGGRDLSATGFALGIDRLADIVKLSSIKKDLFIGCVDKESRTYAQALGYKIRKDNSLLVVENYLGNANVGKQLKKADSQGFKFAIIVGQDELKSKTLKLKNLREDKPDLELKEKDLLEHFEC

SEQ ID NO: 161215 - protein, 165 aa, Unknown
  Bacterial polypetide isolated from the Sargasso Sea
MKLRSVRGTHDLFGINVEKYNIIQKIVTKFAEINSFKKLETPIFEFTELFSKPLGEQSDVVLKEMYTFKDRNKDFLTLRPEYTTPMIRAAITNNLLNDLPLKVFGIGPMFRRERPQKGRFRQFNQINFEIFGSDDCIADLELINLANDVLKSTLPNTKFILNINL

SEQ ID NO: 161216 - protein, 281 aa, Unknown
  Bacterial polypetide isolated from the Sargasso Sea
MEFKAQRGTADILPKDQYIWNFVQNKCSEVAKSFGYRFIETPIFEDSRIFERTVGEDTDIVDKEMYSFVDKGGDNISLRPENTAGVCRAFIENGLYNETLPARLFYYGPMFRYERPQAGRFRQFHQFGIECIGDSSHDNDFEVIKLAWNILNNLEINNTELNINSLGDKDDREVYVSKLIDYFSKYINDLPKVDKLRLERAPLRLLDSKEKITLNISQDAPKTLDFISKDSKNHHDKIIENLENLRGREKSFKYKDNDKLVRGLDYYNRTVFEYLSDSSGP

SEQ ID NO: 161217 - protein, 442 aa, Unknown
  Bacterial polypetide isolated from the Sargasso Sea
FNPLTLKRRRYITNTIRSVFTSFGYNEIETPSIEKRNTLYQKYGSDGDKFIFNIINSGEKIKKADIKSFNNEKYNDFISSISEKGLRFDLTVPLARYVSQHQSEITFPFKRFQIQNVWRADRPQKGRYQEFTQCDADVIGSNSIMLEYEMLQLFSDVFRKLKLDSVNIRINHRRVLNKIANHIGIVEDFNEFLVIIDKIDKIGIDKAKEEVKNKFKDLRNLDELFEMISKKMSPKTYLNNLKSNFIDHDDDNLLDEIETLSKLIMNDKKLINIEFDLSLARGLEYYTGLIYEVSLGSDSEIGSLGGGGRYENLTEAFNLKDNSGIGISFGLDRIYHVIDDKNLFPKDLSLNNDILVINFGKKYLIEIFEKINQLRANGWKVSIYPDNNKLSKQFNYSNKNNFKYACIYGESESESNCIKIKDLQSGSESNFGFDNFIKNFKG

SEQ ID NO: 161218 - protein, 359 aa, Unknown
  Bacterial polypetide isolated from the Sargasso Sea
MVRALVCGTRGRWFESTLLYQKMTKEKKNKPSKELPLGFVDRQEKELLVRDFIISNIKEVMIKYGFQYLETPSFEYSDSIGKFLPDKDRPDEGVFSFKDENKWLSLRYDLTAPLARYVAKNYLEIPKPFKRYQLGTVWRNEKPGPGRFREFLQFDADYVGTKSLQADAELCIMISEILEKCGLTKSEYTIKISSRKITEELFKKLNINDSQQKLTTLRALDKIDRLGWGGVKELLGKGRKDKSGDFTKGANLKLENIKIIEETLKTNSPETEDLVEILKIFKDYDFNNYEFDPSIIRGLEYYTGAIFEVNLKFDVTNNKGQVIQFGSIGGGGRYDNLVNNFGSYDAPATGISIGLDRLV

SEQ ID NO: 161219 - protein, 294 aa, Unknown
  Bacterial polypetide isolated from the Sargasso Sea
LPWGSATDGVGQRGAHQLLAATLSRGCGPFDHRQLADLVEGRGAGLRSDAHEDGLLISLRCTTEDAQELMPLLDWMVTAPHLATEQLELERSLSLQALQCQREDPFHLAIDQWRQLVYGSTGYGHDPLGVSDDLQRLDATVLQTLARQLTTGCSVLAISGTWPSSLEDMLLKRTGEGWQDTTDAPPPPPMHWMSNGDGDLVMQSIDTEQVVLMLGQPCCAYGHPDDLALRLLQCHLGSGMSSLLFRRLREDHGVAYDVGAHHPARAGAAPFVLHASSSAERAELTLSLLHQSWH

SEQ ID NO: 161220 - protein, 292 aa, Unknown
  Bacterial polypetide isolated from the Sargasso Sea
SRPRRTPRTQPAPRPARVQRLPAGGAPGGEVNTAQIPAAHLAGGARPLAASATGRGETMPSRPDRVPEAPAPIQASCPPQPGPRQRDPSAPESSQAACLRATETIRTGADAQGLGGGAPMGPLRAAQHRARRRRPLLRHHAQWAHLRPRPARPRRGLRPCRHGRDRQQDDARGHASHRGPPGPRQPWHHPLHALGRVPGWRPHHPRPGQGRPGPAHPRQGSLAPLRRPRHPLGHAGHLGHPVQPRGLRPPAERLTEAPGTPSRPRPCAAPPHAGAPSPGFRRSGACGLVSAP

SEQ ID NO: 161221 - protein, 95 aa, Unknown
  Bacterial polypetide isolated from the Sargasso Sea
MSEDFRLISVAALLTQDGVAVGDRIRLRGWVRTRRDSKAGLSFVQLHDGSCFEPAQVVAPGELENYATDVQNLTTGCSLIAEGEVVASEGKGQSV

SEQ ID NO: 161222 - protein, 43 aa, Unknown
  Bacterial polypetide isolated from the Sargasso Sea
RRFGTVTHSGFGLGFERLILLCTGMENIRDVIPYPRWPGNCIS

SEQ ID NO: 161223 - protein, 156 aa, Unknown
  Bacterial polypetide isolated from the Sargasso Sea
MRLKRTKIISINDSHNETEVHVSGWVRTKRQSKNVSFVSLNDGSTINNLQIVFEMSDFTESFIDEISTGCSLSVVGKLLKSEGKNQKFEILASKVEILGKAHPDEYPIQPKRHTFEFLRDVAHLRPRTNTFSAIFRIRHSVIFSIHKFFNDRGFFN

SEQ ID NO: 161224 - protein, 208 aa, Unknown
  Bacterial polypetide isolated from the Sargasso Sea
MKTTIAQLKDFEGKEVSLNGWVYNMRSIGKIWFLILRDGTGLVQCVVVKAETEKEVFELENTLTQESSVTVTGTVRSEPRSVGGYEIGVSQIKVHQVAQEYPISHKEHGTDFLMSNRHLWLRSKNQNAILRVRHQVIKATRDFYDNNGFTLMDSPILTANSVEGTSTLFELDYFDRSAYLTQSGQLYGESSAMAFGKVYVFGPTFRAE

SEQ ID NO: 161225 - protein, 160 aa, Unknown
  Bacterial polypetide isolated from the Sargasso Sea
MYQARTKREEVTKLSNNPVVKGTWRPTVELKSRLSLAKAWRMIRGAQSGTAGLGLVWQRRKEDIVAEERAELLRSYEDIAEHERYLHCLSNEFFAEWVKWGNSLATDPQWTSWIMSGEDDLFRFNLAATEDVLPTLSVLKCWNKITDARCHVCKRRLTAH

SEQ ID NO: 161226 - protein, 257 aa, Unknown
  Bacterial polypetide isolated from the Sargasso Sea
MAVGADVLTASGQLRIADPDVGESFFNEGTVPGTHGSLTITPDGAWTYEVDNALPAVQGLGEDQFLTDTVTVTSVDGTEQDIEITITGTNDVPVIGGDVSGSVIEDDALTVSGQLEITDADAGEAFFNEGTVSGTHGSLTITPDGSWSYTADNELAEVQGLGEGAQLTDTVTVTSLDGTEQSIEITITGTNDVPFVSGELSGSVVEDEVFAASGQLSIADVDAGEAFFYEGTVSGAHGSLTIDASGAWTYKVDNDQA

SEQ ID NO: 161227 - protein, 225 aa, Unknown
  Bacterial polypetide isolated from the Sargasso Sea
MAIILKTLIKIRLKYLLNLFICLLSVQYIFSQENNLGYKEDQFYLGVSYFMQIKDIEDFKQNGFSGNFQAGFIKDISLDKNNQRALGLGLGFERNRFTSNIQASLNSDNQVDYRLVISRFLESKNELNYSSIVFPIELRFRNSTPDRYDFWRIYTGFKFKRNYYINSNPSYGRSLKIKDRREWTHSIYLNSGFNTWNISLEYDLNSLLEGTKTDIGNEIDIKFLK

SEQ ID NO: 161228 - protein, 148 aa, Unknown
  Bacterial polypetide isolated from the Sargasso Sea
KSIGLGYTTVTSIFEKTGTNLKETTTLKTNFYDLAFGLGENYSFMWGAGVLSGLEHERYLEYTDKGKDQLWVNSDPVGHSLFFMLAHHGFGFETLLGYRMNFIKTEFYDSNIPSHMGKSPAAGKDVSYEDTNISITTSQVQLGIGVTF

SEQ ID NO: 161229 - protein, 166 aa, Unknown
  Bacterial polypetide isolated from the Sargasso Sea
MTAIEHLEREKILPIKNLPKAQDVRSLGVVVEDIVLPASYTIQWMAEQLADRLYKKVMLRGIHPGHCSVLYDHAVKDKLFPGNQGGISTFLQMVNSSLRTIPGASHSSHMLQLTQSIKESLLFDCNCGSHNTSISPLTVSGQLMSPSDAAGTVEYKTERHSEVNFE

SEQ ID NO: 161230 - protein, 261 aa, Unknown
  Bacterial polypetide isolated from the Sargasso Sea
MKNISYLLSLLLTFSYVSFADEAVKDIPKESDKVSEDVADEVVDEKAEEDKEPTISEFLEEGEFEVFEGMIDIYYETEEDTYYTIIEEENLTKEFIYFYYIISGAQAGGASGGDMGDSSVLEFRKFKDDIALYKKNTIFNYDDSNNISKSTLTNILESFVGRFEVKIEEEGKYLINIDKLFLGEMLVGLTPPKEYAEYYSLILGRIDDKKTYISRVKNYPKNTSIEVTYGFFNPSPKGSVDAVPDARYSSIVARHMFVEMP

SEQ ID NO: 161231 - protein, 349 aa, Unknown
  Bacterial polypetide isolated from the Sargasso Sea
MKNISYLLSLLLAFSYVSFADEEVKEAPKESKEVAEDVAEEPVDEKSEEDKEPTISEFIEEGEFEVFEGMIDIYYETEEDTYYTIVEEENLSKEFIYFYYIISGAQAGGASGGDMGDSSVLEFRKFKDDIALYKKNTVFSYDDSNNISKSTLTNILESFVGRFEVKIEEEDRYLINIDKLFLGEMLVGLTPPKEYAEYYSLILGRIDDKKTYISRVKNYPKNTSIEVTYGFFNPSPKGSVDAVPDARYSSIVARHMFVEMPDDNYEPRVADQRVGYFSTKITDLSTYDYFKGKDLINRWRLIKKDPTAEISEPINPIVFWVENSTPEEIKPFVVEAIELWNIAFEKAGI

SEQ ID NO: 161232 - protein, 218 aa, Unknown
  Bacterial polypetide isolated from the Sargasso Sea
MKTVTINQLSEYEGQDVELKGWVYNTRNVGKLWFIIFRDGTGLLQGVVVKGEATDESFLLENDLNQEDSIILNGTVRKEPRSIGGYELGVKEIEVVKHVSDEFPISHKEHGADFLMSNRHLWLRSKRQNAIMRIRHQVVRAIRNFFDNNGFTLIDSPIFTGNAVEGTTTLFEVDYFERSAYLTQSGQLYQEAGATAFGKTYCFGPTFRAEKSKTRRHL

SEQ ID NO: 161233 - protein, 193 aa, Unknown
  Bacterial polypetide isolated from the Sargasso Sea
MKNIRINQVKNHKDELVKINGWVYNSRRSGKIGFLTLRDGFGLLQCIVAKNDIGDELFENFKRVTQETSISVSGKVVENERAIGGYELLLESFKINHLSHDYPITPKEHGTEFLMSNRHLWLRSKRQHSILKIRHQIIKSIRDFFDNNDFTLVDTPIFTPNAAEGTSTLFKTEYFGKDAFLAQTGQLYGEASA

SEQ ID NO: 161234 - protein, 92 aa, Unknown
  Bacterial polypetide isolated from the Sargasso Sea
QTVRAMDLLVPGVGELIGGSEREEKMDPLLRAIEEKGMSRKPLEWYLELRKWGSCPHGGFGLGFERAVMYITGMSNIRDAIPFPRTPNSVQF

SEQ ID NO: 161235 - protein, 262 aa, Unknown
  Bacterial polypetide isolated from the Sargasso Sea
MKNISYLLSLLLAFSYVSFADEEVKEAPKESEEVAEEVTEESSGEEAEEDKEPTISEFIEEGDFEVIEGMLDIYYETEEDTYYTIIEEGNLSKEFIYFYYIISGAQAGGASGGDMGDSSVLEFRKFKDDIALYKKNTVFNYDDSNNISKSTLTNILESFVGRFEVKIEEEGRYLINIDKLFLGEMLVGLTPPKEYAEYYSLILGRIDDKKTYISRVKNYPKNTSIEVTYGFFNPSPKGSVDAVPDARYSSIVARHMFVEMPD

SEQ ID NO: 161236 - protein, 104 aa, Unknown
  Bacterial polypetide isolated from the Sargasso Sea
AFYMKRDNENEKLALGVDMLAPEGYGEIIGGGQREDNLKILEKRIEEHGLDKKDFKWYLDLRKFGSVPHSGFGLGIERTVAWIAGIKHIRETIPFPRTISRLEP

SEQ ID NO: 161237 - protein, 241 aa, Unknown
  Bacterial polypetide isolated from the Sargasso Sea
MKSHWVGDVLAGAHDGETVELKGWVYRSASKKNISFLRLRDSTGNVQCVAKRDIIGDDAFEAFSSALIESSMIIRGEVVPTERQHGHEILVTSVEIVGSVDSQRPFPIGETDMLHTDEEGELMYGGSQNCLDNRHLYLRTTRATTMLKLRSSAFGAIHDYFRSREFIEYQAPNFVAGAVEGGSTLFEVPYFDKTAYLTQSWQLYAEAAMPALERLYTIAPSFRAEESRTRRHLTEFWHAEM

SEQ ID NO: 161238 - protein, 244 aa, Unknown
  Bacterial polypetide isolated from the Sargasso Sea
MKNKSINKLKDFIGKEVQLNGWIYNLRSVGKIWFAIVRDGTGFVQCVVTSNDVSTDVFELESALTQESSVTVTGIVQEDSRSDLGVEILVKDMEVIHIAEEYPIALKEHGVSFLMDNRHLWLRSKKQYAIMKVRQNVIKSIRDFFDTRDFVLIDSPMFTGNAVEGTTTLFETEYFNRSAYLTQSGQLYQEAGAMAFGKTYCFGPCFRAEKSKTRKHLTEFWMVEPEMAFYDLKNNMDLIEEFIV

SEQ ID NO: 161239 - protein, 259 aa, Unknown
  Bacterial polypetide isolated from the Sargasso Sea
MLSLLLAFSSVSFADEEVKEAPKESEEVVEEVAEESSGEEAEEDKEPTISEFIEEGDFEVIEGMLDIYYETEEDTYYTIIEEGNLSKEFIYFYYIISGAQAGGASGGDMGDSSVLEFRKFKDDIALYKKNTVFNYDDSNNISKSTLTNILESFVGRFEVKIEEEGRYLINIDKLFLGEMLVGLTPPKEYAEYYSLILGRIDDKKTYISRVKNYPKNTSIEVTYGFFNPSPKGSVDAVPDARYSSIVARHMFVEMPDDNY

SEQ ID NO: 161240 - protein, 281 aa, Unknown
  Bacterial polypetide isolated from the Sargasso Sea
GMLDIYYETEEDTYYTIIEEGNLSKEFIYFYYIISGAQAGGASGGDMGDSSVLEFRKFKDDIALYKKNTVFNYDDSNNISKSTLTNILESFVGRFEVKIEEEGRYLINIDKLFLGEMLVGLTPPKEYAEYYSLILGRIDDKKTYISRVKNYPKNTSIEVTYGFFNPSPKGSVDAVPDARYSSIVARHMFVEMPDDNYEPRVADQRVGYFSTKITDLSTYDYFKGKDLINRWRLIKKDPTAEISEPINPIVFWVENSTPEEIKPFVVEAIELWNIAFEKARI

SEQ ID NO: 161241 - protein, 260 aa, Unknown
  Bacterial polypetide isolated from the Sargasso Sea
MENISINKLKNFIGKEVQLNGWIYNLRSVGKIWFAIVRDGTGFVQCVVTSNDVSKDVFGLESTLTQESSVIVKGLVQEDSRSDLGVEILVKDIEVIHIAEEYPIALKEHGVSFLMDNRHLWLRSKKQYAIMKVRQNIIKSIRDFFDSRDFVLIDSPMFTGNAVEGTTTLFETEYFNRSAYLTQSGQLYQEAGAMAFGKTYCFGPCFRAEKSKTRKHLTEFWMVEPEMAFYDLKDNMDLIEEFIVHIVSQSIKSCKEELKI

SEQ ID NO: 161242 - protein, 71 aa, Unknown
  Bacterial polypetide isolated from the Sargasso Sea
REDDHDTLVKRIEDHGLPLSAFKWYLDLRKYGSVTHSGFGLGLERTVSWICGIDHVRQTIPFPRTMGRLEP

SEQ ID NO: 161243 - protein, 227 aa, Unknown
  Bacterial polypetide isolated from the Sargasso Sea
MKNISYLLSLLLVFSYVSFADDESMEAPKDSEEVVEDVAEDAVDEETEEDEDKEPTISEFIEEGEFEVIEGMLDIYYETEEDTYYTIIEEENLSKEFIYFYYIISGAQAGGASGGDMGDSSVLEFRKFKDDLALYKKNTVFNYDDSNNISKSTLTNILESFVGRFEVKIEEEGRYLINIDKLFLGEMLVGLTPPKEFAEYYSLILGRIDDKKTYISRVKNYPKEYLH

SEQ ID NO: 161244 - protein, 810 aa, Unknown
  Bacterial polypetide isolated from the Sargasso Sea
MKNISYFLSLLLAFSYVSFADEEIKEAPKESEDVLEEVTEESSDEEAEEDKEPTISEFIEEGDFEVIEGMLDIYYETEEDTYYTIIEEGNLSKEFIYFYYIISGAQAGGASGGDMGDSSVLEFRKFKDDIALYKKNTVFNYDDSNNISKSTLTNILESFVGRFEVKIEEEGRYLINIDKLFLGEMLVGLTPPKEYAEYYSLILGRIDDKKTYISRVKNYPKNTSIEVTYGFFNPSPKGSVDAVPDARYSSIVARHMFVEMPDDNYEPRVADQRVGYFSTKITDLSTYDYFKGKDLINRWRLIKKDPTAEISEPINPIVFWVENSTPEEIKPFVVEAIELWNVAFEKAGFKNAVVAKIQPDDAEWDAGDVQYNVIRWASTPSPRYSGYGPSVANPRTGEMIAADIVQEFNSISYGYRLRKIWGYDEENDPLRQWIVSLTLHEIGHTLGLRHNFKASWLYGPTEIHDKSVTGKNHIGSVMDYDPINIAPEGVEQGNYFPTVPGFYDIWAITFGYTPDMTEEERNNLLAQSTKPELIFGTDDDAMGSPGRNTDPRNKRYDMSKDPITYTVQRIQTIDKKIAELPEIFNEPGSTYSELKGTFDSLVRDKGRFLESVAIQIGGVYSNRLVVGQNENMTPFEVVPYSEQKRAMEVLNTELFANDAFTFDPEILKLLQSEKRAASYGNSDNDPKIHDLVLRMQMSSLSFILHPRVMKRLTDSAQYGNEYLPNEVLEDIFNGIFVPREIPGTFKMNLQSAYVDGLIAAMDDGSYDEISRAAIFSSLNKIKNFTNSAYGNDMVKGHFDYLNWKINDALD

SEQ ID NO: 161245 - protein, 92 aa, Unknown
  Bacterial polypetide isolated from the Sargasso Sea
MPNIKLPDGKEINFDKPITGLDIAEKISKTLAKQATVISINDELKDLDHLIKNDSKVKIFTSKDAEGLDTIRHDTAHITAMAVQELFPGTQV

SEQ ID NO: 161246 - protein, 179 aa, Unknown
  Bacterial polypetide isolated from the Sargasso Sea
MAKLHDKYQETVVAELTKKFGYTSVMQVPRIEKITLNMGVGEAVADKKVMEHAVRDMTAIAGQKPVVTVARKSVAGFKIREGYPIGCKVTLRGERMWEFLERLVDIAIPRIRDFRGLSAKAFDGRGNYAMGVREQIIFPEIDYDKIDKIRGMDIVITTSANSDEEGRALLDAFNFPFKK

SEQ ID NO: 161247 - protein, 94 aa, Unknown
  Bacterial polypetide isolated from the Sargasso Sea
MTLKNRYKESIRPKLLKDLGLKNIHQVPKVVKVNVNRGLGEAASNSKALEASLNEMATITGQKALVTRAKKAIAGFKIREGMPIGCTVTLRGDR

SEQ ID NO: 161248 - protein, 50 aa, Unknown
  Bacterial polypetide isolated from the Sargasso Sea
MLHRALFGSLERFIGILIENYSGKLPFWISPLQTMVIPVSEDFDNYAKEV

SEQ ID NO: 161249 - protein, 179 aa, Unknown
  Bacterial polypetide isolated from the Sargasso Sea
MTLKNRYKESIRPKLLKDLGLKNIHQVPKVVKVNVNRGLGEAASNSKALEASLNEMATITGQKALVTRAKKAIAGFKIREGMPIGCTVTLRGDRMYSFLERFINLALPRIRDFRGVNPKSFDGRGNYTVGVKEQLIFPEISFDKIDSIRGMDITIVTSAKSDQEGKALLQELGMPFSKN

SEQ ID NO: 161250 - protein, 167 aa, Unknown
  Bacterial polypetide isolated from the Sargasso Sea
EFGYKSPMQVPKLQKVVFNVGVGESLTNSNAIESVVRMISTISGQKPVVTKARNSLAGFKIREGMSIGVMATLRSKRMYEFVDRLINVALPRIRDFRGIPTKSFDGRGNYSLGINEQVIFPEIDYAQIDKLRSFQVTVVTSAKSDQEALRLLQLMGFPFIQNQNRQN

SEQ ID NO: 161251 - protein, 188 aa, Unknown
  Bacterial polypetide isolated from the Sargasso Sea
MPNIKLPDGNTLTFEKKVNGLKIAEKISKSLAKQALIMEVDGELKDLFFEINKDSKVKIITSKDQEGLDAMRHDTTHIMAMAVQKLFPDTKLAIGPAIKDGFYYDFSRKEPFTPDDLIKIEKKMKEIVEKDEKTKREVWERKEAKDHYHKIGENYKVELVDSVPKDQEISVYYHGKWYDLCRGPPFII

SEQ ID NO: 161252 - protein, 111 aa, Unknown
  Bacterial polypetide isolated from the Sargasso Sea
MIYVDIGEGESHEYASGISAGEVIKNVHGRKSGAVAAFVNGEERDMSFALDENCKIEPILGDSEEGLYILRHSCAHLLAQAVTQLYPDAKPTIRPPIEHGFYYDFAMDPIG

SEQ ID NO: 161253 - protein, 93 aa, Unknown
  Bacterial polypetide isolated from the Sargasso Sea
MFLSLDRHNEFCFEVGKRISEAGFRVEVNDSNDRMNAKIRQAQLQKIPYMLVAGDREVEAQSLSVRTKSGDNLDPMSIDQVIDRFIKQVADRS

SEQ ID NO: 161254 - protein, 280 aa, Unknown
  Bacterial polypetide isolated from the Sargasso Sea
KPLLFDYQIKFWKWIADYYHCSFGHVMRASIPSTLLLESETRMIINSEVKIDKNSLSDEQFLIYEALEKSILKIDDLIKISGNKNPIKLIQPLIDNGFITSYQKIEKKYKSKIERVFKIKNPKELQANLSLLKRSPQQTRFILSLHSFDNKGEKWISAKKVFNKSNTNSQIANKLLEKKIIEDRKVEIDRITNKHKTSISLQDLSPDQSKAFDQIKDELLKKNIVLFQGVTSSGKTAIYMKLIKEITDNGGQVLFLLPEISITSQMVSRFNNYFAGIVQV

SEQ ID NO: 161255 - protein, 103 aa, Unknown
  Bacterial polypetide isolated from the Sargasso Sea
FWLSPLQAVVATITSDTDEYAYEVQKALVSKGIRAEIDTRNEKIGYKIREHSNSKVPAIIAVGKKEAEDKTVSVRRIGSSETKTFKLEDIVTSLSKEAKSPIE

SEQ ID NO: 161256 - protein, 129 aa, Unknown
  Bacterial polypetide isolated from the Sargasso Sea
MLHRALFGSLERFIGILIENYAGKLPFWLSPSQAVVCPIAEDNNNYAKKLFEDLFKESIKCEVDLRNQKISYKIREHSLAKVPLILVCGKKEEKDKTVTVRTLGSEKQETFKRDEIIKRIVQSNKMPAN

SEQ ID NO: 161257 - protein, 132 aa, Unknown
  Bacterial polypetide isolated from the Sargasso Sea
MSRLLEEFNKHIKHDLKSKLELNNIFEVPKIKKIILNMGVGEGKDDSKLIDRALEDLTLISGQKAVKTKSKKAISGFKIREGMPLGVKVTLRNKIMYEFLDRLVNIAIPRIRDFRGLNINSFDGNGNFSMGY

SEQ ID NO: 161258 - protein, 269 aa, Unknown
  Bacterial polypetide isolated from the Sargasso Sea
SSFIDLASEYSEDIVTKDNGGDLDYFERDIFPEEFEKGIEALALNDYSKIIELEDTFHILKVTEINKQQPLSEDQIKDEVINELIETESLALMNDDFSLLEDLIFDNSSIEEIASNISKEALESDFFTKSNYDFYIVNNEIKDYIFSTDSQINQPYAIELDDKIIVVSVSSVADPKLQSFEEVAEDVADLLSESKAIEKLALMNNELQSIKNDEDKKFFVDTYNYVTQDTFVNVKRYSSLLPQEVLSEIFNNVPDTTISTNANNKDSFI

SEQ ID NO: 161259 - protein, 86 aa, Unknown
  Bacterial polypetide isolated from the Sargasso Sea
MIPRLKEQYNNELKTKIMSNLQLKNINEIPTLEKIIINIGDGKAATDGRALESMVDELTAISGQKPVIRRAKKSIAGFKIREGMPI

SEQ ID NO: 161260 - protein, 143 aa, Unknown
  Bacterial polypetide isolated from the Sargasso Sea
VYGPGMSIIDYRIIPNITRSLIYNEQLSVYDSGNQTRTYCYVTDALNGFLKVVVKNEKFGVYNIGNDNGEISVLDLVKKTEKVMNEKINYKKTPYPAEYPPDEPNRRCPDLTNSKKNLNYFPMVSLDDGLKRHLDWAKNNLEN

SEQ ID NO: 161261 - protein, 109 aa, Unknown
  Bacterial polypetide isolated from the Sargasso Sea
MISVIFPDDSVKKFDKGVKVIDVAKSISEGLARKVISASFNNETLELNSKLVTDGNIKLFTWEDDEGKQAFWHSSAHILAQTIKFFYPKSKLTIGPFIENGFYYDVDFG

SEQ ID NO: 161262 - protein, 158 aa, Unknown
  Bacterial polypetide isolated from the Sargasso Sea
MEKEPITVNGLEKLKQELILLKEKKRPEIVAAIAEARSHGDLKENAEYHAAKEQQSHNEGRIQEVENIIARANVIDVTKISNDGKVIFGSSVFLQNLDTNEKINYKIVGKDEADLKQKLLYFKSPIGKGLIGKNKGDLVEVNTPAGVKNFEIIDVKYI

SEQ ID NO: 161263 - protein, 61 aa, Unknown
  Bacterial polypetide isolated from the Sargasso Sea
VKKMTPRDEVIAEFENRGEQYKLKLIEDMPEEEAMGLYYHQEYIDMCRGPHVPNNSFLENF

SEQ ID NO: 161264 - protein, 89 aa, Unknown
  Bacterial polypetide isolated from the Sargasso Sea
MPNIKLPDGNTISFEKKVTGLQIAEKISKSLSKQALVISVDGNLKDLSYEIDKDCSVKIHTAKDKEGIETIRHDTAHVLAMAVQELFPG

SEQ ID NO: 161265 - protein, 266 aa, Unknown
  Bacterial polypetide isolated from the Sargasso Sea
AMDPIGDEELRQIEKRMKELVKQNIPIEREELDNESLRDIFSSNPFKLEIMDDKIGHDVGSSAYRQGDFIDLCKGPHVSLTSQLRWFKLTSTSQAYWRADKDRGSLVRIYGMCYPSKDGLKERERQIQEAARRDHKKIGKEMGLYMINELIGKGLPVWLPYGEVLKSEIENFAIETEEAYGYDRVTTPVLGKKELFETSGHLPHYAEGMYPPMKMDDGDYYLKAMNCPMHHLVFTNSKRSYRDLPIRIAEYGTVYRNELSGTLAGL

SEQ ID NO: 161266 - protein, 32 aa, Unknown
  Bacterial polypetide isolated from the Sargasso Sea
TAHLMAQAVKELFPKAKVTIGSYNREWFLLRF

SEQ ID NO: 161267 - protein, 176 aa, Unknown
  Bacterial polypetide isolated from the Sargasso Sea
MSRLLEEYNSNIKKELKSKLGLQNIFQVPKLKKIVLNMGVGDGKEDSKLIDKALDDLTLISGQKAVKTKSKKAISGFKIREGMPLGVKVTLRNKMMYEFLDRLVNIAIPRIRDFRGLSTKSFDNNGNFSMGIKEHVIFPEINFDKVEKIRGMDITICTSGKNNNEALELLKSFNMP

SEQ ID NO: 161268 - protein, 128 aa, Unknown
  Bacterial polypetide isolated from the Sargasso Sea
LHRALFGSLERFIGILIENYAGKFPFWISPLQTMVIPISEEFNDYAVEVFKKIKKAGISSAVDLKNNNLNYKIRDHSLSKIPVLLICGKKEVDSNSVTIRRLDSNKQENMDIDQFLKTFSALNKASSN

SEQ ID NO: 161269 - protein, 141 aa, Unknown
  Bacterial polypetide isolated from the Sargasso Sea
MISVDIGEGESHEYASGISAGEVIKNVHGRKSGAVAAFVNGEERDMSFALDENCKLEPILGDSEEGLYILRHSCAHLLAQAVTQLYPDAKPTIGPPIEHGFYYDFAMDPIGDEELRQIEKRMKELVKQNIPIEREELDNES

SEQ ID NO: 161270 - protein, 37 aa, Unknown
  Bacterial polypetide isolated from the Sargasso Sea
MIHRALFGSLERFIGILIENYAGKFPFWISPLQTVVI

SEQ ID NO: 161271 - protein, 85 aa, Unknown
  Bacterial polypetide isolated from the Sargasso Sea
VIDITKIVNDGKVIFGSTVYLQNLDTNEKINYKIVGKDEADLKQKLLYFQSPIGKGLIGKNKGDLVEINTPAGAKNFEIIDVKYV

SEQ ID NO: 161272 - protein, 179 aa, Unknown
  Bacterial polypetide isolated from the Sargasso Sea
MVNLKQKYINEIVPHLKDSLGLVNVMAVPRITKITLNMGVGEAVGDKKVMENALADLEKISGQKPVVTKSRKSIAGFKIREGWPIGCKVTLRSQRMYEFLDRLISIAIPRIRDFRGVSPKSFDGKGNFAMGVTEQIIFPEIDYDQIDSLRGLDITITTTARTDDEGRALLRAFNFPLKE

SEQ ID NO: 161273 - protein, 118 aa, Unknown
  Bacterial polypetide isolated from the Sargasso Sea
MTLKTRYKETIRPKLLKDLGLKNIHQVPKVIKVNVNRGLGEAASNSKALEASLNEIATITGQKALVTRAKKAIAGFKIREGMAIGCTVTLRGDRMYSFLERFINLALPRIRDFRGVNP

SEQ ID NO: 161274 - protein, 106 aa, Unknown
  Bacterial polypetide isolated from the Sargasso Sea
MIKVECNNEIHEFSSEISVNEVIKKVYGKKSSAIAALVDNEQKDLSYLLYQDCKIELIKDCSNEGLYIMRHSCAHLLAQAVTELFPDAKPTIGPPIDDGFYYDFHM

SEQ ID NO: 161275 - protein, 221 aa, Unknown
  Bacterial polypetide isolated from the Sargasso Sea
GGKEMWMDWRMAEFGVAAVPCGSAPRELFAHSHKPIRSLDDYKGMKVRTAGAWAEIAQKLGASTVILAGAEVYPALERKVVDAIEWGTPTHNIVMGFEKVAKYIVVPGVHQPIAMHECAVNKKVWDGMSDMIKKQITAGGKMMTWDLYMKLGHDDAPNWMKYVNSKKNEIIDLPQSFKDAAKKATDEWAEETGKKANDWFRKIWASQNAYKDAWSQAHRYR

SEQ ID NO: 161276 - protein, 121 aa, Unknown
  Bacterial polypetide isolated from the Sargasso Sea
ITGQKALVTRAKKAIAGFKIREGMPIGCTVTLRGDRMYSFLERFINLALPRIRDFRGVNPKSFDGRGNYTVGVKEQLIFPEISFDKIDSIRGMDITIVTSAKSDQEGKALLQELGMPFSKN

SEQ ID NO: 161277 - protein, 297 aa, Unknown
  Bacterial polypetide isolated from the Sargasso Sea
ALQEEIVQIARNSGMRLIGPNSMGVIDTRARMTLTINAFLEDPELKSGRIGVISQSGTVIGTMMSRGSARGIGFSNLVSIGNECDVGVGELLGLMVDDAGTDAVLLFLEGIRDAEALAANARRAFEVGKPVIAYKLGRSDVGRELAVSHSGAIAGPDASVDAFFRHHGILRVDMLETLFELPPLIINARPTPGHRVAVVTTTGGGSAMVVDRLGAAGLELVPPSTRLKARMAEFGLDLGNRRVIDLTMAGTGKGVYGAALDVLLNEDKLDAVVAVVGTSAQFHPEVAVQPIIDAPKT

SEQ ID NO: 161278 - protein, 303 aa, Unknown
  Bacterial polypetide isolated from the Sargasso Sea
WDISWLPLGFKVMKKIEKVIREEQNSIGAQEMLMPTIQSADIWKESGRYEDYGEEMLRISDRQKREMLYGPTNEEQITEIFRTSVKSYKLLPQILYHIQWKFRDELRPRFGVMRCREFYMKDAYSFDLNEQDAELSYNKMFFSYLKTFNRLGLKSIPMKAETGPIGGDLSHEFIILAETGESKIFADKRIFDVPIENYKNERNSLKKMRDDFSKFYAVTDEKFKSEDFNNNVKKDNQLQTKGIEVGHIFYFGDKYSKPMNCSVDSKDGKKIFVKMGSYGIGVSRLVAAIIEAKFSNEKMKGQE

SEQ ID NO: 161279 - protein, 155 aa, Unknown
  Bacterial polypetide isolated from the Sargasso Sea
MVHRDRGQRLLLSGNVIGNPLLHRPECIAKTAELQPELITGISGSPNGLFFDRPTPMQDAKHEVQRKTIEERQQMDELSRIRHSCAHVLATAVLRLWPEVKLDIGPPTEEGFYYDFDLEHRFSPEDFEKIEAEMKKVVKENQTFDFSEKSRDEAK

SEQ ID NO: 161280 - protein, 100 aa, Unknown
  Bacterial polypetide isolated from the Sargasso Sea
YQIILLSITDRNIQKCLKFNELINNNGYRSKVDIRNEKIGYKIREATLGRVPLIAVIGDKEDEIDSVALRALNGRNLGIFNLPNLYKLIDELIEKKGRTE

SEQ ID NO: 161281 - protein, 153 aa, Unknown
  Bacterial polypetide isolated from the Sargasso Sea
VPKVVKVNVNRGLGEAASNSKALEASLNEMATITGQKALVTRAKKAIAGFKIREGMPIGCTVTLRGDRMYSFLERFINLALPRIRDFRGVNPKSFDGRGNYTVGVKEQLIFPEISFDKIDSIRGMDITIVTSAKSDQEGKALLQELGMPFSKN

SEQ ID NO: 161282 - protein, 165 aa, Unknown
  Bacterial polypetide isolated from the Sargasso Sea
ASTNQMDLVMGSRFGLKYTASDSQEHTPIIIHRAPLGTHERFVAFLIEHYGGAFPTWLAPVQVRFIPIASAFNEYAYSLNQNLYNSLIRTEVDDSHDSFSKKIRNAALDKIPNLLIVGEKEQSNQNVTWQRYGTKTRESLSFEVFSSMLSEEITNRLDWRNDKKI

SEQ ID NO: 161283 - protein, 88 aa, Unknown
  Bacterial polypetide isolated from the Sargasso Sea
MPNIKLPDGNSISFEKKVTGLQIAEKISKSLSKQALVISVDGNLKDLNYEINKDCSVKIHTAKDKEGIETIRHDTAHVLAMAVQELFP

SEQ ID NO: 161284 - protein, 89 aa, Unknown
  Bacterial polypetide isolated from the Sargasso Sea
MTLKNRYKESIRPKLLKDLGLKNIHQVPKVVKVNVNRGLGEAASNSKALEASFNEMATITGQKALVTRAKKAIAGFKIREGMPMGCTVT

SEQ ID NO: 161285 - protein, 179 aa, Unknown; identical to SEQ ID NO: 161249
  Bacterial polypetide isolated from the Sargasso Sea

SEQ ID NO: 161286 - protein, 181 aa, Unknown
  Bacterial polypetide isolated from the Sargasso Sea
MLTSKDHKSGSDRIYEALEKFDPQKKIKKIIHLQGDLPNVSKKLIVSLADIIKNNKCIATPVVQADKTEILDENIVKCAASFKNPKPKIGEIGNALYFSRCPIPWGDSIKWHHLGIYGWDRSILEKYIKLKPSNLEMSEKLEQLRALEAGFNIKILITNEKPIGIDTINDLKKFKKSINAY

SEQ ID NO: 161287 - protein, 141 aa, Unknown
  Bacterial polypetide isolated from the Sargasso Sea
VGEAVADKKILDNAVGDLTLISGQKPIVTNARKSIAGFKIREGWPIGCKVTLRRDRMYEFLDRLVSVAIPRIRDFRGFSPRAFDGRGNYSLGLREQIVFPEVDYDKVDKLRGLNVTITTSARTDDEGRALLRAFNFPFRPN

SEQ ID NO: 161288 - protein, 123 aa, Unknown
  Bacterial polypetide isolated from the Sargasso Sea
MDKEPITTEGLEKLKSELIFLKEKKRPEIVAAIAEARSHGDLKENAEYHAAKEQQSHNEGRIQEVEDLIARANVIDITKISNDGKVIFGSTVYLQNLDTNEKINYKIVGKDEADLKQKLLYFQ

SEQ ID NO: 161289 - protein, 129 aa, Unknown
  Bacterial polypetide isolated from the Sargasso Sea
MLHRALFGSLERFIGILIENYAGKFPFWISPLQTMVIPISEEFNDYAVEVSNKIKNSGISSAVDLKNHNLNYKIRDHSLAKIPLLLICGKKEVDSNSVTIRRLDSNKQENMGLDQFLKTFSALNKASSN

SEQ ID NO: 161290 - protein, 149 aa, Unknown
  Bacterial polypetide isolated from the Sargasso Sea
MISIIFPDDSVKKFDKGVKVIDVAKSISEGLARKVISASFNNETLELDSKLTTDGNIKLFTWEDDEGKQAFWHSSAHILAQTIKFFYPKSKLTIGPSIENGFYYDVDFGDETISEKDFIKIEAKFLEFSRNDFKFKMKSISKKEALEFY

SEQ ID NO: 161291 - protein, 267 aa, Unknown
  Bacterial polypetide isolated from the Sargasso Sea
MLMPTIQPAEIWKESGRYDDYGEEMLRISDRQKREMLYGPTNEEQITEIFRSSVKSYKLLPQIFYHIQWKFRDELRPRFGVMRCREFYMKDAYSFDLSESDAVMTYNKMFYAYLKTFDRLGLKSIPMKAETGPIGGDLSHEFVILADTGESKIYADKKIFEIPINNYENNESSLNKMRKDFSQFYAVTDDKFKKEDFDKSVEKSKQIQTKGIEVGHIFYFGDKYSKPMNCSVDSKDGKKVFVKMGSYGIGVSRLVGALIEAKYINEK

SEQ ID NO: 161292 - protein, 204 aa, Unknown
  Bacterial polypetide isolated from the Sargasso Sea
FSANTPNGWKISIMLEEIGYEYKVTKVDLGKDEQFKPEFIKISPFGKIPVIIDSENDKSVFESGAILMYLGDKSGKFYNKKDRLVINQWLMAQMGTVGPMIGQHHQFHHYNPGKSEFGEQRYFKITKRIYGELDARLKESKFLAGSDYTIADIATWPWIARHEWHDIGLKSYRNLSRWYLEIADREAVVRGYSFMDKEAKVPKL

SEQ ID NO: 161293 - protein, 66 aa, Unknown
  Bacterial polypetide isolated from the Sargasso Sea
FLINLDTNEKINYKIVGKDEADLKNKLLYYKSPIAKGLIGKSKGDFAEVETPAGKKKFEITNVKYV

SEQ ID NO: 161294 - protein, 117 aa, Unknown
  Bacterial polypetide isolated from the Sargasso Sea
MNKLDTNSNLYKIRHSLAHLLAQAVLEIRPSAKLGFGPPVENGFYYDFDLDEPLTPEDLPKLEKRMRHIIKSGQVFEREELGQEKMVELLSRENQHYKIEQVEDLVAQNEIISIYRN

SEQ ID NO: 161295 - protein, 92 aa, Unknown
  Bacterial polypetide isolated from the Sargasso Sea
TDRNIEKCLKFNELINNNGYRSKVDIRNEKIGYKIREATLGRIPLIAVIGDKEEEIDSVALRALNGRNLGIFNLPNLYKLMDELIEKKGRTE

SEQ ID NO: 161296 - protein, 94 aa, Unknown
  Bacterial polypetide isolated from the Sargasso Sea
MLDLDTKRHSCAHVMAGAIQSIWPKAQFGVGPTIENGFYYDVLVEENITEEDLAKIESAMRKIKKKKYRFEKSIVPTDEAIEKMKQDNQPFKVD

SEQ ID NO: 161297 - protein, 84 aa, Unknown
  Bacterial polypetide isolated from the Sargasso Sea
EYAFSLKEKFDEINLRVELDNRNEKIGYKIREHSNAKVPLMAVIGKDEMEANTISIRNLSENKTNTYSIDEAVVLLEASSSTPR

SEQ ID NO: 161298 - protein, 100 aa, Unknown
  Bacterial polypetide isolated from the Sargasso Sea
MTRLLEDYKKNISNDLMNKLKLNNSFQVPKLIKIVLNMGIGDGKEDSKLIDKAQEELTMISGQKAIKTKAKKAISGFKIREGMPLGVSVTLRNKMMYEFW

SEQ ID NO: 161299 - protein, 129 aa, Unknown
  Bacterial polypetide isolated from the Sargasso Sea
MLHRALFGSLERFIGILIENYSGKLPFWISPLQTVVIPVSDEFDEYSKKVNKQLVDAGFSSEVDLKNHNLNYKIRDHSLSKVPILLICGKKEVDSNSVTIRRLDSNKQENIELKKFITIHQALNKAPSL

SEQ ID NO: 161300 - protein, 79 aa, Unknown
  Bacterial polypetide isolated from the Sargasso Sea
DYGGYEVETPIMYDSLHPSMESYFYRFPARQYNIDADGKQLFLRFAACFGQFLIAHDMQISYKNLPYRLYEMPRYSFSR

SEQ ID NO: 161301 - protein, 66 aa, Unknown
  Bacterial polypetide isolated from the Sargasso Sea
FLENLDTNEKINYKIVCKNEADIKQKLIFFQSPIGRGLIGKNKNDLVEINTPAGVKNFEIKDVKYI

SEQ ID NO: 161302 - protein, 70 aa, Unknown
  Bacterial polypetide isolated from the Sargasso Sea
KVDIRNEKIGYKIREATLDRVPLIAVIGDKEEEIDSVALRALNGRNLGIFNLANLYKLMDELIEKKGRTE

SEQ ID NO: 161303 - protein, 308 aa, Unknown
  Bacterial polypetide isolated from the Sargasso Sea
MYQRPNKHIIRLLRRFRRPIALFIGLQVVWFALLALWVTWFIHQQESIGKLSQALNETPIDGTTGIVALVIGCILLGVILVGTAVLFTMNQIQSGLIKQQKSFVSSVTHELRSPLSSIQLSFETLQRPNLPDDIKCKLMEMVDRDIVRLSQLIDRILLSSRLDRGILDYASQLETFALRDAIYNCVERSMHMDRTLKDRLEITCPESLEVRGIKMAFNMIVGNLLENAIKYSPKGTLIKIEAGRREHEFFLHVKDQGFGLNKRDHRKIFDMFHRTQRAAQKAVSGTGLGLFIVKSMVDSLGGRVWVES

SEQ ID NO: 161304 - protein, 88 aa, Unknown
  Bacterial polypetide isolated from the Sargasso Sea
MLNITLPDGNKLNFEKKVTGLEVAEKISKSLSKSALLISIDGKLKDLNTVIEKDCSVKIFTSKDKEGLETIRHDTAHVLAMAVQELFP

SEQ ID NO: 161305 - protein, 176 aa, Unknown
  Bacterial polypetide isolated from the Sargasso Sea
KIRYKESIRPKLLKDLGLRNIHQVPKVVKVNVNRGLGEAASNSKALEASLNEMATITGQKALVTRAKKAIAGFKIREGMPIGCTVTLRGDRMYSFLERFINLALPRIRDFRGVNPKSFDGRGNYTVGVKEQLIFPEISFDKIDSIRGMDITIVTSAKSDQEGKALLQELGMPFSKN

SEQ ID NO: 161306 - protein, 179 aa, Unknown
  Bacterial polypetide isolated from the Sargasso Sea
MTLKNRYKESIRPKLLKDLGLKNIHQVPKVVKVNVNRGLGEAASNSKALEASLNEMATITGQKALVTRAKKAIAGFKIREGMPIGCTVTLRGERMYSFLERFINLALPRIRDFRGVNPKSFDGRGNYTVGVKEQLIFPEISFDKIDSIRGMDITIVTSAKSDQEGKALLQELGMPFSKN

SEQ ID NO: 161307 - protein, 120 aa, Unknown
  Bacterial polypetide isolated from the Sargasso Sea
LILAALSDQQAAELEDTARGLNLDVLLEVHNLPELSRALRLKSKMIGINNRNLKTLEVDLKMTEELAGKLPNNFLVISESGLFTPIDLARMAEFGVKCFLIGEAFMREDDVELAVRKILA

SEQ ID NO: 161308 - protein, 175 aa, Unknown
  Bacterial polypetide isolated from the Sargasso Sea
MYKYPIGVFISGRGSNLMSIIKASKDKNYPGVIKLVFSDNPCAKGLELAKENNIEYFTLDYNNYENKNIFEKEILALIKPYKLELICLAGYMRILTKNFIDSYPDKILNIHPSLLPKYKGLNTHRRAIENKENITGCTVHYVNQNLDDGKIILQREVKIDYGETEKTLANKVLAA

SEQ ID NO: 161309 - protein, 179 aa, Unknown
  Bacterial polypetide isolated from the Sargasso Sea
MTLKNRYKESIRPKLLKDLGLKNIHQVPKVVKVNVNRGLGEAASNSKALEASLNEMATITGQKALITRAKKAIAGFKIREGMPIGCTVTLRGDRMYSFLERFINLALPRIRDFRGVNPKSFDGRGNYTVGVKEQLIFPEISFDKIDSIRGMDITIVTSAKSDHEGKALLQELGMPFSKN

SEQ ID NO: 161310 - protein, 136 aa, Unknown
  Bacterial polypetide isolated from the Sargasso Sea
MTLKNRYKESIRPKLLKDLGLKNIHQVPKVVKVNVNRGLGEAASNSKALEASLNEMATITGQKALVTRAKKAIAGFKIREGMPIGCTVTLRGDRMYSFLERFINLALPRIRDFRGVNPKSFDGRGNYTVGVKEQLI

SEQ ID NO: 161311 - protein, 144 aa, Unknown
  Bacterial polypetide isolated from the Sargasso Sea
MIEVQINDKDTHKYASGITAGEILLNVYGKRNGAVAAIVDGIERDMSFVVNNNCKIEPILADSEQGLYILRHSCAHLLAQAVVEMYPDAKPTIGPPIEHGFYYDFLMEPIGDSELKKIEKRMNQLVRENIVINREEYGNEELRE

SEQ ID NO: 161312 - protein, 179 aa, Unknown
  Bacterial polypetide isolated from the Sargasso Sea
MTLKNRYKESIRPKLLKELGLKNIHQVPKVVKVNVNRGLGEAASNSKSLEASLNELATITGQKALVTRAKKAIAGFKIREGMPIGCTVTLRGDRMYSFLERFINLALPRIRDFRGVNPKSFDGRGNYTVGVKEQLIFPEISFDKIDSIRGMDITIVTSASTDQEGKALLQELGMPFSKN

SEQ ID NO: 161313 - protein, 91 aa, Unknown
  Bacterial polypetide isolated from the Sargasso Sea
MLKVTFPDGAKKEYDKGITPLEIAQSISHSLAKRLLSASYNNKQVESSTKIFENGNIEFYFWDDIKGKNAFWHSSAHLFAQIVLELYPESK

SEQ ID NO: 161314 - protein, 128 aa, Unknown
  Bacterial polypetide isolated from the Sargasso Sea
LHRALFGSIERFIGILIENYSGKLPFWISPLQTMVIPVSEDFDNYAKEVNQKIKKVGITSEVDLKNHNLNYKIREHSLSKIPILLICGKKEVDSNTVTIRRLDSNKQENMELNLFLKKFSALSKAPSN

SEQ ID NO: 161315 - protein, 310 aa, Unknown
  Bacterial polypetide isolated from the Sargasso Sea
MFTSIGAGATAVFFPRFSASNFFKWAHDCGATCVNMLGAVAEYLFSSKPSEYDQKHNVRIMLGSPAPRNLIDFQKRFNVRVIDGYGSTEMGMVLWKNPEDPRDRSMGYPTEGFYVELRNPEKVEEVIRPHWDPYVDSDPPDSAKGILYIRPLVANTTLNEYFKDERRTREAFDDDGFFNSDDVMACGTDGRYYFIGRHTRLRVSGENVDPVAVADLALEYPSIQDAIAVGVRLPDVSDDELKLNIILKDGEKYDHAEFCTWMAEKAIIAMVPRFIEIFEEGFPVTATQKVKVAELKEITDKTWDRAESGL

SEQ ID NO: 161316 - protein, 127 aa, Unknown
  Bacterial polypetide isolated from the Sargasso Sea
HRALFGSLERFIGILIENYSGKLPFWITPLQSVVIPISNDFDEYAKNVYIELKKAGISTEVDLKNHNLNYKIREHSLTKVPLLLICGKKEVDTNTVTIRRLDSNKQENMELKEFLKKYSALNKAPSI

SEQ ID NO: 161317 - protein, 296 aa, Unknown
  Bacterial polypetide isolated from the Sargasso Sea
SCPATAAHIMPAAPAPITAISKDSMGPHCTRASAAPRPRCYTFRLAFSYLDAGLVHSRARSNPPNMLVLGIESSCDETGLALYDTERGLLAHALHSQIAMHREYGGVVPELASRDHIRRALPLLEEVMERAGAVRSDIDAIAYTQGPGLAGALLVGASVANSLAMAWDKPTIGIHHLEGHLLSPLLVDEPPPFPFVALLVSGGHTQLMRVTDIGVYETLGETLDDAAGEAFDKTAKLLGLGYPGGPEVSRMAEFGTPGRSRAAASDATFRRPRFQLQRAENRRPHARQESLAARIS

SEQ ID NO: 161318 - protein, 278 aa, Unknown
  Bacterial polypetide isolated from the Sargasso Sea
GQFLIAHDMQISYKNLPYRLYEMTRYSFRREQSGELVGLRRLRAFTMPDCHAFCKDIPQAIEEFRTRFDLSRDVLKNVGIENDDYEMAIRFTEDFYNENKELITEIVKKLDKPVLVEMWKERFFYFVLKWEFNYIDNLGKASALSTDQIDVENGNRYGIEFVDENNKTINPIILHNSPSGAIERVIYALLEKCAKDAKEGKKPMFPLWLAPTQVRIIPLKDEFMEFSQNLFDKLTEKNIRVDIDDRNESIGKRIRESEKEWIRYILVIGDKEVNSKNL

SEQ ID NO: 161319 - protein, 179 aa, Unknown
  Bacterial polypetide isolated from the Sargasso Sea
MTLKNRYKESIRPKLLKDLGLTNIHQVPKVVKVNVNRGLGEAASNSKALEASLNEMATITGQKALVTRAKKAIAGFKIREGMPIGCTVTLRGDRMYSFLERFINLALPRIRDFRGVNPKSFDGRGNYTVGVKEQLIFPEISFDKIDSIRGMDITIVTSAKSDQEGKALLQELGMPFSKN

SEQ ID NO: 161320 - protein, 180 aa, Unknown
  Bacterial polypetide isolated from the Sargasso Sea
MKNTGHYFPPARQNVYYGRKLELTLNEIAQSLGAQNVLFVTNSSLANTALSASIVEGLKKFGVHQVTGLKAHSPRGDVTRVCNAIEKHAINLVISFGGGSVCDTTKVACLAHTNDLSEGNFDLLNSPEKLTNTPIPFVAIPTTLSAGEFTCFAGITDEQIPRKEVFWHPDIAPHSVILDP

SEQ ID NO: 161321 - protein, 86 aa, Unknown
  Bacterial polypetide isolated from the Sargasso Sea
PEGLEVIRHTCAHVFGHALKQIYPNAKMVIGPTIDNGFYYDIYNSESISEKDLKLIESLMKKLSKKNYKIQRDVVTRKKAIDVFKK

SEQ ID NO: 161322 - protein, 91 aa, Unknown
  Bacterial polypetide isolated from the Sargasso Sea
MKLKENFNTKLKNTLKENLNLSNIMQVPKLEKITINMGVGEAINDKKYLTNALKAIESLSGQKAVVTKARRSEAGFKIREGWPVGCKVTLR

SEQ ID NO: 161323 - protein, 70 aa, Unknown
  Bacterial polypetide isolated from the Sargasso Sea
KVISDLRNEKITYKIRDHSIQKIPYQIVIGDKEIEEGSISVRERESQKQSSMSESDFSKMVLGKIRSKEV

SEQ ID NO: 161324 - protein, 120 aa, Unknown
  Bacterial polypetide isolated from the Sargasso Sea
MGNIVVKLPDNTEKQLPPDSTGLDLAKSIGSGLAKAAIAYTSDGIQKDLLDPLDNNSVVSLITINSNEGIEIMRHTLTAQVLALAVKNLYPDSKLAIGPTIDNGFYYDFSFKNTFSIEDL

SEQ ID NO: 161325 - protein, 134 aa, Unknown
  Bacterial polypetide isolated from the Sargasso Sea
NSRPVMIHRAPLGSLERFVAILIEHTGGNFPLWLISKQIVLIAVGGNHENYTEKVSKLLEKSEIRAAYDTRNETVGKKIRDAEQMKIPFMGIIGDNEIENEIVSIRAHGGKIIGEMKINELVEYIKKEEKESYN

SEQ ID NO: 161326 - protein, 181 aa, Unknown
  Bacterial polypetide isolated from the Sargasso Sea
MIPRLKEQFNTELKQKIMSDLQLRNVNEIPSLEKIIINIGDGKAATDGRALESMVNELTAISGQKPVIRRAKKSIAGFKIREGMPIGTSVTLRGDRMWEFYDRFVQVVVPRIRDFRGFNKKSFDGSGNYTLGLNEQLVFPEVEYDKVRDIRGMNITICTSANDNEKGYVLLQSLGFPFREN

SEQ ID NO: 161327 - protein, 385 aa, Unknown
  Bacterial polypetide isolated from the Sargasso Sea
MFLSKLFIPISKDIPTEAKIKSHQLMLRTGMIRQASAGIYSWLPLGFKVMKKIEKIIREEQNSIGAQEILMPTIQSADIWKESGRYEDYGEEMLRISDRQKREMLYGPTNEEQITEIFRTSIKSYKLLPQILYHIQWKFRDELRPRFGVMRCREFYMKDAYSFDLNEQDAEISYNKMFFSYLKTFNRLGLKSIPMKAETGPIGGDLSHEFIILAETGESKIFADKRIFDVPIENYKNERNSLKKMRDDFSKFYAVTDEKFKSEDFNNNVKKDNQLQTKGIEVGHIFYFGDKYSKPMNCSVDSKDGKKIFVKMGSYGIGVSRLVAAIIEAKFSNEKMKWPREVSPFDVVIIPVINKNDNSNVEKAKILYKSLIEKGIDVLFDDIDE

SEQ ID NO: 161328 - protein, 181 aa, Unknown
  Bacterial polypetide isolated from the Sargasso Sea
MIPRLKEQFNTELKTSVMEQLSLNNVNEIPTLDKIIINIGDGKAATDGRALESMIDELTAISGQKPVIRRAKKSIAGFKIREGMPIGVAVTLRGDRMWEFYDRFVQVVVPRIRDFRGFNKKSFDGNGNYTLGLNEQLVFPEVEYDKVRDIRGMNITICTSANDNNQGYVLLQSLGFPFREN

SEQ ID NO: 161329 - protein, 396 aa, Unknown
  Bacterial polypetide isolated from the Sargasso Sea
MVDIWPFHGTRPYNQDAKNLIAPSTDHLSIENIEIFRKNNYWNYLKVLNPVGQLKEKDSLFEAREHFIEMKDYDVIKKDNELNFYIYQIQLGYHSQLGFLSLASISDFEKNIIKPHEKIYESRKIERADQMMNINTQIGPIYVSYPSDENIANLLLSITKNSPTYDFESFDKSIHRLWCVNDKDFIHEFTNLTKNIKHLYIADGHHRIGAMQHIKKINPLIERFMIAAFPSNECKIFDYNRVIKDLNGLSKDQFIKNLSNDFKVLKVDKAYKPLTKNEFGMYHDNQWYMLEFNNSFTSSDFIDALDINILNQFCLTKMLNIKDVNNDERIRFIAGCHGLSALEKKVDENPDSVAFSIFPSNITDVIRVADNNLTMPPKSTWFDPKPLDGLVVYEFN

SEQ ID NO: 161330 - protein, 150 aa, Unknown
  Bacterial polypetide isolated from the Sargasso Sea
LPERFDLSYVDRDNVKQRPIMIHRAIFGSLERFFGILTENYAGEFPLWLAPEQVRLLPVTDEVSDYTEGVAKKLRDAGVRVEICSGQRLAKLVRTAEKSKIPVMAVVGREEAENNTLAVRTYKDGDVGSLSVDEVLSRIVTANATKGDNF

SEQ ID NO: 161331 - protein, 396 aa, Unknown
  Bacterial polypetide isolated from the Sargasso Sea
MVDIWPFHGTRPYSQDAKNLIAPSTDHLSIENIEIFRKNNYWNYLKVLNPVGQLKEKDSLFEAREHFKEMKDYDVIKKDNELNFYIYQIQLDNHSQLGFLCLASIDDFKKNIIKPHEKIYESRKIERADQMMNINTQIGPIYVSYPSEDKIANLLLSITKNSPTYDFESFDKSIHRLWCVNDKNFIQEFKNRAKNINHLYIADGHHRMGAMHHIKKMNPLNERFMIAAFPSNECKIFDYNRVIKDLNGLSKEQFIKNLSNDFKILKTDKAHKPTTKNEFGMYHDNQWYILEFINPFTFNNFIDALDINILNQFCLTKMLNIKDVNNDERIRFIAGCHGLSALEKKVDENPDSVAFSIFPSTITDVIRVADNNLTMPPKSTWFDPKPLDGLVVYEFN

SEQ ID NO: 161332 - protein, 230 aa, Unknown
  Bacterial polypetide isolated from the Sargasso Sea
MKTLLTVFSVLAITAAQAATIEQIDAAANGMDLKQLSLYAADQSSDYNKAYANYRLSIMAGITGQKDQAEQALDMAQSTLEQLATAEPDAESFALLASVYGMQIGNNPIKGAFYGPKSNKAISQAAGLDPANPRVVLVKAISAYNTPAAFGGSKQSAIELSSKAIELYAQPCQQICWGHAEAYTWRGLAKQELGDKAGAIADWTKATEVEPSYGWAKFLLTQQQSYSQNR

SEQ ID NO: 161333 - protein, 181 aa, Unknown
  Bacterial polypetide isolated from the Sargasso Sea
MIPRLKEKYNSELSGEIQKELNLSNINQIPTLEKIIINIGDGKAATDGRALESMVDELTAISGQKPVVKRAKKSIAGFKIREGMPIGTSVTIRGDRMWEFYDRFVQVVVPRIRDFRGFSTKSFDGKGNYSLGLNEQLVFPEVEYDKVRDIRGMNITICTTANDNNEGYVLLNSLGFPFREN

SEQ ID NO: 161334 - protein, 179 aa, Unknown
  Bacterial polypetide isolated from the Sargasso Sea
MAKLHDYYKSDVVNELSKQFGYKTIMQVPRIEKITLNMGVGEAISDKKLLENAAADMAAISGQKPLITKARKSVAGFKIREGYPIGCKVTLRGERMWEFLERLICISVPRIRDFRGLNAKAFDGRGNYSMGVREQIIFPEIDYDKVDRVRGLDITITTSANTDEEGRALLAAFNFPFRK

SEQ ID NO: 161335 - protein, 66 aa, Unknown
  Bacterial polypetide isolated from the Sargasso Sea
AEFAHEKISYKIREHTLEKVPYLLVVGDKEREAQTVAVRARGGVDLGVMPLDTFIERLRQDVQSFN

SEQ ID NO: 161336 - protein, 122 aa, Unknown
  Bacterial polypetide isolated from the Sargasso Sea
FIGILIENYAGSYPVWLAPVQAVVVSITENQTEYTNKIMKILKKQGFRVEDDLRNETIGLKIRDHAMQRVPYQIILGAREEEENKVAVRTRNSDDLGSMTLEDFIQRLEGDISRLGRIDLEE

SEQ ID NO: 161337 - protein, 142 aa, Unknown
  Bacterial polypetide isolated from the Sargasso Sea
MGVGEAVADKKVMEHAVRDMTAIAGQKPVVTVARKSVAGFKIREGYPIGCKVTLRGERMWEFLERLVDIAIPRIRDFRGLSAKAFDGRGNYAMGVREQIIFPEIDYDKIDKIRGMDIVITTSAKTDEEGRALLDAFNFPFKK

SEQ ID NO: 161338 - protein, 128 aa, Unknown
  Bacterial polypetide isolated from the Sargasso Sea
LHRALFGSLERFIGILIENYAGKLPFWITPLQSVVIPVSNDFDEYAKKVCEQLKKSGISVEVDLKNHNLNYKIRDHSLSKVPILLICGKKEVDTNSVTIRRLDSNKQENMELKEFIKKYSALNKAPSI

SEQ ID NO: 161339 - protein, 138 aa, Unknown
  Bacterial polypetide isolated from the Sargasso Sea
AASNSKALEASLNEMATITGQKALVTRAKKAIAGFKIREGMPIGCTVTLRGDRMYSFLERFINLALPRIRDFRGVNPKSFDGRGNYTVGVKEQLIFPEISFDKIDSIRGMDITIVTSAKSDQEGKALLQELGMPFSKN

SEQ ID NO: 161340 - protein, 415 aa, Unknown
  Bacterial polypetide isolated from the Sargasso Sea
HQLMLRTGMIRQASAGIYSWLPLGFKVMKKIEKIVREEQNIIGAQEMLMPTVQSADIWKESGRYDDYGEEMLRISDRQKREMLYGPTNEEQITEIFKTSVKSYKLLPQILYHIQWKFRDELRPRFGVMRCREFYMKDAYSFDLSEDDAVLSYNKMFFAYLKTFERLGLKSIPMKADTGPIGGDLSHEFIILAETGESKIYTDKRIFDIPINNYKNENNSLNQMRNDFSKFYSVTDEKFDSNDFNKKVKKNDQLQTKGIEVGHIFYFGDKYSKPMNCSVDGKDGKKIFVKMGSYGIGVSRLVAAIIEAKFNNDKMKWPKAISPFDVVIIPAINKNDNSNIEKSRKIYSLLKEKGIDVLLDDVEENISNKFKKHDLLGIPYQIVVGSKSTKDQFEFKEVGKDPQVLEINKIINILKK

SEQ ID NO: 161341 - protein, 179 aa, Unknown; identical to SEQ ID NO: 161249
  Bacterial polypetide isolated from the Sargasso Sea

SEQ ID NO: 161342 - protein, 179 aa, Unknown
  Bacterial polypetide isolated from the Sargasso Sea
MAKLHEIYKDTVVPELFKQFGYTSVMQVPRIVKITLNMGVGEAVADKKILDNAVADLTAISGQKPLVTKARKSVAGFKIREGYPIGAKVTLRGERMWDFLERLVSIAIPRIRDFRGVNPKSFDGRGNYSMGVREQIIFPEIDYDKVDAVRGLDITITTTARTDDEGRALLAAFNFPFKK

SEQ ID NO: 161343 - protein, 179 aa, Unknown; identical to SEQ ID NO: 161246
  Bacterial polypetide isolated from the Sargasso Sea

SEQ ID NO: 161344 - protein, 89 aa, Unknown
  Bacterial polypetide isolated from the Sargasso Sea
MPQIQLLDGKKISFTKSISGIELIKKISKSLEKAALIMEVDGNLKDLSHEITKDSKVRIITSKDKEGLEVIRHDAAHIMAMAVQELFPG

SEQ ID NO: 161345 - protein, 52 aa, Unknown
  Bacterial polypetide isolated from the Sargasso Sea
MPIITLPDGSKKVFEKSVTILEIAQSIGAGLAKATIAGKVNDVLLDATIPKI

SEQ ID NO: 161346 - protein, 277 aa, Unknown
  Bacterial polypetide isolated from the Sargasso Sea
MKLSNYFLPVLKESPNEAEIISHKLMLRAGMISQSSSGIYSWLPLGLNVLKRIENIVREEQNNAGVNEILMSTIQPADLWKESGRYEDYGKEMLRIKDRQERDMLYGPTNEEQVTDIFRRSVRSYKELPLLLYHIQWKFRDELRPRFGVMRGREFLMKDAYSFDLTLENSESSYNKFFVCYLKTFERLGLKAIPMAADTGPIGGDMSHEFIIISNTGESDIYFDKNILSEGKKINEINYDDDLSTIVQNFKNYYSASDDKFDQNEFDKNVKKDSQMT

SEQ ID NO: 161347 - protein, 407 aa, Unknown
  Bacterial polypetide isolated from the Sargasso Sea
SCPATAAHIMPAAPAPITAISKDSMGPHCTRASAAPRPRCYTFRLAFSYLDAGLVHSRARSNPPNMLVLGIESSCDETGLALYDTERGLLAHALHSQIAMHREYGGVVPELASRDHIRRALPLLEEVMERAGAVRSDIDAIAYTQGPGLAGALLVGASVANSLAMAWDKPTIGIHHLEGHLLSPLLVDEPPPFPFVALLVSGGHTQLMRVTDIGVYETLGETLDDAAGEAFDKTAKLLGLGYPGGPEVSRMAEFGTPGAVVLPRPMLHSGDLDFSFSGLKTAVLTHAKKLGGANICEQAKADLARGFVDAAVEVLAAKSLAALKRTKLNRLVVAGGVGANRQLREALSAAAKKRNFFVHYPDLSLCTDNGAMIALAGALRLQRWPDQSAKDYAFTVKPRWDLTSLAR

SEQ ID NO: 161348 - protein, 146 aa, Unknown
  Bacterial polypetide isolated from the Sargasso Sea
RLDASYVDKDGTKKVPVMLHRALFGSLERFVGILIENYAGKFPFWISPLQTMVIPISEEFNDYAVEVSKKIKNAGISSAVDLKNNNLNYKIRDHSLEKIPLLLICGKKEVDSNSVTIRRLDSNKQENMGIDKFLKTFSALNKASSN

SEQ ID NO: 161349 - protein, 105 aa, Unknown
  Bacterial polypetide isolated from the Sargasso Sea
KLPFWLSPQQVVVASIISDVNDYSLGIVESLKKEGILAEADLRNEKISYKIREHSDRKVPIILAIGNNEKKDKTVSIRRIGSTDTEVVDLKDAIKEIAKENLALN

SEQ ID NO: 161350 - protein, 118 aa, Unknown
  Bacterial polypetide isolated from the Sargasso Sea
QKPVIRRAKKSIAGFKIREGMPIGTSVTLRGDRMWEFYDRFVQVVVPRIRDFRGFNKKSFDGNGNYTLGLNEQLVFPEVEYDKVRDIRGMNITICTSANDNEKGYVLLQSLGFPFREN

SEQ ID NO: 161351 - protein, 209 aa, Unknown
  Bacterial polypetide isolated from the Sargasso Sea
LVCFQGFIGWYMVSSGLVDRIDVSHFRLSAHLFIAFLILSCLIWYYLNLKNSANKNFLINDSRLKSIKFLIFFIFLQIIFGAFVSGLDAGMIYQTWPLMNESYFPSDVNFKDYRNFLDLNDRSVVQFIHRNVAYLILIIIIYIGFKIRELKMIHLYKSYSYLLGFIFIQIILGVLALISNLHIAIASMHQISSIFLIIFSLNFYFKSIN

SEQ ID NO: 161352 - protein, 181 aa, Unknown
  Bacterial polypetide isolated from the Sargasso Sea
MIPRLKKQYRNVLIDDLKKQLNINNTNAVPNLEKIVINIGDGKAATDGRALESMVDELTAISGQKPVIKRAKKSIAGFKIREGMPIGVSVTLRGNRMWEFYDRFVQVVVPRIRDFRGFSKKSFDGNGNFSLGLNEQLVFPEVEYDKVRDIRGMNITICTTASDNQDGYGLLNALGFPFREE

SEQ ID NO: 161353 - protein, 73 aa, Unknown
  Bacterial polypetide isolated from the Sargasso Sea
MELDPLDSDQTSVLRQKIRHSAAHVMADAVMQLFPDAKMGIGPPTKDGFYYDFEVTDPFTPDDLIKMKKECLK

SEQ ID NO: 161354 - protein, 158 aa, Unknown
  Bacterial polypetide isolated from the Sargasso Sea
MDKEPITTEGLEKLKSELIFLKEKKRPEIVAAIAEARSHGDLKENAEYHAAKEQQSHNEGRIQEVEDLIARANVIDITKISNDGKVIFGSTVYLQNLDTNEKINYKIVGKDEADLKQKLLYFQSPIGKGLIGKNKGDLVEINTPAGTKNFEIVDVKYV

SEQ ID NO: 161355 - protein, 344 aa, Unknown
  Bacterial polypetide isolated from the Sargasso Sea
MKSSLLKLGLASVIGFGAVTTSQAATKLDMATPWGGGIMLEYVARGAAANMELFTSNNVKVEVFPGGTLGKALKVTDTVKKGVAQIGHNWSGYDWGVDKTAILFGGFAGSMSWDKMMHWTFRGGGKEMWMDWRMAEFGVAAVPCGSAPRELFAHSHKPIRSLEDYKGMKVRTAGAWAEIAQKLGASTVILAGAEVYPALERKVVDAIEWGTPTHNIVMGFEKVAKYIVVPGVHQPIAMHECAVNKKVWDGMSDMVKKQITAGGKMMTWDLYMKLGHDDAPNWMKYVNSKKNEIIDLPQSFKDAAKKATDEWAEETGKKANDWFKKIWASQNAYKDAWSQAHRYR

SEQ ID NO: 161356 - protein, 181 aa, Unknown
  Bacterial polypetide isolated from the Sargasso Sea
MIPRLKDQYRTQLIDELKKQLNIENTNAVPKLEKIVINIGDGKAATDGRALESMVDELTAISGQKPVIKRAKKSIAGFKIREGMPIGVSVTLRGNRMWEFYDRFVQVVVPRIRDFRGFSKKSFDGNGNFSLGLNEQLVFPEVEYDKVRDIRGMNITICTTAKDNSGGYELLNSLGFPFREN

SEQ ID NO: 161357 - protein, 285 aa, Unknown
  Bacterial polypetide isolated from the Sargasso Sea
KSGAVAAFVNGEERDMSFALDENCKVEPILGDSEEGLYILRHSCAHLLAQAVTQLYPDAKPTIGPPIEHGFYYDFAMDPIGDEELRQIEKRMKELVKQNIPIEREEHDNESLREIFSSNPFKLEIMDDKIGHDVGSSAYRQGDFIDLCKGPHVSLTSQLRWFKLTSTSQAYWRADKDRESLVRIYGMCYPSKDGLKERERQIQEAARRDHKKIGKEMGLYMINELIGKGLPVWLPYGEVLKSEIENFAIETEEAYGYDRVTTPVLGKKELSETSGHLPHYAEGMY

SEQ ID NO: 161358 - protein, 178 aa, Unknown
  Bacterial polypetide isolated from the Sargasso Sea
MPIVTLPDGSTRSYNAPVSPATIAADIGPGLATAAMLAVVDGQEWDMNREIEADSSVALLTAKDDTILATIRHDAAHVMAEAVLELYPETQVTIGPSIENGFYYDFHREAAFSDEDLAAIEARMHEIVDRDEPIIRNVWTRDEAVAFYKQNNEPFKIELVEAIPAGETVTFYQQGDSS

SEQ ID NO: 161359 - protein, 216 aa, Unknown
  Bacterial polypetide isolated from the Sargasso Sea
DLPLRLAEYGTCYRYEQSGELAGLLRVRGMTMNDAHIYCTPDQAKSEFIKVMDLHTEYYKMFGLSNFWLRLSLAEEDKGKFVDEPELWQKAETLVSEVMEEVGIPYEAVRGEAAFYGPKIDFQVTNVVGREETASTNQMDLVMGNRFGLKYTASDSQEHTPIIIHRAPLGTHERFVAFLIEHYGGAFPSWLAPVQVRFIPVASAFNEYAFVLNQNL

SEQ ID NO: 161360 - protein, 146 aa, Unknown
  Bacterial polypetide isolated from the Sargasso Sea
MQPYINIDNEKRNPVMLHRAILGSFERFIGILIEQYEAKFPIWLAPYQIILLSITDRNIEKCLKFNDLINNNGYRSKVDVRNEKVGYKIREATLDRVPLIAVIGDKEEEIDSVALRALDGTNLGIFNLPNLYKLMDELVEKKGRTK

SEQ ID NO: 161361 - protein, 101 aa, Unknown
  Bacterial polypetide isolated from the Sargasso Sea
MYIYKLLDGSSKEFQDKINGTELAKSISPSLLKKTVAVKVNGEIKDLTDSLPNNSDIEFVTREHPEALDLIRHDCAHVLAEAVQILFPETQVTIGPVIENG

SEQ ID NO: 161362 - protein, 103 aa, Unknown
  Bacterial polypetide isolated from the Sargasso Sea
LWLSPSQVVVATITSESDNYAFDVKDQLSKNGLRTEVDIRNEKIGYKIREHSNAKIPIILAVGKKEAEDKTVSVRRLGSQKTLVVKLDELISDLKKESLSPIS

SEQ ID NO: 161363 - protein, 123 aa, Unknown
  Bacterial polypetide isolated from the Sargasso Sea
MPTITLPDNSKRKFDNPLSIDDIAKDIGPGLAKATVAGKVNGMLVDASDIIQEDCDLEIVTIQDDEGIEIVRHSCAHLFAHALKQIYPNAQMAIGPVIKEGFYYDIKLDKNLTYEDLETMKKE

SEQ ID NO: 161364 - protein, 227 aa, Unknown
  Bacterial polypetide isolated from the Sargasso Sea
MKLTLPDKSIRELEAGSSGFDLAKDIGPGLAKAAVAININGEQRDLFDPICEDANVSIITINSEEGLEIMRHTLTAQVLARAIKNIYPDSELAIGPTIKDGFYYDFKTKEAVSIDDLDDIEKEMTKIIDSKSKITKKLFSKKDALKVFTGNKEPYKKFIIEDSDQNNDFQLYFQDDNQFVDLCKGPHLPDLNFIGSFKLTRVSGAYWKGDSKNEMLTRIYGTAWTNE

SEQ ID NO: 161365 - protein, 158 aa, Unknown
  Bacterial polypetide isolated from the Sargasso Sea
NADSSARFNLADRLDAQYVAEDGNKYNPVMFHRAILGSFERFIGILIENYSGNLPLWLAPTQVTVCSITDEADDYVKEISETLRSKNIRCNSDLRNEKISYKVREHSVSKVPIIVAVGKKEVSDRTVSVRRLGSDDTSIFSFDDFATSVVQESLAPNK

SEQ ID NO: 161366 - protein, 310 aa, Unknown
  Bacterial polypetide isolated from the Sargasso Sea
VILSPDGTMTEFDKFDFSKHKKLEKLAKYESAKNRNVDEPPPHVALMKKLGIADYEPASDHGNMRFFPNGRLIKSLLEQYVTNRVKNYGGYEVETPIMYDSHHPSMESYFNRFPARQYNIDADGKQLFLRFAACFGQFLIAHDMQISYKNLPYRLYEMTRYSFRREQSGELVGLRRLRAFTMPDCHAFCKDMPQAVDEFKKRFELSRDVLQNVGIENDDYEMAIRFTEDFYNENKELILEMVKKLDKPVLVETWKERFFYFVLKWEFNYIDNLGKASALSTDQIDVENGNRYGIEFVDESNSTLHPNHFT

SEQ ID NO: 161367 - protein, 165 aa, Unknown
  Bacterial polypetide isolated from the Sargasso Sea
NHEKFSSKQIIYFDPLDQSKYTPYVVETSIGLDRMFLAIFSNSLITEKLDGGSQRIVLKIPKILAPNKCAILPLVKKDGLSEYANNIKDKLKIKFKLTYDEKDAIGRRYRRQDALGTPYCITIDHQSIEDNTVTVRERDSMKQERIKVDLIEEFLVKSLDISNWL

SEQ ID NO: 161368 - protein, 164 aa, Unknown
  Bacterial polypetide isolated from the Sargasso Sea
MPKDFNQLNFKEKQIYLDNLRHSSAHVLAEAVIKLFPDAKLTIGPPIEDGFYYDFDVKNAFTPKDLKKIEQEMRRIINQNTDFIEREVTRDEAMLSVKDNPFKIEILESIPENAKITLCSHSDGNFEDLCRGGHVDKTGDIKALKLMSTSGAYWRGDENNPMLQ

SEQ ID NO: 161369 - protein, 126 aa, Unknown
  Bacterial polypetide isolated from the Sargasso Sea
MVSRKICWNINEHYAGHLPLWLSPLQIVVTTITSDADDYAENIYNQFKEKGFKVEKDIRNEKIGYKIREHSASKIPVIIVVGKKEEENNTLSLRRLGSNQSKIYKVDEVLDQLFKEAMSPINVNMK

SEQ ID NO: 161370 - protein, 106 aa, Unknown
  Bacterial polypetide isolated from the Sargasso Sea
MPFWLAPRQVVVASIISEANDYVQKVVDQLNAVGVRAEADLRNEKINYKVREHSVGKVPVILACGMKEVEEGTVSVRRLGEKKTSVEALDSMIEDLSKEATPPDLL

SEQ ID NO: 161371 - protein, 159 aa, Unknown
  Bacterial polypetide isolated from the Sargasso Sea
QCGTLQVDLNLPSRLGSSYIASDGSKKIPVMLHRALFGSLERFIAILIEHYAGKLPLWLTPLQAVVLPITSEFDKYAKKIFEQCLKAGINTEVDLKNQKINYKIREHSLSKVPLLLICGQKEVNDNSVTIRRLGSEKQETLSINEAIKKISEKNKFPIN

SEQ ID NO: 161372 - protein, 110 aa, Unknown
  Bacterial polypetide isolated from the Sargasso Sea
MPIITLSDGKNIEFPKEVTGLDIAEKISKSLLKQALIMSVDGELKDLYFSIKKDCLVKIFTAKDPEGLEVIRHDTAHIMAMAVQELYPGTQVTIGPVMKMVFTTILLERN

SEQ ID NO: 161373 - protein, 158 aa, Unknown
  Bacterial polypetide isolated from the Sargasso Sea
GGTLQVDFNLPGRLGASYVDKDGTKKVPVMLHRALFGSLERFIGILIENYAGKFPFWISPLQTVVIPISEDFEEYASSVSKKIKEAGMSSIVDLKNHNLNYKIREHSLAKVPILLICGKKEVDSNSVTIRRLDSNKQENMELNKFLKTFSALNKASSI

SEQ ID NO: 161374 - protein, 151 aa, Unknown
  Bacterial polypetide isolated from the Sargasso Sea
LNLPKRLGATFVDKDGTKKTPVMLHRALFGSLERFIGILIENYAGKLPFWLSPLQAVVLPIAEEHNDYAKKIFEDLFKEGIKCEVDLRNQKINYKIREHSLAKTPLILICGKKEISEKSVTMRKLGSEKQEKVKFNKAVEKLKMLNNLPIK

SEQ ID NO: 161375 - protein, 88 aa, Unknown
  Bacterial polypetide isolated from the Sargasso Sea
DTDDYAIKVKNELIKNGIRADVDLRNEKIGYKIREHSNSKVPIIIAVGKKESQEKTTSVRRIGSAETKTFKLDEIVITLSKETKSPIE

SEQ ID NO: 161376 - protein, 279 aa, Unknown
  Bacterial polypetide isolated from the Sargasso Sea
SGQLFGLMRVRSLQMNDAHIYCTPNQFKKEFMDVCRMYLEYFELFNIEKYSMRLSLHDKAGLGEKYVNEPELWLETEQWVREALDEGGFNYSEVSGEAAFYGPKIDVQVWSAIGKEFTLATNQVDFVIPKRFGLTYKNENGEQKTPICIHRAPLSTHERFIGFLVEHFGGNFPLWLAPVQVAILPVSDKTNEYARKINEKLIDSDIRTFLDDRSDKIGAKIRNAEINRINVMLILGPKEEENNTVSVRRKISGDLGTIDQDMLISELVKEIKDRSLTHS

SEQ ID NO: 161377 - protein, 162 aa, Unknown
  Bacterial polypetide isolated from the Sargasso Sea
RDWQCGTLQVDFNLPGRLEASYVDKDGKKKVPVMLHRALFGSLERFIGILIENYAGKFPFWISPLQTVVIPISEEFNDYAKKVSDQIKKEGMSSVVDLKNHNLNYKIRDHSLAKIPILLICGKKEVDSNSVTIRRLDSNKQENMELKTFLKTFSALNKAFSK

SEQ ID NO: 161378 - protein, 136 aa, Unknown
  Bacterial polypetide isolated from the Sargasso Sea
KKEIQLCCIEHFRILERFIGILIEQYEAKFPIWLAPYQIILLSITDRNIEKCLKFNELINNNGYRSKVDIRNEKIGYKIREATLARVPLIAVIGDKEEEIDSVAIRALNGRNLGIFNLPNLFKLMDELIEKKGRTE

SEQ ID NO: 161379 - protein, 95 aa, Unknown
  Bacterial polypetide isolated from the Sargasso Sea
VICSIAEENNNYVKKLFEDLFKEGIKCEMDLRNEKINYKVREHSLAKIPFIIVCGKKEVADNTVTVRKLGSDKQEIMKREDLIKNMLASNKLPLN

SEQ ID NO: 161380 - protein, 186 aa, Unknown
  Bacterial polypetide isolated from the Sargasso Sea
MDKQSNPKLYAIRHSLAHVLAQAVQSQFAGTKLGFGPPTDTGLYYDFHFAEKSPTEKDFKAIEKQMRKIINEKQTYTKTSCTYEQAVERATKQQEPYKVTNIKMLAQNGVTEFTFFKNGEFEDLCEGPHVEHTGELPVKGFCLDRIAGAYWLGDEKNEMLTRIYVLAFETPQELHDFKLKRQKAEA

SEQ ID NO: 161381 - protein, 166 aa, Unknown
  Bacterial polypetide isolated from the Sargasso Sea
MPTITLPDNSKRKFDNPLSIDDIAKDIGPGLAKATVAGKVNGMLVDASDIIQEDCDLEIVTIQDDEGIEIVRHSCAHLFAHALKQIYPNAQMAIGPVIKDGFYYDIKLDKNLTNEDLEAVEKRMKQLAKTKYDVVREVVSRKQAIDTFQKRNEPYKVHLAEEIPDG

SEQ ID NO: 161382 - protein, 129 aa, Unknown
  Bacterial polypetide isolated from the Sargasso Sea
MFHRAILGSFERFIGILIENYSGNLPLWLAPTQVTVCSITDEADDYVKEISKMLRSKNIRCNSDLRNEKISYKVREHSVSKVPIIIAVGKKEVSDRTVSIRRLGSDDTSVLTLDDFTTSVVQESLAPNK

SEQ ID NO: 161383 - protein, 155 aa, Unknown
  Bacterial polypetide isolated from the Sargasso Sea
MITITLPSNDKKKYDKPVTSAEIANDISEKLKSEALVSIVNGELWDLDRPIEVDSKIAILTKKNKETLDVIRHDAAHIMAEAVLELFPETQVTIGPSIENGFYYDFYREKKFILSDLEIIEKRMHDIVDRDETISREVWSREKAIDHFKKSNEKF

SEQ ID NO: 161384 - protein, 79 aa, Unknown
  Bacterial polypetide isolated from the Sargasso Sea
SSYIASDGSKKIPVMLHRALFGSLERFIGILIEHYAGKLPLWLAPLQVVVLPIASEFDNYAKNIFEQCVKAGINTAVDL

SEQ ID NO: 161385 - protein, 193 aa, Unknown
  Bacterial polypetide isolated from the Sargasso Sea
MPTITLPDNTQREYEKPLTIMQVAQDIGPGLGKAAIAGYMDDELHDACELIENDTHLRIITNKDPEGVEIIRHSFAHLMGHAVKQLFPNAKMAIGPVIQDGFYYDIDTEIPLTPDDLQKIESRMNELIKKDYDVIREVVSHDKAMQTFIERDEPYKQEIIDEISDNEIIKLYYHEEYTDMCRGPHVQILVTFV

SEQ ID NO: 161386 - protein, 154 aa, Unknown
  Bacterial polypetide isolated from the Sargasso Sea
AVDLNLPGRLGASFVDKDGTKKVPVMLHRALFGSLERFIGILIENYAGKLPFWISPLQAVVIPISSDFDEYAKSVTSELKQSGLIAEVDVKNHNLNYKIRDHSLTKVPLLLICGKKEVDTNSVTIRRLDSNKQENMTLKEFIKKYSDLNKAPSI

SEQ ID NO: 161387 - protein, 140 aa, Unknown
  Bacterial polypetide isolated from the Sargasso Sea
SSYVSSDGTKKVPVMLHRALFGSLERFIGILIEHYAGKLPLWLAPLQAVVIPIAAEFDNYAKKIFEQCVKAGINTEVDLKNQKINYKIREHSLSKVPLLLICGEKEVKNKSVTIRKLGSEKQETLLLEKAIMQISKKINF

SEQ ID NO: 161388 - protein, 136 aa, Unknown
  Bacterial polypetide isolated from the Sargasso Sea
MPEIKLLDGKKIPFSKPIDGFELTEKISKSLRKEALVMEVNGELKDLSFKISKDSEVKIITSKDKQGIEVIRHDAAHIMAMAVQELFPGTQVTIGPVIENGFFYDFARKNPFTMEDLKKIEKRMSDIIDRNVKTKR

SEQ ID NO: 161389 - protein, 174 aa, Unknown
  Bacterial polypetide isolated from the Sargasso Sea
MPDIKLLDGKKIPFTKSINGFELAKKISKTLEKEALIMEVDGELKDLSYLIKKNSVVKIVTSKDKEGLEVLRHDAAHIMAMSVQELFPGTQVTIGPVIENGFYYDFARKDPFTSDDLKKIEKKMSEIIDRDVKTKREVWERGKAIAHFKKIGEKYKAEIIESIPANEELSIYHH

SEQ ID NO: 161390 - protein, 191 aa, Unknown
  Bacterial polypetide isolated from the Sargasso Sea
AVRGEAAFYGPKIDFQVTNVVGREETASTNQMDLVMGSRFGLKYTASDSQEYTPIIIHRAPLGTHERFVAFLIEHYGGAFPTWLAPVQVRLIPVASSFNEYAHNLNQNLYSSLIRTEVDDSHDSFSKKIRNAAIDKIPNLLIVGEKEQANQCITWQRYGSKTRESVSFEAFSSSLQGEITNRLDWRNKDKI

SEQ ID NO: 161391 - protein, 133 aa, Unknown
  Bacterial polypetide isolated from the Sargasso Sea
KVPVMLHRALFGSLERFIGILIENYAGKFPFWISPLQTVVIPISEDFEEYASKVSKKIKDAGMSSVVDLKNHNLNYKIREHSLAKVPILLICGKKEVDSNSVTIRRLDSNKQENMELNKFLKTFSALNRASSK

SEQ ID NO: 161392 - protein, 144 aa, Unknown
  Bacterial polypetide isolated from the Sargasso Sea
EPFSEEDLNKIENKMKEIVERDEKTIREVWSRKKAIDHFKKIGEIYKAEIIESIPEGEEVSIYFHGKWHDLCRGPHLSSTGKIGKFFKLTKVSGAYWRGDSNNEMLQRVYGTSWSTKKDLDDYLNRIEEAEKRDHRKLGKSMDL

SEQ ID NO: 161393 - protein, 169 aa, Unknown
  Bacterial polypetide isolated from the Sargasso Sea
CLRDAIGRDWQCGTLQVDLNLPARLDASYVDKDGTKKVPVMLHRALFGSLERFIGILIENYAGKFPFWISPLQTMVIPISEEFNDYAIEVSNKIKNSGISSSVDLKNHNLNYKIRDHSLAKIPLLLICGKKEVDSNSVTIRRLDSNKQENMGIDQFLKTFSALNKASSN

SEQ ID NO: 161394 - protein, 125 aa, Unknown
  Bacterial polypetide isolated from the Sargasso Sea
MKISRDSKEGLDIIRHDCAHVLAEAVQSIFPETLVSIGPTIENGFYYDFAREKPFTSEDLILIEKKMHEIIAKGKKFEKEVWKREEAIKFFSKKGEIYKVELINDIPASEEITIYKQGEWLDLCR

SEQ ID NO: 161395 - protein, 292 aa, Unknown
  Bacterial polypetide isolated from the Sargasso Sea
KTSTALESESKIKSYWYILSPDGTMSEFDKFNFSKHKKLEKLAKYESAKNRNVDEPPPHVALMKKLAIADYEPASDHGNMRFFPNGRLIKSLLEQYVTNRVKDYGGYEVETPIMYDSHHPSMESYFNRFPARQYNIDADGKQLFLRFAACFGQFLIAHDMQISYKNLPYRLYEMTRYSFRREQSGELVGLRRLRAFTMPDCHAFCKDMPQAVDEFRKRFELSRDVLQNVGIENNDYEMAIRFTEDFYNENKELILEMVKKLDKPVLVEMWKERFFYFVLKWEFNYIDNLGKA

SEQ ID NO: 161396 - protein, 71 aa, Unknown
  Bacterial polypetide isolated from the Sargasso Sea
VRADVDLRNEKIGYKIREHSNSKVPIIIAVGKKESQEKTTSVRRIGSSETKTFKLDEIVTTLSKETKSPIE

SEQ ID NO: 161397 - protein, 158 aa, Unknown
  Bacterial polypetide isolated from the Sargasso Sea
CGTLQVDLNLPGRLGATYVSKDGSKQVPVMLHRALFGSLERFIGILIENYAGKMPFWLTPLQTVVIPISSDFDEYAKNVYQKLKKVGISSEVDLKNHNLNYKIRDHSLTKVPLLLICGKKEVDTNTVTIRKLDSNKQENMELKEFLKKYSALNKAPSI

SEQ ID NO: 161398 - protein, 76 aa, Unknown
  Bacterial polypetide isolated from the Sargasso Sea
MKTVVLKYADRPEVRVGEDKVWDKAEASLLEAVKATKLEYSINKGEGAFYGPKIEFVLRDAIGRDWQCGTVQVDLN

SEQ ID NO: 161399 - protein, 71 aa, Unknown
  Bacterial polypetide isolated from the Sargasso Sea
MPVITLPDGSQRSYDNPLSVLDVAKDIGPGLAKATIAGKINGQLVDACELITSDASLSIVTAKDQEGLEII

SEQ ID NO: 161400 - protein, 132 aa, Unknown
  Bacterial polypetide isolated from the Sargasso Sea
VPVMLHRALFGSLERFIGILIENYAGKFPFWISPLQTVVIPISEEFDDYAIEVSEKIKKAGMSSFADLKKHNLNNKIRDHSLAKIPILLICGKKEVDSNSVTIRRLDSDKQENMDLNLFLKTFSALNKASSN

SEQ ID NO: 161401 - protein, 85 aa, Unknown
  Bacterial polypetide isolated from the Sargasso Sea
YEIKKKLDDVGIRSELDLRNEKIGYKIREHSSQAIPIIVIIGNQEKDNQSVAVRYLGSKKQEFLSLKEFIENIVDKCLPPDLAKP

SEQ ID NO: 161402 - protein, 136 aa, Unknown
  Bacterial polypetide isolated from the Sargasso Sea
DGSRQKPVVIHRAMLGSLERFLGVLIEHLSGNFPTWLSPVQAIIIPITDKHLDYSYDIYKQFKSKNIRIEVDESSERMNAKIRNAQLRKIPYMFIIGDNEMTSKTVSVRTRNGKETSSISREDILEKVNSEILNRF

SEQ ID NO: 161403 - protein, 146 aa, Unknown
  Bacterial polypetide isolated from the Sargasso Sea
RLDASYVDKDGTKKVPVMLHRALFGSLERFIGILIENYAGKFPFWISPLQTMVIPISEEFNDYAVEVSNKIKNSGISSAVDLKNHNLNYKIRDHSLAKIPLLLICGKKEVDSNSVTIRRLDSNKQENMGLDQFLKTFSALNKASSN

SEQ ID NO: 161404 - protein, 161 aa, Unknown
  Bacterial polypetide isolated from the Sargasso Sea
DWQCGTLQVDLNLPERLGATYVAKDGNKKVPVMLHRALFGSLERFIGILIENYAGKLPFWLAPLQTVVIPISNDFDDYAKNVYKQIKREGISSEVDLKNHNLNYKIRDHSLTKVPLLLICGKKEVDTNSVTIRRLDSNKQENMELKEFLTKYSAFNKAPSI

SEQ ID NO: 161405 - protein, 168 aa, Unknown
  Bacterial polypetide isolated from the Sargasso Sea
LRDAIGRDWQCGTLQVDLNLPERLGASFVDSDGNKKVPVMLHRALFGSLERFIGILIENYSGKLPFWLCPVQTIVIPISNDFDEYAKLVNNELKKVGLSSEVDLKNHNLNYKIREHSLTKVPMLLICGKKEVDSNTVTIRRLDSKKQETMELKEFLKKYSALNKAPSI

SEQ ID NO: 161406 - protein, 112 aa, Unknown
  Bacterial polypetide isolated from the Sargasso Sea
MINITFPDKSVRKYDSSITGHDLAKSISNSLAKDAICIEIDGELRDLSYVIENDADCKVYTKDDQYSLDTLRHSTAHVLAQAVLNLYPGTEFAVGPSIDDGFYYDFLFKEIL

SEQ ID NO: 161407 - protein, 125 aa, Unknown
  Bacterial polypetide isolated from the Sargasso Sea
LGSFERFIGILIEQYEAKFPIWLAPYQIILLSITDRNIEKCLKFNELINNNGYRSKVDIRNEKIGYKIREATLGRVPLIAVVGDKEEEIDSVALRALNGKNLGIFNLPNLYKLMDELIEKKGRIE

SEQ ID NO: 161408 - protein, 175 aa, Unknown
  Bacterial polypetide isolated from the Sargasso Sea
GPKIEFVLRDAIGRDWQCGTLQVDFNLPGRLGASYIDKDGTKKVPVMLHRALFGSLERFIGILIENYAGKLPFWISPLQTVVIPISEDFGHYAIEVCKKLKSDGISSIVDLKNHNLNYKIREHSLAKVPLLLICGKKEVDSNSVTIRRLDSNKQENMKLDLFLKKYSAQNKASSN

SEQ ID NO: 161409 - protein, 69 aa, Unknown
  Bacterial polypetide isolated from the Sargasso Sea
LVLSIYKDFGFENVSIKFSDRPEKRVGNDDVWDKSETALREAMEATGLEYTLNPCEGAFYGPKLEFILN

SEQ ID NO: 161410 - protein, 133 aa, Unknown
  Bacterial polypetide isolated from the Sargasso Sea
MKLTLPDKSVKELPKGVTGLDVAMSIGPGLAKSAIAVNIDGEQKDLSDPINADCSLSVITLDSDEGLEIMRHTTAAQVLALAIKSIYPDSKLAIGPTIENGFYYDFHTEDSISTEDLPRIEEEMRKIIKEKSE

SEQ ID NO: 161411 - protein, 119 aa, Unknown
  Bacterial polypetide isolated from the Sargasso Sea
MPTITLPDNSQRKFDNPLSIDDIAKDIGPGLAKATVAGKVNGMLVDASDIIQEDCDLEIITIQDDEGIEIVRHSCAHLFAHALKQIYPNAQMAIGPVIKDGFYYDIKLDKNLTNEDLEA

SEQ ID NO: 161412 - protein, 158 aa, Unknown
  Bacterial polypetide isolated from the Sargasso Sea
MSDKITITFPDGNFRIVKKGINGFEIAEEISKSLAKESIAIKINSSIFDLKTRIEKDAKIQIIKKSDEEALDIIRHDCAHVMAEAVQSLFPETQVTIGPSIENGFYYDFARKEPFTLSDLPKIEKKMHEIINIGEKFTREVWSREEAIKFFKAKGEDL

SEQ ID NO: 161413 - protein, 101 aa, Unknown
  Bacterial polypetide isolated from the Sargasso Sea
VVVCSIVDSTNDYINEIKKKLDKSGIRCEIDLRNEKIGYKIREHSNQAIPIIVVIGKQEQENKSVAVRYLGSKKQEFLNLNEFLENIVNKCTPPDLLDEYS

SEQ ID NO: 161414 - protein, 94 aa, Unknown
  Bacterial polypetide isolated from the Sargasso Sea
MNKPNTNSDLYKIRHSLAHVLAQAVLEIRPKAKLGFGPPVDNGFYYDFELADPLTPEDLPKLEKRMRHILKSGQVFEREELDQEAMVKLLRGVN

SEQ ID NO: 161415 - protein, 228 aa, Unknown
  Bacterial polypetide isolated from the Sargasso Sea
MIDVLLPNGQSKKYNNPISPFEIAKEISSSLAKEALIAKVDDDLWDLNRLIHSNCKIKILTNKDPETLSVLRHDAAHIMAEAVLELYPDTQITIGPAIENGFYYDFYRLESFILDDLNKIEKRMHEIVKRNEKIHRKVWKKQKAIEFFKKNGENFKVELVEEIPEEEEVTFYSQGKFIDLCRGPHFTSTSKLGHAFKLMKLAGSYWRGDSNNQTLQRYMEQHFLNKKI

SEQ ID NO: 161416 - protein, 151 aa, Unknown
  Bacterial polypetide isolated from the Sargasso Sea
LNLPGRLGASFVDSDGNKKVPVMLHRALFGSLERFIGILIENYSGKLPFWLCPIQTIVIPISSDFDDYAKQVNSQLKNVGLSSEVDLKNHNLNYKIREHSLTKVPMLLICGKKEVDSNTVTIRRLDSKKQETMDLKEFLQKYSALNKAPSI

SEQ ID NO: 161417 - protein, 70 aa, Unknown
  Bacterial polypetide isolated from the Sargasso Sea
AYWRGDSKNEMLQRIYGTSWATQKDLDEHLKRIEEAEKRDHRKLGREMDLFHFREESPGSVFWHERGWGL

SEQ ID NO: 161418 - protein, 90 aa, Unknown
  Bacterial polypetide isolated from the Sargasso Sea
MPIITLPDGSKKVFEKSVTILEIAQSIGAGLAKATIAGKVNDVLLDATIPINEDSKVVIITSKDKEGIEIIRHSFAHLIGHAVKQIYSDI

SEQ ID NO: 161419 - protein, 144 aa, Unknown
  Bacterial polypetide isolated from the Sargasso Sea
MVSIKLPDGSKKKFSGSIKGDKLAKSISPSLSKSAIAISVNGQLKDLDFEINKDSDAQIITKESELGIEILRHDTAHVMAEAVKILYPDVQVTIGPPIENGFYYDFSRKVPFVPEDLIKIEKKMLEIINKNESFEREVWDRKKA

SEQ ID NO: 161420 - protein, 151 aa, Unknown
  Bacterial polypetide isolated from the Sargasso Sea
LNLPGRLGASFVDKDGSKKVPVMLHRALFGSLERFIGILIENYSGKLPFWISPLQTVVIPVSSDFDNYAKEVNKKIKKEGITSEVDLKNHNLNYKIREHSLSKIPILLICGKKEVDSNTVTIRRLDSNKQESMELNLFLKKFSALNKANLN

SEQ ID NO: 161421 - protein, 129 aa, Unknown
  Bacterial polypetide isolated from the Sargasso Sea
MPVITFPDGSKKTFKKNVSPLNIAEDISNSLKKNAVIAKVNDEFWDLNREILRDSDVSILRKGDKKILEILRHDCAHILAEAVLEIYPETQVTIGPVIENGFYYDFYREEPFSSEDLIVIEKRMHEIVD

SEQ ID NO: 161422 - protein, 201 aa, Unknown
  Bacterial polypetide isolated from the Sargasso Sea
MHEDKKIVIELSDGSLRNYPYGITGLEIAEEISSSLAKKSLACSINGYLTDLSTRLTEDCSLTLHTAKDTEIALELIRHDCAHILARAVQEIWPDVKVTIGPVIQDGFFYDFDKEDPFSENDIEKIEKLMRSIIAKKDLVKKETWDRKRALEFYKEKNEPYKVELIQDIPTDQDIKMYWHGDWQDLCRGPHLVNTGQVPAD

SEQ ID NO: 161423 - protein, 104 aa, Unknown
  Bacterial polypetide isolated from the Sargasso Sea
MPQIQLLDGKKIPFTKSINGFDLTKKISKSLEKTALIMEVDGQLKDLSHEITKDSSVRIITSKDKEGLEVLRHDAAHILAMAVQELFPGTQVTIGPVIQDGFYY

SEQ ID NO: 161424 - protein, 150 aa, Unknown
  Bacterial polypetide isolated from the Sargasso Sea
NLPERLGATFVDKDGSKKVPVMLHRALFGSLERFIGILIENYAGKLPFWLSPSQVVVLPIAEEHNEYAKKIFKELFKEGIKCEVDLRNQKINYKIREHSLSKVPLLLICGKKEMKDKSITIRKLGSEKQETQNFDKAIEKIRSLNNLPIH

SEQ ID NO: 161425 - protein, 140 aa, Unknown
  Bacterial polypetide isolated from the Sargasso Sea
VDKDGSKKVPVMLHRALFGSLERFIGILIENYAGKLPFWISPLQIVVIPVSDEFDKYATQVADKLRNVGLNCEVDLKNHNLNYKIREHSLSKVPVLLICGKKEVDSDSVTIRKLDNKKQENMKLKDFIKKYSALNQASLN

SEQ ID NO: 161426 - protein, 129 aa, Unknown
  Bacterial polypetide isolated from the Sargasso Sea
MFHRAILGSFERFIGILIENYSGNLPLWLAPTQVTVCSITDEADDYVKEISEMLRSKNIRCNSDLRNEKISYKVREHSVSKVPIIIAVGKKEVSDRTVSIRRLGSDDTSMLSLDDFTTSVVQESLAPNK

SEQ ID NO: 161427 - protein, 219 aa, Unknown
  Bacterial polypetide isolated from the Sargasso Sea
KKYINDPDLWIETEDIVRNTLKDGNINFKEIPGEAAFYGPKVDVQVWSAIGKEFTLATNQVDFAIPKRFGLTFTDQNGKDQTPLCIHRAPLSTHERFVGFLIEHFGGDFPVWLSPVQIAILPVSEKVNKYAFDLKARFNKFSFRSYVDERPDKIGSKIRAAELKKVPIMLVVGEKEASSDTVSLRRRFIGDQGTLTVEKIIEDISEEINKRRLPYRKSE

SEQ ID NO: 161428 - protein, 72 aa, Unknown
  Bacterial polypetide isolated from the Sargasso Sea
DFNLPERFDMPYVGSDGQKYHPIMIHRALLGSVERFFGILVEHFAGKFPLWLAPVQVCVMPINLKQHDYADS

SEQ ID NO: 161429 - protein, 144 aa, Unknown
  Bacterial polypetide isolated from the Sargasso Sea
ASYVDKDGTKKVPVMLHRALFGSLERFIGILIENYAGKFPFWISPLQTVVIPISEDFEEYAKKVSDKIREAGITSMVDLKNHNLNYKIRDHSLAKIPLLIICGKKEVDSNSVTIRRLDSNKQENMELNSFLKKFSALNKAPSNI

SEQ ID NO: 161430 - protein, 244 aa, Unknown
  Bacterial polypetide isolated from the Sargasso Sea
DGNELSYDDGITPFEIAEKISPALARDVLSVEYNDEIIETKTKLFIDGNLKFFKWDDKQGKKAFWHSTAHLLAQVILDLYPNSKLTIGPPIENGFYYDVDFQNSTFSENDFSKIENKMIEEARKDHSFNMRKVSNSNALSYYKKQKNEYKCELIKGLGDEKITFCDHANFTDLCKGGHIPSTKFIKSVKLLNTAGAYWRGDENNKQLTRIYGISFPKEKLLKEYLQLIDEAKKRDHRVLGKKLG

SEQ ID NO: 161431 - protein, 76 aa, Unknown
  Bacterial polypetide isolated from the Sargasso Sea
LFKEGIKCEMDLRNEKINYKIREHSLAKIPYIIVCGKKEVSENTVTVRKLGSDKQETIKKEKLIKNMLDLNKLPLN

SEQ ID NO: 161432 - protein, 325 aa, Unknown
  Bacterial polypetide isolated from the Sargasso Sea
IMYDSHHPSMESYFTDFLARQYNIDADGKQLFLRFAACFGQFLIAHDMQISYKNLPYRLYEMTRYSFRREQSGELVGLRRLRAFTMPDCHAFCKDIPQAIEEFRTRFDLSRDVLKNVGIENDDYEMAIRFTEDFYNENKELITEIVKKLDKPVLVEMWKERFFYFVLKWEFNYIDNLGKASALSTDQIDVENGNRYGIEFVDENNKTINPIILHNSPSGAIERVIYALLEKCAKDAKEGRKPMFPLWLAPTQVRIIPLKDEFMEFSQNLFDKLTEKNIRVDIDDRNESIGKRIRESEKEWIRYVLVIGDKEVNSENLSVRDRTQS

SEQ ID NO: 161433 - protein, 184 aa, Unknown
  Bacterial polypetide isolated from the Sargasso Sea
MQEFSKGITPLEIMHDTKGISKDSIICKVDGVLTDLSAELLNDCDLQFMDAKSKDGHSVLLHSTAHLMAQAVKRLYPKTKVTIGPYLENRFYYDFDVETPFLEEDLSKIEKEMVKISEENLMITHEIKSRKDALSYFDKIKENYKVEIINDLDKNEILKVYSQGEFSDLCRGPHVPSTGVIKHF

SEQ ID NO: 161434 - protein, 211 aa, Unknown
  Bacterial polypetide isolated from the Sargasso Sea
MIEITFPDGAVKEYKKGITPIEIARSISNSLARNLLSVSFNKKQIESTSILEGSGSIEFHFWEDPKGKSAFWHSSAHLFAQIVKELYPKSKLTIGPPIEHGFYYDLDLGDQTISENDFEKIEKRIIEEARKDHKFSIRESSKEDAINFYKNNKNEYKIELIEKLDDEKITFCDHANFSDLCKGGHIPSTGHIKAIKLLNVAGAYWRGDEKN

SEQ ID NO: 161435 - protein, 233 aa, Unknown
  Bacterial polypetide isolated from the Sargasso Sea
MFKVKIENKAYDVKPKTSIENFVKDSLDDVSCVAARLNGKKVDLSFLIEDNYTLELIKPSDTEGLEIIRHTCAHVFGHALKQIYPNARMVIGPTIDNGFYYDVLTSESISEKDLKSIETLMKKLSKKNYKIHREVVSKKKAIEIFTERKEDYKIKLIEDIPDDEIIAIYYHEEYIDMCRGPHLTSTKHLNFFKLMKVSGSYWKGDSNNTQLQRVYGTAWDTKENLKSYLNKLE

SEQ ID NO: 161436 - protein, 148 aa, Unknown
  Bacterial polypetide isolated from the Sargasso Sea
PERLNASYVDKDGTKKVPVMLHRALFGSLERFIGILIENYAGKFPFWISPLQTVVIPISEDFENYAKKVSEKIKEAGMSSIVDLKNHNLNYKIREHSLAKVPLLLICGKKEVDSNSVTIRRLDSNKQENMELKTFLKTFSALNKASSN

SEQ ID NO: 161437 - protein, 74 aa, Unknown
  Bacterial polypetide isolated from the Sargasso Sea
YFKLTKVSGAYWRGDSKNEMLQRIYGTSWATQKDLDEHLKRIEEAEKRDHRKLGREMDLFHFREESPGSVFGTK

SEQ ID NO: 161438 - protein, 149 aa, Unknown
  Bacterial polypetide isolated from the Sargasso Sea
MLIITLPDNSKRKFDNPLSIDDIAKDIGPGLAKATVAGKVNGMLVDASDIIQEDCNLEIVTIQDAEGIEIVRHSCAHLFAHALKQIYPNAQMAIGPVIKDGFYYDIKLDKNLSNEDLEVIEKRMKKLAKTKYDVVREVVSKNQAIDTFQ

SEQ ID NO: 161439 - protein, 176 aa, Unknown
  Bacterial polypetide isolated from the Sargasso Sea
LWSKIEFVLRDAIGRDWQCGTLQVDLNLPGRLGASFVDSDGNKKVPVMLHRALFGSLERFIGILIENYSGKLPFWLCPVQTIVIPISSDFDDYAKEVNSQLKKAGISSEVDLKNHNLNYKIREHSLTKVPMLLICGKKEVDSNTVTIRRLDCKKQETMDLKEFLKKYSALNKAPSI

SEQ ID NO: 161440 - protein, 123 aa, Unknown
  Bacterial polypetide isolated from the Sargasso Sea
MVSKKEAIKLFDERDELYKVKIIKSSDQEDNFQIYCQDNTDFIDLCYGPHLHNLKSTGAFKLTKVAGAYWKGDSKNEMLQRIYGTAWKNEEDLNNHLNFLKEAEKRDHRLIGKQMNLFHFQEE

SEQ ID NO: 161441 - protein, 156 aa, Unknown
  Bacterial polypetide isolated from the Sargasso Sea
MQVDFVLPDRLDAEYVAEDGSRQRPVMLHRAILGSLERWIGILIEQYSGKMPVWLSPVQCVVAPITEVANEYAQEVADKFKAAGMRVENDMRNEKIGYKVREHSVAKVPFIIAVGGREAESRTIALRRLGSDKQETLSLDDALAQLGLEILPPDLA

SEQ ID NO: 161442 - protein, 278 aa, Unknown
  Bacterial polypetide isolated from the Sargasso Sea
WLISAHVSKIGDVFLLEGRLLESETGRVINAVSYDFELSIEGLYTRGMHNFSELIMSKRIPLEVHKRQNLIYFKTNPSGAMVRVGKDTLNGVTPLAIDRVVVESRPIIIFKEDYQPFKVKQLPDDNSDIIYIDLKLKVPKVGNVVFNQPIPEDIAIVSSDGKSSLLIEEGLKSYRDLPIGNYKLDSDLYVIRNNRFRIQHRKTTKSSPIFYPKKEINERRDYYHSRRMIYLQILGGSLLYRSYISLRSSYLYNQYSTNIENSDERHRKIENLDQQKPV

SEQ ID NO: 161443 - protein, 152 aa, Unknown
  Bacterial polypetide isolated from the Sargasso Sea
MPKIKLPDGSVKEFDKPINFDELASSIGSGLAKATVAGMLNGKLVDASELIESDSDVILITNSDEDGVEIIRHSCAHLFGHALKQLYPKAKMAIGPTIENGFYYDIDLEESLSENDLEKIELRMKELAQTNYDVVREVVTRKKALDTFENRN

SEQ ID NO: 161444 - protein, 151 aa, Unknown
  Bacterial polypetide isolated from the Sargasso Sea
MNLPERLGATYVAKDGSKKVPVMLHRALFGSLERFIGILIENYAGKLPFWITPLQTVVIPISNDFDDYAKNVHQQLKKVGISSEVDLKNHNLNYKIRDHSLTKVPLLLICGKKEVDTNTVTIRRLDSNKQENMELKEFLKKYSALNKAPSI

SEQ ID NO: 161445 - protein, 164 aa, Unknown
  Bacterial polypetide isolated from the Sargasso Sea
IGRDWQCGTLQVDLNLPGRLGASFVDKDGAKKVPVMLHRALFGSLERFIGILIENYSGKLPFWISPLQTMVIPVSAEFDNYAKEVNKKIKKQGITSEVDLKNHNLNYKIREHSLSKIPILLICGKKEVDSNTVTIRRLDSNKQESMELSLFLKKFSALSKAPLN

SEQ ID NO: 161446 - protein, 339 aa, Unknown
  Bacterial polypetide isolated from the Sargasso Sea
MFLSKLFIPISKDLPAEAKIKSHQLMLRTGMIKQSSAGIYSWLPLGFKVMKKIEQIVREEQNAIGAQEMLMPTIQSSEIWKESGRYDDYGEEMLRIKDRQGREMLYGPTNEELITDVFRASVKSYKSLPQLLYHIQWKFRDEIRPRFGVMRCKEFYMKDAYSFDLSDEEANKSYNKMFFSYLKTFNRLGLKAIPMAADTGPIGGDLSHEFVIIAETGESKIYADKNIIDINLNQYELNDGSLSKMREDISKIYAVTDEKYKKTDFDNHVKKENQMITKGIEVGHIFYFSDKYSKPMNCLIDDKDGKKTSVKMGSYGIGVSRLVGAIIEANYTKDIMEWP

SEQ ID NO: 161447 - protein, 179 aa, Unknown
  Bacterial polypetide isolated from the Sargasso Sea
MPNITLPDGKKLSFKNNVTGYEVAEKISKSLSKQALIVSVDGALKDLSFSIKKDSSVKIITSKDKDGLDVIRHDAAHIMAMAVQELFPGTQVTIGPVIEDGFFYDFARKEPFTKDDLKKIEKKMSEIIDRDVKTKREVWDRDKAIAHFKKIGEKYKAEIIESIPENEELSIYHHGDTWH

SEQ ID NO: 161448 - protein, 364 aa, Unknown
  Bacterial polypetide isolated from the Sargasso Sea
MRILQLHCDNISYEATKKEIKSAEDIEPKPVSIDEVVVCFVAVENGDNNDVGLDAISQIKESMQKIGCKKLLLYPYAHLSSDLAAPSTALSILKLMESESQDLEVSRAPFGWTKSYNVKVKGHPLAESSKVITAGDKKEKTSTALESESKIKSYWFILSPDGSLTEFDKFNFSKHKKLEKLAKYESDKNRNVDEPPPHVALMKKLAIADYEPASDHGNMRFFPNGRLIKSLLEQYVTDKVKDYGGYEVETPIMYDSHHPSMESYFNRFPARQYNIDADGKQLFLRFAACFGQFLIAHDMQISYKNLPYRLYEMTRYSFRREQSGELVGLRRLRAFTMPDCHAFCKDIPQAIEEFRTRFDLSRDV

SEQ ID NO: 161449 - protein, 345 aa, Unknown
  Bacterial polypetide isolated from the Sargasso Sea
MLRIKDRQGREMLYGPTNEELITDIFRSSVKSYKSLPQMLYHIQWKFRDEIRPRFGVMRCKEFYMKDAYSFDLSDEEAKKSYNKMFYSYLKTFERLGLKAIPMAADTGPIGGDLSHEFVILAETGESNIYADKNIFEIDLKNYKFDDQSLKKMREDFTKVYAVTDEKFKEGQFNKLVKKENQMKAKGIEVGHIFYFSDKYSKPMNCLIDDKDGKKTSVKMGSYGIGVSRLVGATIEANYNDNVMKWPKSISPFDVVIIPSVSKNNKENLEKSEKIYEELKKQNIDVLLDDVDENMSNKFKKHDLIGIPYQIIIGTKSDNDKFEFKELNFKSEMLSLDKIKLKLKI

SEQ ID NO: 161450 - protein, 380 aa, Unknown
  Bacterial polypetide isolated from the Sargasso Sea
MFLSKLFIPISKDLPAEAKIKSHQLMLRTGMIKQSSAGIYSWLPLGFKVMKKIEQIVREEQNAIGAQEMLMPTIQSSEIWKESGRYDDYGEEMLRIKDRQGREMLYGPTNEELITDVFRSSVKSYKSLPQLLYHIQWKFRDEIRPRFGVMRCKEFYMKDAYSFDLSDEEAKKSYNKMFFSYLKTFNRLGLKAIPMAADTGPIGGDLSHEFVIIAETGESKIYADKKIFDINLNQYELNDRSLSKMREDFSKIYAVTDEKYEKIEFDSRVKKENQMITKGIEVGHIFYFSDKYSKPMNCLIDDKDGKKTSVKMGSYGIGVSRLVGATIEANYTKDTMKWPKSISPFDVVIIPSITKNNKENLEKAEKVYKKLKKQNIDVLL

SEQ ID NO: 161451 - protein, 154 aa, Unknown
  Bacterial polypetide isolated from the Sargasso Sea
MSDKIIITFPDGNKKDLKKGVSGFEIAESISKSLAKESIAIKINNKIVDLSRKIEKDSEVQIIKKNDEEALNIIRHDCAHVMAEAVQTLFPGTQVTIGPAIENGFYYDFAKEVPFTTSDLEKIEKKMHEIISKGENFTREIWDRKDAIDYFDNK

SEQ ID NO: 161452 - protein, 87 aa, Unknown
  Bacterial polypetide isolated from the Sargasso Sea
MPIITLPDGSKKVFEKSVTILEIAKSIGAGLAKATIAGKVNDVLLDATIPINKDSKVVIITSKDKEGIEIIRHSFAHLIGHAVKQIY

SEQ ID NO: 161453 - protein, 196 aa, Unknown
  Bacterial polypetide isolated from the Sargasso Sea
MKITLPDNSSRELPEGSSGYDLAKDIGPGLAKSAIAVTIDGVQKDLYDVIDSDASVSIITIDSDEGVEIMRHTLTAQVLARAIKNLYPESKLAIGPTVQDGFYYDVESDESISSDDLSKIEEEMKKIIKTKSAITKKLVSKKDALKIFKSNKEPYKEIIINESDQDDDFQLYYQDDEEFVDLCRGPHLPNLGFIGS

SEQ ID NO: 161454 - protein, 103 aa, Unknown
  Bacterial polypetide isolated from the Sargasso Sea
LFGFPGKAVVCPIAEENNEYVKKLFEDLFKEGIKCEMDLRNEKINYKVREHSLAKVPFIIVCGKKEVAENTVTVRKLGSDKQEIMKREDLIKNMLASNKLPLN

SEQ ID NO: 161455 - protein, 43 aa, Unknown
  Bacterial polypetide isolated from the Sargasso Sea
PSGALHGLLRVRAFTQDDAHIFCSEDQITKECLNVTNLILKNL

SEQ ID NO: 161456 - protein, 205 aa, Unknown
  Bacterial polypetide isolated from the Sargasso Sea
WFMLSDSPPERDLQWTDTGIASSFKFINKLYDFIGKFKEYRSNETNDSNILESLKIIINEVTNNIEGFQFNKSVAKIYEYVNILNEALSFKKISTKDFEWSLKKLSLILQPFVPHISEEMWSALNNNTLCINQHWPIEEVRKKDNFKIAVQINGKTKEIIEINGILSEAQILDLVKSNDKIKKSLVGKKITREIYVPGKIVNLVL

SEQ ID NO: 161457 - protein, 210 aa, Unknown
  Bacterial polypetide isolated from the Sargasso Sea
AAVEGSYRFLRRVWNFGLKLAAIDRDAAMASVAGAKLQDVQFGKEAKALRLEIHNVLKQVDYDYQRMQYNTVVSGAMKMINALEDFKAMDSAGAQVALIEGFGILLRCLYPATPHIAHSLWTGLGYAGALGDLLDAPWPQVDAGALVQDEIELMLQVNGKLRGSIHVPAQADKAEIERIALASEAFVAQAAGAHPKRVIVVPGRLVNVVV

SEQ ID NO: 161458 - protein, 199 aa, Unknown
  Bacterial polypetide isolated from the Sargasso Sea
WIGKSFGAEIEYKIDASKDSLITFSTRPDTIFGVSFLAISPNHPLAIKIAKDNEKISNFLEKCKETKAAEADMAKAEKLGIDTNLRVTHPLTKEKLPVWIGNFVLLDYGTGVVMGVPAHDSRDYEFAKKYNLNIKEVIQNNEEELPKTENGILINSDKFNGLSSEEGSKKIIEELVKLKSGKQLIQFRLRDWGVSRQRY

SEQ ID NO: 161459 - protein, 173 aa, Unknown
  Bacterial polypetide isolated from the Sargasso Sea
RSEDAFKDSKTSIEEEIKELSIKINDDYEKRLNLNTVVSSCMEIFNKLNKRMEKNKITADENEFLKVYEFLLISLSPIAPHICEYLYEDVLEKNFNSACWPKEDFFQQKRSEVNYLVQVNGKVRANIVLHVNLNQSEVEKAVSKHPNISKYLQGNEIKKIIFIKDKLINFVNG

SEQ ID NO: 161460 - protein, 32 aa, Unknown
  Bacterial polypetide isolated from the Sargasso Sea
MTFIKPQDKVDSKQNWYALSMFPYPSGDLHIG

SEQ ID NO: 161461 - protein, 265 aa, Unknown
  Bacterial polypetide isolated from the Sargasso Sea
LSDTVIASNLVEGSISWLYYADRLLELPVGMVAIALSTVMLPHLSRLSAGGSEDGFSSLMNWGVLMGLGLGLPAGIGLYILSVPLLSVLFMSFEGGAMTDYDVRMAGLALEMFAIALPGFVLVRVLSSGFFAKKNTKQPFRYASAAVAVNLFVSLATFKTLGHVGLALATALSAWTNVFLLYFGLIKHKIAVIKVVTPQLVKVYLLCLLMALGLGIWSPEDLIWLSQDPLYRLAKLLIAILVVLGLYFVALFGLGFRGRDLRPGI

SEQ ID NO: 161462 - protein, 276 aa, Unknown
  Bacterial polypetide isolated from the Sargasso Sea
NQAFIPVMVEFKAKGREELKIFLSSVSGLFGALLIIFVFLGLIGSDLLVKLFAPGFMSDPEKLSQTSDLVRIMFPYIGFISLTAYAGGVLNAHDRFAVPAITPVLLNLCLIIASLLWIWEVFDGLAVVVLAWAVLFAGVAQLAYQIPSLGALGLLVKPNLNYRHSGVKEMGVLILPAIFASSVGQINALVNTVIASNLVEGSISWLYYADRLLELPVGMVAIALSTVMLPHLSRLSAGGSEDGFSSLMNWGVLMGLGLGLPAGIGLYILSVPLVSV

SEQ ID NO: 161463 - protein, 155 aa, Unknown
  Bacterial polypetide isolated from the Sargasso Sea
MCVTRLASQAALGIRVTSYRSPLPLAGEGLGERAKKVQGGTMTLLDNAKRLRHEMTDAEQRLWYYLRAHRFLGLKFKRQKPIGPYIVDFICTERWLVIELDGGQHQLQTEYDQQRERYLETRGYRVLRFWNHQVLAKTEAVLEQIRLEIGEQDGL

SEQ ID NO: 161464 - protein, 262 aa, Unknown
  Bacterial polypetide isolated from the Sargasso Sea
TQGMVCHNTFQNESRAWVYPDDVEKKDAHYFQISTGEKVTMGEIESMSKSKKNVIDPESIIDTYGADSARWFMLSDSPPEKDINWTDSGIHGAWKICQKIWTLVKKNQKFLERNVETAAPNYEGGNLIFIKTIHQNLHAITQSIEKFQMNVSIARVFEIVNAMSKFEINDEKDKMAFTEALCILIRVIEPMVPHLAEECWSLTGNTNSITNEPWPKVNEKYLENKEVTVVIQINGKRRGEVVVLKDSSENEVKKEMQNIKNI

SEQ ID NO: 161465 - protein, 295 aa, Unknown
  Bacterial polypetide isolated from the Sargasso Sea
NSAFAHRIKNTNDFISFDMIKNEKTQKIHVDISFVDDKNRLNIERLKQNHPEFNGVNFIKDESFYVSRDIEKMSKSRYNVISPDDICKRYGADTLRMYEMFLGPIDQSKPWNTAGISGVFSFLNKFWNLFHINEKFYVSDDQPSDEALKIYHKTVKKVVNDIDKFSFNTSVSAFMICINELSSIGCNSKNILSNLCILLSPFAPHICEEIWSLLGNDKSISYEKYPEFDEKFFEESVIEYPVSFNGKLRFRISLQSNIELKEVESVINNHELTNKYLDGKSIKKIIFVPKKIINV

SEQ ID NO: 161466 - protein, 126 aa, Unknown
  Bacterial polypetide isolated from the Sargasso Sea
MEQSNENVKVVIPSKQSFSKEWASDQKAFKGVPWGKAMMWIFLVSDTFVFSIFLISYMTVRFSTKAEWPNPSEVFGLHVGHYNVPLLLIAIMTFILITSSGTMALAVKYGYEKNRKMCAYLMLATA

SEQ ID NO: 161467 - protein, 54 aa, Unknown
  Bacterial polypetide isolated from the Sargasso Sea
MQKNWIGKSIGCELNFKIIEKNKNLSIFTTRPNTIFGASFIAVSVDHEICKDSN

SEQ ID NO: 161468 - protein, 260 aa, Unknown
  Bacterial polypetide isolated from the Sargasso Sea
GKNWENYINKVGSFQITKAVESFERFGIKNKSRKSFLDIGSGSGLFSLAAFKLGFKNITSFDYDLNSVNATIKLHQIVKSNSNCKILQGSVLDKNFLNELGKFDVVYSWGVLHHTGNMWQAIENSSQCVNEEGYLIIAIYNKQFFISSCWYYIKLFYNIAPKPVRYILEYFYYIYFFILGFLADIFRLKLPIKRYFNERRGMSFFNDVKDWIGGFPYECATPEEIELFLIKLGFKLEKKYTVGFKLGCNEFLFKKEKYGN

SEQ ID NO: 161469 - protein, 83 aa, Unknown
  Bacterial polypetide isolated from the Sargasso Sea
MDYGFGAVFGCPAHDQRDFDFAKKYNLKIKTVVKPKDEKDDFTVKNEAYSGDGIIINSENLNGLKVPAESVIKTIDILEKKLE

SEQ ID NO: 161470 - protein, 195 aa, Unknown
  Bacterial polypetide isolated from the Sargasso Sea
KVHQGFLKRIWKLASERKYERFDDVFKFSKEELELRRKSHSTLKKVSNDYENRFAFNTAIASIMELLNFIPEEFKKDSSTNSQKFCLNETIIFILKMLAPITPHICEDLWNKFYGEEDIELSWPDFDEDIILIEEFELIIQINGKVRGKLNIKKDTNQKDIELKAIEVENVKSFINNSKIKKTIYVKDKLINFVI

SEQ ID NO: 161471 - protein, 233 aa, Unknown
  Bacterial polypetide isolated from the Sargasso Sea
FVLNHVAIFPKEHWPKEIVVNGSVLMDGKKMSKSMGNIIPLRDAVRKYGADPIRLSILISAELLQDADFNLETISSIKNRLESMHEECIKLRNSGKIGTEPEDVWIQSRLSKLITKVTDSMEKMRLRESLHHILYGFDSDLQWYMKRASAKNRDDVSGVLNKVLATRISMLSPFAPHIAEEMWEKLGNSEMVSKSAWPKEEEQTDDKAVQNESLLSSVINDISNITKVTKITP

SEQ ID NO: 161472 - protein, 150 aa, Unknown
  Bacterial polypetide isolated from the Sargasso Sea
TIKDVTKSIDDFHFNIAVVQIRSLFNFVASYEIENDDDLKVVLFMTRKLLILINPMVPHLAEELWQDLGNESSISNEYWPKVDLGYIKKDNIKLPIQVNGKVRAVIEVPIDLDEKIIEEVALKEKNVLKFLNKSPKKVIIIPNRVVNFVI

SEQ ID NO: 161473 - protein, 296 aa, Unknown
  Bacterial polypetide isolated from the Sargasso Sea
MGYKNKDFSFTEPFKGLFTQGMVCHETYKDQRNNWISPDEIELIEGEFFKKGESNNKIIVGPSESMSKSKKNVIDPENIINNYGADAVRLFILSDSPPEKDVQWSEQGMTASYKFLLKLWTLHQKIKNKIKIENKNQNRKLDKFTNQMISKITNNLENFNYNVIIANIYEIYNFFNKEIENDIDNNLLRENYIKILTLMAPAIPHFSHECLEDLGYFESLSWPSIDKSQLNENKIDYVIQINGKKRAILNENRDINEESLLSKVKTNKLSNKYLKNKTIKKIIFVKNRLINLLINE

SEQ ID NO: 161474 - protein, 125 aa, Unknown
  Bacterial polypetide isolated from the Sargasso Sea
NLVSSYKIENDNDKKTVFFVTSKLLILINPMVPHLAEELWSTLGNENSISNECWPKVDESYIKKNNIKMPIQVNGKVRAVIEVPIDLDKNELEEIALKEKNVLKFLNKGPKKVIIVPNRVVNFVI

SEQ ID NO: 161475 - protein, 218 aa, Unknown
  Bacterial polypetide isolated from the Sargasso Sea
MNNYGADAVRLFILSDSPPEKDVQWSNQGIEAAYKFIQKLWVLHNKFKEKLIKNEKEDDSNNLEKITNQFIKKVTNNLESFSYNVIIANFHEIYSLLTKEIEKKYSSAKLKENFEKILKCMLPVIPHFANQCLIELNYNKKFKMEWPSFDENILLEEKINFVVQVNGKKRGILKLKRDCDEDKILNEIMTNEILLKYVENKTIKKKIFIPNKLINIII

SEQ ID NO: 161476 - protein, 213 aa, Unknown
  Bacterial polypetide isolated from the Sargasso Sea
MKKKLTKKNKTFTQTISFNDNALLPLIYGEHDKFLELIEENMSVSIITRGNFLQSSGQEENVKKSINLLENLYKDAQKNNFSDEGEVLGMINLVKDSDNEKSKKIENIDSLSFSAGKKLIKPRSRKQIDYFNLVKKKNLVFCCGPAGTGKTYLAVALAVSMLKTGQIDKIILSRPAVEAGERLGFLPGDLKEKIDPYLRPLNDALNDMLSFSE

SEQ ID NO: 161477 - protein, 187 aa, Unknown
  Bacterial polypetide isolated from the Sargasso Sea
MVCHETYKDENNNWLYPEEVEKINEKEAVKKKDKTKVVIGPSESMSKSKKNTIDPETMIKLYGADAVRWFMLSDSPPEKDVLWSDTGVAASSKFLQKIWNLVNSIITRQESKIDKTEEIKFNDRIESLATKIDNTINTFKFNVTIAHFYEAFKIVQNSKNSNIGNKCLLNSVTQLVKLMLPITPHLA

SEQ ID NO: 161478 - protein, 264 aa, Unknown
  Bacterial polypetide isolated from the Sargasso Sea
DTSPHDLKSLTKNYLDIEMVPFKSVFGSQLRKRTLSDMLLDPENRDVVANYAALDAYATYRLFFELRDSLKKLYIKDEHTLWDYYLESELKFTKVLWEVERNGVSIDTEALAEKAPAIERELLSIQKWFGRAMGKLYVNLNSNDQMSELFFGKLKRKPISYTDKGKPQLNKSSLDRWVGRGCEYAERLLRYRALDKQLGTYITNLLDKVHVDGKIHATFNQTGARTGRLSSSEPNLQNQPPYIRSAYIPCDGYKLMASDYAQLE

SEQ ID NO: 161479 - protein, 291 aa, Unknown
  Bacterial polypetide isolated from the Sargasso Sea
MKALKANNNSIKFSEPFKGLFTQGMVCHETYKDNKGIWLSPDEIEKGPDDHAVKKTDKSKITVGPSEAMSKSKKNIIDPESMIKIYGADAVRWFILSDSPPEKDIQWSNQGVNASYKFLQKIWSLNSKFIERKNPEISKEIEEKIESQFHKHLHKITSSIENFQINVAVANVHEVYNLINEHLSKAISNELLRKILIDFMKVLIPFIPHVASESLEKLGEMNIDKWPIIKDDLMQNLLIKVAIQINGKTREIIEAKQNLSEKDLVKISKDSAKVSKHLQNKNIKKVDFCKK

SEQ ID NO: 161480 - protein, 88 aa, Unknown
  Bacterial polypetide isolated from the Sargasso Sea
AKLKPGSGSIHTQSWPAFDEELAAEDLITLVVQVNGKVRDRLEISSGTSKEETEKNAISAPKVQSFIEGKEIRKIIVVPERLVNIVCE

SEQ ID NO: 161481 - protein, 239 aa, Unknown
  Bacterial polypetide isolated from the Sargasso Sea
MSKNEIIITKPRKLFSIGEILQLQTKKTRFVITEIEQNWHSPDDVKELRLPDEKTKKILVSSEIPVEVGRSVKMSKSKKNVVDPIDIIDQYGADTARWFVMSDSPPERDVEWTSAGVEGAWRHLQKVWNLSIDIINEEPTEEKQEDKESAEALNYAMNLAIKGVTSGIENFAFNKAIAKLYELTNTLSKSKAPRENKIEALKILAKLMQPMTPHISEEIWSALGNENLILKTGWPEENA

SEQ ID NO: 161482 - protein, 299 aa, Unknown
  Bacterial polypetide isolated from the Sargasso Sea
MRVDAQASQALEAGTMVQAHEGHASLQLDLLLSDTPWAVRPSMARLLSQPGLTRAAAVATVLDAGEVRERKVVASLRHAGVDDLNAAQVFARESHWHEQALGLGHDPLQWRLQHLPEGPVRDLAQQVAERAQVSPQDDIPQDTGGRLLGRGFATAQLQTLDAQGADLHAWSAWVAEVAVHPLTGEIEVTRVVAGHDSRSLQAAQAARTRPEIVQQDPQLLADARRLLGTAPAFDDWTGSAASASGFDVIAKPGSDLVQQARGDVGPIRQGGLALDGVATLPAAAAIANAIHHATGVRLR

SEQ ID NO: 161483 - protein, 243 aa, Unknown
  Bacterial polypetide isolated from the Sargasso Sea
RIPNFFRRLFAEGAFNQAFFPVMVEFKAKGREELRIFLSSVSGLFGALLIIFVFLGFIGSDFLVMLFAPGFLSDPDKLALTSDLVRIMFPYIGFISLTAYAGGVLNAHDRFAVPAITPVLLNLCLIIASLLWIWEIFDGLAVVVLAWAVLLAGLAQLAFQIPSLGFLGLLVKPKLDYRHSGVKEMGILIVPAIFASSVGQINALVNTVIASNLVEGSISWLYYADRLLELPVGMVAIALSTVM

SEQ ID NO: 161484 - protein, 255 aa, Unknown
  Bacterial polypetide isolated from the Sargasso Sea
NEKFNLTEPFDGLFTQGMVCHETYKDSDDNWVSPEEIETIGGQKYLIKDKSKKIKIGPSESMSKSKKNTIDPENIISNYGADAARLFILSDSPPEKDVQWSEEGIISSFKFIQKLWNLNSIILEEIKKNHKEDSDEELKKNTNIFLKKITDNLKNFSYNKIVANLHEIYSFMYKEIKKTYKKNTIIDNYQKILITMTPIIPHYSYECLKLINAKDVSWPNYDESMLKKEIVNIVVQINGKKRGLLQTKPNISEEN

SEQ ID NO: 161485 - protein, 290 aa, Unknown
  Bacterial polypetide isolated from the Sargasso Sea
KVKNSEPFEGLFTQGMVCHETYKDVNDKWVSPDEIEKDNSGNIIHKNKKTKITVGPSEAMSKSKRNIIDPESMIKIYGADAVRWFILSDSPPDKDVQWSNQGVNASYKFLQKIWNLNLSILNRSDVKSTKALEEEFDDKFNNYILKITNLIENFQLNVAVANVYEIYHLFNKYVTSKVSNACLKSNLTNFMRILTPFTPHLASECLEKLDKTKIESWPKIKKGFSQKQKTKIAIQINGKTREVLEIEKNLIEEKVVLITKKSEKIRKSLLNKKIVRIIFVKDKIINYLIK

SEQ ID NO: 161486 - protein, 278 aa, Unknown
  Bacterial polypetide isolated from the Sargasso Sea
IKEPFKGLFTQGMVCHETYKDQNNNWVSPDEIEVKNGKKFLKNKPEQQVKVGASESMSKSKKNIVDPEKIIDIYGADSARLFILSDSPPEKDVQWSDEGISSSYKFIQKLWILNKKILEEIDKNHPKDSNDNFSRFTNKFIKKMTVCLENFSYNILIANLHEMQNFLIKEINNKYTNKTLIDNFSKILVTMIPIVPHFASECLTLLQIPKVSWPKFDENLLLEEIIPYVIQVNGKKRGLIELKRDISQEELLKTVEKEKNISKYFDINKVKKYIFIKK

SEQ ID NO: 161487 - protein, 114 aa, Unknown
  Bacterial polypetide isolated from the Sargasso Sea
GTEAKLSAAKTLAQLMSPMTPHLSEELWEKMGEKNLLAQQPWPAVDEDQLSDNIITMPIQVNGKLRGQIEVQKDLSPSDIEKLALADISVQRALNGSKPKKIIVVPSRIVNVVI

SEQ ID NO: 161488 - protein, 234 aa, Unknown
  Bacterial polypetide isolated from the Sargasso Sea
SKSKKNIVDPESMIKIFGADAVRWFILSDSPPERDVQWSTAGVSASHKFILRIWNINQKILDRKQTEISSDDVKKFELKFNEYIFKITDLIENFQLNVAIAKIYEVASLMESNIDKKIGNKNLLVSQIKFMKMLLPFAPHLSCECLSKLEGKNFFEEIQWPKIDKTLLEKQEVTLVVQINGKKRGLFVAKKDLSEKDALSEAKKIENIKKNLKDKKILKNIFVKNKIINFIVTG

SEQ ID NO: 161489 - protein, 229 aa, Unknown
  Bacterial polypetide isolated from the Sargasso Sea
MSKSKKNVVNPSSIIENYGADTARWFMLSDSPPERDLEWTDVGVASSYKFINKIWETCIRAKNYKASDDLLKTNKFNALIQSVSENIEKFHFNKSVANIYEYVNEINKFMDKKTISGDGLKGVVKNLCIIIHPFTPHLSEEIWELLGHKGFCANANWPEFKKNDVVNKINLPIQVNGKLKGLISSKKNEKEEVVLEKAKKLPSLNRVLKDKIIVKIIYIPGKILNIVIK

SEQ ID NO: 161490 - protein, 285 aa, Unknown
  Bacterial polypetide isolated from the Sargasso Sea
MGSAVVVVTDQQVAGHYLAPMLEALAGGTVRVLSHVLPVGESGKTRAEKARLEDALCAWHCGSDTVLLALGGGVVSDLVGFVASTYCRGIPWVCCPSSLLAMVDASVGGKNGVNLDGVKNRIGTIYPAHLTWVDVSLLATLSPCMWRQGGAEMLKHAWLSGRQAWEAWCAQWPHLRDAPSSDWAKVVHWHVAFKHQVVLRDQKQVGYRDVLNVGHTVAHAIEMRSQGACAHGDAVAMGLWIEAWVAVRMGVLPESVAQELGDVVARYFPVQRLRPWCHDLAQACR

SEQ ID NO: 161491 - protein, 277 aa, Unknown
  Bacterial polypetide isolated from the Sargasso Sea
MFKKYIVNKDYHNSRFDKWFKQNIFNIPQSLIEKLIRKKKVKVNNKKIKTSHRIRLNDVIEIYGTESLKPTDKSKKIKYKPSEKEKNKYSEFIIENNSNFIVINKPSGIPVQSGTKSFRNIIDILKDTKYFIESKPFVVHRLDKETSGVMIVAKNREYAQLFTSLFRIRKIHKTYLAVATGKISENINLLEDNLVTYENNRKLIQKAVSNLRVLKSNNDYSLVELKPITGRKHQLRKQLFNIGHPIVGDNKYSNNLTKNKYKYNKLMLHSHKIKFMI

SEQ ID NO: 161492 - protein, 143 aa, Unknown
  Bacterial polypetide isolated from the Sargasso Sea
SMNVGARHYGDIRHDASSWMGRVELSIDRIDDRPATFSGGMQQRLQIARNLVTNPRLVFMDEPTGGLDVSVQARLLDLLRSLVRDLGLSVIIVTHDLAVVRMLAHRVMVMQRGHMVETGLADQVLDDPQHPYTQLLVSSVLQA

SEQ ID NO: 161493 - protein, 281 aa, Unknown
  Bacterial polypetide isolated from the Sargasso Sea
RLVTQGMVCHQTYKDENNNWVYPEDVFSDDGKNYYKNKDPSKKVTVGPSESMSKSKKNTVDPETIIKLYGADSVRLFILSDSPPEKDVQWSDSGISASFKFLQKLWSLNEKIISNKKQFLKFDEHLEKFTNQIIKKLEDDLNKFGFNVVIASIYKIYTFYNKHTNKTEWGSNFYENYIKILKVINPIIPHFSNECLEKLDQSIKDIRWPSVEEKYLEEEIINIVIQINGKKRKVFSIDKSFRKETLIENIKNDDQIKKYIDNKKIIKTIYVENKLINFIIE

SEQ ID NO: 161494 - protein, 84 aa, Unknown
  Bacterial polypetide isolated from the Sargasso Sea
MVKKIRIYKDFKVKKIHKNSIILIGNFDGLHVGHQKLFKLAQNYKKKFKHKIGVVTFNPIPKMFFNKKIKNYKLSNLNQKLNYF

SEQ ID NO: 161495 - protein, 268 aa, Unknown
  Bacterial polypetide isolated from the Sargasso Sea
INALVNTVIASNLVEGSISWLYYADRLLELPVGMVAIALSTVMLPHLSRLSAGGSEDGFSSLMNWGVLMGLGLGLPAGIGLYILSVPLVSVLFMSFEGGAMTDYDVRMAGLALEMFAIALPGFVLVRVLSSGFFAKKNTKQPFRYASAAVAVNLIVSLATFKALGHVGLALATALSAWTNVFLLYFGLIKHKITVIKVVTPQLVKVYLLCLLMALGLGIWSPEDLIWLSQDPLYRLAKLLIAILVVLGLYLVALFGLGFRGRDLRPSV

SEQ ID NO: 161496 - protein, 292 aa, Unknown
  Bacterial polypetide isolated from the Sargasso Sea
DNFDIEEPFKGLFTQGMVCHETYKDQYNNWISPDEVEKKDNKYFKKNDPISKIIVGPSESMSKSKKNVIDPENIISNYGADAVRLFILSDSPPEKDVQWSEQGMLASYKFIQKLWVLHNKIKEKVNSNFSDTEDLELDKFTNRLIIKMTNNLENFNYNVIVANMYETYNFLIKKTENNIDSIKLLKNYKIILTMFNPIIPHFSSECLSDFEQNSLNWPNVDEDLIDGEKINYVIQINGKKRNLVNFNKDTNQEDLLNQIKTNKLIDKYLLNKSIKKIIFVKNRLINIILNEK

SEQ ID NO: 161497 - protein, 34 aa, Unknown
  Bacterial polypetide isolated from the Sargasso Sea
VIDPSKTIDMYGADTARWFMLSDSPPERDLEWTE

SEQ ID NO: 161498 - protein, 296 aa, Unknown
  Bacterial polypetide isolated from the Sargasso Sea
ALKKCGYKIEFDEPFKNLFTQGMITHETYKDENGKWLSPDEIEKVGDKLAKKKKDKTNVTVGAPESMSKSKKNIIDPEETVKIYGADSIRWFVLSDSPPDKDILWSDRGINAAYKFLQKVWNLNSQINLLSERKGNLDIEKKYEKEFSKYILKIDDHIEKFNLNVMIANIYEYFNALSECFKLSASKIFLEKHLINLMKVMFPITPHLSSECLETLKCKSDEWPSVDKKLVKDDEIKLVVQINGKTRLVTTMKVDMEENKVTETLLKNDKLKKYLIENKIKNKIFIKNKLVNYIIK

SEQ ID NO: 161499 - protein, 262 aa, Unknown
  Bacterial polypetide isolated from the Sargasso Sea
SGYGIHSYLASENHIFSNDLSYNSDISLYLESTGNSSIHNNTFIGNDDYPATVTESYYNVIRDNKFVANDDYFQFFEAGGYNSLVNNTFDESGIILEDSNNQIISDNTISESSENGIKIYKSSSDNYLSGNTISDSDDEDIYIGGSDYQRNNRGYDNIFSTIEVQNNGQFILMDYVNVRTENSEGNMSGNDVQAVYNSEIFYASEYFSGSDPLTDSFGLVPDFLAPVEEYNGSSTPDEILTTITVRYVDWINLFEMDGSDDT

SEQ ID NO: 161500 - protein, 222 aa, Unknown
  Bacterial polypetide isolated from the Sargasso Sea
KYLWGNAAWLMAVRITTAFAKYGWCAAIRGAEGGGAVEDLPAHTFRTLSGDLSLKCPTEVAITDRREKELNDLGFITLCHKKNTDMAVFFGGQTTNKAKVYNTNEANANARISAMLPYVLAASRFAHYLKVIMRDKVGSFMTRDNVQTYLNNWIADYVLINDNAPQEIKAQYPLREARVDVSEVAGKPGVYRATVFLRPHFQLEELTASIRLVASLPPPAAA

SEQ ID NO: 161501 - protein, 34 aa, Unknown
  Bacterial polypetide isolated from the Sargasso Sea
PFEKNEINKWLPVDQYSWRSRARNITFVICQIFH

SEQ ID NO: 161502 - protein, 166 aa, Unknown
  Bacterial polypetide isolated from the Sargasso Sea
MRALYTAATGMAAQQRNIDTTANNLANVNTTGYKKSKVHFQDLLYHNERTAGVPSSVSTQVPVGLHVGHGVKFIGTEKIHTQGNLENTGNDLDLSIDGHGFFQILQPNGIVGYSRDGHFNIDGMGRLVTNDGMLLDPEINIPQDTRKIEVGFDGTVTVFLRDETMP

SEQ ID NO: 161503 - protein, 70 aa, Unknown
  Bacterial polypetide isolated from the Sargasso Sea
DSQNEEPPFDEKKINSWLPIDQYIGGVEHAILHLLYSRIFVKALREINLLDVDEPFHNLFSQGMINFGGS

SEQ ID NO: 161504 - protein, 299 aa, Unknown
  Bacterial polypetide isolated from the Sargasso Sea
LVLLSPEAITALFAPGFLDKPSVFNETALLVRITFPYLALISMTAYSASLLNAHGRFAVPAITPIVLNICLIVAALLSTYLFLDYSSAFVLSCGVLVAGFLQLSLQLPLLVKLRLIPKPILNTKHPGVRRVGALFVPALFAASVNQINTLVNTILASTLITGSISWLYYADRLLELPIGLVAVALGTVLLPYLSSVAIEGDKAKYSAAIDWGVHLGLVLALPAASALFALAIPLILVVFMSFGGAMSSDDALMAGSALKMFSFALPAFVLIKVFSPAFFAKEDTKTPFLCALCAVVVNL

SEQ ID NO: 161505 - protein, 234 aa, Unknown
  Bacterial polypetide isolated from the Sargasso Sea
MGNTLENTPLKIAIVAGERSGDELGAPLMKSLKSINPSIEFVGVGGSKMTTEGLESYFDMSEISVMGIIEPLLNLRKLLKLRKGLKKYLLQQNPDIFIGIDSPDFNLPIAKFLKNNLGIKTIQYVSPSVWAWRKGRIKSMESSIDSVLTLFHFEETAYSNSKIKTSYVGHPLSYKIDITNMEIESKVQNSIALLPGSRTSEILLMGDLMIKAAKKLKINESKVQIFYAIIKSFP

SEQ ID NO: 161506 - protein, 164 aa, Unknown
  Bacterial polypetide isolated from the Sargasso Sea
MSVRRKSHATLKKVENDYEVRFAFNTAIAAIMELINFIPDEYKNEDASDAQKYCLDELIMFTLKMLSPISPHICEHLWNNFYLDESSIDTWWPKFDENLLEVEEFELIVQVNGKVRGKINIDKNIEQQEIESAALNVENVKSHIGSSKIKKAIYIKEKLINFVI

SEQ ID NO: 161507 - protein, 225 aa, Unknown
  Bacterial polypetide isolated from the Sargasso Sea
LYSRFFMRAINYKNNKFKITEPFEGLFTQGMVCHETYKDENNNWLSPDEVESKDGKKFFIKKYPDKKVFVGSSESMSKSKKNTIDPEDIINNFGADAVRLFILSDSPPEKDVQWSEQGMVASYKFMQKLWTLHQKFKDKIKEDSKGENNEIEIFTNQMIKKINYNLEKFHYNVIVANLYEAYNFFTQKLNLNRSNKNLSDSYTKFLTVISPINSTILLRKCLEEF

SEQ ID NO: 161508 - protein, 248 aa, Unknown
  Bacterial polypetide isolated from the Sargasso Sea
GYKNDRFKIKEPFSGLFTQGMVCHETYKDSKKNWLFPDEVFSEDGKTYYKKNKPDEKVFVGSSESMSKSKKNIIDPENIVSSYGADSVRIFILSDSPPEKEIKWTEQGITGSYKFIQKFWILHEKIKEKIDDSSNDDKKNDESLNKFTNILIEKVTKNLEKFNLNVVIANFYETYNFLNKIVDKNINNKILEENYYNILKLIFPVIPHLSSECIVDIKKDLVFDWPKPLDKYLFKDNVDVVVQINGKK

SEQ ID NO: 161509 - protein, 179 aa, Unknown
  Bacterial polypetide isolated from the Sargasso Sea
MTVRFSTKVEWPNASEVFGLHVGHYNVPLLLIAIMTFILITSSGTMALAVKYGYEKNKKMCGWLMLATALLGASFVGMQAFEWTKLIHEGVRPWENPFGAPQFGAIFFMVTGFHGTHVTIGVIFLFIMTWKTFRGHFDTGKRGFFTSQKSDYEAIEIMGLYWHFVDLVWVFIFAFFYLW

SEQ ID NO: 161510 - protein, 264 aa, Unknown
  Bacterial polypetide isolated from the Sargasso Sea
LLYSRFFMQALTHKNDKFNIIEPFKGLFTQGMVCHETYKDQENNWVSPNEIISKDGKKYLKNNPFQEVKVGPSESMSKSKKNTIDPENIISNYGADSVRLFILSDSPPEKDVQWSEEGIAASHKFIQKLWTLHTKIIEEISKDHSKNAGDELMKFTNKFIKKISNNLENFSYNIIVANLHEMYSFLIREINKGYKKETILDNYKKILITMNPIIPHLSNECLKNIENNDKISWPSYDEKQIKEDYSLIVIQINGKKERINNNRL

SEQ ID NO: 161511 - protein, 41 aa, Unknown
  Bacterial polypetide isolated from the Sargasso Sea
MSILINKNTKVICQGFTESSWYFSFRAGFKVRYTISRRCDS

SEQ ID NO: 161512 - protein, 252 aa, Unknown
  Bacterial polypetide isolated from the Sargasso Sea
ITSTNLGISSIYIPTQALYLPNHNLATGDKVTYSPGTGGQGIHYSESGHNVSLASTSGVKKATDGQEFFVARFSDTLVGLATVRVGLGTTGIYIGLETGSFGGRNQTPVFFRTIGAGNSHSIKTNYTPITGEIVRNLVTVDTGISTHGLHVGHHVDVSVNAGASTSFVFNYDDYHRKLIVNPREFTGGDVTTTTDSITVKDHNLETGQKIIHTSGGPAAGLSTNKIYYAVKVDKDTIKLADTYYNSIQGIPE

SEQ ID NO: 161513 - protein, 282 aa, Unknown
  Bacterial polypetide isolated from the Sargasso Sea
MSKKLFKSGLIVSVMTLISRVLGLVRDVVIANLMGAGSSADVFFFANKIPNFLRRLFAEGAFAQAFVPVLTEYQEKKTPEETRELIGKVAGTLGVLVSVVTLFGVICSPVLAALFGGGWFLDWLNDGPNAEKFELASLMLKITFPYLWFITFTALAGSILNTRGRFAVSAFTPVFLNVAIIAVAMWYAHTLENPEIGLAWGVFVGGLVQFLFQIPFLMREKALVKPSWGWHHPGVVKIRTLMIPAMFGVSVSQINLLFDTFIASFLMTGSISWLYYADRLLE

SEQ ID NO: 161514 - protein, 356 aa, Unknown
  Bacterial polypetide isolated from the Sargasso Sea
GCKGFSVYNHMYIPRSFGDPVQNYWNLVNDAILCDVSVERQVQIKGPDASKFIQYLTPRDLSKMKVGQCKYVLIISNEGGIINDPVLLKISENEYWLSIGDSDVLLWAKGVKVNSNFDVQINEPDVSPLQLQGPKSHQIMRTIFGNWIDDIKYYHHKDFIFENIPLVISRTGWSSEFGYEIFLKNHNLGDRLWEIIMSIGRPMGLHVGHTSTIRRIEGAMLSYVADMDIRNNPYELGLERLVDLNQNFIGKEALKKINNDGVSIKFCGFEIDGPPLANPTDEHIDITYKSEKIGYITSSVFSPRLKKNIGLGYFPIRHSYIGFEADTKFGDHKRKVKIVEKPFIDPNKNIAKGIKN

SEQ ID NO: 161515 - protein, 301 aa, Unknown
  Bacterial polypetide isolated from the Sargasso Sea
MHAINHKNEKFKYKEPFKGLFTQGMVCHETYKDQNNNWVSPDEVFTKDGKNYLKKNNENEKIKVGPSESMSKSKKNTIDPENIINEYGADAVRLFILSDSPPEKDVQWSEQGMVASYKFLQKFWLLHQNIKKNLSSKNEDEKSSIELNQFTNLTIQKITQNLEKFHYNVIVANLYETYNFLIKFVTKINDGASLLKNYTEILKIMTPIVPHFASECLEDLGEKGEIKWPKVNEQYLIKENVNIVLQINGRKRGIIVNKRNVDEEMLINEIKNNFIYDKYLKNKKIIKSIYIKNKLINLILK

SEQ ID NO: 161516 - protein, 416 aa, Unknown
  Bacterial polypetide isolated from the Sargasso Sea
MSSIIALCDGNKFYSSCEQIFNPLYRGKPLIVVSNNDGMTVTLSPEAAALGLKKFTPYFQVAEFCRANGVVVCSSNYALYSEISTQFMRVASRECYSYFPYSIDEIFAEFGNDDTPQNLSVLGRKLRHDVWREVRLPIGVGLGDTLTLAKAANHAAKRLGYRGVCVIKAHNREAILGAMLTTDVWGVGKRIGQRLSSMGIHTALQLAQMKTKTARKMFGVNIERTIFELNGTKAFNWDDMPVNKRQIFSTRSVGQRITTIAGLKEALSFHACEAARKLRGQKSVARCLVFFAQTSAYDKHGVSGFSRTIHLPAPTSDSMIISQQITSAVESCYAAVPYYRVGVGLLDIEPGLQLDMFNDNLGKPALMSVMDRLNEQMGKGAVFVAANGIEKKWQMRRAFLSPSYLTNWNEIPTIRC

SEQ ID NO: 161517 - protein, 261 aa, Unknown
  Bacterial polypetide isolated from the Sargasso Sea
MRALYTAATGMAAQQRNIDTTANNLANVNTTGYKKSKVHFQDLLYHNERTAGVPSSVSTQVPVGLHVGHGVKFIGTEKIHTQGNLENTGNDLDLSIDGHGFFQILQPNGIVGYSRDGHFNIDGMGRLVTNDGMLLDPEINIPQDTRKIEVGFDGTVTVFLRDETMPEAIGSIQLARFQNPAGLTPLGKNLYVSTPASGNAIVDAPGASSMGTLTQGFLERSNVSLVEEMVNMITSQRAYEVNSKAIQSADEMLKNTNNLVR

SEQ ID NO: 161518 - protein, 702 aa, Unknown
  Bacterial polypetide isolated from the Sargasso Sea
MKNYLVKFRLDEFVFPITTLRPETIFGITNLWVNPNTTYKKIKADGEKWIVSEECAEKLEFFGKEITIEGDIKGTEIIGKFAKAPHTEQEIPIFEAEFVESGMGTGLVMSVPAHAPKDYQALMDLKSKNHELASKIEPIPIISTEGYGNIPAKDVCERLGVTDQVDAKLEEATEELYLKEFVNGKLNERCGDFVNEKVEFGRNKVRDWLKDKNELESFPTLQNSPIRCRCGSECVVKILNNQWFLNYGDEEWKTLARNCLDSMNILPNKIKTEFHDVINWLHERACARQQGLGTKLPWDNDWIVESLSDSVIYMAYYTLSRFVNDGTVQADNLTKEFFDYVFLDKGSIDAVASSSNLSEDIINTMKKEFQYFYPVDARHSGRDLVQNHLSFFVLNHAAIFEEKLWPKEIVVNGSVMMDGAKMSKSMGNIIPLRTAIQDHGADPIRLAIISSAELLQDADFNMESVSGIKNKLESLLDECSTLKKGEIGDLQTEDKWIISKTQSKIAEVTEAVEKMRLREALHDILFTFESDLSWYQKRIQAKERDDVSGILHQINSARVAMLSPFAPHVAEEMWEKLGNSELVSKSTWPEYSSDKVDVSIIQAEELLKSTIEDIANILKVTKISPKKIVIYVNSNSVKSKIYRKILNVMVGGQNNMGVVMKELIADPETTDAKKMPDFVQKVIKDLHSESESIKKMKLESES

SEQ ID NO: 161519 - protein, 173 aa, Unknown
  Bacterial polypetide isolated from the Sargasso Sea
MMKKQFKDSKNQLTDECKKLFKKINDDYEKRLNLNTIVSSCMEILNNINGRFDDKNVNCSKEDLLNVYDFLLLALHPIAPHICETLYAEVLKKDIAQAEWPEDSFFVADLSESNYLVQVNGKLRANIMMPIDLKEDEVKEIALTNENVARHLENKNIIKIIFIKNKLINFVHS

SEQ ID NO: 161520 - protein, 233 aa, Unknown
  Bacterial polypetide isolated from the Sargasso Sea
MKLVTTEEAWGTCRKNGYHFQFAGNWNNLHPERVIVGRAVTCRWVPQRPDLNDAIESQGKSDKRIGGQNSWVIDELEKNDLIVVDLFGKIFDGTFAGDNLTTAIRSKTGTGMIVDGGIRDTQRIYEMDDFNAFIRGVDPSAINNVSMPEINGVTRIGEATCIPGDVVLGTRSGVIFIPPHLAEEVVISSEDVRLKDEFGQQRIMEGIYTPGEVDREYSDDMLKDFENWKKERE

SEQ ID NO: 161521 - protein, 157 aa, Unknown
  Bacterial polypetide isolated from the Sargasso Sea
HLTIKKVTEDYENRYAFNTVIAACMELLNSMPDQIKGEISSENDQFCLNEFTASTLQMLYPIAPHICETLWNNFFENSSEIEDSWPTFDEDLMVTDTFELVVQINGKVRGKIEISSNLEQDEIESVAKSIKNVDDLLGDKEIKKCIYVKEKLINFVI

SEQ ID NO: 161522 - protein, 225 aa, Unknown
  Bacterial polypetide isolated from the Sargasso Sea
EKYIELYGADSIRTFMIFASPPEQSLEWSDNGLEGCHRFLKRLYALSEKIKNRSEDTFKHSNTSIEEEIKELSIKINDDYQKRLNLNTVVSSCMEIFNKLNRRIDKNKITADENEFLKVYEFLLISLSPIAPHICEYLYEDVLEKNFNNACWPKEDFFQQKRSEVNYLVQVNGKVRANIVLRVNLNQSDVEKAVSKHPNISKYLEGNEIKKVIFIKDKLINFVNG

SEQ ID NO: 161523 - protein, 290 aa, Unknown
  Bacterial polypetide isolated from the Sargasso Sea
KVKEPFKGLFTQGMVCHETYKDEKGKWLSPDQIQKTNGRFTSKIDGSKVKIGPSEAMSKSKKNIVDPESMIKIYGADAVRWFILSDSPPERDVQWSTEGVSAANKFMQRIWNLNSKIIEKKEEKTDQSSEKKFLSKFNEYLFKISDLIEKFQLNVAIAKIHELTNLLEDNLNRKLSRKSLLESQIKFAKLIMPFVPHLSCECLSRLEGKNFYLEIQWPKGNKSMLKNQEVTLVVQINGKKRGLFVAKKDLEEKDALMEAKKIENIKKNLKDKKIVKNIFVKNKIINFITT

SEQ ID NO: 161524 - protein, 181 aa, Unknown
  Bacterial polypetide isolated from the Sargasso Sea
DKKFKKVKIQGELDNSQKDFRRKIHLTIKKVTDDYENRYAFNTVIAACMELLNSTPDQIKGEISSENDQFCLNEFIASILQMLYPIAPHICETLWNNFFENSSEIEDTWPTFDEDLMVTDTFELVVQINGKVRGKIEISSNLEQDEIESVAKSIKNVDDLLGDKEIKKCIYVKEKLINFVI

SEQ ID NO: 161525 - protein, 154 aa, Unknown
  Bacterial polypetide isolated from the Sargasso Sea
MSKVKDDYERRHAFNTAVAAIMELTNYIPKNYLSDEASISERSAADEAIKSILIMLSPIAPHITQELWSMVGENDLIIDASWPEVDKNLLVEDQVELVIQVNGKLRGKIEVAIDLDKQKVEELALQNENVLKHIDDKDIKKIIYVPNKLINVVV

SEQ ID NO: 161526 - protein, 599 aa, Unknown
  Bacterial polypetide isolated from the Sargasso Sea
MKNGLKALSFFRNVVFLKWASQIIFLVGLLYIIWSYIQNAVVNLEQTNIAFSWGWLGETPGVSIAEGMYTLPNSGRQMIQVGMLNMLRVTVTGIFAATFLGTFLGIARLSKNYIVEKTSTGLLEVVRNVPLLVQIFFFQAFVLTFPRLEVFDVGTYNLHVSAKGIAFPWLNRQPTAYLFWVYLLAILILANRIYKWRVQILEREGRETRPFVWSVGIFLGLLVAGWYGGYRIMGIIGFLAGYISTGVDLLPAIFYQILFSSIAVFIGFKSTKKFIDSKKSEEAQGIYSDDDYFKIILNVIVVLLVVVLMFSSVGLGLSNFLVGDEIVFKADWGVPQFFDGVNNKLYWNPEAKIVLDPQLDGMKRAEIIDWIAVPGTEVTEGDVVARATAKDLKGDLNQEISIYAKYTGVIEEVFVSEGDTVKINEKTYDIRVTDSKPLELSRPRVEQIGTTKFKRYADGYGKSLSVGYFAIWLGVVLYTAIFISEVVRAGIMAVSKGQSEAGLSLGLGRGALLRLVVLPQAIRVMLPPMGNQYLNLAKNTSLGIAVAYPEIVAVGQTLYNQEGQTLPVFLIWMAFYSTVSLTISTIINYYNRKMKIVER

SEQ ID NO: 161527 - protein, 612 aa, Unknown
  Bacterial polypetide isolated from the Sargasso Sea
MKYSFSGLPPYDASVVDTQAGLSRLLDAARLDAVLVTSQDEYVTEYLPLPNNPRYAVSGFDGSAGCGIFLSAATAQALDLPPFVLFVDGRYHLQAEQQCDPARVRIEKLGMNVTIWQAMADWLVAHGSRLARVGYDARRISVAQRDRLFEQTQAASLDWTSLADREIDRAIALPGWVVERPIFEVPEAATGLSVAQNLDTLNRQLAAHTGAPDGKTAFFTCASDDLAYLLNSRGYHIPNASSHLGFLFAVGGQVALFLPEGCDRCEVTLASYPALHVIRRDVAALERFLAQFDVEHVCYGFESVNCALVDAVKRAWPHARQADFNPVEAMRASKTPAVLDRFRDAFARSSAAIAETMRWAKAGEPGVRHTEYDLARTINDAYGARSAVALTFPSIAANGANSAFAHYTAASADVELTEGELVLLDSGAYYEAGFATDCTRVVLRRTRPETVAQPWQREIYTVALKACIKGLVTRFPSTAKGGDVDALVRQVCRDHGHDFGHGTGHGVGIHVHEGGVRFAPGAKYGLVPNAVVSVEPGIYVPGKGGVRIENIVIIHRDDAQPDTVTFENIVTVGYDWDLIDLDLLDDDERAYLRDYERLCVERGTQVTACPLL

SEQ ID NO: 161528 - protein, 46 aa, Unknown
  Bacterial polypetide isolated from the Sargasso Sea
AIYGCPAHDQRDLDFANKYDLEVIEVIKGDDHVILTTKTPTQVMAN

SEQ ID NO: 161529 - protein, 326 aa, Unknown
  Bacterial polypetide isolated from the Sargasso Sea
MTFFSRVSGLIRDIALSYVFGASAMADIFFVAFRIPNFFRRLFAEGAFNQAFIPVMVEFKARGLEELKIFLSSVSGLFGALLIIFVFLGLIGSDLLVKLFAPGFMSDSDKLSQTRDLVRIMFPYIGFISLTAYAGAVLNAHDRFAVPAITPVLLNLCLIIASLLWIWEVLDGLAVVVLAWAVLLAGLAQLAFQIPSLGALGLLVKPNLNYRHSGIKEMGVLILPAIFASSVGQINALVNTVIASNLVEGSISWLYYADRLLELPVGMVAIALSTVMLPHLSRLSAGGSEDGFSSLMNWGVLMGLGLGLPAGIGLYILSVPLVSVLF

SEQ ID NO: 161530 - protein, 255 aa, Unknown
  Bacterial polypetide isolated from the Sargasso Sea
MLIGNFDGLHVGHQKLFNLAKKFKKKFKSKIGVITFEPMPKMYFNKNLKNFRISNLNQKKEILKSFGTDFLIIKKFNRKFSKIKSLDFIKKILYQKLNTKFIFVSSNFRFGNKREGDIKQLTSYERIFRYKLIKPKPLKLRKKIVSSTLIRKLISKGKINLANKLLNRKWSIFSKVQEGKKLGKKIGFPTCNLDINDYVIAKPGVYAVKIYQKNKKKCLNGIANLGYRPTFNQKKLLLEVHIYKFNRNIYNKYLT

SEQ ID NO: 161531 - protein, 179 aa, Unknown
  Bacterial polypetide isolated from the Sargasso Sea
MQDSLLLKEKKNKSVLLDNVKYDASDSIIIDQKNNKITLYNNARIEYGDIELTSGLIVLDYKENIVNAGRIADSKGELSQYPTFTQGGNVVNPDSIKYNFDNQKALIWNSKSEENGMNILSTLTKKQNDSVYYLKDGKVTTGGNLLGDETEEADYFFKIRKGKLVPGGNIITGFTNLFV

SEQ ID NO: 161532 - protein, 230 aa, Unknown
  Bacterial polypetide isolated from the Sargasso Sea
MDRLTSLGVFVAAVEEGSFAAAARRFGLSPAMAGKHVSAIEADLNARLLQRTTRRLSLTDAGHTYYERCKRILEAFDEANREAGDSQGTAHGVLRVAAPVTFGAMHLGDVVARYLEDHPHVNVEVLLGDRYVDLMDAGVDVAIRIGRLTDPRLVTRRLAPCRMVVCASPAYLERHGAPRKPEDLRLAQRLAFSEAVSSGDWTLLDARNRAHVIDGPCRMTANNTQMLLAA

SEQ ID NO: 161533 - protein, 100 aa, Unknown
  Bacterial polypetide isolated from the Sargasso Sea
PLFAPMAPHLAEECWKIIGCNGIISQREWPQLIEKYIQEDTVLIVVQVNGKKRGEIEVAKGLSKNEVEAAAMKIDNVSKSINSKIRKIIYVPNRILNVVI

SEQ ID NO: 161534 - protein, 224 aa, Unknown
  Bacterial polypetide isolated from the Sargasso Sea
MDSNSNSIQFFTSFQSSDFFYILDAAFNTLLISCVSIILGTILGILFGWVLHVSKWKGAATLGLFLDIFRSIPLIIQIILFYNFFPLIGIYLDAFEAGTVVLTIYCSSLMAFVFRGGLDSVETVTRRAARSLGMTYFQDLRYIVFPIGLRAILPSWTGVALGVLKDSALVSVIGYVELLRASQILITRTQQPFLILTVVGLFYFSLSYPIARFSDHIEKKWQND

SEQ ID NO: 161535 - protein, 698 aa, Unknown
  Bacterial polypetide isolated from the Sargasso Sea
MRTAHRTPCGTLPHSSFQTETADARPDSRFSDLPRYALDPDRRGRLALSDDRADRREALEGPLCDRVDHRLRADHLGVRHRAPGRDAAVGVARRRAPPHRHADRDRLRADRRLLRAGQPHQDARRPSDGGRRGGVGDRAPARERHAARSRAVRCLLRVGAGRFRRVACARPPRWRALSGGQAVRRRRGDRGRARRVGRLRAVPARLADRRASVRLSGRHVERLRSRTAERRPTGAPLACPGQRSARLRAGRIAEWHRLATQEIRRDDRKRRQYREPELEARIRVERLRAEHGHQRQQCDPVRHRIKPRAERLRIARRVLLLPPHREVRDDDEDPHDHHERAAALREHQEQVAAAHEVNAEDRHADREAQHERVHRHALRVGPAEHRRRVAALAEREQHARVREQERVHHRHERHEQHDLHRDGRAREACHAEQRHVRRFQVGLVGPRHAQDQDRHRADVEHHHAHDHALDCTDHVLARVLGFARRNGRDFAAAEREDHDHHAREHGRDAVRHEAAVTREVHEPRRGNARLEAEQDRGAERHEDDDRRHLRERQPVFGFAERAHRVRVARDQRDEHEQRSAPHGQPRQEIVEDRTEQDRLDGDRHHRLEPVQPADREAGPFAEIAACVGGERSAVGVAGRHFAEHEHDQRDDHAADQVRQDRRGAGGRDDGAGADEQARADHAAKRDHRDVPLLEALPQ

SEQ ID NO: 161536 - protein, 290 aa, Unknown
  Bacterial polypetide isolated from the Sargasso Sea
NSNFNILEPFSGLFTQGMVCHETYKDPDNNWISPEEIENIDGKKYLKQDRSKLISIGPSESMSKSKKNTIDPENIIANYGADSARLFILSDSPPEKDVQWSEEGIVSSFKFIQKLWKLNEKIINEINKNHNKDKDEEITKYTNKYLKKVYDNLESFSYNKIIANLYEMYSFINKQIEKTYTKHTIIENYQKILITMTPILPHFANECLSMIKAKNLKWPEYDTSMLKEETINVVIQINGKKRGLIQTKPNIAEEKLFEIIKNDEKVMKYFDQKKIKKKIYIKDKLLNIII

SEQ ID NO: 161537 - protein, 69 aa, Unknown
  Bacterial polypetide isolated from the Sargasso Sea
MIDSKYNPREIEESAQNYWEDKRVFESIEDQEKEKYYCLCMFPYPSGRLHMGHVRNYTIGDVVSRYQRM

SEQ ID NO: 161538 - protein, 70 aa, Unknown
  Bacterial polypetide isolated from the Sargasso Sea
MGNADIPYDPAKIEEKIQAFWKENETFSVTEDPNKEKYFCLSMFPYPSGSIHMGHVRNYTIGDVISRFKE

SEQ ID NO: 161539 - protein, 250 aa, Unknown
  Bacterial polypetide isolated from the Sargasso Sea
EISEYFLKDEKFQKFKKECCKTGTTEEAIAIGEKIGFKTNLMAKNPLDPSQKVPVFFANFVLMDYGFGAVFGCPAHDQRDFDFAKKYNLNIKTVVKPNEEHDEFEVQDEAYSGPGIIINSQFLNGLKVPDEAVLKTIEILEKKGIGKKKINFRLKDWGVSRQRYWGCPIPIAYDENGNVITIPKKDLPVKLPENVNLNSKGNPLDSEDNWKNIVINGKKYKRETDTLDTFVCSSWYYVRFCSSSEKNYGY

SEQ ID NO: 161540 - protein, 128 aa, Unknown
  Bacterial polypetide isolated from the Sargasso Sea
PTGESPLKYHHGFLKTVCPKCGGDAERETDTMDTFICSSWYYYAYVVPYWKKGERLMRDDFPWDVEKINSLCPVDQYTGGIEHATMHLLYFRFFTKALADLGFLDFREPTKRLFNQGMILGEDHEKMS

SEQ ID NO: 161541 - protein, 78 aa, Unknown
  Bacterial polypetide isolated from the Sargasso Sea
RFIDPLHKNPINNSLFDDWSPVHQYVGGIEHAVLHLLYSRFFVKALHSMGEINFKEPFSGLFCQGMVCHKTYQDSDKK

SEQ ID NO: 161542 - protein, 170 aa, Unknown
  Bacterial polypetide isolated from the Sargasso Sea
MCKDYVTRSDFIDFKKKCSQVGTTEEAIANAEKIGFKTHLEAEHPFIKGKKIPIYVSNFILMDYGTGAIFGCPAHDQRDLDFANKYKIEVIQVVKPKDINNEKINNVAYTGEGSIINSDFLNNLTISEAKEKIVKEIEKKKIGKKKITYRLKDWGVSRQRYWGCPIPMIY

SEQ ID NO: 161543 - protein, 310 aa, Unknown
  Bacterial polypetide isolated from the Sargasso Sea
THQDIIARFKRMNNYNVVYPMGWDDNGLPTERRVQNIFGVRIDNDIPYIENLVVEKEKKIKGLSKDEPLIINRKNFIEMCQIVTEKDEVVFKDLFRKMGYSIDWQDEYSTIDNSSRTISQLSFLDLFEKNMIYQSESPTMWDIDFQTAVAQAEIEDREIDGAYHDISFGVKDSDEEIIISTTRPELLASCVGITAHPNDKRYKHLFGKKALSPVFFAPVPIFPSELVDMEKGTGILMVCTFGDQTDVIWWRENSLPLRQLFSQDGIVDQINFDSSDKNSVWQSENPNLANKNIHSIQGKNLAQTKNIIID

SEQ ID NO: 161544 - protein, 256 aa, Unknown
  Bacterial polypetide isolated from the Sargasso Sea
MKKTIFLLDKHKNEVLAGKVEKMSKSKKNVIDPSSIIETYGADTARWYVLSDSPPERDLEWTASGIGGAFKFVKKVWDLTTSIISISDKQENVNTNPNLENETNKAIENVTNNIDAFHYNKAVANIYAFVNSLQQFQKNSEISKDSFLVSLKKLALIIHPFTPHLSEEMWKALSCKGLAIEQEWPKPTKSQQILRPKIAVQINGKTKAIVEADFNADKDSVEKIVLSNQKIIKIIDNKKIKKSIFVPNKIYNIVLN

SEQ ID NO: 161545 - protein, 59 aa, Unknown
  Bacterial polypetide isolated from the Sargasso Sea
ERYNFKLVESKWQKFWEKNKTFKSIIKKEKKKFYCLEMFPYPSGKIHMGHVRNYTIGDV

SEQ ID NO: 161546 - protein, 36 aa, Unknown
  Bacterial polypetide isolated from the Sargasso Sea
KTILNIICLSMFPYPSGKLHMGHVRNYTIWRCNLKV

SEQ ID NO: 161547 - protein, 134 aa, Unknown
  Bacterial polypetide isolated from the Sargasso Sea
MKNWPEKVKLMQKNWIGKSYGCEINFALDNKKKSQKIKIFTTRPDTIFGASFIALSVDHPITKNFEKNKKFISFKSECSKMGTTEEALANAEKIGFNTGLFALHPFDKKNKLPIFVANFVLMEYGTGAIFGCPA

SEQ ID NO: 161548 - protein, 247 aa, Unknown
  Bacterial polypetide isolated from the Sargasso Sea
GCYFDSGNERVEVGKIEKMSKSKKNVVNPSSIIDNYGADTARWFMLSDSPPERDLEWTDVGVASSHKFINKIWDTCLKTKNYNNKKGHIKTDKFNPLINSISENIEKFHFNKSVANIYEYVNEVNKSIDKKIITTDCLKRVIKNLCIVIHPFTPHLSEEIWELLGHEGFCANAKWPEFEKNTVVEKVDLPIQVNGKLKGLISAKNDDKQEVVLEKAKSLPVLNKALKDKIIIKTIYIPGKILNIVIK

SEQ ID NO: 161549 - protein, 266 aa, Unknown
  Bacterial polypetide isolated from the Sargasso Sea
IGGVEHAILHLLYSRFFMRAISFKNAKFNINEPFQSLFTQGMVCHETYKDKNNNWLSPEEVDSKDGKNFYLKSDIKNEVIVGPSESMSKSKKNTIDPELIILNYGADAVRLFILSDSPPEKDVQWSEQGMVASYKFIQKLWTLHNKVKIKLDENNDSTKNEIPNQINEFVNKINNNLERFNYNVIIANIYEIYNFLSKELDKPIERKILLKSYINFLSVISPIIPHFASECLEELNFDSLQKWPEVDKSLLHKQMIDYVIQVNGKK

SEQ ID NO: 161550 - protein, 295 aa, Unknown
  Bacterial polypetide isolated from the Sargasso Sea
HLLYSRFFMHALSHKSDKFKLKEPFEGLFTQGMVCHETYKDKNNNWVSPEDVYSDDEKNFFLKSNKEEKITVGSSESMSKSKKNTIDPELIIKNYGADSVRLFILSDSPPEKDVQWSEQGMQASYKFIQKLWLMHQKIIKKVQSETKIDKPDIDLNEFTNQLINKINTNIERFHYNVIIANFYEMYNYIIKIIDKKIDPDNLKKNYIKILSLLIPVIPHFANECLKDIQKEKEYIWPLVDKKYLVSKFTNIVIQINGKKKDLIKTNIDITEDQLLEQIVKSDKINKYLRNNKIIK

SEQ ID NO: 161551 - protein, 69 aa, Unknown
  Bacterial polypetide isolated from the Sargasso Sea
MSELSRYNFKSIEHKWQSHWEKNNLFKADINSKNKKFYCLEMFPYPSGKIHMGHVRNYTIGDVLARYKL

SEQ ID NO: 161552 - protein, 206 aa, Unknown
  Bacterial polypetide isolated from the Sargasso Sea
SPPEQSLEWSESSVEGASRFLKRIWNLVSKRKNIKLEEKLNFTKDQLELRRKSHSTLKKVENDYESRFSFNTAIAAIMELINFIPEKYKENNASNEQKFCLNEAISFSLKMLFPIAPHICEYLWEKFNDSENSSIESSWPLFDMSIIEVKEFELIIQVNGKVRGKVFIEKNMKEDEIKEISIGVENVQKSIGANTIKKVIFVKDKL

SEQ ID NO: 161553 - protein, 219 aa, Unknown
  Bacterial polypetide isolated from the Sargasso Sea
MVKEFGADAVRLYLMFLGPWDHGGDWSDEAFNGITRWLNRVWDISSRNLNELINNKENDNELDILVNSTIKKVSQDLEKFKFNTAISSLMEFTNSLNKIWKSGCSETKWKDSINTLVKLLSPMAPHITEELWESNGNKFSVHNENFPEWDDKLIVSDSKTIVVQVNGKVRAQFDIKESKSEEEIIELALNLDKVSENLKDKEIIKKIYIKDKLVNFAVK

SEQ ID NO: 161554 - protein, 304 aa, Unknown
  Bacterial polypetide isolated from the Sargasso Sea
GGIEHAILHLLYSRFFTKALKNCNKEFKISEPFQNLFTQGMVCHETYKDQNGNWLYPEEIEKEGLNKAKKKSDKSRVVVGPPESMSKSKKNTIDPEIMVKQYGADAVRWFILSDSPPEKDVQWSDVGVSSANKFLQKIWNLNYLVANRKVKKPNNQEEKEILQEVNSFVNKIDLSINNFRFNVCIANFYEMYNFFRKYLDTNISEKILKDNLSKIMKLMIPFTPHLAYECLELLDIKSTNKWPEIDKKNLKEEIKMAVQINGKTRDILTIKKDLVEKEINTIIHNSSKAKKFLQNKKVIKTIFI

SEQ ID NO: 161555 - protein, 285 aa, Unknown
  Bacterial polypetide isolated from the Sargasso Sea
LPWDDSWVIESLSDSTIYMAYYTVAHYLQELKEDQLTESLFDAIFGAGNTKFASEETGIDQATIIGWRNEFNYWYPYDLRISGKDLIQNHLSFSLFNHTAMFNPDKWPKGFAVNGWVLVEGEKMSKSKGNFFTMKELNEKYGADVVRFTLCNAGEGLDDPNWEVSFAETAGKKLANWLSFVKDNKGKGRTTDHPVDDWFREVMADVSYKAHQASERLKFRTSTRLLFFELAQYFKWYVQRTGEPHAELLHDYMSVVTRGIAPIVPHTAEEAWSLLGEKDFVLNQP

SEQ ID NO: 161556 - protein, 77 aa, Unknown
  Bacterial polypetide isolated from the Sargasso Sea
LDTFVDSSWYYIRFLNNKLDKPFDIDQVNELLPVDKYIGGIEHAILHLLYSRFFMKALRDIYKLKVDEPFKQLFTQG

SEQ ID NO: 161557 - protein, 39 aa, Unknown
  Bacterial polypetide isolated from the Sargasso Sea
WYYLRFCSPQNKSSPFDLKKVNYWIPVDQYIGGIEHAIL

SEQ ID NO: 161558 - protein, 55 aa, Unknown
  Bacterial polypetide isolated from the Sargasso Sea
RKENYVNWDPVDQTVLANEQVIDGKGWRSGATVERRKLNQWFFNITKFSSELLDG

SEQ ID NO: 161559 - protein, 167 aa, Unknown
  Bacterial polypetide isolated from the Sargasso Sea
KSNSYPDKEKSLIKSMNIAIKEISNDILNNQFNTAISELMKFYNSLSNSINDVNNNLKIDALKTFCILLAPFAPHIAEEIWHLIGFKKSVHLEHWPSFNAEALKEDSYELVIQVNGKVRDKVNINNDMSEDQIKELTFKRPNILKWTQDKEIRKIIIVKGKIMNIVV

SEQ ID NO: 161560 - protein, 27 aa, Unknown
  Bacterial polypetide isolated from the Sargasso Sea
KKFYCLEMFPYPSGKNSYGTCKKLYYW

SEQ ID NO: 161561 - protein, 207 aa, Unknown
  Bacterial polypetide isolated from the Sargasso Sea
MKEQLKSMGLSYYWSREVSTCDPQYYKFEQKMFIDFFQKGLAYKKESWVNWDPVEKTVLANEQVIDGRGWRSNAIVEKKLLNQWFLKMTHYADDLLETIGNLKNWPDRVKLMQNNWLGKSLGANINFKIIEKNEIIEVFTTRPDTLFGASFIALAPSHPISLDLSKNNSTIKNFIDECNKNSTSEAVIEKNEKKGIYTNLNVVHPFD

SEQ ID NO: 161562 - protein, 66 aa, Unknown
  Bacterial polypetide isolated from the Sargasso Sea
MNQEYAPQTLELALQAEWAASGRFAVQADDTRGKFYCLAMFPLPSGKLHMGHVRNYTIADVIARYH

SEQ ID NO: 161563 - protein, 318 aa, Unknown
  Bacterial polypetide isolated from the Sargasso Sea
LDYVSTNDPFKKLVNQGMILGNSAFAHRIKNTNDFISFDMIKDEKTQKIHVDISFVDEKNRLNIERLKQNNPEFKDVNFIKGESFYVSRDIEKMSKSRYNVISPDDICKRYGADTLRMYEMFLGPIDQPKPWNTAGISGVFSFLNKFWNLFHRNEKFYVSDDQPSDEVLKIYHKTVKKVVYDIDKFSFNTSVSAFMICINELSSMGCSSRNILSNLCILLSPFAPHICEELWSLLGNDKSISYEKYPEFDEKFLEESVVEYPVSFNGKLRFKISLQSNIELKEVESVVNNHELTNKYLYGKSIKKIIFVPKKIINVVF

SEQ ID NO: 161564 - protein, 192 aa, Unknown
  Bacterial polypetide isolated from the Sargasso Sea
FLNKVWKLIEGKKYIELKIDDLKFSKDDLALRRKSHATLKKVQNDYEKRFGFNTAIAAIMELLNFIPEKFKVDELNDSSKFCLNEAIVFILKMLSPIAPHICDRLWCEYEYDTKNIESWWPEFDESLLAIEEFELIIQVNGKVRGKINIEVNKSKTEIEELAKNVDNVKSHIGSVNVKKTIYVENKLINFVV

SEQ ID NO: 161565 - protein, 82 aa, Unknown
  Bacterial polypetide isolated from the Sargasso Sea
MERYNFLQIEKKWRDKDISISVKNSNSQKKYYCLEMFPYPSGKIHMGHVRNYAIGDVIARYKFLNGYNVLHPNGLGRFWSSC

SEQ ID NO: 161566 - protein, 238 aa, Unknown
  Bacterial polypetide isolated from the Sargasso Sea
PDTLFGFSFLALSVDHEISKFFLKDKKFQEFKSDCSKTGTTEEAIAIGEKIGFKTNLKAINPLNPSQKVPVFFANFVLMDYGFGAVFGCPAHDQRDFDFAKKYGLDIKTVVRPEEENENFEVKDEAYSGPGVLINSEFLNNLKVPEESVPKTIDILEEKKIGQKQINFRLKDWGVSRQRYWGCPIPMAYDEHGNVRTIPKENLPVRLPENVNLNSKGNPLDSKLDWKNIIIDGKKYTR

SEQ ID NO: 161567 - protein, 271 aa, Unknown
  Bacterial polypetide isolated from the Sargasso Sea
FHKLMRDMNIVDNPEPFTSLLSQGMVLKGGIKMSKSKGNTIDPDDIINKYGADTIRLFIMFSAPPEQSLEWSDTAIEGSHKFLKRLWVLSYNIISKSTLENESYDQHKKNMISDSEINMKIHKTTQKVTNDIFQRNSFNTAIASIMELLNNLTKYFQQDQPNNTILINGIKTILKLLSPFTPHITQKIWSELGEKTLIMKESWPEVDATALEESKKEIIIQINGKLRGKITVNINEDELKIRKMILEDNNLKKYLLDKNIKKVIYIKGQVG

SEQ ID NO: 161568 - protein, 61 aa, Unknown
  Bacterial polypetide isolated from the Sargasso Sea
MSAKEYNPTEVENLIQESWKQDNSYKASPSETKEKFYCLSMFPYPSGNYTWVMFAIIRLEM

SEQ ID NO: 161569 - protein, 46 aa, Unknown
  Bacterial polypetide isolated from the Sargasso Sea
MNKVDVKDIDKKWQDFWSSNKNSFKNTDKKKKFYCLEMFPYPSGKI

SEQ ID NO: 161570 - protein, 81 aa, Unknown
  Bacterial polypetide isolated from the Sargasso Sea
ENINLEVKGNPLDSQDNWKEVLIDGKKLKRETDTLETFVCSSWYYLRFCSPKEESYGFNKDEIDYWMPVDQYIGGVEHAIL

SEQ ID NO: 161571 - protein, 124 aa, Unknown
  Bacterial polypetide isolated from the Sargasso Sea
EFTNSDADTEKRKAADQTIKAIILMLAPITPHLSQHLWWELDQDSLVVDTKWPEAKEEMLEEDFTKIVIQVNGKLRSEIDVNSDSEEEDIKSMALNDEKIKKYVSDSEIKKIIYVPGKLINIVL

SEQ ID NO: 161572 - protein, 202 aa, Unknown
  Bacterial polypetide isolated from the Sargasso Sea
GCEVNFKIENSNDIKEIKCFTTRPDTLFGMSFLALSVDHPLSQLYVNNKDFLEFKKKCSTTGTTEEAIASAEKFGFKTDLTAVNPLDENIKVPVYFANFVLMDYGFGAVFGCPGHDQRDLDFALKYNLKVNTVVKPHNENDNFVVTKEAYTGPGFIINSSFLNGLKSPESSIIKSIEYLEKHKLGKKKINFRLKDWGVSRQR

SEQ ID NO: 161573 - protein, 59 aa, Unknown
  Bacterial polypetide isolated from the Sargasso Sea
MDYLKPSEIEKKWQNIWGSKNLFSANKDKRQKFYVLEMFPYPSGNIHMGHLRNYTIGDV

SEQ ID NO: 161574 - protein, 227 aa, Unknown
  Bacterial polypetide isolated from the Sargasso Sea
IIDQYGADTARWFMLSDSPPERDLEWTDSGVQGSWKFINRLWKVVNLNVDSISESGLSEPTDLDTNTANLIRFLHRTIQDITKAYDNFRFNVAVAKLYELVNKLQSYPSGEEHENWARKKTIETIIQLSAPMIPHIAEELWTKIGHKQLVSEVKWPKPNKSYLDDDNINVIIQINGRLRGKIEVPANTDNGSLESLAKLNSNVQKILGNNTVKKTIIVPNKVINFVI

SEQ ID NO: 161575 - protein, 246 aa, Unknown
  Bacterial polypetide isolated from the Sargasso Sea
VEPIRVDTSLVNEKNELDILTLKKNNPIFNSSKFILEGGKYIVGREVEKMSKSKHNVVNPDEICEKYGADTLRMYEMFLGPIDQDKPWNTEGITGVHNFLNKLWKLFYNGTEFIVKDESPSTKSLRVLHKSIKKINEDIERFSFNTCISTFMICVNDLTSLKCQSKNILEPLIILLSPFAPHISEEIWSILGNKESIEHIPYPKFNPKFIQEFKKNYPISFNGKTRYMLELALDLSKDKIEEIVLN

SEQ ID NO: 161576 - protein, 273 aa, Unknown
  Bacterial polypetide isolated from the Sargasso Sea
FVVFRFFARAMQITGHLPKTAKEPFDALFTQGMVTHAIYKSTGTDGRDLFHYPYEVEMREGKAFLIKNNKEVSIIPSAKMSKSKNNVVDPVNIVDAFGADTARWFVLSDSPPERDIEWTASGAEASNKHLSRVYRIINEIISNDIPSNENDESLLKEMHKTIHDVTQAIESFGFNAAIARLYSFTNSLAKSNAGTKTKLSAAKTLAQLMSPMTPHLSEEIWERLGEKKLVAREPWPTVDETILSDDTVVMPIQVNGKRRGQIEVQKDLEPSEI

SEQ ID NO: 161577 - protein, 272 aa, Unknown
  Bacterial polypetide isolated from the Sargasso Sea
MSGNENNGYKPIAIEGKWQARWEEEGTNSLSAELLERGENPYYNLMMFPYPSAEGLHVGNIYAFTGADVHGRFQQLAGHTVFEPIGFDAFGIHSENFALKQGVHPMDLIPSNVANFTRQLKRMGGMFDWDHTVDTTDPTYYRWTQWIFIQLFKAGLAVRKEAPVNWCPSCMTVLSNEQVIGGRCERCDTPVEQRNIAQWFFRITQYSQRLLDGLKNIDWSETTKKAQENWIGRSEGAILHFPILPEEQREHSFDGMSKDELFSATKDLKKIE

SEQ ID NO: 161578 - protein, 59 aa, Unknown
  Bacterial polypetide isolated from the Sargasso Sea
MERYNAKLTEKNWREKWEKEGTYLTSDDKKKKKYYVLEMFPYPSGKIIWGMSEIYYGEM

SEQ ID NO: 161579 - protein, 171 aa, Unknown
  Bacterial polypetide isolated from the Sargasso Sea
VNQQKLPIYIADYVLMGYGTGAIMAVPGHDERDHAFAKKYSLPILRVLTGGAENIESEAHSGEGELVNSRFLNGLSKKKAFDKIISWLEEKQLGEKTVNYRLLDWIFSRQRYWGEPFPVLHTKDGVVKTLSENELPLTLPSLKDYRPTEDGDPPLGRASDWLTVEKDGESL

SEQ ID NO: 161580 - protein, 85 aa, Unknown
  Bacterial polypetide isolated from the Sargasso Sea
GWPERVKIMQQNWIGKSFGVNFGFPYELDGEKKLLRVFTTRADTIMGVTFCAIAAEHPLATRLAQDKPELLAFIDECKRGGVDER

SEQ ID NO: 161581 - protein, 50 aa, Unknown
  Bacterial polypetide isolated from the Sargasso Sea
MQEYVPKEIEAKWQKYWEEHNLLDFDFDSENPKYYMLTMLPYPSGDLHIG

SEQ ID NO: 161582 - protein, 45 aa, Unknown
  Bacterial polypetide isolated from the Sargasso Sea
MDKVNFNNIEKKWQKIWEKTNLYRENKEKKFYCLEMFPYPSRKIH

SEQ ID NO: 161583 - protein, 224 aa, Unknown
  Bacterial polypetide isolated from the Sargasso Sea
IVETFGADTARWFILSDTPPERDIQWTDKGAEASSRFIQRIWKIVNDGASLISGNEIVMPKEFTENALIIRKITHKAIKDITDALENLRFNRAIAHIYELSNEIQNLINKDKIFNDISELYSFRELLETYCQLFAPMAPHLAEECWKIIGCNDIISQREWPQLIEKYIQEDKVLIVVQVNGKKRGEIEVAKGLSQDDVEAAAMKIDNVSKSINSEIRKIIYVPK

SEQ ID NO: 161584 - protein, 102 aa, Unknown
  Bacterial polypetide isolated from the Sargasso Sea
MPVDQYIGGVEHAILHLLYSRFFMRAINYKNNKFKITEPFKGLFTQGMVCHETYKDENNNWLSPEEVESKDGKKFYIKDNPDKKVFVGSSESMSKSKKNTID

SEQ ID NO: 161585 - protein, 220 aa, Unknown
  Bacterial polypetide isolated from the Sargasso Sea
PNDIINLYGADTARWFMLSDSPPERDLQWTETGIASSYKFINRLWDFLDKCKNYENINKTNGVLLDNFKKLINNIAEDIESFHFNKSVAKIYEYVNLLNEAVVKKNISKDDFAWSLKKLSLILQPFLPHISEEIWSGLETDGLCINQKWPVEKVDRNSTKINIAVQINGKTRNIIELKNDLNKEEVMKIIKKDKKVLKYIENKKINKEIYVPGKIVNFVL

SEQ ID NO: 161586 - protein, 266 aa, Unknown
  Bacterial polypetide isolated from the Sargasso Sea
LHLLYSRFWHHVLYDLGLVSTKEPFKKLFNQGMIRGEDGQKMSKSRGNVINPDDVVKDYGADSLRLYEMFMGPLDKSKPWSTKGLQGCYRFLQKVWRLITDNIDNIESDVASEETLRLLHQSIKKVTEDLDGLRFNTSVSQLMILVNHLLTLEKLDKKVIETLLTLLNPFAPHISEELYNMLGNEHTIVILDWPIWDSSLVSSEVVTLVIQFNGKRRGEIEIEKDLSKETIIKIIRDKNRFNKYFIDKTIIKEIYVDNRLINFVVK

SEQ ID NO: 161587 - protein, 34 aa, Unknown
  Bacterial polypetide isolated from the Sargasso Sea
REKYYILEMFPYPSGRIHMGHVRNYTIGRCNSTI

SEQ ID NO: 161588 - protein, 60 aa, Unknown
  Bacterial polypetide isolated from the Sargasso Sea
MNKVDVKKIDKKWQDFWKNNKKVLKDTDKKKKYYCLEMFPYPSGKIHMGHVRNYAIGDVL

SEQ ID NO: 161589 - protein, 298 aa, Unknown
  Bacterial polypetide isolated from the Sargasso Sea
LHLLYSRFFMKALGYRNSTFNVDEPFTGLFTQGMVCHETYKDQDNNWLSPDEIEIRGNIFYKKGDEKSKVIRGPSESMSKSKKNVIDPENIMKNYGADSVRLFILSDSPPEKDVQWSEQGMVASYKFLQKLWTLHSKIKNKIKDKKIFDNPNKNLDKFTNQLIFKITNNLENFSYNVIIANIYEAYNFLVKEIEKDLDYKNLEENYKKILIVFSPAIPHFTSECLEDLKTEGQISWPNIDKKYLNEDKIDYVIQINGKKRAILNENRDISESTFLNAIKNKKELNRLIENKKIKKIFF

SEQ ID NO: 161590 - protein, 310 aa, Unknown
  Bacterial polypetide isolated from the Sargasso Sea
TCNMHLLYSRFFTKALNIKSVKEPFESLFTQGMVCHHTYRNSTGAWVYPDDIKKEGDKLTQISTNESVIEGPIESMSKSKRNVIDPQSIIEMYGADSARWFMLSDSPPEKDINWSDSGIKGAWKICQKIWTIVHSNKDILHKNLDENQELSDEGKKLMGLTYECLEGITNSIEKFQMNVAIAKVYELVNAISKFKIEEEADQICLKETIKIMVKIIEPMVPHLAEECWESFNSEKRLDEIPWPSVKKDFLKKDNVVVVIQINGKRRGELLVKSNTIEEDIVKLVYEIDSINKILKDKKIMKRIFVPNKII

SEQ ID NO: 161591 - protein, 79 aa, Unknown
  Bacterial polypetide isolated from the Sargasso Sea
DALKTFCILLAPFAPHIAEEIWQLIGFKKSVHLENWPSFNAEALKEDSYELVIQVNGKVRDKVNINNDMSEDQIKELTL

SEQ ID NO: 161592 - protein, 80 aa, Unknown
  Bacterial polypetide isolated from the Sargasso Sea
DLDGLGWPERVKIMQQNWIGKSFGVNFGFPYELDGEKKLLRVFTTRADTIMGVTFCAIAAEHPLATRLAQDKPELLAFID

SEQ ID NO: 161593 - protein, 236 aa, Unknown
  Bacterial polypetide isolated from the Sargasso Sea
KGNTVDPQSYIEKYGADTVRLYMMFTSHPEQSLEWSESSVEGASRFLKKIWKLINGKKYNRLSSQFDFTKEELSLRRKSHATLKKVENDYEVRFSFNTAIAAIMELLNFIPDEYKNENSLDSQKYCLDEAILFILQMLSPIAPHICEYLWDSFYEDGPSIECSWPKLSETLLEIEEFELIVQVNGKVRGKVNINKGSDQKEIENIALNIENVKNYINDSEVKKVIYVKNKLVNFVI

SEQ ID NO: 161594 - protein, 223 aa, Unknown
  Bacterial polypetide isolated from the Sargasso Sea
MEINWNQLDVKWRTKWHDAKDFETNPNEKPKKFITVAYPYPNSPQHIGHGRTYTLADVHARFYRMKGYNVLFPMGFHYTGTPVLGMAKRIEAGEKEILDGLRNIYHVPEDVIKTFVEPIKIADYFHEEIKSGMIEMGYSIDWRREFTTIVPGYQKFIEWQISTLRDNNRIIQGSHPVGWCPVDQNPVSQHDTMGDVEPKINNENYLVKFRLDEFVFPNYNIKT

SEQ ID NO: 161595 - protein, 227 aa, Unknown
  Bacterial polypetide isolated from the Sargasso Sea
MKEFFITGTDTDAGKTHVTSLLLKLLAQHKKKAIGYKPLAAGSEMAFDQLVNADALMLMESATVSAKYDVVNPFTFAPPIAPHIAAEQAGVTINVSELTAAYKTVKQQGADYLLTEGAGGWALPINNTEYLYDWVKAEKLPVILVVGMKLGCLNHALLTAAHIQSLGINCIGWIANQVDEHMDEYQANLDSLKARLPFPILAISPYSEQTPKLQIYKTLLENLSINP

SEQ ID NO: 161596 - protein, 237 aa, Unknown
  Bacterial polypetide isolated from the Sargasso Sea
IEKMSKSKKNVIDPSQTIEMYGADTARWFMLSDSPPERDLEWTEYGISSSYKFINKIWELSSELFEDKYEEKDSSDDNKIKIDINNTIKKVTDNINLFHYNKAIANIHEFINNAQKFIVNKTISKKEAINSFKKLSLIIQPFIPHLSEEIWRKFGEKELAIEQAWPIVDKTLLVENFNIAIQINGKTKDVLSSTKELDKDSVVNILKENNKISRLLKNKRVIKTIYVSGKIINFVTN

SEQ ID NO: 161597 - protein, 330 aa, Unknown
  Bacterial polypetide isolated from the Sargasso Sea
MDINWNQIDEKWRSKWQESKDFETNPNEKPKKFITVAYPYPNSPQHIGHGRTYTLADVHARFYRMKGYNVLFPMGFHYTGTPVLGMATRIEAGEKEILDGLRNIYHVPDEVIKTFVEPIKIADYFHEEIKSGMIEMGYSIDWRREFTTIVPGYQKFIEWQITTLRDNDRIIQGSHPVGWCQVCQNPVSQHDTMGDVEPKINNENYLVKFRLDEYVFPITTLRPETLFGITNLWVNPNTTYKKIKVDDEKWIVSQECAEKLKFFGKEISNEGDIKGTEIIGKTAKSPHTEQEIPIFEAGFVEPGMGTGLVMSVPAHAPKNYQALMDLKSKN

SEQ ID NO: 161598 - protein, 142 aa, Unknown
  Bacterial polypetide isolated from the Sargasso Sea
EGDELQFNTAVSELMKLSNAMAGQLDKVSAPVAHESVRNLLLLLAPFAPHLADELWEQLQGNGSIHQQRWPKVDASALVRDTITVVLQVKGKVRGNLEVPATISKEELEQVALASEVAQKWLEGNPPKRVIVVPGKLVNLVP

SEQ ID NO: 161599 - protein, 218 aa, Unknown
  Bacterial polypetide isolated from the Sargasso Sea
VRLYMMFTSPPEQSLEWSESSVEGSARFLKKVWNLISARKYSKLDGRFDFSKEELALRRKSHATLKKVENDYEVRFSFNTAIAAIMELLNSIPEDFKDSMAPDSKKYCLDEAILFILQMLSPIAPHICEYLWSNFYGEDFDIESSWPEVNENLLEIEEFELIIQVNGKVRGKLKVNKSTEQEEIEEMALNVENVNNFIGSSKLKKTIYVQEKLINFVI

SEQ ID NO: 161600 - protein, 278 aa, Unknown
  Bacterial polypetide isolated from the Sargasso Sea
MPVDPYIGGVEHAILHLLYSRFFMRAIDYKNDKFNIKEPFEGLFTQGMVCHETYKDQNNNWLSPEEIESKDGKNFYIKNNPGKKVIVGPSESMSKSKKNTIDPETIIENYGADSVRLFILSDSPPEKDVQWSEQGMAASYKFIQKLWVLHGKIKEKLKKKNSNVSSIDISKNTNKFISKINNNLDRFHYNVIIANIYEIYNFLNQSINAELNSQELRENYTKILSVLLPIVPHYASECLNDLNDNIFQNWPQIDKKMLQEDYVEYVVQINGKKRAMIK

SEQ ID NO: 161601 - protein, 54 aa, Unknown
  Bacterial polypetide isolated from the Sargasso Sea
MERINFQVIEKKWQEKFKTAKLYHKEKTSKKFYLSEIVPYPSGKIHMGHVRNTL

SEQ ID NO: 161602 - protein, 128 aa, Unknown
  Bacterial polypetide isolated from the Sargasso Sea
ANKVQKAPVDTDADKQVKREGIQTLIQLLNPITPHLSQYLWKELGFATALEQSPWPVADAAAMVEDEKLVVVQINGKVRAKVTVSVDATEAQVLELAHAEENVQRFLEGVTIRKVIYVPGKLLSLAVG

SEQ ID NO: 161603 - protein, 204 aa, Unknown
  Bacterial polypetide isolated from the Sargasso Sea
LEWSESSVEGAARFLKKVWNLVDGRKNIEVNNKFDFNKEELELRRKSHSTLKKVQHDYEVRFSFNTAIAAIMELLNSIPDSYKEENATDSQKFCLNEAIVFSLKMLSPIAPHICEHLWNNFQISESCIESSWPKFDEDIIKSEEFELIIQVNGKVRGKINIDKNLEEEEIKNIALEVDNVSNNIGENQIKKIIYVKDKLINFVI

SEQ ID NO: 161604 - protein, 285 aa, Unknown
  Bacterial polypetide isolated from the Sargasso Sea
EPFDALFTQGMVTHAIYKSTGTDGRDLFHYPEEVELREGKAYLIKGGIEVEIIPSAKMSKSKNNVVDPVNIVDAFGADTARWFVLSDSPPERDVEWTASGAEAANKHLSRVYRVIDEIVKNNIPATTNDETLLKEMHKTAHDVTQAIESFGFNAAVARLYSFTNSLAKSKAGTKTKIAAAKTLAQLMSPMTPHLSEEIWKKLGEKNLVVQQPWPIVDETMLNDDTITMPIQVNGKRRGQIEVKKDLEPSEIENLALKEEAVKRALNDAVPKKVIVVPGRIVNVVI

SEQ ID NO: 161605 - protein, 356 aa, Unknown
  Bacterial polypetide isolated from the Sargasso Sea
MIKKLLIANRGEIALRILRACKELDISTVAAYSEADRDLMHVKMADESICIGPAESSKSYLNIPSLISAMELCGADGIHPGYGFLSENGDFAEQVEKSDFQFVGPSSEIIRLMGNKVSAKRFAKEMGLPVVPGTDGPIDENLKEEAMKIGYPIILKAASGGGGRGMRIVNDESELEDAIALTQAESETAFGDSTIYMEKFLSSPRHIEVQVMADRFGNVLHLGDRDCSLQRRHQKVIEEAPAIGIPQGEKEDIFKKCVEACKKMKYVSAGTFEFLYEDGEFYFIEMNTRIQVEHPVTESITGLDLVKLQLRIARNEELKIKQEDVVFSGHAIECRINAEHPKTFFPSPGKVVDYHA

SEQ ID NO: 161606 - protein, 82 aa, Unknown
  Bacterial polypetide isolated from the Sargasso Sea
MISRLLMLGGPKFDSSLLKSETSLIVVQVNGKLRSKLEVDASISEDELKSMALSDEKVVRFIDGNEIKKIIVIPEKLVNIVV

SEQ ID NO: 161607 - protein, 153 aa, Unknown
  Bacterial polypetide isolated from the Sargasso Sea
PIMYREDGKVIEVPEDQLPLELPDDIDLSIPGNPLDNHPEWKFTKCPETGMNAIRETDTLDTFVDSAWYFLRFCSPLETKEPFNLDEINYWMPVDQYVGGVEHAILHLLYSRFFTKALNIKEMMSPLIAYLHKAWFVITRFKMNLKPGFILMM

SEQ ID NO: 161608 - protein, 92 aa, Unknown
  Bacterial polypetide isolated from the Sargasso Sea
MNTYNIEYNHKRSEKYWQEIWNKNNCFKLKKTDNPYYVLEMFPYPSGRIHMGHVRVYTLGDVLARYKRAQGFDVMHSYGMGFFWYAQLKMLQ

SEQ ID NO: 161609 - protein, 216 aa, Unknown
  Bacterial polypetide isolated from the Sargasso Sea
INLYGADTARWFMLSDSPPDRDLQWSETGIAASYKFINKLWDFVLKYEEYKNKEKSKGGCIENLKIKINEVGRYIEDFQFNKSVAKIYEYSNGLNNLIIKKDISKEDFKWSLEKLAIILQPFVPHISEEIWFRLNQAGLCIDQKWPKEIINEANITRDIAIQVNGKTRHVVSIDVNMSKEKVLEIIKGDDRIIKYIKNKKIVREIYVPGKIVNFVL

SEQ ID NO: 161610 - protein, 209 aa, Unknown
  Bacterial polypetide isolated from the Sargasso Sea
MEINWNQLDVKWRTKWHDAKDFETNPNEKPKKFITVAYPYPNSPQHIGHGRTYTLADVHARFYRMKGYNVLFPMGFHYTGTPVLGMAKRIEAGEKEILDGLRNIYHVPEDVIKTFVEPIKIADYFHEEIKSGMIEMGYSIDWRREFTTIVPGYQKFIEWQISTLRDNNRIIQGSHPVGWCPVDQNPVSQHDTMGDVEPKINNEKLPCQI

SEQ ID NO: 161611 - protein, 63 aa, Unknown
  Bacterial polypetide isolated from the Sargasso Sea
MEQPKKAIAHAEKIGFKTDLVAINPLDNKRSVPVYFANFVLMDYGFGAVFGCPAHDQRDMDFC

SEQ ID NO: 161612 - protein, 70 aa, Unknown
  Bacterial polypetide isolated from the Sargasso Sea
MDRYNFKTVEEKWQKKWQDTNAFSSKIDRSKDKFYCLEMFPYPSGKIHMGHVRNYTIGDVLSRYKSLKGF

SEQ ID NO: 161613 - protein, 379 aa, Unknown
  Bacterial polypetide isolated from the Sargasso Sea
VCQGMLNAPAPYCSDCNSEYHVDYFESACPSCGKELSSRSAKMSKSLGNTVSPEEMISRFGADTVRLFILFGANPEAGMDWSDSALEANHRQINSLFDAIDEAMALSDSPSKIDGWLLSRMRASQNRWIEAMSDVSLREGVMISHFEMLSDWNWYLRRGGLDRNTAMKFLEGWIPMLAPATPHIAEEFWNKFGGKDLLAALEIPTLSIESDDLHILAEEEYVKNIISSARNLRNLAERHSKKPISRVVIQTSPIWKSDLASEAIKLHFSEFDFKANGQEHVKSLEIFNEESTRGEVFHTWNSITVGGKKTRGKIYTWSDGSRYLLSEGIDELGIISANSDFIASALGVENVEAYRVGEGEDVGGKARISFPLEPGIAFL

SEQ ID NO: 161614 - protein, 250 aa, Unknown
  Bacterial polypetide isolated from the Sargasso Sea
TKEPFQKLFNQGMIQGEDGQKMSKSRGNVINPDDVVKEYGADSFRLYEMFMGPLDKSKPWNTKGLQGCYRFLSKVWRLFHENTENIKVDCSTKKTKMLLHQTIKKITEDIEGLRFNTSVSQLMIFTNHLVSLENLDYETLHVFLQLLNPFAPHITEEINQTILKNANAPLSSIKWPSHDESLIKSESYTLAVQFNGKMRGTIEIEANLDESQIIELITNDTKLKAYFNNVIVIKRIHIPNKLINFVLKPS

SEQ ID NO: 161615 - protein, 39 aa, Unknown
  Bacterial polypetide isolated from the Sargasso Sea
TVNYKLRDWLFSRQRYWGEPFPLIHKDDKVELFQKKIYL

SEQ ID NO: 161616 - protein, 96 aa, Unknown
  Bacterial polypetide isolated from the Sargasso Sea
MSKETIQLPKTAFSMKANLPTKEPKILDEWEKEKIFEKLRKSSKGKKKFVLHDGPPYANGHIHMGTALNKILKDIITRYHQMDGKDSIYVPGWDCH

SEQ ID NO: 161617 - protein, 173 aa, Unknown
  Bacterial polypetide isolated from the Sargasso Sea
MSKNQINLPKTAFSMKANLPIREPEILKLWKKIDLYKELRNSRKGEEKFVLHDGPPYANGNIHMGTALNKILKDIIVKFHQMDGKDSVYVPGWDCHGLPIEWKIEEQYKKNKKNKNDVPIVEFRKECRTFAEKWIEVHKDQFKRLGVVGDWENYYSTMSYDAEAQIVRELGKF

SEQ ID NO: 161618 - protein, 129 aa, Unknown
  Bacterial polypetide isolated from the Sargasso Sea
MSKQHINLPKTAFSMKANLPTKEPEFIKFWDKINLYQKLRDKTKGYEKFVLHDGPPYANGNIHMGTALNKILKDIITKFHQMDGKDSIYVPGWDCHGLPIEWKIEEQYKKNKKNKNDVPIVEFRKECRD

SEQ ID NO: 161619 - protein, 232 aa, Unknown
  Bacterial polypetide isolated from the Sargasso Sea
MDINLPKTKFSMKANLPTKEPSIIEFWKNMDLYNQIRKINKGKEKFVLHDGPPYANGNIHMGTALNKILKDIIVKFHQMSGSDAVYVPGWDCHGLPIEWKIEEQYKKNKKNKNDVPIIEFRKECRDFAEKWINVHKDQFQRLGVIGDWENYYSTMSFPAEAQIVRELGKFLKQGSLYKGYKPVLWSTVEKTALADAEVEYQDHKSDTIYTSFKVIKSKNEKLISSDVIIWTT

SEQ ID NO: 161620 - protein, 98 aa, Unknown
  Bacterial polypetide isolated from the Sargasso Sea
MSKANLNLPKTTFSMKANLPNKEPGILDYWDEIDLYKKLRFLSEKKEKFVLHDGPPYANGDIHMGTALNKILKDIIVKFHQMSGKDSVYVPGWDCHGL

SEQ ID NO: 161621 - protein, 322 aa, Unknown
  Bacterial polypetide isolated from the Sargasso Sea
RGWFQSSLLTSIAMNGRAPYKSVLTHGFVVDEDGRKQSKSLGNVVSPQKVWDNLGADILRLWVASTDFRSEMVASDEILKRTSDQYRRIRNTFRFILGNLNDFSEENKVEYKAQVELDKWIIDEAKNLEQKVINLYEAYSYHKAIQSIHNFCVNELGGIYLDIVKDRLYTCKNDSLARRSCQTSLDVLLNILIRLIAPVLSYTAEEIWQLTPSLTKQEDSVFLSNFNLEKKNPNSVISNHEWKRIFEIKDSVNQTIEQLRNENKLKGSLDAIVNIEVNSEDFRILDKLGDELHFLFIASEASISEGKDLKVNITISENDKCV

SEQ ID NO: 161622 - protein, 324 aa, Unknown
  Bacterial polypetide isolated from the Sargasso Sea
RKQSKSLGNVVSPQKVWDTLGADILRLWVASTDFRSEMVASDEILKRTSDQYRRIRNTFRFILGNLSDFSDKDKIMFEDQVELDKWIINEIKTLQKEVISLYESFSYHKAIQKIHNFCVNELGGVYLDIIKDRLYTCKNDSLARKSCQTSLDCILNVLVRLISPILSYTAEEIWQTSNRLNSQQDSVFLSNFENFEEDSKSNINQSEWKRIFEIKDAVNQTIEEMRNENTIKGSLDSIVDIKATADDMSILKKLGEELHFLFISSEANLSKGKSFKIKVNPSNNTKCVRCWHRCSSVGSNKEHPELCNRCIDNIENDGEQRKSV

SEQ ID NO: 161623 - protein, 75 aa, Unknown
  Bacterial polypetide isolated from the Sargasso Sea
MKSQNSKEQKSDFSYKETLNLLKTDFSMRANSVVREPEIQKFWANNDIDFQLGSNNSGEIFTLHDGPPYANGALH

SEQ ID NO: 161624 - protein, 76 aa, Unknown
  Bacterial polypetide isolated from the Sargasso Sea
MEYKDTIFLPKTSFEMRANLPAKEPTIIEEWDKENIFKKLRDKSKGREKFVLHDGPPYANGHIHMGTALNKILKDV

SEQ ID NO: 161625 - protein, 288 aa, Unknown
  Bacterial polypetide isolated from the Sargasso Sea
MTGVYLDKEFGGVPLPIFINKKTKEPLRDKSVIDRIAEIFEKEGSDCWFTDDPKRFLGKGYDTNDFIQLKDIVEVWFDSGSTHSFVLESREDLSWPADMYLEGSDQHRGWFHSSLLESCGTRGRAPFKSILSHGFVVDGKGMKMSKSSGNVISPDEILKNYGADILRVWVTASDYAEDLRIDKSILSQHAESYRKIRNTFRFILGNIQDKFQKVKFDTAKLEQLPELEKYILHKIYVLNLSYKENLKNYNFHKLYKELLNFCTLDLSSFYFDIRKDVLYCDTKDQKKE

SEQ ID NO: 161626 - protein, 157 aa, Unknown
  Bacterial polypetide isolated from the Sargasso Sea
MSKEHINLPKTSFSMKANLPTKEPSLVDYWDKINLYKKLREENKGNKKFVLHDGPPYANGDIHMGTALNKILKDIIIKFHQMNGKDSVYVPGWDCHGLPIEWKIEEQYKKNKKNKNEVPINEFRKECRDFASKWIGVHKKQFKRLGVLGDWENYYST

SEQ ID NO: 161627 - protein, 301 aa, Unknown
  Bacterial polypetide isolated from the Sargasso Sea
DIVEVWFDSGSTHSFVLEKRKDLKWPADMYLEGSDQHRGWFHSSLLESCGTRGKAPFESILSHGFVVDGKGMKMSKSMGNVILPEDILKNYGADILRAWVAASDYAEDLRIDKSILTQHAESYRKIRNTFRFMLGNLKDNFEKQNFEKIKLNEFEELEQFILHKLFLIDKSVDENLKNYNFHKLYKELLNFCTLDLSSFYFDIRKDVLYCDSINSKKRKNCVIVLNIILESLLKWFAPILVFTTEEIYSLLNKSNEKSIHENQFVKIPSHWENDKLNEKWTDLFKIKQEANIAIEEKRANK

SEQ ID NO: 161628 - protein, 128 aa, Unknown
  Bacterial polypetide isolated from the Sargasso Sea
NGSIHIGHALNKILKDIITRSKTMAGFDAPYVPGWDCHGLPIEHKVETTFGKNQPADLTRERCRAYAAEQVEEQKAGFVRLGVLGDWDNPYLTMNFANEAGEIRALAEMVKNGFVFKGLKPVNFCSST

SEQ ID NO: 161629 - protein, 333 aa, Unknown
  Bacterial polypetide isolated from the Sargasso Sea
KLKNQYKNIKKNKNDVPIVELEKECRDFANKWIDVHKKQFQRLGVIGDWKDYYSTMSFKAEAQIVRELAKFLKEGSLYKGYKPVLWSTVEKTALADAEVEYMDHISDTIYSSFPIKKTSNKSLEGCEIIIWTTTPWTIPANKALAYNKDISYQIIKIEDDGDFKNKKIVIAHDLIETVLKECEIKKFEKLDKLSGKEFKNIICSHPLEKEGYTHDIPMLEANFVTTEQGSGIVHCAPSHGPDDFNLCINNGIQAVETVDNDGKYTKNILNYEGIHVFKANPIIIESLKKNNRLLSNGKLNHTYPHSWRSKAPLIHRATPQWFISMESHGLRKK

SEQ ID NO: 161630 - protein, 226 aa, Unknown
  Bacterial polypetide isolated from the Sargasso Sea
MSKEHLNLPKTAFSMKANLPNKEPEYLKFWDKINLYEKLRSQSKGKEKFVLHDGPPYANGNIHMGTALNKILKDIIIKFHQMDGKDSVYVPGWDCHGLPIEWKIEEQYKKNKKNKNDVPIIEFRKECRDFATKWINIHKDQFKRLGVIGDWENYYSTMSFDAEAQIVRELGKFLKEGSLYKGYKPVLWSTVEKTALADAEVEYKDHVSDTIYVAFPVKESNIQELI

SEQ ID NO: 161631 - protein, 310 aa, Unknown
  Bacterial polypetide isolated from the Sargasso Sea
PASMYLEGSDQHRGWFHSSLLESCGTRGKAPFKSILTHGFVVDGKGLKMSKSTGNIIAPEDVLKKYGADILRAWVAASDYAEDLRLDYSILEQHAESYRKIRNTFRFLLGNLKDQKVDVKLNSIEIEKWPELERYILHQIFTLNKNFEKYFKEYNFHKLYKELLNFCSLDLSAFYFDIRKDVLYCDDIKSKKRKICINLLSLTLDILLKWFAPILSFTTEEIFQIVNSGKNSSIHLEYFPKIPANWENRKLHEKWEKLKVIRNVVNAGIEVKRSSKDIGSSLEADIEIYLGKEYLELVKDINLSEIFYYI

SEQ ID NO: 161632 - protein, 142 aa, Unknown
  Bacterial polypetide isolated from the Sargasso Sea
MPENNLQLPKTAFSMKANLPSKEPKILESWDKTKLYEKLRKKSAGKEKFILHDGPPYANGHIHMGTALNKILKDIVTKFHQMNNKDSIYVPGWDCHGLPIEWKIEEEYKKKKKNKDEVPTKDFRKECREFAEKWIGIHKKEL

SEQ ID NO: 161633 - protein, 308 aa, Unknown
  Bacterial polypetide isolated from the Sargasso Sea
QGSDCWFTDDAKIFLGDDYDANDYEKLNDIVEVWFDSGSTHSFVLEKRKDLKWPADMYLEGSDQHRGWFHSSLLESCGTRGKAPFKSILSHGFVVDGKGMKMSKSMGNVISPEDILKNYGADILRVWASASDYAEDLRIDKNILIQHAESYRKIRNTFRFMLGNLKDNFEKQNFEKVNLSELDELEQFILHKLFSINKSFNENLKNYNFHKLYKELLNFCTLDLSSFYFDIRKDVLYCDSLNSKKRKNCVIVLNIILESLLKWFAPILVFTTEEIFSLLNKNSDESIHETHFVKIPSSWENDKLNEKW

SEQ ID NO: 161634 - protein, 180 aa, Unknown
  Bacterial polypetide isolated from the Sargasso Sea
MSKENLNLPKTAFSMKANLPQKEPDLVDFWDKINLYQNLRDKSRGKEKFILHDGPPYANGDIHMGTALNKILKDIITKFHQMNNKDSVYVPGWDCHGLPIEWKIEEQYKKNKKNKNEVPVVEFRKECREFANKWIKVHKGQFKRLGVIGDWENYYSTMSFDAEAQIVRELGKFLKGGKSL

SEQ ID NO: 161635 - protein, 321 aa, Unknown
  Bacterial polypetide isolated from the Sargasso Sea
KTDNDKLKEHSIVIWTTTPWTIPGNRALAVHNDIEYKSLILKINDGNKNVIIASDLVESFIKENKIEEYKVNFSIKGYELTNTFCKHTLYDSGYNFEVPILHGDFVTTEQGTGIVHICPVHGMDDFILGKQHNLELPMTINESGIYYDHIPVFNGQHIFKVDQNVCDEINKNNNLISQGILIHSYPHSWRSKAPLVYKNTSQWFISMDTNDLRTKALKAIDETDFFPKQGQKRLRSMIQDRPDWCVSRQRVWGVPLPIFVNKKTGEPLRDQNIIEKIAKIYELEGGDAWFNSEPSRFLSPEYDPNDFETVKDVVEVWFDSG

SEQ ID NO: 161636 - protein, 179 aa, Unknown
  Bacterial polypetide isolated from the Sargasso Sea
MEYKDTIFLPKTSFEMRANLPSKEPAIIEEWDKENIFKKLRDKSKGREKFVLHDGPPYANGHIHMGTALNKILKDVIVRTQQMAGKDSIYVPGWDCHGLPIEWKIEEEYRKKGKNKDDVPTVQFRNECREFAEKWIDIQKKEFRRLGVEGDWENPYLTMSNQAEAQIVRELGKFLLDES

SEQ ID NO: 161637 - protein, 165 aa, Unknown
  Bacterial polypetide isolated from the Sargasso Sea
MSKEYRDTLNLPQTNLSMKAGLPRKEPEILEFWNSINLYQKIREQNNGKEQFILHDGPPYANGDIHLGHAVNKTLKDITIKFQSLIGKDAPYVPGWDCHGLPIELNVEKKHGKGSDLVRDKKSFINACREYAQSQVDKQREDFIRMGVLGDWENPYLSLNKSFEA

SEQ ID NO: 161638 - protein, 311 aa, Unknown
  Bacterial polypetide isolated from the Sargasso Sea
FDTIYVSFIIKKTDVKDLEGCQIAIWTTTPWTIPANKALAYNESLKYLILEIEDDNEFKKSKVVVAKELLESFIKECNIEKYKILKELPGKVFKGVICNHPFLDIGYDYDVPMLEARFVTTEQGTGFVHCAPSHGPDDFNLCINNGIKALETVDDDGRYTKHILEFEGTHIFKANPLVIEKLKESKRLLANGKLKHSYPHSWRSKAPLVHRATKQWFISMESHGLRKLALKALDETKFYPSKGKERIRSMIETRPDWCVSRQRVWGVPLPIFVSKKDDKVLIDDEVFENIAKIYEKEGSDCWFLDDFREIF

SEQ ID NO: 161639 - protein, 92 aa, Unknown
  Bacterial polypetide isolated from the Sargasso Sea
MSKSDINLPKTAFSMKANLPIREPEILNYWQKINLYDELRKSSKGKEKFVLHDGPPYANGNIHMGTALNKILKEKVVKFHQMDGKDSIYVPG

SEQ ID NO: 161640 - protein, 324 aa, Unknown
  Bacterial polypetide isolated from the Sargasso Sea
INKKTKEPLRDQKIIDRIASIYEKQGSDCWFTDDSKIFLGDDYESKDYEKLNDIVEVWFDSGSTHSFVLEKRKDLKWPADMYLEGSDQHRGWFHSSLLESCGTRGKAPFKSILSHGFVVDGKGMKMSKSMGNVISPEDILKNYGADILRVWASASDYAEDLRIDKNILIQHAESYRKIRNTFRFMLGNLKDNFEKQNFENIKVDELDELEQFILHKLFILNKSVEENLKNYNFHKLYKELLNFCTLDLSSFYFDIRKDVLYCDSLNSKKRKNCVIVLNIILESLLKWFAPILVFTTEEIYSLVNKNNSESIHEPYFVKIPNSWE

SEQ ID NO: 161641 - protein, 309 aa, Unknown
  Bacterial polypetide isolated from the Sargasso Sea
NVVSPEKVLKTYGADILRLWVVSADYSEDLRISDEILKYQADSYRRLRNTLRYLLGNLAEYSESEEVDIQDMPELERWILHRLYTLDKDIREWANSYEFHSIFTAIHNFCAVELSAFYFDIRKDTLYCESLDNIVRRSARTVLDKLFLCLTAWLAPILCFTSEEAWLARFPSSDESVHFREFPVIPLEWENDNLSSRWEKIREVRRVVTGALELERSEKRIGSSLEAKPFIWASEEYQSLFSSLDLDEIFITSGAKFCSGDPPEGAFSMNDLSGVAVSTAFAEGSKCPRCWRYSSINSMDSQTGSLQEV

SEQ ID NO: 161642 - protein, 186 aa, Unknown
  Bacterial polypetide isolated from the Sargasso Sea
PTKEPKILENWDNSKLYEKLRAKSVGKEKFVLHDGPPYANGHIHMGTALNKILKDIVTKFHQMNNKDSIYVPGWDCHGLPIEWKIEEEYKKKKKNKDEVPTKDFRKECRDFAQKWIGIHKNEFKRLGVIGDWDNYYSPMSFDAEAQIVRELGKFLIEGSLYRGFKPVLWSTVEKTALADAEVEYKD

SEQ ID NO: 161643 - protein, 116 aa, Unknown
  Bacterial polypetide isolated from the Sargasso Sea
MEYKDTIFLPKTSFEMRANLPSKEPAIIEEWDKENIFKKLRDKSKGREKFVLHDGPPYANGHIHMGTALNKILKDVIVRTQQMAGKDSIYVPGWDCHGLPIEWKIEEEYRKKGKNK

SEQ ID NO: 161644 - protein, 91 aa, Unknown
  Bacterial polypetide isolated from the Sargasso Sea
MPENNLNLPKTAFSMKANLPSKEPKILESWEKTKLYERLRKKSAGKEKFILHDGPPYANGHIHMGTALNKILKDIVTKFHQMNNQDSVYVP

SEQ ID NO: 161645 - protein, 212 aa, Unknown
  Bacterial polypetide isolated from the Sargasso Sea
FVNLEQGTGIVHCAPSHGPDDFNLCLKNNIPSLYTVDDAGLYTDEIPFFEKTHIFKADTIVIDKLKEQKKLLKNDKLSHTYPHSWRSKAPLIYRATPQWFISMKKNDLRKKAIKSINETDFYPKKGKERLLSMIEGRPDWCVSRQRVWGVPLPIFINKKTKEPLRDQKVIERIASIYEKQGSDCWFTDDSKVFLGDDYDTNDFEKLNDIVEV

SEQ ID NO: 161646 - protein, 203 aa, Unknown
  Bacterial polypetide isolated from the Sargasso Sea
MSKENLNLPKTAFSMKANLPQKEPSLINFWDKINLYQNLREKSKGKEKFILHDGPPYANGNIHMGTALNKILKDIITKFHQMNDKDSVYVPGWDCHGLPIEWKIEEQYKKNKKNKNEVPVVEFRKECRDFANKWIKVHKEQFKRLGVIGDWENYYSTMSFEAEAQIVRELGKFLKEGSLYKGYKPVLWSTVEKTALSDAEVEY

SEQ ID NO: 161647 - protein, 94 aa, Unknown
  Bacterial polypetide isolated from the Sargasso Sea
MSKDNIQLPKTVFSMKANLPSKEPEILKKWEKNKIFEKLRKNSKGKEKFILHDGPPYANGHIHMGTALNKILKDMVTRFHQMTGKDSIYVPGWD

SEQ ID NO: 161648 - protein, 118 aa, Unknown
  Bacterial polypetide isolated from the Sargasso Sea
MDYKDTVFLPKSSFGMRGGLPQREPEMIERWNKINLWEKLRELSKDREKFILHDGPPYANGPIHIGTSMNKILKDIINRSKQMSGYNSHYIPGWDCHGLPIEWQVEQTYKKKGINKEE

SEQ ID NO: 161649 - protein, 289 aa, Unknown
  Bacterial polypetide isolated from the Sargasso Sea
RQRVWGVPLPIFINKKTKEPLRDKKIIDRIASIYEKQGSDCWFTDDAKIFLGDDYDSKDYEKLNDIVEVWFDSGSTHSFVLEKRKDLKWPADMYLEGSDQHRGWFHSSLLESCGTRGEAPFKSILSHGFVVDGKGMKMSKSMGNVISPEDILKNYGADILRVWASASDYAEDLRIDKNILIQHAESYRKIRNTFRFMLGNLKDNFEKQNFEKIKLKEFDELEQFIMHKLFLINRSFDENFKSYNFHKLYKELLNFCTIDLSSFYFDIRKDVLYCDSLNSKKRKNCVIVL

SEQ ID NO: 161650 - protein, 173 aa, Unknown
  Bacterial polypetide isolated from the Sargasso Sea
MSKAQINLPKTAFSMKANLPTREPEILKLWRNIDLYNELRKSRKGKEKFVLHDGPPYANGNIHMGTALNKILKDIIVRFHQMDGKDSVYVPGWDCHGLPIEWKIEEQYKKSKKNKNEVPIVEFRKECRAFAEKWIDIHKDQFKRLGVVGDWENYYSTMSYEAEAQIVRELGKF

SEQ ID NO: 161651 - protein, 259 aa, Unknown
  Bacterial polypetide isolated from the Sargasso Sea
NYKELKVFKGSEFKGTICNHPFVKMDFKYDVPMLDAQFVNLEQGTGIVHCAPSHGPDDFNLCLKNNIPSLYTVDNSGVYTKEVPYFTNTHVFKADPIVIDKLKEQKQLLKNDKLNHSYPHSWRSKAPLIYRATPQWFISMQKNKLRDKAIKAINETIFYPNKGKDRLLSMIEGRPDWCVSRQRVWGVPLPIFINKKTKEPLRDQKIIDRIASIYEKQGSDCWFTDDAKTFLGDDYDAKDYEKLNDIVEVWFDSGSTHSF

SEQ ID NO: 161652 - protein, 96 aa, Unknown
  Bacterial polypetide isolated from the Sargasso Sea
MSKDYKSTILLPKTNFSMRAGLPNYEPKVLEQWEENKIYDKIREKSKNREKFILHDGPPYANGHIHIGTALNKILKDIVSRSQQMMGKNSHYIPGG

SEQ ID NO: 161653 - protein, 164 aa, Unknown
  Bacterial polypetide isolated from the Sargasso Sea
MDYKDTVFLPKSSFGMRGGLPQREPEMIERWNKINLWGKLRELSKDREKFILHDGPPYANGPIHIGTSMNKILKDIINRSKQMSGYNSHYIPGWDCHGLPIEWQVEQNYKKKGTNKEEIPIADFRAECRNFADKWIGAQMDDFKRLFVLADWDNKYLTMSFDAE

SEQ ID NO: 161654 - protein, 149 aa, Unknown
  Bacterial polypetide isolated from the Sargasso Sea
MSKDNLHLPKTAFSMKASLPTKEPLILEKWKKNKIFEKLRKNSKGKEKFILHDGPPYANGHIHMGTALNKILKDMITRFHQMNGKDSVYVPGWDCHGLPIEWKIEEQYKKKKKNKDEIPIKDFRQECREFAKNWIQVHIKEFERLGVVG

SEQ ID NO: 161655 - protein, 71 aa, Unknown
  Bacterial polypetide isolated from the Sargasso Sea
MSKENINLPKTSFSMKANLPNKEPEILKIWEKLDLYNKLRDSSKGKEKFVLHDGPPYANGHIHMGTALIKF

SEQ ID NO: 161656 - protein, 344 aa, Unknown
  Bacterial polypetide isolated from the Sargasso Sea
NRALAYNENLKYVIVKIEDQTDFKDKKIIVAQDLLKSLINDCGIEKFSKILTFPGKDFKGTICSHPFSKIGFDYDIPMLDANFVTLEQGSGIVHCAPSHGPDDFNLCLKNNIKAEETVNDDGKYTKHVPNFEGLHIFKANKVIIEKLKEQKKLLSNGELIHSYPHSWRSKAPLVHRATPQWFISMESHGLRKKALKSIDETNFYPNKGKERLKSMIELRPDWCVSRQRVWGVPIPVFLSKDTNEVLMDEQVIENIASIFEKEGADCWFEEDAQKFLGKKYKSEDYKKMTDIVEVWFDSGSTHAYVLEKREDLKWPASMYLEGSRQHRGWFHSSLLESCGTRSRA

SEQ ID NO: 161657 - protein, 211 aa, Unknown
  Bacterial polypetide isolated from the Sargasso Sea
MSKENLNLPKTAFSMKANLPLKEPELINFWDKINLYENLRNDSKGNEKFILHDGPPYANGNIHMGTALNKILKDIITKFHQMDNKDSVYVPGWDCHGLPIEWKIEEQYKKNKKNKNEVPVVEFRKECRDFANKWIKVHKDQFKRLGVIGDWENYYSTMSFDAEAQIVRELGKFLKEGSLYKGYKPVLWSTVEKTALSDAEVEYMDHSSDTI

SEQ ID NO: 161658 - protein, 293 aa, Unknown
  Bacterial polypetide isolated from the Sargasso Sea
EVPIKDFRSECRDFAKKWIEIQTKEFKRLGVVGDFDNYYSTMSFNGEAQIVRELGKFLLDKSLYQGFKPVLWSTVEKTALADAEVEYKDHTSNTIYAAFKIKKTDKDFLKDANIVIWTTTPWTIPANKALAFNSSLDYSLIEIEGLDNFKEKKIVIAKELIKSVTESCGLEKFKVVKNFKGSELNKTVCSHPFLKLGYDYDVPMFDARFVTLEQGTGIVHCAPSHGVDDFNLCLKNNIESKYTVDDSGYYTKEIPYFEKTHVFKADPIVIDNLREQKKLLKNDKFTHSYPHSW

SEQ ID NO: 161659 - protein, 115 aa, Unknown
  Bacterial polypetide isolated from the Sargasso Sea
MSKEYINLPKTAFSMKANLPTKEPGIIEYWQKINLYEKLRENSKGKEKFVLHDGPPYANGNIHMGTALNKILKDIITKFHQMDGKDSVYVPGWDCHGLPIEWKIEEQYKKNKKTK

SEQ ID NO: 161660 - protein, 279 aa, Unknown
  Bacterial polypetide isolated from the Sargasso Sea
VADALVDSVVKECELKKYRKIKTFKGKEFKSTICSHPFLNLGYDHDIPMLEARFVTTDQGTGIVHCAPSHGPDDFNLCLNNDIKAIETVDGDGKYTKNVKLFEGIHIFKANPIVIEKLKEQKNLLFNGELVHSYPHSWRSKAPLVHRATPQWFISMESHKLRDKALKAINETNFYPSKGKERLKSMIETRPDWCVSRQRVWGVPLPIFINKQTKEILVDDEITENIASIYEKEGSDCWFSDDPQRFLGRKYKANEFEKLNDIVEVWFDSGSTHSFVLEK

SEQ ID NO: 161661 - protein, 113 aa, Unknown
  Bacterial polypetide isolated from the Sargasso Sea
MSENNLQLPKTAFSMKANLPSKEPKILESWDKTKLYERLRKKSNGKEKFVLHDGPPYANGHIHMGTALNKILKDIVTKFHQMNNKDSIYVPGWDCHGLPIEWKIEEEYKKRKK

SEQ ID NO: 161662 - protein, 261 aa, Unknown
  Bacterial polypetide isolated from the Sargasso Sea
MSDIVEVWFDSGSTHSYVLEKRDDLKWPASMYLEGSDQHRGWFHSSLLESCGTRGKAPFESILSHGFVVDGKGLKMSKSTGNVIAPEDILKKYGADILRIWVASSNYAEDLRIDYTILDQHAESYRKIRNTFRYLLGNIQDEYLEIDFKNLDIKEMPDLEKYMLHRIYEINESFHKFFKTYNFHNLYKELLNFCTVELSAFYFDIRKDLLYCDPIDSTKRSKCILILNILLQCLLKWFAPILSFTTEEIFRLVNKNEDEKS

SEQ ID NO: 161663 - protein, 290 aa, Unknown
  Bacterial polypetide isolated from the Sargasso Sea
KFLKEGSLYRGFKPVLWSTVEKTALADAEVEYQDHKSDTIYASFKVKKSKIKELNDNEIVIWTTTPWTIPANKALAYNENLDYLLVKINDDGDFKDKKIVVAEALLESVIKDCNIESHEISKKFKGKELKDTICIHPFFNLGFDYDIPMLEARFVTTEQGTGIVHCAPSHGPDDFNLCMNNGIKAIETVDGDGKYTGNVKLFEGVHIFKANPLIIEKLKDEKKLLSNGELVHSYPHSWRSKAPLVHRATPQWFISMESHNLRSKALKAIDETNFYPSKGKERLKSMIETR

SEQ ID NO: 161664 - protein, 116 aa, Unknown
  Bacterial polypetide isolated from the Sargasso Sea
MNKSQINLPKTAFSMKANLPIREPEILKLWKKIDLYKELRNSRKGEEKFVLHDGPPYANGNIHMGTALNKILKDIIVKFHQMDGKDSVYVPGWDCHGLPIEWKIEEQYKKNKKNKN

SEQ ID NO: 161665 - protein, 275 aa, Unknown
  Bacterial polypetide isolated from the Sargasso Sea
YTSDTIYVSFTVKESKLKELNGSDIIIWTTTPWTIPANKALAYNSSLKYIIIKINDEGDFKNRKIVLAKDLLESLIKDCKINNFIIEKEFLGKEFKGTICTHPFLEIGYDYDIPMLEGRFVTIEQGSGIVHCAPSHGPDDFNLCINNNIKAVETVDDDGKYTDNIIKFSGTHIFKANPIVIENLNRQKKLLANGKLTHSYPHSWRSKAPLVHRATAQWFISMESHNLRTKSLKAIDETIFYPSKAKDRIKSMIETRPDWCVSRQKVWGVPCLFSY

SEQ ID NO: 161666 - protein, 278 aa, Unknown
  Bacterial polypetide isolated from the Sargasso Sea
YLDHTSDTIYVSFPIKNTKFKNLIGSEIIIWTTTPWTIPANKALAFNPSLIYTIIKIKDLGDFKDKKIVIAKDLLETVIKECEIKSYKIEKEFLGKEFKGTVCIHPFSEIGYDYDIPMLDARFVTTEQGSGIVHCAPSHGPDDFNLCLNNNIKAVETVDDDGKYTKNIINFEGMHIFKANPIVIEKLKSLKKLLANGKLNHSYPHSWRSKAPLVHRATAQWFISMESHDLRSKSLKAINETIFYPSKAKERIKSMIETRPDWCVSRPRVWGVPLPIFL

SEQ ID NO: 161667 - protein, 256 aa, Unknown
  Bacterial polypetide isolated from the Sargasso Sea
YQDHKSDTIYASFPVKSSNIKELDDSEIVIWTTTPWTIPANKALAYNESLEYLLIEVNDDGDFKNKKIVIADALIDSVVKDTKIQSFKKLKNFKGKDLKGTICNHPFLKLGYEYDIPMLEARFVTTEQGTGIVHCAPSHGPDDFNLCMNNGIKAIETVDGDGKYTKNVALFEGIHIFKSNSIVIEKLKDQKKLLSSGELVHSYPHSWRSKAPLVHRATPQWFISMDSHKLRNKALKAIDETTFYPSKGKERLKSMI

SEQ ID NO: 161668 - protein, 177 aa, Unknown
  Bacterial polypetide isolated from the Sargasso Sea
MSKENINLPKTAFSMKANLPVKEPSFVQFWDKIDLYGKLRTITKDKEKFILHDGPPYANGNIHMGTALNKILKDIITKFHQMDGKDSVYVPGWDCHGLPIEWKIEEQYKKNKKNKNEIPITEFRNECREFANKWIKVHKDQFKRLGVVGDWENYYSTMSFAAEAQIVRELAKFLKER

SEQ ID NO: 161669 - protein, 282 aa, Unknown
  Bacterial polypetide isolated from the Sargasso Sea
FQKECEIENLNLIEEIKGKDFEGTICSHPFLNLGYDYEVPMLEASFVTLEQGTGVVHCAPSHGPDDFNLCLKHGIKSLDTIDDNGKYTKHIKKFEGIHIFKADQIVIESLIDCKKLLANGKLTHSYPHSWRSKAPLVHRATSQWFISMETKDLRKKALKAIDNTNFYPERGRERIKSMIETRPDWCISRQRIWGVPLPLFISKKTKEVLRDADVIENIAKIFEKEGADCWFTDDPQKFLGKKYKSEEYIKSNDIVEVWFDSGATHSYVLEKRKDLDWPASMY

SEQ ID NO: 161670 - protein, 252 aa, Unknown
  Bacterial polypetide isolated from the Sargasso Sea
GKNQPADLTRERCRTYAGEQIEGQKADFIRLGVLGDWDNPYKTMDFANEAGEIRALAEMVKQGFVFKGLKPVNWCFDCGSALAEAEVEYQDKKSDAIDVAFPIEDADKLAAAFGLSELSKPTAIVIWTTTPWTIPANQALNVHPEFTYALVDTGERLLLLAEELVESCLQRYGLQGQVIATAQGAALDLIRFRHPFYERFSPVYLAEYVELGAGTGIVHSAPAYGEDDFRTCKAYGMSNDDILSPVQSNGVY

SEQ ID NO: 161671 - protein, 232 aa, Unknown
  Bacterial polypetide isolated from the Sargasso Sea
MSKSNINLPKTAFSMKANLQNKEPGIIDYWDKIDLYKKLRNSSKGKTKFVLHDGPPYANGDIHMGTALNKILKDIIVKFHQMKGEDSVYVPGWDCHGLPIEWKIEEQYKKNKKNKNEVPVNEFRKECRDFAKKWIEVHKKQFKRLGVVGDWENYYSTMSFDAEAQIVRELGKFLKEGSLYRGYKPVLWSTVEKTALADAEVEYMDHKSDTIYAAFNIKKSKNKKLLNSEVII

SEQ ID NO: 161672 - protein, 299 aa, Unknown
  Bacterial polypetide isolated from the Sargasso Sea
KLQIVRELGKFLKEGSLYKGYKPVLWSTVEKTALADAEVEYKDHVSDTIYAAFPVKKSNIQELIGSKVVIWTTTPWTIPANKALAYNQSLNYVLCEIDNKDILQNEKIVIAKELLTSVVKDTDYKINILKEFKGKEFDGTVCSHPFHKIGYDYDVPMLEARFVTTEQGTGIVHCAPSHGPDDFNLCINNGIKAIETVDDDGRYTKHIPIFEGTHIFKANDIVIEKLKELKGLLNNGKLTHSYPHSWRSKAPLVHRATPQWFISMESHKLRDKALKAINDTAFYPSKGKERIKAMIETRP

SEQ ID NO: 161673 - protein, 222 aa, Unknown
  Bacterial polypetide isolated from the Sargasso Sea
MNYNYDVPMLDGQFVNLDQGTGFVHCAPSHGADDFNLCLKNNIPSLYTVDNAGLYTKEIPHFTGTHIFKADPVVIEKLKEQNKLLKNNKLTHSYPHSWRSKAPLIYRATPQWFISMKKNNLRDKAVKAINKTTFYPNKGKDRLLSMVEGRPDWCVSRQRVWGVPLPIFINKQTKEPLRDEKVIDRIASIYEKQGSDCWFTDDPKIFLGEDYDTAEYEKLNDI

SEQ ID NO: 161674 - protein, 247 aa, Unknown
  Bacterial polypetide isolated from the Sargasso Sea
EKRKDLKWPADMYLEGSDQHRGWFHSSLLESCGTRGKAPFKSILSHGFVVDGKGMKMSKSMGNVISPEDILKNYGADILRVWASASDYSEDLRIDKNILIQHAESYRKIRNTFRFMLGNLKDNFEKQDFEKINLTELDELEQFILHKLYSIGTSVTENLKNYNFHKLYKELLNFCALDLSSFYFDIRKDVLYCDSLKSKKRKNCVVVLNIILESLLKWFAPILVFTTEEIYSLVNNNNESIHEKNFV

SEQ ID NO: 161675 - protein, 236 aa, Unknown
  Bacterial polypetide isolated from the Sargasso Sea
GLPIELKVLQNLKSDERKNLNTIGLRKKATEYAYTQINKQLEGFKRWGIWGDWNNPYLTLKKSYESAQIGVFGKMYLNGYIYRGLKPVHWSPSSRTALAEAELEYPEEHFSKSIYVSFKIAKITKEILLNISDDEQRKFLDFNHINFFIAVWTTTPWTIPANEAVAVNPKIKYVFANDEDDNIYIFAKDLISEISNKLNKNFKILLEVKGSNLENIEYEHPTKNKTCKIVIGGDYI

SEQ ID NO: 161676 - protein, 286 aa, Unknown
  Bacterial polypetide isolated from the Sargasso Sea
DDFFKSNDIVEVWFDSGATHSYVLEKRKDLIWPASMYLEGSDQHRGWFHSSLLESCGTRGKAPFKSILTHGFVVDGKGLKMSKSTGNIIAPEDILKKYGADILRTWVAASDYAEDLRLDYSILEQHAESYRKIRNTFRFLLGNLKDKKNNFDFNSQEVEKWPELERVILHQVFLLNQNFKNYFKEYNFHKLYKELANFCSLELSAFYFDIRKDTLYCDDFSSSKRKSSINLLGLILDILLKWFAPILAFTTEEIYQIVNQGQKSSIHLQSFPDIPASWRNDKLFEK

SEQ ID NO: 161677 - protein, 295 aa, Unknown
  Bacterial polypetide isolated from the Sargasso Sea
ATDYAHIQIDNQKEGFKRWGIWGDWNNPYLTLKKSYESAQIGVFGKMFLNGYIYRGLKPVHWSPSSRTALAEAELEYPDEHYSKSIYVSLKITKIPEEILLNFIQENLNIKKDFFQNNSFITIWTTTPWTIPANEAVAVNPKIKYVFAIDEEKRIYLFAKDLSSEISKKSNKDFKVLLEVKGSKLENIEYQHPSKNKNCRIVIGGDYITTESGTGIVHTAPGHGIDDFIVGQKYDLPITCVVDEKGNLNEYSGQFKGSNVLKDANDLIIEHLKENNLLLLQENYKHRYPYDWRTK

SEQ ID NO: 161678 - protein, 293 aa, Unknown
  Bacterial polypetide isolated from the Sargasso Sea
DAKIFLGDDYDDKDYDKLNDIVEVWFDSGSTHSFVLEKRKDLKWPADMYLEGSDQHRGWFHSSLLESCGTRGKAPFKSILSHGFVVDGKGMKMSKSMGNVISPEDILKSYGADILRVWASASDYAEDLRIDKNILVQHAESYRKIRNTFRFMLGNLKDNFEKQNFDRIKLNEFDELEQFILHKLFLINKSVDENLKNYNFHKLYKDLLNFCTLDLSSFYFDIRKDVLYCDSINSKKRKNCIIVLNIILESLLKWFAPILVFTAEEIYSLVNKDNSESIHEKNFVKIPANGRMI

SEQ ID NO: 161679 - protein, 182 aa, Unknown
  Bacterial polypetide isolated from the Sargasso Sea
MSKDNLQLPKTAFSMKASLPTKEPLILEKWEKNKIFEKLRKSSKGKEKFILHDGPPYANGHIHMGTALNKILKDMIIRFHQMNEKDSVYVPGWDCHGLPIEWKIEEEYKKKKKNKDEVPIKDFRQECREFAKKWIQVHIKEFKRLGVVGDFENYYSTMSNEAEAQIVRELGKFLLDGSLYQG

SEQ ID NO: 161680 - protein, 286 aa, Unknown
  Bacterial polypetide isolated from the Sargasso Sea
TMSFDAEAQIVRELGKFLLEGSLYRGFKPVLWSTVEKTALADAEVEYKDHKSNTIYAQFKVEKTDQNFLKDAFIIIWTTTPWTIPANKALAFNQNLRYSVLQVDNKKIVVAEKLINSVIENCNLSKFKIVKSFEGKLFNKTICSHPFKNLGYNFDVPMLEADFVTLEQGTGIVHCAPSHGPDDFNLCLKHGMKAIETVNNDGRYTKNIPVFEGTHVFKADDIIIKNLDEQKNLLGSGSLVHSYPHSWRSKAPLVHRATPQWFISMESHKLRNKALESIDQTSFIQK

SEQ ID NO: 161681 - protein, 30 aa, Unknown
  Bacterial polypetide isolated from the Sargasso Sea
MWSPVEKTALAEAEIEYQDHTSVTIYARFP

SEQ ID NO: 161682 - protein, 169 aa, Unknown
  Bacterial polypetide isolated from the Sargasso Sea
MSKESLQLPKTAFSMKANLPKKEPDIIQHWEKIDLYKKLRIKSKGKEKFVLHDGPPYANGHIHMGTALNKILKDIITRFHQMNGKDSIYVPGWDCHGLPIEWKIEEQYKKKKKNKDEVPIKDFRQECREFAESWIDVHIKEFKRLGVVGDFDNYYSTMSYGAEAQIVRE

SEQ ID NO: 161683 - protein, 282 aa, Unknown
  Bacterial polypetide isolated from the Sargasso Sea
VVAKNLIETIIKDCEIKNYKELKTFKGSEFKGTLCSHPLVKMDFDYDVPMLDAQFVNLEQGTGIVHCAPSHGPDDFNLCLKNNIPSLYTVDNSGVYTKEVPYFTNTHVFKADPIVIDKLKEQKQLLKNDKLNHSYPHSWRSKAPLIYRATPQWFISMQKNKLRDKAVKAINETIFYPNKGKDRLLSMIEGRPDWCVSRQRVWGVPLPIFINKKTKEPLRDQKIIDRIASIYEKQGSDCWFTDDAKIFLGDDYDAKDYEKLNDIVEVWFDSGSTHSFVLEKEK

SEQ ID NO: 161684 - protein, 78 aa, Unknown
  Bacterial polypetide isolated from the Sargasso Sea
MTKSQINLPKTAFSMKANLPTREPEILEYWKKINLYDELRNTSKGREKFVLHDGPPYANGNIHKGTALNKILNRYNCK

SEQ ID NO: 161685 - protein, 203 aa, Unknown
  Bacterial polypetide isolated from the Sargasso Sea
EDQIWPASIYLEGTDQHRGWFHSSLLESCGTRGVAPYESVLTHGFVLHEDGNKMSKSSSNIVPPAEIVEKSGADILRLWVASSDYSEDLKIGPEIIKSNADSYRRLRNTLRFILGNLNDFSEVEKVKFLDLPELDQYILHKLAHLEDEVLKSYQSFEYQRVFSAIFNFCTNELSSFYFDVRKDSLYCDHRTSLTRRATRTVLD

SEQ ID NO: 161686 - protein, 266 aa, Unknown
  Bacterial polypetide isolated from the Sargasso Sea
LVDDNASILAWTTTPWTLPGNVGLAVGPEVTYCRVRITEPPSGNWEGRGGAKVGDELILAKELMSEVLRHQVEVIEEFPGSKIVGKAYEPLFPDAIQRGDSGTAWTVVSADFVTTTDGTGVVHTAVMYGEEDYALGMEVGFPAQHTVGMDGKFINGTHESLDGRYVKDCDSDIIDLLDTNSRLYREHIYTHDYPHCWRTDHPLLYYAMDSWFVRMTAVKDKIIQYNSEVEWAPEWTGTGRVGEWLRNIKDWAISRERYWGTPIPVW

SEQ ID NO: 161687 - protein, 174 aa, Unknown
  Bacterial polypetide isolated from the Sargasso Sea
MAENNLNLPKTSFSMKANLPAKEPKILENWDKTKLYEKLREKSSGKEKFVLHDGPPYANGHIHMGTALNKILKDIVTKFHQMNNKDSIYVPGWDCHGLPIEWKIEEEYKKKKKNKDEIPTKDFRKECRDFAQKWISIHKTEFKRLGVIGDWENYYSTMSYDAEAQIVRELGKFL

SEQ ID NO: 161688 - protein, 243 aa, Unknown
  Bacterial polypetide isolated from the Sargasso Sea
MSKENINLPKTSFSMKANLPNKEPEILKIWENLNLYKKLRESSKGKKKFILHDGPPYANGHIHMGTALNKILKDMITRFHQMEGKDSVYVPGWDCHGLPIEWKIEEQYKKNKKDKNQVPIKDFRLECREFAEKWIKIHIGEFTRLGVVGDWKNYYSTMSFDAEAQIVRELGKFLLDGSLYKGYKPVLWSTVEKTALADAEVEYKDHTSNTIYAGFKVKNSKINLLKNAEIIIWTHYTPGLSQA

SEQ ID NO: 161689 - protein, 290 aa, Unknown
  Bacterial polypetide isolated from the Sargasso Sea
SSSLLESCGTRGRAPFETILSHGFVVDGKGMKMSKSAGNIISPEEILKKYGADILRLWVASSDYAEDLRIDHSILEQHAESYRKIRNTFRYILGNLRDNYSPQNFKSIKVNELPELEQVILHKLYFLSLEIKKSFKDYNFHKLQKELLNFCTLDLSSFYFDIRKDTLYCDEVSSQQRKSCVTLLNVILECLLKWYAPVLSFTTEEINDLSNKNKKTSIHEETFSNLPENWQNKTLLKKWEKLLSFRQEVNIAIEEKRSKKIIGSSLDADVKISLSKKDYEILSSINAEEL

SEQ ID NO: 161690 - protein, 110 aa, Unknown
  Bacterial polypetide isolated from the Sargasso Sea
MTKSQINLPKTAFSMKANLPTREPEILEYWKKINLYDELRNESKGREKFVLHDGPPYANGNIHMGTALNKILKDIIVKFHQMDGKDSIYVPGWDCHGLPIEWKIEEQYKK

SEQ ID NO: 161691 - protein, 244 aa, Unknown
  Bacterial polypetide isolated from the Sargasso Sea
SIIIWTTTPWTIPANKALAFNSNIEYAVLEIDQLEHFKDKRIVVAKNLIETITKDCEIKNYKELKTFKGSEFKGTLCNHPFVKMDFDYDVPMLDAQFVNLEQGTGIVHCAPSHGPDDFNLCLKNNIPSLYTVDNSGVYTKEVPYFTNTHVFKADPIVIDKLKEQKQLLKNDKLNHSYPHSWRSKAPLIYRATPQWFISMKKNKLRDKAVKAINETIFYPNKGKDRLLSMIEARPDWWFQDNELG

SEQ ID NO: 161692 - protein, 293 aa, Unknown
  Bacterial polypetide isolated from the Sargasso Sea
DYEKLSDIVEVWFDSGSTHSFVLEKRDDLKWPASMYLEGSDQHRGWFHSSLLESCGTRGVAPFESILSHGFVVDGKGLKMSKSTGNVIAPQDILKKYGADILRIWVASSNYAEDLRIDYSILDQHAESYRKIRNTFRYLLGNIQDQYENLDFEKVKFENFDSLEKFMLHRIYTINENFKNNFKFYNFHNLYKELLNFCTVELSAFYFDIRKDTLYCEALNSDKRKNCITLLNIILQCLLKWFAPILSFTTEEIYQLVKKEEDSQSIHLQNFVSVPNSWNNVELSSDWDYVKKF

SEQ ID NO: 161693 - protein, 141 aa, Unknown
  Bacterial polypetide isolated from the Sargasso Sea
MSDKKDQKLNLPNTSIPMKANLNLREPEILKQWEKRNVYKKIRKNRKGKEKFILHDGPPYANGNIHLGHAVNKVLKDIVIRSKTLEGYDAPYIPGWDCHGLPIEQQVEKKLGKKRREIAQSDFRDLCRDYAKKQINIRKTI

SEQ ID NO: 161694 - protein, 100 aa, Unknown
  Bacterial polypetide isolated from the Sargasso Sea
MEYKETIFLPKTSFEMRANLPKKEPQILQDWNEQDIFDQLRKKSEGKEKFILHDGPPYANGHIHMGTALNKILKDVIVRTQQMTGKDSIYVPGWDCHGLP

SEQ ID NO: 161695 - protein, 113 aa, Unknown
  Bacterial polypetide isolated from the Sargasso Sea
MSNLQINLPKTAFSMKANLPVREPEIIEYWQKINLYQELRNSRKGKEKFVLHDGPPYANGNIHMGTALNKILKDIIVKFHQMDGKDSIYVPGWDCHGLPIEWKIEEQYKKNKK

SEQ ID NO: 161696 - protein, 292 aa, Unknown
  Bacterial polypetide isolated from the Sargasso Sea
VIAHDLLETVLNECEIKKFEKLDKISGKEFKDIICSHPMEKEGYTYDIPMLEANFVTTEQGSGIVHCAPSHGPDDFNLCNNNGIQAIETVDDDGKYTKNILNFEGIHVFKANPIVIESLKKNKTLLSNGKLNHTYPHSWRSKAPLIHRATPQWFISMESHGLREKALVAIDKTDFYPNKGKERLKSMIETRPDWCVSRQRVWGVPLPIFISKKDEKVLIDEEVFNNIANIFEKEGSDCWFEDNKQKFLGKKYDENDFYQTTDIVEVWFDSGSTHSFVLEQREDLKMARISLP

SEQ ID NO: 161697 - protein, 277 aa, Unknown
  Bacterial polypetide isolated from the Sargasso Sea
KTFKGKELKETICNHPFLDLGYDYDIPMLEARFVTTEQGTGIVHCAPSHGPDDFNLCLNNGIKAIETVDGDGKYTNHVSLFEGIHIFKANPIVIEKLKEQKKLLSNGELIHSYPHSWRSKAPLVHRATPQWFISMESHKLRDKALKAINDTTFYPSKGKERLKSMIETRPDWCVSRQRVWGVPLPIFVNKKTKEILVDDEVNENIASIYEKEGSDCWFSDNPQRFLGNQYKAEDYEKLSDIVEVWFDSGSTHSFVLEKREDLKWPASMYLEGSDQHR

SEQ ID NO: 161698 - protein, 131 aa, Unknown
  Bacterial polypetide isolated from the Sargasso Sea
MSKSSVNLPKTSFSMRANLPLKEPDIIDYWNRISLYEKLRSNSKGNEKFVLHDGPPYANGNIHMGTALNKILKDIVTKFHQMNGKDSVYVPGWDCHGLPIEWKIEEQYKKNKKNKNDVPIVNLEKSAETCK

SEQ ID NO: 161699 - protein, 296 aa, Unknown
  Bacterial polypetide isolated from the Sargasso Sea
LIELNDDGDLKNKKIVIAEALLESMIKDCDINKFKNLKKFKGEDLKNTICNHPFLDLGYDYDVPMLEAQFVTTEQGTGIVHCAPSHGPDDFNLCLKNGIKAIETVDGDGKYTKNVGSFEGIHIFKANPIVIEKLKEQKKLIKNGELVHSYPHSWRSKAPLVHRATPQWFISMESHKLRNKALKAIDETIFYPSKGKERLKSMIETRPDWCVSRQRVWGVPLPIFVNKKTKEVLIDDELFENIAKIYEKEGSDCWFSDDPQKFLGKKYKAEDFDKLSDIVEVWFDSGSTHSFVLEKR

SEQ ID NO: 161700 - protein, 88 aa, Unknown
  Bacterial polypetide isolated from the Sargasso Sea
MNKNNINLPKTSFSMKASLPNKEPSLIDYWNKIDLYKKLRSSSEGKEKFVLHDGPPYANGDIHMGTALNKILKDLIVKFHQMNGKDSV

SEQ ID NO: 161701 - protein, 130 aa, Unknown
  Bacterial polypetide isolated from the Sargasso Sea
MEYKDTIFLPKTSFEMRANLPTKEPEILKDWDKQNIFTELRKKSKGREKFVLHDGPPYANGHIHMGTALNKILKDVIVRTQQMAGKDSIYVPGWDCHGLPIEWKIEEEYRKKGQNKDDIPIVQFRQECRD

SEQ ID NO: 161702 - protein, 119 aa, Unknown
  Bacterial polypetide isolated from the Sargasso Sea
MSKESLQLPKTAFSMKANLPKKEPDIIQHWEKIDLYKKLRIKSKGKEKFVLHDGPPYANGHIHMGTALNKILKDMITRFHQMNGKDSIYVPGWDCHGLPIEWKIEEQYKKKKKNKDEIP

SEQ ID NO: 161703 - protein, 177 aa, Unknown
  Bacterial polypetide isolated from the Sargasso Sea
MSKENINLPKTAFSMKANLPNKEPEILNHWGKINLYKELRKSNKGNKKFILHDGPPYANGNIHMGTAYNKILKDIIVKFHQMSGEDSVYVPGWDCHGLPIEWKIEEQYKKNKKNKNDIPIAEFRKECRAFAEKWIEVHKKQFMRLGVVGDWDNYYSTMSFDAEAQIVRELGKFLKEG

SEQ ID NO: 161704 - protein, 204 aa, Unknown
  Bacterial polypetide isolated from the Sargasso Sea
MSKSNINLPKTAFSMKANLQNKEPGIIDYWDKIDLYKKLRSSSKGKTKFILHDGPPYANGDIHMGTALNKILKDVIVKFHQMKGEDSVYVPGWDCHGLPIEWKIEEQYKKNKKNKNEVPINEFRKECRDFAKKWIEVHKKQFKRLGVVGDWENYYSTMSFDAEAQIVRELGKFLKEGSLYRGYKPVLWSTVEKTALADAEVEYM

SEQ ID NO: 161705 - protein, 298 aa, Unknown
  Bacterial polypetide isolated from the Sargasso Sea
RLGVVGDWENYYSTMSYEAEAQIVRELGKFLKEGSLYRGYKPVLWSTVEKTALADAEVEYMDHTSDTIYVSFHIQKSKLENLLGAEVIIWTTTPWTIPANKALAYNKSLKYVVIQINDKSDFNTRKIVVAKDLLKSVVEDCKINDYKIISEINGSDFDGVVCSHPFKNLGYNYDIPMLEARFVTTEQGSGIVHCAPSHGPDDFNLCLNNNIKAVETVDDDGKYTKHVLNFEGIHIFKANPIVIEKLKNEKNLLANGKLNHSYPHSWRSKAPLVHRATPQWFISMESHKLRDKALKAID

SEQ ID NO: 161706 - protein, 121 aa, Unknown
  Bacterial polypetide isolated from the Sargasso Sea
MSKSQINLPKTAFSMKANLPIREPEILELWKKIDLYKELRNSRKGEEKFVLHDGPPYANGNIHMGTALNKILKDIIVKFHQMDGKDSVYVPGWDCHGLPIEWKIEEQYKKNKKNKNDVPNC

SEQ ID NO: 161707 - protein, 255 aa, Unknown
  Bacterial polypetide isolated from the Sargasso Sea
VEYMDKVSTSVDVLFKIVEPSEFIERTNASKINNDNELFIPIWTTTPWTLPSNEAVAMGEDIPYGIYSLTLHERDIHVVIANELRESIEKRWGVSNLEMLEEVSAENLSGLQLQHPFDERTVPVLLGDHVTTENGTGSVHTAPAHGHEDFQIGKENDLDLKCYVNSYGVFIDAKESFAKQHIFKSESEIIERLDESNLLILSEKFEHSYPHCWRHKTPVIFRTTRQWFISMENEDFRSSCLESIKDVQWKPKWGE

SEQ ID NO: 161708 - protein, 304 aa, Unknown
  Bacterial polypetide isolated from the Sargasso Sea
DLDHFKDKKIVVANNLIDSIIKSCGIENHKVLKTFKGSEFKGTICSHPFLQMNFDYDIPMLEANFVDLEQGTGIVHCAPSHGPDDFNLCLKNNIPSSYTVDNAGLYTKEVPYFTNTHIFKADPLVIEKLKEQNKLLKDDKLHHSYPHSWRSKAPLIYRATPQWFISMEKNSLRNKAIKAIKNTAFYPEKGKERLLSMIEERPDWCVSRQRVWGVPLPIFINKKTKEPLRDKKVIDRIAEIYEKEGSDCWFTDEAKKFLGKDYDPNDYEKLNDIVEVWFDSGSTHSFVLEKRKDLKWPADMYLKS

SEQ ID NO: 161709 - protein, 314 aa, Unknown
  Bacterial polypetide isolated from the Sargasso Sea
AIKKDGIDSWTNLDLSVDEEGYEKSKDIFDVWFDSGITHYCVVDEIFGSNTQSDLYLEGSDQHRGWFQSSLLTSIAMKGTAPYKAVLTHGFVVDESGRKMSKSVGNVVTPQEVIKDSGADILRYWIASTDFRGEMAFSKDIFDRSIDGFRRIRNTMRFMVSNLYDYDGEFKKDDLLFLDRVILSKAHRLQEDIRENFNNYNFHLVISKILNFCVNDLGGMYLDVIKDRLYTMKSDSLGRRSAQYAVNHILNILIKSISPILPFTAYEFQESLKPGKGDDIFYEEFQNDDLAASFEDIEKFEFLDSLRSRVYQAI

SEQ ID NO: 161710 - protein, 251 aa, Unknown
  Bacterial polypetide isolated from the Sargasso Sea
GKKYKKEDYIKSNDIVEVWFDSGATHSYVLEKRKDLAWPASMYLEGSDQHRGWFHSSLLESCGTRGKAPFKSILTHGFVVDGKGLKMSKSTGNIIAPEDILKKYGADILRTWVAASDYAEDLRLDYSILEQHAESYRKIRNTFRFLLGNLKDKKNNFDLNSKEIEKWPELERFILHQIFLLNKNFENYFKEYNFHKLYKELINFCSLELSAFYFDIRKDTLYCDDFSSTKRQACINLLGLILDMLLKWFAP

SEQ ID NO: 161711 - protein, 69 aa, Unknown
  Bacterial polypetide isolated from the Sargasso Sea
MSEKKDQKLNLPKTSIPMKASLNLREPEMLSEWDKRNVYKKIRKNRKGKEKFILHDGPPYANGNIHLGH

SEQ ID NO: 161712 - protein, 287 aa, Unknown
  Bacterial polypetide isolated from the Sargasso Sea
KTKEPLRDQKIIDRIASIYEKQGSDCWFTDDAKTFLGNDYDANDYEKLNDIVEVWFDSGSTHSFVLEKRKDLKWPADMYLEGSDQHRGWFHSSLLESCGTRGKAPFKSILSHGFVVDGKGMKMSKSMGNVISPEDILKNYGADILRVWASASDYAEDLRIDKNILIQHAESYRKIRNTFRFMLGNLKDNFEKQKFDKIKINEFDELEQFILHKLFSINKSFYENLKNYNFHKLYKELLNFCTLDLSSFYFDIRKDVLYCDSLNSKKRKNCVIVLNIILESLLKWFAP

SEQ ID NO: 161713 - protein, 273 aa, Unknown
  Bacterial polypetide isolated from the Sargasso Sea
FLFGLQPHGTIPANKALAYNQGLSYVLCEIDNKDILQNEKVVIAKELLTSVAKDTDYKINILKEFKGKEFDGTVCSHPFYKIGYEYDVPMLEARFVTTEQGTGIVHCAPSHGPDDFNLCINNGIKAIETVDDDGRYTSHIPIFEGTHIFKANDIVIEKLKELKGLLNNGKLTHSYPHSWRSKAPLVHRATPQWFISMESHKLRDKALKAINDTTFYPGKGKERIKAMIETRPDWCVSRQRVWGVPLPIFISKKTGEILIDEEVFENIAKIYEK

SEQ ID NO: 161714 - protein, 154 aa, Unknown
  Bacterial polypetide isolated from the Sargasso Sea
MSKDQINLPKTAFSMKANLPLKEPKIVEHWNKIDLYNLLRENNKGKEKFVLHDGPPYANGNIHMGTAFNKILKDIITKFHQMDGKDSVYVPGWDCHGLPIEWKIEEQYKKNKKNKNDVPVVEFRKECREFANKWIKVHKEQFKRLGVVGDWENY

SEQ ID NO: 161715 - protein, 272 aa, Unknown
  Bacterial polypetide isolated from the Sargasso Sea
SKRSSLYRGYKPVLWSTVEKTALADAEVEYMDHVSDTIYVEFPVVKTNFKEIEKSNVVIWTTTPWTIPANKALAYNQSLTYLLLEIDNEKKIIIAKDLLESFKKDTNIEKTKIIKEFSGKEFEGTLCSHPFYSIGYDYEIPMLEARFVTTEQGTGIVHCAPSHGPDDFNLCLNNNIKAVETVDDDGRYTKNILHFEGLHIFKANSVIIDKLKEHKKLIANGKLNHSYPHSWRSKAPLVHRATPQWFISMESHELRSKALKALDETTFYPSKG

SEQ ID NO: 161716 - protein, 285 aa, Unknown
  Bacterial polypetide isolated from the Sargasso Sea
RFQRWGIWADWEQPYLTLQKEYESAQIRVFGEMVLKGHIYRGLKPVHWSPSSRTALAEAELEYPDGHTSPSVYVAFPAVELPATLRDAVKQEGLDLPSDPKTLGEGLQVAIWTTTPWTLPANLAVSVNERLDYALAEDGAGRLLLVAADLIESLSKTLECPLKQRATVKGALLAGLIYRHPLLDRTSPVVIGGEYITTESGTGLVHTAPGHGVDDFHTGQKNGLPVLCPVDEGGTLTDEAGPFAGLNVLKDANPKIIEALESAGALLKQEAYGHRYPYDWRTKKP

SEQ ID NO: 161717 - protein, 261 aa, Unknown
  Bacterial polypetide isolated from the Sargasso Sea
EDQKFLGKKYNSEDYEKMSDIVEVWFDSGSTHSYVLEKREDLKWPASMYLEGSDQHRGWFHSSLLESCGTRGRAPFESILSHGFVVDGKGLKMSKSTGNVILPEEVLKKYGADILRIWVASSNYAEDLRIDYSILDQHAESYRKIRNTFRYLLGNIQDDYIDKNFEDLNIEQLPDLEKYMLHRIYLMNKNFYNYFNSYNFHNLYKELLNFCTVELSAFYFDIRKDLLYCDPIDSKKRSDCILVLNIMLNCLLKWFAPILSF

SEQ ID NO: 161718 - protein, 201 aa, Unknown
  Bacterial polypetide isolated from the Sargasso Sea
MSKEHINLPKTKFSMKANLPNKEPNYIEFWKKIDLYNLLRQKSKGQEKFVLHDGPPYANGNIHMGTALNKILKDIITKFHQMDGKDSVYVPGWDCHGLPIEWKIEEQYKKNKKNKNDVPIIEFRKECREFANKWIDVHKGEFTRLGVIGDWENYYSTMSFDAEAQIVRELGKFLKEGSLYRGYKPVLWSTVEKTALADAEV

SEQ ID NO: 161719 - protein, 275 aa, Unknown
  Bacterial polypetide isolated from the Sargasso Sea
IIIEKLKTLKNLVSNGKLKHSYPHSWRSKAPLVHRATQQWFISMESHGLREKALKALDETKFFPSKGKDRIKSMIETRPDWCVSRQRVWGVPLPIFVSKKNNEVLIDEEVFENIANIYEKEGSDCWFSDDPQRFLGNKYKSQDYHKLSDIVEVWFDSGSTHSFVLEKRDDLKWPASMYLEGSDQHRGWFHSSLLESCGTRGRAPFESILSHGFVVDGKGLKMSKSAGNTIAPEDILKKYGADILRIWVAASNYAEDLRIDHSILQQHAEAYRKIR

SEQ ID NO: 161720 - protein, 294 aa, Unknown
  Bacterial polypetide isolated from the Sargasso Sea
MSFDAEAQIVRELGKFLKEGSLYKGYKPVLWSTVEKTALADAEVEYQDHVSDTIYAAFPVKKSNINELIGSNVVIWTTTPWTIPANKALAYNQSLDYVLCEIDNKKALQNEKIVIAKELLPSVAKDTENKIKIIMDFKGKEFEGTICSHPFYKIGYDYDVPMLEARFVTTEQGTGIVHCAPSHGPDDFNLCINNGIKAIETVDDDGRYTKHIPMFEGIHIFKANDIVIEKLKEVKGLLNNGKLTHSYPHSWRSKAPLVHRATPQWFISMESHNLRDKALKAINDTTFYPSKGKE

SEQ ID NO: 161721 - protein, 248 aa, Unknown
  Bacterial polypetide isolated from the Sargasso Sea
ALLDSVIKDCGIKKFKNLKKIKGKDFKKTVCKHPFFDLGYDYDIPMLEANFVTTEQGTGIVHCAPSHGPDDFNLCLNNGIKAIETVDDDGKYTKNVSLFEGTHIFKANPIVIEKLKDQKKLLFNSILVHSYPHSWRSKAPLVHRATPQWFISMESHKLRSKALKAIDDTVFYPSKGKDRLKSMIETRPDWCVSRQRVWGVPLPIFINKKTKEILIDEEVFENIAKIYEKEGSDCWFSDDPQKFLGSKY

SEQ ID NO: 161722 - protein, 167 aa, Unknown
  Bacterial polypetide isolated from the Sargasso Sea
MSKSNINLPKTAFSMKANLQNKEPGIIDYWDKIDLYKKLRSSSKGKTKFILHDGPPYANGDIHMGTALNKILKDVIVKFHQMKGEDSVYVPGWDCHGLPIEWKIEEQYKKNKKNKNEVPINEFRKECRDFAKKWIEVHKKQFKRLGVVGDWENYYSTMSFDAEAQNS

SEQ ID NO: 161723 - protein, 296 aa, Unknown
  Bacterial polypetide isolated from the Sargasso Sea
GDFDNYYSTMSYEAEAQIVRELGKFLLDGSLYQGFKPVLWSTVEKTALADAEVEYLDHTSNTIYVAFKVVKTKKDFLKNTNVIIWTTTPWTIPANRALAFNSNIEYSILEINDLEHFKEKKIVVAKNLIKSITEECEIKNFKEIKTFKGSEFEGTVCSHPFVKMNFNYDVPMLDAQFVNLEQGTGIVHCAPSHGPDDFNLCLKNNISSRYTVDNSGLYTKEIPYFTNTHIFKADPLVIGKLKEQNKLLKHDKLNHSYPHSWRSKAPLIYRATPQWFISMQKNKLRDKAIKAINETV

SEQ ID NO: 161724 - protein, 254 aa, Unknown
  Bacterial polypetide isolated from the Sargasso Sea
TTTPWTIPANRALAYNEALDYVQLELNDDSDFKKRKIVVAEALLQSVINDCKIKNYKKIKTFKGKDLKETICNHPFLDLGYDYDIPMLEARFVTTEQGTGIVHCAPSHGPDDFNLCLNNGIKAIETVDGDGKYTKHVSLFEGIHIFKANPIVIEKLKEQKKLLSNGELMHSYPHSWRSKAPLVHRATPQWFISMESHKLRDKALKAINDTTFYPSKGKERLKSMIETRPDWCVSRQRVWGVPLPIFINKETKEI

SEQ ID NO: 161725 - protein, 222 aa, Unknown
  Bacterial polypetide isolated from the Sargasso Sea
MSNSQINLPKTAFSMKANLPVREPEILEYWQKINLYKELRNSSKGKEKFVLHDGPPYANGNIHMGTALNKILKDIIVKFHQMDGKDSIYVPGWDCHGLPIEWKIEEQYKKNKKNKNDVPIVEFRKECRSFAEKWIEVHKGQFKRLGVVGDWENYYSTMSFDAEAQIVRELGKFLKEGSLYRGFKPVLWSTVEKTALADAEVEYQDHKSDTIYTSFPIKTSNL

SEQ ID NO: 161726 - protein, 255 aa, Unknown
  Bacterial polypetide isolated from the Sargasso Sea
KFNKDFMTLLDVKGSSLEDIEYQHPTKNKNCRVVIGGDYITTESGTGIVHTAPGHGIDDFNVGKKYDLPTTCVVDEKGNLNEHSGQFKGSNVLKDANDLIIEYLNENNLLLLQEKYKHRYPYDWRTKKPTIFRATEQWFASVNGFRSSALKAIEDVEWMPATGKKRIYSMVVGRGDWCISRQRSWGVPIPVFYKKNGNEILLNSDIINHIKKLFSEHGADIWWDWDVKNLLPKNYEKESDLWIKGTDTMDVWFDS

SEQ ID NO: 161727 - protein, 297 aa, Unknown
  Bacterial polypetide isolated from the Sargasso Sea
ISRLGVIGDWNNYYSTMSFDAEAQIVRELGKFLNEGSLYRGYKPVLWSTVEKTALADAEVEYKDHKSDTIYTSFEVKNSKDNKLKDVEIIIWTTTPWTIPANKALAYNKNLKYIVIKIEDETDYKDRKILVADALLKSVLDECKIKKFSKVLELNGQNLEGTICKHPFSKIGFDYDIPMLEANFVTTEQGTGIVHCAPSHGPDDFNLCLNNGIKAIETVDGDGKYTDIIPLFKGMHIFKANSLVIEKLKNEKNLLSSGELIHSYPHSWRSKAPLVHRATPQWFISMESHDLRKKAFK

SEQ ID NO: 161728 - protein, 230 aa, Unknown
  Bacterial polypetide isolated from the Sargasso Sea
MEYKDTIFLPKSSFEMRGNLPLKEPKILEQWDREKIFYKLREKSKGREKFVLHDGPPYANGHIHMGTALNKILKDVIVRTQQMAGKDSIYVPGWDCHGLPIEWKIEESYRKKGKNKDDVPVVKFRQECREFAEKWIDIQKKEFRRLGVEGDWLNPYLTMSNEAEAQIVRELGKFLIDESLYKGAKPVLWSVVEKTALADAEVEYEDHTSNTIYVKFIITSTADKDWKDQI

SEQ ID NO: 161729 - protein, 86 aa, Unknown
  Bacterial polypetide isolated from the Sargasso Sea
MEYKDTIFLPKTSFEMRANLPSKEPVLLENWDKQKIFLKLREKSKGKEKFVLHDGPPYANGHIHMGTALNKILKDVIVRTQQMNGK

SEQ ID NO: 161730 - protein, 132 aa, Unknown
  Bacterial polypetide isolated from the Sargasso Sea
MTVNYRDTLNLPDTDFSMKAGLPRKEPEILHLWSKQDLYAKIRKKYENKELFLLHDGPPYANGDIHLGHSVNKILKDITIKYKTLSGFDAPYVPGWDCHGLPIELNVEKKHGKNSELLKNKESFQKACKEYA

SEQ ID NO: 161731 - protein, 306 aa, Unknown
  Bacterial polypetide isolated from the Sargasso Sea
FKTLQGFNAPYVPGWDCHGLPIELNVEKKHGKNSELVKNKESFQKACKEYAESQINNQLNDFKRLGVFGDWENSYKSLDPKFEADIVRSLGTIFSEGHLEKGEKPVHWCQESGSSLAEAEVEYIDKTSKAIDVSFKVDDSSLEKVKDLFSFKDLDEIFFVIWTTTPWTIPSNVAVCINPEFEYSLISMQNKFYVIAFEMIDQCSKRWKQKFDVISTIKGNKLIDIDLIHPFLKRKSVLLHADHVTTETGTGCVHTAPAHGMDDYLICKKNNIETIHSLNNKGFFKDELDFIAGLPAMKADPLIVEK

SEQ ID NO: 161732 - protein, 220 aa, Unknown
  Bacterial polypetide isolated from the Sargasso Sea
MSKEHINLPKTAFSMKANLPAREPELIKFWEKINLYQKLRDKTKGCEKFVLHDGPPYANGNIHMGTALNKILKDIITKFHQMNGKDSIYVPGWDCHGLPIEWKIEEQYKKNKKNKNDVPIVEFRKECRDFAEKWIKVHKEQFRRLGVIGDWEDYYSTMSFDAEAQIVRELGKFLKEGSLYRGFKPVLWSTVEKTALADAEVEYLDHTSDTIYVSFAVKEK

SEQ ID NO: 161733 - protein, 121 aa, Unknown
  Bacterial polypetide isolated from the Sargasso Sea
MSKEHINLPKTKFSMKANLPNKEPNYIEFWKKIDLYNLLRQKSKGQEKFVLHDGPPYANGNIHMGTALNKILKDIITKFHQMDGKDSVYVPGWDCHGLPIEWKIEEQYKKNKKNKNDVPII

SEQ ID NO: 161734 - protein, 297 aa, Unknown
  Bacterial polypetide isolated from the Sargasso Sea
EDILKKYGADILRLWVASSDYAEDLRIDHSILEQHAESYRKIRNTFRYILGNLRDNYSSQNFKSIKVNELPELEQVILHKIYFLSLEIKKILKDYNFHKLQKELLNFCTLDLSSFYFDIRKDTLYCDEVSSQKRKSCVTLLNVILECLLKWYAPVLSFTTEEITDLSNKNKKISIHEETFSDLPENWQNETLYKKWEKLLSFRQEVNIAIEEKRSKKIIGSSLEADVKISLSKKDHEILNSVDAEELFITSNVTKTIQDDIKDKLSISVKKADGTKCVRCWKIVPSVKENKCPRCGK

SEQ ID NO: 161735 - protein, 185 aa, Unknown
  Bacterial polypetide isolated from the Sargasso Sea
MSKQHINLPKTAFSMKANLPVREPEFIKFWDKINLYKKLRDQTKGYEKFVLHDGPPYANGNIHMGTALNKILKDIITKFHQMDGKDSIYVPGWDCHGLPIEWKIEEQYKKNKKNKNDVPIVEFRKECRDFAEKWIKVHKEQFKRLGVIGDWEDYYSTMSFDAEAQIVRELGKFLKEGSLYRGLNQ

SEQ ID NO: 161736 - protein, 258 aa, Unknown
  Bacterial polypetide isolated from the Sargasso Sea
PWTIPANQALNVHPEFNYALVDTGERLLVLAEDLVESCLERYGLEGQVLATAEGAALELIRFRHPLYERFSPVYLAEYVELDAGTGVVHSAPAYGEDDFRTCKQYGMSNDDILSPVQSNGVYVSDLPFFGGQFIWKANPAIVAKLEEVGALLKHNRIQHSYMHCWRHKTPLIYRATAQWFVGMDVPVDGGATLRERALKAIEETEFVPAWGKQRLHNMIAGRPDWCISRQRNWGVPIPFFLHRETGELHPRTVELIEQ

SEQ ID NO: 161737 - protein, 287 aa, Unknown
  Bacterial polypetide isolated from the Sargasso Sea
KALAYNQSLDYILCEIDNKDILENEKIVIAKELLSSVVKDTDYKIEILKEFKGKEFDGTICSHPFHKIGYNYDVPMLEARFVTTEQGTGIVHCAPSHGPDDFNLCINNGIKAIETVDDDGKYTKHIPIFEGTHIFKANDIIIEKLKELKCLLNNGKLTHSYPHSWRSKAPLVHRATPQWFISMESHKLRDKALKAINETTFYPSKGKERIKAMIETRPDWCVSRQRVWGVPLPIFISKKNGEILIDEEVFENIAKIYEKEGSDCWFEDNFQRLLGDKYKAEDFDKTQ

SEQ ID NO: 161738 - protein, 244 aa, Unknown
  Bacterial polypetide isolated from the Sargasso Sea
YDIPMLEANFVDLEQGTGIVHCAPSHGPDDFNLCLKNNIPSSYTVDNAGLYTKEVPYFTNTHIFKADPLVIEKLKEQNQLLKDDKLNHSYPHSWRSKAPLIYRATPQWFISMEKNSLRNKALKAINDTNFYPKKGKERLLSMIQDRPDWCVSRQRVWGVPLPIFINKKTKEPLRDKKVIDRIAEIYEKEGSDCWFTDEPKKFLGEDYNPNDFEKLNDIVEVWFDSGSTHSFVLEKRKDLKWPAD

SEQ ID NO: 161739 - protein, 279 aa, Unknown
  Bacterial polypetide isolated from the Sargasso Sea
LGTVLSNFEAGQNYQDVQDPAVTVLFKLQDEDKYISAWTTTPWTLPSNLGLCVGKDIDYVEVKDPELQKVIIIAKARLEHYGKKKELEIIKELKGEELKGLKYVPLFPYFEHFKKDGAFQIFNDEYVTTDNGTGIVHLAPSFGEDDNRVMKEAGFNFELCPINDKGEFLNSVVDFAGEYVKSADKGIIKTLKESGKLYEQSVLVHSYPMCPRSDTPLIYRSIPSWYVNVEKIKGDLLKSNSEINWVPSHIKDGRFGKWLEGARDWSISRNRVWGTPIPI

SEQ ID NO: 161740 - protein, 303 aa, Unknown
  Bacterial polypetide isolated from the Sargasso Sea
EAEAQIVRELGKFLLDGSLYQGFKPVLWSTVEKTALADAEVEYLDHTSNTIYVAFKVKKTNKDFLKDASIIIWTTTPWTIPANKALAFNSNIEYSVLEIENLAHFKEKRIVVAKNLIESITKECEIKNYTELRTFKGSEFKGTLCSHPFAKMDFDYDVPMLDAQFVNLEQGTGIVHCAPSHGPDDFNLCLKNNIPSLYTVDNAGVYTKEVPYFTNTHVFKADSIVIEKLKEQNKLLKNDKLNHSYPHSWRSKAPLIYRATPQWFISMQKNKLRDKAVKAISETVFYPNKGKEKLLSMIEGRPD

SEQ ID NO: 161741 - protein, 202 aa, Unknown
  Bacterial polypetide isolated from the Sargasso Sea
MEYKDTIFLPKTSFEMRANLPVKESKILDDWDNQKIFQQLRKKSKGKEKFILHDGPPYANGHIHMGTALNKILKDVIVRTQQMVGKDSIYVPGWDCHGLPIEWKIEEEYRKKGRNKDDVPIVQFRQECREFAEKWISIQKKEFRRLGVEGDWNNPYLTMSNEAEAQIVRELGKFLLDKSLYKGARPVLWSVVEKTALADAEV

SEQ ID NO: 161742 - protein, 284 aa, Unknown
  Bacterial polypetide isolated from the Sargasso Sea
MQTVDIHLGHSVNKILKDITIKFKTLQGFNAPYVPGWDCHGLPIELNVEKKHGKNSELVKNKESFQKACKEYAESQINNQLNDFKRLGVLGDWKNSYKSLDPKFEADIVRSLGIIFSEGHLEKGEKPVHWCQESGSSLAEAEVEYIDKTSKAIDVAFKVDDSSLEKVKELFSSKDLNGIFFVIWTTTPWTIPSNVAVCINPEFEYSLISMQNKFYVIAFDMIDQCSKRWKQKFDVISTIKGKKLIDIDLIHPFIKRKSVLLHADHVTTETGTGLCSYRSCSWHG

SEQ ID NO: 161743 - protein, 37 aa, Unknown
  Bacterial polypetide isolated from the Sargasso Sea
KQDLYEKIRKKYENKELFLLHDGPPYANGGYTSRTFS

SEQ ID NO: 161744 - protein, 281 aa, Unknown
  Bacterial polypetide isolated from the Sargasso Sea
LEGSLYRGFKPVLWSTVEKTALADAEVEYKDHKSNTIYAEFKIKKSDKDFLKDASIIIWTTTPWTIPANKALAYNKEIKYSVIQVNDKKIIVAEKLINSVIKDCNITKFKVLKSFQGDLFKKTICSHPFNKLGYNFDVPMLEANFVTLEQGTGIVHCAPSHGPDDFNLCLKHGMKAIETVNNDGRYTKNIPIFEGIHVFKADEIVIKNLNEQKNLLGSGTLVHSYPHSWRSKAPLVHRATPQWFISMESHKLRIKALKSIDQTAFYPEKGKTRIRAMIETR

SEQ ID NO: 161745 - protein, 269 aa, Unknown
  Bacterial polypetide isolated from the Sargasso Sea
MWPASMYLEGSDQHRGWFHSSLLESCGTRGKAPFKSILTHGFVVDGKGLKMSKSTGNIIAPEDILKKYGADILRTWVAASDYAEDLRLDYSILEQHAESYRKIRNTFRFLLGNLKDQKVSFKLNSKEIEEWPELERYMLHQIFVVNNNFEKYFKEYNFHKLYKELLNFCSLDLSAFYFDIRKDVLYCDDLKSSKRKICTNFLGLTLDILLRWFAPILSFTTEEIFQIVNANKNSSIHLENFPKIPKNWENKKLHEKWEKLKVVRNVVNA

SEQ ID NO: 161746 - protein, 181 aa, Unknown
  Bacterial polypetide isolated from the Sargasso Sea
MSKEHLNLPKTAFSMKANLPNKEPEYLKFWEKISLYKKLRSQSKGKEKFVLHDGPPYANGNIHMGTALNKILKDIIIKFHQMDGKDSVYVPGWDCHGLPIEWKIEEQYKKNKKNKNDVPIIEFRKECRDFASKWIEIHKDQFKRLGVIGDWENYYSTMSFDAEAQNVRELGKFLKEGKVYT

SEQ ID NO: 161747 - protein, 283 aa, Unknown
  Bacterial polypetide isolated from the Sargasso Sea
KEPLRDEKVINHIAEIYEKEGSDCWFTDDPQRFLGKDHNSSDYIQLKDIVEVWFDSGSTHSFVLESRKDLKWPADMYLEGSDQHRGWFHSSLLESCGTRGKAPFKSILSHGFVVDGKGMKMSKSAGNVISPDDILKNFGADILRVWVTASDYAEDLRIDKTILNQHAESYRKIRNTFRFILGNIKDNFQKIDLEDVKTRDLPELERYILHKVYSLNEKYKENLKNYNFHKLYKELLNFCTLDLSSFYFDIRKDVLYCDSLNSKKRKDCVIVLNILLECLLKWF

SEQ ID NO: 161748 - protein, 73 aa, Unknown
  Bacterial polypetide isolated from the Sargasso Sea
MTINYRDTLNLPNTDFSMKAGLPRKEPEILDLWSSTDLYGKIRKKYENKELFLLHDGPPYANGDIHLGHSVNK

SEQ ID NO: 161749 - protein, 312 aa, Unknown
  Bacterial polypetide isolated from the Sargasso Sea
IRDFRAADFVTETEGTGFVHCAPSHGMEEYELYRELGMLAEVITYNVKDDGSFRDDLPFFGGKYILSRKGGEGDANKAVIDKLIEVNGLLARGKIKHSYPHSWRSKAPVIYRNTPQWFASIDREVDDNRDEYGRTIRERALNSIDKLVSWTPQTGRNRLYSMIETRPDWVLSRQRAWGVPLTCFTKKGALPTDSDFLLKNAELNERIAKAFEKEGADAWYLENSKERFLEGIVDPTDYEQVYDILDVWFDSGSTHAFVLKEREDGSDDGLADLYLEGTDQHRGWFHSSMLQSCGTNGRAPYRGVLTHGFTLE

SEQ ID NO: 161750 - protein, 114 aa, Unknown
  Bacterial polypetide isolated from the Sargasso Sea
MPENNLNLPKTAFSMKANLPSKEPKILETWDKTKLYDKLRKKSAGKEKFILHDGPPYANGHIHMGTALNKILKDIVTKFHQMRDKDSIYVPGWDCHGLPIEWKIEEQYKKKKKN

SEQ ID NO: 161751 - protein, 222 aa, Unknown
  Bacterial polypetide isolated from the Sargasso Sea
DILRLWVASSDYAEDLRIDHSILEQHAESYRKIRNTFRFILGNLRDEFKPKDFKKINIKDLPELEQLILHKLYLLNTEVEKNLKNYSFHKLQKDLLNFCALDLSSFYFDVRKDVLYCDEKNSEKRTFCIILLNIILECLLKWYAPVLSFTTEEITELAKKNNKNSIHEEIFPEIPSSWKNEKLNEKWDKLFSIRQKVNISIEEKRSSKIIGSSLEADVNISL

SEQ ID NO: 161752 - protein, 139 aa, Unknown
  Bacterial polypetide isolated from the Sargasso Sea
EADIVRSLGIIYKEGHLEKGEKPVHWCQDCGSSLAEAEVEYIDKTSKSIDVAFKVDERSLNKVKDLFNTKEADEISFVIWTTTPWTIPSNAAVCINPEFKYSLIKMNNKFYVIAFEMADHCKERWKQKFEVISIIEGKN

SEQ ID NO: 161753 - protein, 263 aa, Unknown
  Bacterial polypetide isolated from the Sargasso Sea
MEGFKRWGIWGDWDNPYLTLKKSYESAQIGVFGKMFLNGYIYRGLKPVHWSPSSRTALAEAELEYPEEHYSKSIYVSLKITKISDEVLLKFCDKNPNIKKELFLSNSFITIWTTTPWTIPANEAVAVNPKINYVFAIDEEKRIYLFAKELSSEINNKFNKNFQPLLEVKGNCLEDIEYQHPTKNKNCKIVIGGDYITTESGTGIVHTAPGHGIDDFNVGQKYDLPTTCVVDEKGNLNEFSGQFKGSNVLKDANDLIIENLREN

SEQ ID NO: 161754 - protein, 285 aa, Unknown
  Bacterial polypetide isolated from the Sargasso Sea
MSEKKHSYKQTLNLPKTTFPMRANLSQNETLSIKRWNKQNIYDCLIDQHANNDTFLFHDGPPYANGNIHIGHLLNKVLKDFVVRSQFLLNRHCPFTPGWDCHGLPIEHNVMTRLQEEKNPVFDLPLKEQRIAIRKACQHYAKQFIKAQSKQMQSLLTLADYKKPYLTMSKQFESRCLSVFAKLVKEGIVYRQLKPVHWSLENKTALADAELDYHDKEDTAIFVGFDLLDHVSFYSSYSLSKNLPIRLMVWTTTPWTLPANLAIAVNEHALYCVIEYKNTYYIVAK

SEQ ID NO: 161755 - protein, 77 aa, Unknown
  Bacterial polypetide isolated from the Sargasso Sea
MSKFQINLPKTAFSMKANLPTREPEFLKFWEKINLYRELRNSRKGEEKFILHDGPPYANGNIHMGTALNKILKDIIV

SEQ ID NO: 161756 - protein, 143 aa, Unknown
  Bacterial polypetide isolated from the Sargasso Sea
MTKENLNLPKTSFSMKANLPQKEPGMIEFWDKIDLYKKLREKSKGDKKFILHDGPPYANGHIHMGTALNKILKDIVTKFHQMDGRNSNYVPGWDCHGLPIEWKIEEQYKKNKKNKDDVPIGEFRKECKKFANKWIDVHIKEFK

SEQ ID NO: 161757 - protein, 326 aa, Unknown
  Bacterial polypetide isolated from the Sargasso Sea
EVPIKDFRKECREFAEKWIVIHKKEFKRLGVIGDWENYYSTMSFGAEAQIVRELGKFLKDGSLYRGFKPVLWSTVEKTALADAEVEYKDHKSNTIYAAFEVKKTDKDFLKNTSIIIWTTTPWTIPANKALAYNKDINYVVLDTNKNKIVVAEKLIQSVIESCELSKYKVLETFKGSEFNNTLCSHPFKNLGYEYDVPMLEANFVTLDQGTGIVHCAPSHGPDDFNLCLKHGMKAIETVNNDGLYTKNIPIFEGTHVFKADEIIIKNLKEQNNLLGSGSLMHSYPHSWRSKAPLVHRATPQWFISMESHELRKKAIDSIDKTAFYPE

SEQ ID NO: 161758 - protein, 263 aa, Unknown
  Bacterial polypetide isolated from the Sargasso Sea
VVQECKIKDFKKLKKFKGKEFKGTVCKHPFFKLGYDYEIPMLEARFVTTEQGTGIVHCAPSHGPDDFNLCINNGIKAIETVDGDGKYTNNVALFEGIHIFKSNPIVIEKLKEQKKLLFNGELVHSYPHSWRSKAPLVHRATPQWFISMDSHELRSKALKAIDETIFYPSKGKERLKSMIETRPDWCVSRQRVWGVPLPIFINKKTSEILIDDNVFENIAKIYENEGSDCWFSDDSQKFLGDKYKAEDFDKLSDIVEVWFDSGS

SEQ ID NO: 161759 - protein, 267 aa, Unknown
  Bacterial polypetide isolated from the Sargasso Sea
DGPPYANGHIHMGTALNKILKDIITRFHQMKGKDSVYVPGWDCHGLPIEWKIEEQYKKNKKDKNQVPIKDFRLECREFAEKWIKIHIGEFTRLGVVGDWENYYSTMSFDAEAQIVRELGKFLLDGSLYQGYKPVLWSTVEKTALADAEVEYKDHTSNTIFVGFKVKTSKINLLKNAEIIIWTTTPWTIPANKALAYNKDLDYSIIEINLPSENFDNKKIVIATELLDQVSKDCELGTYKVIEKIKGRDFNGTICSHPFESLGYQYEV

SEQ ID NO: 161760 - protein, 229 aa, Unknown
  Bacterial polypetide isolated from the Sargasso Sea
ALADAEVEYKDHKSNTIYAEFQIKKTDKDFLNDASLVIWTTTPWTIPANKALAYNQNLNYSLLQFDNKKIVIAEKLINSVVDNCGLGKFKILKTFEGKIFKNTICSHPFKNLGYKFDVPMFEADFVTLEQGTGIVHCAPSHGPDDFNLCLKHGMKAIETVNNDGRYTKNIPIFEGIHVFKADEIIIKNLTEQKNLLGSGSLVHSYPHSWRSKAPLVHRATPQWFISMES

SEQ ID NO: 161761 - protein, 316 aa, Unknown
  Bacterial polypetide isolated from the Sargasso Sea
MNKSVPYKTVLTHGFVVDEKGRKQSKSLGNVVSPQKVWDTLGADILRLWVASTDFRSEMVASDEILKRTSDQYRRIRNTFRFILGNLSDFSDKDKVMFEDQVELDKWIINEIKTLQKEVISLYESFSYHKAIQRIHNFCVNELGGVYLDIIKDRLYTCKNDSLARRSCQTSLDRILNILVRLISPILSYTAEEIWQTSNRLNSQEDSVFLSNFDNFEEESKSNINQSEWKRIFEIKDAVNQTIEEMRNENTIKGSLDSIVDIKATADDMSVLKKLGEELHFLFISSEANLSKGNSFKIRVNPSNNTKCVRCWHRCS

SEQ ID NO: 161762 - protein, 311 aa, Unknown
  Bacterial polypetide isolated from the Sargasso Sea
INCNVVIWTTTPWTMPGNRAVAFGKHFEYSLIQVKSVLEDSLAIVNDKIIIASDLIETFLSETKVIDFELVSKISLKDFEGLVLRHPLYELGYDFDVPLLEADFVTTEQGTGFVHIAPGHGSDDFDLGVKNSLPVIETVEDDGYLKNNLPLFGGLHVLRDNEKIADLMVEQKALIGRGSLVHSYPHSWRSKAPLIFRTTPQWFISMEKNDLRKLALKGINDTKFFPDQGANRLYSMIKDRPDWCVSRQRAWGVPIAIFYHKETLEPLRDEKVLNRVVEAFRKEGADAWFSKPEKYFLGDDYNPEDYIKVND

SEQ ID NO: 161763 - protein, 290 aa, Unknown
  Bacterial polypetide isolated from the Sargasso Sea
IDRIASIYEKQGSDCWFTDDANIFLGDDYDAKDYEKLNDIVEVWFDSGSTHSFVLEKRKDLKWPADMYLEGSDQHRGWFHSSLLESCGTRGKAPFKSILSHGFVVDGKGMKMSKSMGNVISPEDILKNYGADILRVWASASDYAEDLRIDKNILIQHAESYRKIRNTFRFMLGNLKDNFEKQNFEKIKLNEFDELEQFILHKLFLLNKTVDENLKNYNFHKLYKELLNFCTLDLSSFYFDIRKDVLYCDSIKSKKRRNCVIVLNIILESLLKWFAPILVFTTEEIYSLVN

SEQ ID NO: 161764 - protein, 180 aa, Unknown
  Bacterial polypetide isolated from the Sargasso Sea
MSDNNLQLPKTSFSMKANLPSKEPKILEFWDNTKLYERLRKKSSGKEKFVLHDGPPYANGHIHMGTALNKILKDIVTKFHQMNNKDSIYVPGWDCHGLPIEWKIEEEYKKKKKNKDEVPTKDFRKECRDFAEKWIVIHKKEFKRLGVIGDWDNYYSTMSFDAEAQIVRELGKFLLEGKFI

SEQ ID NO: 161765 - protein, 196 aa, Unknown
  Bacterial polypetide isolated from the Sargasso Sea
TQSEFRDLCREYAKKQIAIQKDDFVRLGVFGDWDKSYASLDQNFEGDAINGFARIFHNGHVEKGFKPVHWCPECSSSLAEAEVEYIDKNSTAIDVKFKFDENSTENLINKLKLDKKKNISLVIWTTTPWTIPGNQAVCFNADIDYQVIDSGEEYLLVAVELCEQCLDRWNNDSYKATKIKFKGSELEGLKSLHPLL

SEQ ID NO: 161766 - protein, 305 aa, Unknown
  Bacterial polypetide isolated from the Sargasso Sea
MVLKGHIYRGLKPVHWSPSSRTALAEAELEYPDGHTSPSVYVAFPAVELPAALRDAVKQEGLDLPSDPKALGEGLQVAIWTTTPWTLPANLAVSVNERLDYALAEDGAGRLLLVAADLIESLSTTLERPLKHRATVKGALLAGLIYRHPLLDRTSPVVIGGEYITTESGTGLVHTAPGHGVDDFHTGQKHGLPVLCPVDEAGTLTAEAGPFAGLNVLKDANPGIIEALEQTGALLKQEAYSHRYPYDWRTKKPTIFRATEQWFASVEGFRQDALDAIDQVQWTPASGRNRIEAMGRSGGTGASPA

SEQ ID NO: 161767 - protein, 282 aa, Unknown
  Bacterial polypetide isolated from the Sargasso Sea
KSDERKNLDTLNLRKKATDYAYIQINNQMEGFKRWGIWGDWENPYLTLKKSYESAQIGVFGKMFLNGYIYRGLKPVHWSPSSRTALAEAELEYPDEHYSKSIYVSLKITKISEEILLNFNQENFNFKKDFFQNNSFITIWTTTPWTIPANEAVAVNPKIKYVFAIDEEKQIYLFAKDLSSELSKKFNKDFKELLEVKGSKLENIEYQHPSKNKDCKILIGGDYITTESGTGIVHTAPGHGIDDFNVGQKYDLPITCVVDEKGNLNEYSGQFTGSNVLKDAND

SEQ ID NO: 161768 - protein, 270 aa, Unknown
  Bacterial polypetide isolated from the Sargasso Sea
MEIKSLDTIDDHGRYTKHIKKFEGIHIFKADQIVIEKLKECKKLLANGKLTHSYPHSWRSKAPLVHRATSQWFISMEKKDLRKKALKAIDETNFYPARGRDRIRSMIETRPDWCVSRQRIWGVPLPLFVSKKTKEPLKDPDVIENIAKIFEKEGADCWFTDDPQKFLGKKYKKEDYTKSNDIVEVWFDSGATHSYVLEKRKDLTWPASMYLEGSDQHRGWFHSSLLESCGTRGKAPFKSILTHGFVVDGKGLKMSKSTGNIIAPEECSQK

SEQ ID NO: 161769 - protein, 313 aa, Unknown
  Bacterial polypetide isolated from the Sargasso Sea
ENSYKEHCLNKILKDIIIKYNSIIGKGIDYIPGWDCHGLPIEHQVSKKIKDKNISKSKIRDLCEEFALSFVSIQKEEFKRLGIFADWDKPYLTINPEFETNQIDVFWNMYSKGYIYRGLKPVNWSPSSRTALAEAELEYPDNHISKSVYVKFKIENSIDFLGDFQESLFLIVWTTTPWTLPANKAVAINKSFEYGIYKTDNNYVIIEESLSQKLEEKLGKKFILFKKINGNELTNLKYLSPLTGEVSPIVAADYVTKESGTGLVHTAPGHGSDDYNTGIKNNLEIYSPVDSAGRFTEDAGDGLTGLNVLKEGN

SEQ ID NO: 161770 - protein, 288 aa, Unknown
  Bacterial polypetide isolated from the Sargasso Sea
FEDNFQRLLGDKYNAEDFDKTSDIVEVWFDSGSTHSFVLEKREDLKWPASMYLEGSDQHRGWFHSSLLESCGTRGRAPFESILSHGFVVDGKGLKMSKSTGNVIAPEDILKKYGADILRIWVASSNYAEDLRIDYSILDQHSESYRKIRNTFRYLLGNIQDEYSKVDFDKIDLNNIPELEKYILHRLYVIDERFNEYFKSYNFHNLYKELLNFCTVELSAFYFDIRKDLLYCDPKVSKKRSDCILILKVILECLLKWFAPILSFTTEEIYHLIYKEDENGSIHLQKFV

SEQ ID NO: 161771 - protein, 312 aa, Unknown
  Bacterial polypetide isolated from the Sargasso Sea
KDVVKVWFDSGSTHSYVLEAREDLHWPASMYLEGSDQHRGWFHSSLLESCGTRDKAPFESILSHGFVVDGKGRKMSKSVGNVISPDEIINKYGADILRIWVVASDYSEDLKIDNQIINYQIDSYRKIRNTLRFLLGNLNNFNKQNLVDPDEMPELERYLLTRISSLNEKLKELVSNHDYHAIYTALLNFCTLELSAFYFDIRKDSLYCDDIKSTKRRSTSTCLHIIFEFLTKWLSPIVSFTCEEAWKSRSYNNEESILLQNVKDDEFIYKDISLEKVFEELKRVRKSVTSALELKRNEKLIGSSLQAKVILF

SEQ ID NO: 161772 - protein, 66 aa, Unknown
  Bacterial polypetide isolated from the Sargasso Sea
MSKNNINLPKTAFSMKANLQNKEPGIIDYWDKIDLYKKLRSSSKGKTKFVLHDGPPYANGDIHMGN

SEQ ID NO: 161773 - protein, 251 aa, Unknown
  Bacterial polypetide isolated from the Sargasso Sea
MEYKDTIFLPKTSFEMRANLPSKEPAIIEEWDKENIFKKLRDKSKGREKFVLHDGPPYANGHIHMGTALNKILKDVIVRTQQMAGKDSIYVPGWDCHGLPIEWKIEEEYRKKGKNKDDVPTVQFRNECREFAEKWIDIQKKEFRRLGVEGDWENPYLTMSNQAEAQIVRELGKFLLDESLYKGAKPVLWSVVEKTALADAEVEYEDHTSNTIYVKFLIKNSTDKDLIDSNIVIWTTTPWDNFRVTELWAYG

SEQ ID NO: 161774 - protein, 288 aa, Unknown
  Bacterial polypetide isolated from the Sargasso Sea
SAQEAVAKLGVKGYNDECRSIVQRYVAEWRSTITRLGRWVDFDDDYKTMDPWYMESVWWVFKQLWDKGLVYKGFKVMPISTALGTPLANFEVSQNYRDVQDPAVTVLFKIKDHERYLAAWTTTPWTLPSNLAVCVGDEIDYVLVRDESTAKNIYFAEELLTHYGDFEILERVKGSDLVGLQYEPLFDYFADQQTEGGFVVVSDDYVTTDGGTGLVHQAPAFGEDDYRVLNENDIDAFVCPVGLDGRFNESVTDFSGMHVKDADKLIIEFLKQRGSLYRQEVIQHSYPF

SEQ ID NO: 161775 - protein, 94 aa, Unknown
  Bacterial polypetide isolated from the Sargasso Sea
MPENNLNLPKTAFSMKANLPSKEPKILESWDKTKLYKKLRKNSEGKEKFILHDGPPYANGHIHMGTALNKILKDIVTKFHQMNNKDSIYVPGWD

SEQ ID NO: 161776 - protein, 280 aa, Unknown
  Bacterial polypetide isolated from the Sargasso Sea
KFLKEGSLYKGYKPVLWSTVEKTALADAEVEYQDHVSDTIYAVFPVKKSNIKELIGSNVVIWTTTPWTIPANKALAYNQSLDYILCEIDNKDILENKKIVIAKELLASVVKDTEYSIKILKEFKGKEFNGTICSHPFHKIGYDYDVPMLEARFVTTEQGTGIVHCAPSHGPDDFNLCINNGIKAIETVDDDGRYTKHIPIFEGTHIFKANDIVIEKLKELKSLLNNGKLTHSYPHSWRSKAPLVHRATPQWFISMESHNLRDKALKAINDTTFYPGKGKE

SEQ ID NO: 161777 - protein, 301 aa, Unknown
  Bacterial polypetide isolated from the Sargasso Sea
VLCSTVEKTALADAEVEYKDHTSNTVYVGFKVKNSKIDSLKGSEIIIWTTTPWTIPANKALAFNKNLDYSIVEINSDLGNLDNKKIVVATQLLDQVLKECEIGGHKLIKKIKGKDFEGTVCSHPFEKLGYQYDIPMLEANFVTLEQGTGIVHCAPSHGPDDFNLCLKHGIKSLDTIDDTGRYTKHIEKFEGIHIFKADQIIIEKLKECKKLLANGKLTHSYPHSWRSKAPLVHRATSQWFISMEKKDLRKKALQAINDTDFFPERGRDRIRSMIETRPDWCVSHQRIWGVPLPLFVSKKTK

SEQ ID NO: 161778 - protein, 266 aa, Unknown
  Bacterial polypetide isolated from the Sargasso Sea
NHPFFKIGFDYDIPLLEALFVTTEQGSGIVHCAPSHGPDDFNLCLKNNIKAQETVDDDGKYTKHVPLFEGTHIFKANKIIIDKLKEQKKLLANGELVHQYPHSWRSKAPLVHRATPQWFISMESHGLRTKALKAIDDTNFYPKKGKERLKSMIEIRPDWCVSRQRVWGVPIPVFISKKTNEVLIDDEITKNIAEIFEKEGADCWFDKDVKKFLGNKYKSEDYEKMTDIVEVWFDSGATHSYVLEKRKDLKWPASMYLEGSDQHRGW

SEQ ID NO: 161779 - protein, 246 aa, Unknown
  Bacterial polypetide isolated from the Sargasso Sea
MPENNLNLPKTSFSMKANLPSKEPKILETWDKIKLYERLRKKSEGKTKFVLHDGPPYANGHIHMGTALNKILKDIITKFHQMSDKDSIYVPGWDCHGLPIEWKIEEQYKKRKKNKDEVPIKDFRKECREFAEKWILIHKKEFKRLGVIGDWENYYSTMSYDAEAQIVRELGKFLKEGSLYRGFKPVLWSTVEKTALADAEVEYKDHKSNTIYAAFEVKKTDKDYLKKYFCYYLDYHTLGRYQQIKH

SEQ ID NO: 161780 - protein, 313 aa, Unknown
  Bacterial polypetide isolated from the Sargasso Sea
MYQGYTIQPYSPAAGTGLSSAEVNMEGCYQDVKDTTVVAQFKVISPEFKDTWGVEGDVHILAWTTTPWTLPSNTALCVGPKIEYSLVKSFNQYTGESIQVIIGAPLVEKQFSGKFFAVDSEEDLVFEEGDKKIPFFVDKKFLGNDLVGIRYEQLIKGCLPYQDAEKAFQVIKGDFVTTEDGTGIVHIAPTFGADDALVAKEAGVPPMLILDKKDNPVPLVDLTGRFVKELGGELGGMFVKNEYYDEVDCPDKSADVLIAIQLKTENKAFKVEKYEHSYPHCWRTHKPVLYYPLDSWFIKATEVKSRMTQLNNT

SEQ ID NO: 161781 - protein, 160 aa, Unknown
  Bacterial polypetide isolated from the Sargasso Sea
MSKSQINLPKTAFSMKANLPIREPEILEYWKKINLYEKLRINSKSKEKFVLHDGPPYANGNIHMGTALNKILKDIIVKFHQMDGKDSIYVPGWDCHGLPIEWKIEEQYKKNKKNKNEVPIVEFRKECRSFAEKWIEVHKIQFKRLGVVGDWEKYYSTMSF

SEQ ID NO: 161782 - protein, 305 aa, Unknown
  Bacterial polypetide isolated from the Sargasso Sea
FGSDILRLWVASTDSSSEMNVSEEILNRTSDKYRKIRNTIRFLLSNISDYDNEKFSHEAVTVELDKWIIKKAVETQKEVQRHYEQYNFHLLTQVIHGFCVNELGAFYLDVIKDRQYTCKKNSKERISAQQSMYFLTKMLLTWIAPICPHTAEEAWQHIPKNNKGSIFLNNWFDLDINNLAQCSISETNWNDILEVKKAVSKALEEKRTENIIGSSLDADIIIYCSRDLYNTLNALNGELKFIFITSNASLRSIDEKESLNNISINNHLLAIDIKNSNNKKCERCWHKCKTVGMNKKYGNICHRCI

SEQ ID NO: 161783 - protein, 165 aa, Unknown
  Bacterial polypetide isolated from the Sargasso Sea
MSNSQINLPKTAFSMKANLPVREPEILEYWQKINLYRELRNSSKGKEKFVLHDGPPYANGNIHMGTALNKILKDIIVKFHQMDGKDSIYVPGWDCHGLPIEWKIEEQYKKNKKNKNDVPIVEFRKECRLFAEKWIEVHKGQFKRLGVVGDWENYYSTMSFDAEAQ

SEQ ID NO: 161784 - protein, 306 aa, Unknown
  Bacterial polypetide isolated from the Sargasso Sea
ATDFYFKKTGEVLVDDEVFENIAKIYEKEGSDCWFNEDYQIFLGDKYKAEDYEKLSDIVEVWFDSGSTHSFVLEKRDDLKWPASMYLEGSDQHRGWFHSSLLESCGTRGVAPFESILSHGFVVDGKGLKMSKSTGNVIAPQDILKKYGADILRIWVASSNYAEDLRIDYSILDQHAESYRKIRNTFRYLLGNIQDQYENLDFEKVKFENFDSLEKFMLHRIYIINENFKNNFKVYNFHNLYKELLNFCTVELSAFYFDIRKDTLYCEALNSEKRKNCITLLNIILQCLLKWFAPILSFTTGRNFIN

SEQ ID NO: 161785 - protein, 286 aa, Unknown
  Bacterial polypetide isolated from the Sargasso Sea
KEILKFLKNGGLYKGYKPVLWSVVEKTALADAEVEYKDKVSNTIYAKFKINKKFKNHDNISVVIWTTTPWTIPCNRALCYNSKYNYTILNISHNNIEEKLIVATDLIDNFIKENEIKKYKKIETFIGSEFNNTKCIHPFKEYGYDFEVPMLDGEYVTLEQGTGIVHIAPSHGPDDFHLSLKNKILVENTLEDDGTYTDKIKKFKGVHIYKADKIVIDELKKTSSLISAGEYKHSYPHSWRSKAPLVHRATPQWFISMEKNNLRSSALKAIGKTSFYPEIGKNRLEG

SEQ ID NO: 161786 - protein, 257 aa, Unknown
  Bacterial polypetide isolated from the Sargasso Sea
VFLGNEYDPNDYDKLNDIVEVWFDSGSTHSFVLEKRKDLNWPADMYLEGSDQHRGWFHSSLLESCGTRGRAPFKSILSHGFVVDGKGMKMSKSMGNVISPEDILKNYGADILRVWASASDYAEDLRIDKNILIQHAESYRKIRNTFRFMLGNLKDKFEKQDFKKIQINKMDELEQFILHKLFIIGQSVDENLKNYNFHKLYKDLLNFCTLDLSSFYFDIRKDVLYCDSLNSSKRKNCVVVLNIILESLLKWFAPNFG

SEQ ID NO: 161787 - protein, 208 aa, Unknown
  Bacterial polypetide isolated from the Sargasso Sea
MNHSYPHSWRSKAPLVHRATQQWFISMESHKLRSKALKAINDTDFYPAKGKERLRSMIETRPDWCVSRQRVWGVPLPIFIYKSDGKVLVDEDVFENIANIYEKEGSDCWFSDDPQKFLGSKYKADDFVKLKDIVEVWFDSGSTHSFVLEKRKDLKWPASMYLEGSDQHRGWFHSSLLESCGTRDRAPFESILSHGFVVDGKGLKMSKS

SEQ ID NO: 161788 - protein, 326 aa, Unknown
  Bacterial polypetide isolated from the Sargasso Sea
DGDDPYLTMSNQAEAQIVRELGKFLLDESLYKGAKPVLWSVVEKTALADAEVEYEDHTSNTIYVKFLISNSDDKDLVGSNIVIWTTTPWTIPGNRALAYGNDLDYCIIKVDKVENSSLAKVGDKLIFAADLLDNVSNEIGIIKYSIVKKFKGSNLATCECNHPFKDIGYNFIVKPFHGEFVNLDQGTGIVHIAPGHGDDDYILGIKNNIDIIQTVEDDGKYNHHAIGFEGEHVYKVDQKIADKLKEFSKLLFQGTLRHSYPHSWRSKAPLIYRNTPQWFISMEKNGLREIALKSIDETIFYPSQGQKRLRSMIETRPDWCVSRQRV

SEQ ID NO: 161789 - protein, 196 aa, Unknown
  Bacterial polypetide isolated from the Sargasso Sea
VARRSCQTALFHIVEALVRWMAPIMSFTADEIWGYLPGSREKYVFTGEWYEGLFGLADDEAMNDDFWDDLLQVRGEVNKVIEQARADKLVGGSLEAAVTLYADADLAAKLNALGSELRFVLLTSGATVADYAQAPADAWQSELLKGLKVVLSKAEGEKCPRCWHYTSDVGKVAEHAEICGRCVSNVAGDGEKRKFA

SEQ ID NO: 161790 - protein, 274 aa, Unknown
  Bacterial polypetide isolated from the Sargasso Sea
KIDDFEGNKIIVANDLIESFISACKIKNFKKLKTFKGKEFKGTICSHPFFKLGFDYEVPMLSANFVDTEQGTGIVHCAPSHGQDDFNLCLQNNIPSKYTVDDSGRYTKEIPFFENLHIFKADEEVIKKLKEEKSLLSSDKLQHSYPHSWRSKAPLIYRATPQWFISMEKKSLREKAIKSINETEFFPKKGKGRLMSMIETRPDWCVSRQRVWGVPLPIFINKKTNEPLRDQNVINRIAELYEQEGSDCWFTDDPQKFLGKKYKADDYNQLKDIV

SEQ ID NO: 161791 - protein, 136 aa, Unknown
  Bacterial polypetide isolated from the Sargasso Sea
MEYKDTLFLPKSSFEMRANLPSKEPKILEDWDKQNIYKNLREKSLGKEKFVLHDGPPYANGHIHMGTALNKILKDVIVRTQQMSGKDSIYVPGWDCHGLPIEWKIEEQYKKIGKNKDTIPIIQFRKECREFAEKWI

SEQ ID NO: 161792 - protein, 323 aa, Unknown
  Bacterial polypetide isolated from the Sargasso Sea
MLLSENLEKISLKHPLSSAKDANGEWDDIRDFRAADFVTDTEGTGFVHCAPSHGMEEYELYRELGRLDQVITYNVKDDGSFRDDLPFFGGKYILSRKGGEGDANKAVIDKLIEVNGLLARGKIKHSYPHSWRSKAPIIYRNTPQWFASIDRAVGDSKDEFGRTIRERALNSIDKLVSWTPQTGRNRLYSMIETRPDWVLSRQRAWGVPLTCFTKKGALPTDSDFLLKNTAVNERIAKAFENEGADAWYLENSKERFLKGIVDPKEYEQVYDILDVWFDSGSTHAFVLKEREDGPDDGLADLYLEGTDQHRGWFHSSMLQSCGT

SEQ ID NO: 161793 - protein, 230 aa, Unknown
  Bacterial polypetide isolated from the Sargasso Sea
MSKENINLPKTKFSMKANLPAKEPEMVEHWEKIGLYKQLRESRKGKEKFVLHDGPPYANGNIHMGTAYNKILKDLITKFHQMDGKDSVYVPGWDCHGLPIEWKIEEQYKKNKKNKNDVPISEFRKVCRDFAAKWIDVHKTQFKRLGVIGDWDNYYSTMSFDAEAQIVRELGKFLKEGSLYRGYKPVLWSTVEKTALSDAEVEYMDHTSDTIYVSFPIKKTNIEYLNECEI

SEQ ID NO: 161794 - protein, 78 aa, Unknown
  Bacterial polypetide isolated from the Sargasso Sea
MSKENLNLPKTAFSMKANLPQKEPSLIDFWDKINLYQNLRDESKGKEKFILHDGPPYANGNIHMGTALNKILKDIITK

SEQ ID NO: 161795 - protein, 139 aa, Unknown
  Bacterial polypetide isolated from the Sargasso Sea
MSKDNLQLPKTAFSMKASLPTKEPLILEKWEKNKIFEKLRKSSKGKEKFILHDGPPYANGHIHMGTALNKILKDMIIRFHQMNEKDSVYVPGWDCHGLPIEWKIEEEYKKKKKNKDEVPIKDFRQECREFAKKWIQVHI

SEQ ID NO: 161796 - protein, 108 aa, Unknown
  Bacterial polypetide isolated from the Sargasso Sea
MEYKNTIFLPKTSFEMRANLPTKEPKILDEWDKTNIYKELRKKSKGKEKFVLHDGPPYANGHIHMGTALNKILKDVIVRSQQMIGKDSIYVPGWDCHGLPIEWKIEEQ

SEQ ID NO: 161797 - protein, 226 aa, Unknown
  Bacterial polypetide isolated from the Sargasso Sea
MEYKDTIFLPKTSFEMRANLPAKEPEIIEEWDKENIFKKLRDKSKGREKFVLHDGPPYANGHIHMGTALNKILKDVIVRTQQMAGKDSIYVPGWDCHGLPIEWKIEEEYRKKGKNKDDVPTVQFRNECREFAEKWIEIQKKEFRRLGVEGDWENPYLTMSNQAEAQIVRELGKFLLDESLYKGAKPVLWSVVEKTALADAEVEYEDHTSNTIYVKFLIKNSTDKDL

SEQ ID NO: 161798 - protein, 184 aa, Unknown
  Bacterial polypetide isolated from the Sargasso Sea
MEYKDTIFLPKTSFEMRANLSKKEPKIIEDWDNENIFKKLRIKSKGREKFILHDGPPYANGHIHLGTALNKILKDVIVRTQQMAGKDSIYVPGWDCHGLPIEWKIEEEYRKKGKNKDDVPIVQFRNECREFAEKWIQIQKKEFRRLGVEGDWDNPYLTMSNQAEAQIVRELGKFLINKSLYKGA

SEQ ID NO: 161799 - protein, 191 aa, Unknown
  Bacterial polypetide isolated from the Sargasso Sea
MSKFQINLPKTAFSMKANLPTREPEILKLWQKINLYDELRKSRKGEEKFVLHDGPPYANGNIHMGTALNKILKDIIVKFHQMDGKDSVYVPGWDCHGLPIEWKIEEQYKKNKKNKNEIPVVEFRKECRAFAEKWIKVHKDQFKRLGVVGDWDNYYSTMSYDAEAHIVRELGKFLKEGSLYRGFKPVLWSTV

SEQ ID NO: 161800 - protein, 344 aa, Unknown
  Bacterial polypetide isolated from the Sargasso Sea
KKRFLGEEYNEEDYEKLNDIVEVWFDSGSTHSFVLEKRGDLKWPADMYLEGSDQHRGWFHSSLLESCGTRGKAPFESILSHGFVVDGKGMKMSKSAGNVILPEEILKKYGADILRVWVASSDYSEDLRIDKIILEQHAESYRKIRNTFRFLLGNLKDNFEPTDLKKLNIQELPELERYILNRIFNVNETINKNFKIYNFHKMYKELLSFCTLDLSSFYFDIRKDCLYCDDVNSKKRKDCIIVLNVILETLLKWFAPILVFTTEEIYNLIKKDNKSIHEHEFLQIPKSWANLNLNDKWESLNKIKQAVNIAIEEKRSKKVIGSSWKQKLKSFLIKRIMTYLKIWI

SEQ ID NO: 161801 - protein, 478 aa, Unknown
  Bacterial polypetide isolated from the Sargasso Sea
MGFKESKNFSLNSIAKEIEDFWAKNDVFIKSSNRDNRESFVFFEGPPSANGKPGIHHVMARTIKDAFCRYKTIKGFNVKRKAGWDTHGLPVELGVEKELGISKDDIGNKISVSEYNRACKEAVMKYTSNWESLTKEMGYWIDMSDPYVTFDSKYMESVWWIIKEIYNKNLIYKGYTVQPYSPAAGSGLSSHELNQPGAYRDISDTSVVAQFKSIKERLPNEFINLYPFYFLAWTTTPWTLPSNTALTIGKKIKYSFVKTYNQYTKELVTVVIASKLIDKIFSKIFYEVKTEKELKSYNTEKRDIPYLICHEVSGKSLENIRYERIWEESPLPLDNPENAFRVISGDFVTTDDGTGIVHTAPTFGADDYKAAKSAKPEVPPLQVLDKNGIKVPLVDLKGKFIDGIGLISGKYVKNEYYESDCIPEKSVDVEISIRLKELNRAFKVEKYSHSYPHCWRTDKPVLYYPMESWFIKMDSLSK

SEQ ID NO: 161802 - protein, 401 aa, Unknown
  Bacterial polypetide isolated from the Sargasso Sea
MIIKKLLGNKYKAEDFNKLSDIVEVWFDSGSTHSFVLEKRADLKWPASMYLEGSDQHRGWFHSSLLESCGTRGKAPFESILSHGFVVDGKGLKMSKSQGNVIAPEDILKKYGADILRIWVASSNYAEDLRIDYSILDQHAESYRKIRNTFRFLLGNIKDEYEEYDFNNLEIVNLPDLEKYMLHRLAKVNQSFHKNFQSYNFHQLYKELLNFCTVELSAFYFDIRKDLLYCDPINSDKRSDCIKVLNIILQCLLKWFAPILSFTTEEIFKLLNQNSNKQSIHLENFIKMPSNWFNQNIEHKWDNIKKIRDEANISIETKRASKEIGSSLEAKILIKLNKDLYNVTKNENFSEICITSESKIVEDQNTDKEVEVITEKAEGSKCSLCWKIKSKKCERINCQIS

SEQ ID NO: 161803 - protein, 167 aa, Unknown
  Bacterial polypetide isolated from the Sargasso Sea
MSKEYLNLPKTAFSMKANLPNKEPEYLKFWDKINLYEKLRSQSKGKEKFVLHDGPPYANGNIHMGTALNKILKDIIIKFHQMDGKDSVYVPGWDCHGLPIEWKIEERYKKNKKNKNDVPIIEFRKECRDFASKWINIHKDQFKRLGVIGDWENYYSTMSFDAEAQIV

SEQ ID NO: 161804 - protein, 228 aa, Unknown
  Bacterial polypetide isolated from the Sargasso Sea
MTKSQINLPKTAFSMKANLPTREPEILEYWKKINLYNELRNQSKGREKFVLHDGPPYANGNIHMGTALNKILKDIIVKFHQMDGKDSIYVPGWDCHGLPIEWKIEEKYKKNKKNKNEVPIVEFRKECRTFAEKWIEVHKSQFKRLGVVGDWENYYSTMSFNAEAQIVRELGKFLKEGSLYKGFKPVLWSTVEKTALADAEVEYQDHKSDTIYTSFKVKSSNLKDLVWK

SEQ ID NO: 161805 - protein, 250 aa, Unknown
  Bacterial polypetide isolated from the Sargasso Sea
MEIKDTLNLPETKFPMKASLTKAEPQMLEWWAKEKIYEEIRESSKGNEKFVFHDGPPYANGHIHMGHALNKVLKDFIVKIMGMKGYDAGFIPGWDCHGLPIEHQVGKKLKEKKMSLEKSAIRKQCRSYAQDFVSIQRDEFKRLGIFADWENPYLTMDYSYESTIVREFGKFVEKGMVYKGLKPVHWCTSCRTALAEAEVEHGDHTSPSIYVKFEIKSGVPNNMGGDLGKAYMVIWTTTPWTLPANLAISL

SEQ ID NO: 161806 - protein, 378 aa, Unknown
  Bacterial polypetide isolated from the Sargasso Sea
WFDSGSTHSFVLEKREDLKWPASMYLEGSDQHRGWFHSSLLESCGTRGRAPFESILSHGFVVDGKGLKMSKSTGNVIAPEDILKKYGADILRIWVASSNYAEDLRIDYSILDQHSESYRKIRNTFRYLLGNIQDEYSKIDFDKINLNNIPELEKYMLHRLYVIDESFNEYFKSYNFHNLYKELLNFCTVELSAFYFDIRKDLLYCDPKDSKKRSDCILILKVILECLLKWFAPILSFTTEEIYHLIQKEDDKGSIHLQKFVKIPNKWKNEELNDKWNKLKLIRDEANISIESKRADKIIGSSLEANIEIKIKDKDMYSLAQNHDFSEICITSSASILNDNNLEKEIEITSSKAVGNKCPVCWKIRENICERDGNCHLS

SEQ ID NO: 161807 - protein, 308 aa, Unknown
  Bacterial polypetide isolated from the Sargasso Sea
MSKSLGNIIAPEDILKKYGADILRIWVAASDYAEDLRIDYSILEQHAESYRKIRNTFRYILGNLNDKFEKVDFEKINARNFPELEQFMLHKIYNLNILFEKNFEKYNFHTIYKEIINFCTSDLSAFYFDIRKDALYCDSLESKKRISTIEFLNIVLEILLKWFAPVLSFTTEEIHSLLKINEKGSIHLEKFPSIPSNWNNPDLNNKWTELIKIRDKCNSSIELKRASKEIGSSLEANLKILLNDKLIQLSKGTDFSELCITSGADVDKIKKDDGEEIIVETNKAVGKKCSVCWKIKEDKCERHGCVIK

SEQ ID NO: 161808 - protein, 160 aa, Unknown
  Bacterial polypetide isolated from the Sargasso Sea
MSKENLNLPKTSFSMKANLPSKEPGFIEYWDKIKLYEKLRESTKGKEKFVLHDGPPYANGNIHMGTALNKILKDIITKFHQMDGKDSVYVPGWDCHGLPIEWKIEEQYKKNKKNKNEVPITEFRKECREFANKWIKVHKDQFKRLGVIGDWENYYSTMSS

SEQ ID NO: 161809 - protein, 125 aa, Unknown
  Bacterial polypetide isolated from the Sargasso Sea
MEDYAVCKENGIDVLNPVKGNGTYSEDVEHFAGQFVFKANDNITNLLEERGVLLSKSSYEHSYPHCWRHKTPVMFRATPQWFISMEKKDLLKQSQDSVDSVKWAPTWGSSQNEFNAGRTSRLVYF

SEQ ID NO: 161810 - protein, 236 aa, Unknown
  Bacterial polypetide isolated from the Sargasso Sea
MSKEHINLPKTKFSMKANLPNKEPNYIEFWKKIDLYNLLRQKSKGQEKFVLHDGPPYANGNIHMGTALNKILKDIITKFHQMDGKDSVYVPGWDCHGLPIEWKIEEQYKKNKKNKNDVPIIEFRKECREFANKWIDVHKGEFTRLGVIGDWENYYSTMSFDAEAQIVRELGKFLKEGSLYRGYKPVLWSTVEKTALADAEVEYMDHVSDTIYAAFKVKVSNLDIIDGADVIIGRQL

SEQ ID NO: 161811 - protein, 191 aa, Unknown
  Bacterial polypetide isolated from the Sargasso Sea
MSKDTLQLPKTAFSMKASLPTKEPEILKNWEKNKIFEKLRKKSKGKEKFILHDGPPYANGHIHMGTALNKILKDMITRFHQMNGKDSVYVPGWDCHGLPIEWKIEEQYKKKKKNKDEVPIKDFRQECREFAESWIDIHIKEFKRLGVVGDFENYYSTMSFEAEAQIVRELGKFLLDGSLYQGFKPVLWSTV

SEQ ID NO: 161812 - protein, 117 aa, Unknown
  Bacterial polypetide isolated from the Sargasso Sea
MSKEHLNLPKTAFSMKANLPNKEPEYLNYWDKINLYEKLRSQSKGKEKFVLHDGPPYANGNIHMGTALNKILKDIIIKFHQMDGKDSVYVPGWDCHGLPIEWKIEEQYKKNKKNKND

SEQ ID NO: 161813 - protein, 113 aa, Unknown
  Bacterial polypetide isolated from the Sargasso Sea
MSKEHINLPKTAFSMKANLPVREPGILDYWQKIGLYKKLRQKSKGKEKFVLHDGPPYANGNIHMGTALNKILKDIITKFHQMDGKDSVYVPGWDCHGLPIEWKIEEQYKKNKK

SEQ ID NO: 161814 - protein, 348 aa, Unknown
  Bacterial polypetide isolated from the Sargasso Sea
MTAEKEQKTFSFVEMEHEILDFWDQESIFQQSLKNTKDKKPYIFYDGPPFATGLPHHGHLVASTIKDVVPRYWTMKGRYVMRRFGWDCHGLPVEHEIDKKLGISAQEAVNSLGVQGYNDECRAIVQRYVSEWRQTITRIGRWVDFEHDYKTMDTWFMESVWWAFRQLWDKGLIYQGMKVVPVSTELGTPLANFEATSNYKDVQDPAITVLLKIIDREEYLAVWTTTPWTLPSNLAVCVGADIDYCLVEDPDTGLKFYLAEERISAYEDKGRFKILSSIKGDRLVGLSYEPPFDYFLGEQEKGAFVVLSDDYVTTDSGTGLVHQAPAFGEKDYRVLNENGIEAFACPVG

SEQ ID NO: 161815 - protein, 160 aa, Unknown
  Bacterial polypetide isolated from the Sargasso Sea
MEKDYKNTLNLPKTDLPMKAGLPNKEPEILSFWDSINLYNLIREENAKKDKFILHDGPPYANGDIHLGHSVNKILKDIVIKTKTLQGFDAPYVPGWDCHGLPIELNVEKKFGRDSDTVKDKSKFISACREYALSQIENQKKDFIRLGVLGDWENSYKSLD

SEQ ID NO: 161816 - protein, 60 aa, Unknown
  Bacterial polypetide isolated from the Sargasso Sea
MSKEHLNLPKTAFSMKANLPNKEPEYLKFWDKINLYEKLRSQSKGKEKFVLHDGPPYANG

SEQ ID NO: 161817 - protein, 138 aa, Unknown
  Bacterial polypetide isolated from the Sargasso Sea
MEYKDTIFLPKTSFEMRANLPSKEPAIIEEWDKENIFKKLRDKSKGREKFVLHDGPPYANGHIHMGTALNKILKDVIVRTQQMAGKDSIYVPGWDCHGLPIEWKIEEEYRKKGKNKDDVPTVQFRNECREFAEKWIEI

SEQ ID NO: 161818 - protein, 172 aa, Unknown
  Bacterial polypetide isolated from the Sargasso Sea
MTLNYRDTLNLPDTEFSMKAGLPRKEPEILKFWSKTSVYEKIRKKYEGKDLFLLHDGPPYANGAIHLGHSVNKILKDITVKSKTLQGYDAPFIPGWDCHGLPIELNVEKKHGKKSDLVKNKESFQKACKEYAQSQISDQLEDFKRLGVFGDWENSYMSLDSKLKQILLGHWE

SEQ ID NO: 161819 - protein, 316 aa, Unknown
  Bacterial polypetide isolated from the Sargasso Sea
MSKSLGNVISPDDILKKYGVDILRLWVVASDYYDDLKLDNAILQSQAESYRRIRNTFRFLIGNLSEFTEEEVIDESEFPELEKYLLHRLWEVDQVVQKCVSTFNFHLMFTTLLNFCSSDLSAFYFDIRKDTIYCDSKESVKRRSTRTLLNIIFNHLVRWFAPSISFTSEEAWKAMGNIESIHLQDFLQCKKEYEDNQLNEKWNIIKNIRKVATGAIEKIREEKTIRSSLEAHIDIFVSAKSYKKLEKVMFDEITITSSFSLFVIDEKSNGFSIEDISDVIVKASKVNGEKCQRCWKYEAKLINDEVCNRCNTVIFK

SEQ ID NO: 161820 - protein, 364 aa, Unknown
  Bacterial polypetide isolated from the Sargasso Sea
MGHALNKVLKDIINKYKTLRGFRVHFVPGWDCHGLPIELKVLQNLKSDERKNLNTLNLRKKATDYAHIQINNQKEGFKRWGIWGDWNNPYLTLKKSYESAQIGVFGKMFLNGYIYRGLKPVHWSPSSRTALAEAELEYPDEHYSKSIYVSLKITKIPEEILLNLIQEKLNIKKDFFQNNSFITIWTTTPWTIPANEAVAVNPKIKYVFAIDEEKKIYLFAEDLFSEISKKFNKDFKVLLEVKGSKLENIEYQHPSKNKNCRIIIGGDYITTESGTGIVHTAPGHGVDDFNVGQKYDLPITCVVDEKGNLNEYSGQFKGANVLKEANDLIIEHLKEIICFYLQKIISIDIRMIGELKNQLFLGQQ

SEQ ID NO: 161821 - protein, 381 aa, Unknown
  Bacterial polypetide isolated from the Sargasso Sea
KYRSEDYNKMSDIVEVWFDSGSTHSYVLEKRDDLKWPASMYLEGSDQHRGWFHSSLLESCGTRGKAPFESILSHGFVVDGKGLKMSKSTGNVIAPEDILKKYGADILRIWVASSNYAEDLRIDYAILDQHAESYRKIRNTFRYLLGNIKDEYLESNFKNLDLKEMPDLEKYMLHRIYEINESFYKYFKSYNFHNLYKELLNFCTVELSAFYFDIRKDLLYCDPIDSKKRSKCILILNILLQCLLKWFAPILSFTTEEIFKLINKNEDEKSIHLKNFVDIPKNWKNEEINNKWEQIKKIRDEANISIENKRASKAIGSSLEANISIKLKENLYNISKNEDFSEICITSNATIVEDNQMQNEIEVNTEKAKGIKCPVCWKITK

SEQ ID NO: 161822 - protein, 214 aa, Unknown
  Bacterial polypetide isolated from the Sargasso Sea
MSKEHINLPKTKFSMKANLPNKEPNYIEFWKKIDLYNLLRQKSKGQEKFVLHDGPPYANGNIHMGTALNKILKDIITKFHQMDGKDSVYVPGWDCHGLPIEWKIEEQYKKNKKNKNDVPIIEFRKECREFANKWIDVHKGEFTRLGVIGDWENYYSTMSFDAEAQIVRELGKFLKEGSLYRGYKPVLWSTVEKTALADAEVEYMDHVSDTIYAA

SEQ ID NO: 161823 - protein, 183 aa, Unknown
  Bacterial polypetide isolated from the Sargasso Sea
MSKSQINLPKTAFSMKANLPIKEPEILEYWKKISLYEKLRNNSKSKEKFVLHDGPPYANGNIHMGTALNKILKDIIVKFHQMDGKDSIYVPGWDCHGLPIEWKIEEQYKKNKKNKNEVPIIEFRKECRSFAEKWIEVHKSQFKRLGVIGDWENYYSTMSYDAEAQIVRELGKFLKEGSLYRGF

SEQ ID NO: 161824 - protein, 74 aa, Unknown
  Bacterial polypetide isolated from the Sargasso Sea
MTKSQINLPKTAFSMKANLPIREPEILEYWKKINLYNEIRKESKGREKFVLHDGPPYANGNINMGTALNKILKD

SEQ ID NO: 161825 - protein, 385 aa, Unknown
  Bacterial polypetide isolated from the Sargasso Sea
RDFANKWINVHKDQFTTFGVIGDWKNYYSTMSFDAEAQIVRELGKFLKEGSLYRGYKPVLWSTVEKTALADAEVEYMDHVSDTIYAAFSIKKTNLKEMEGSNVIIWTTTPWTIPANKALAYNSNLIYLIVKIKDDGDFKDKKIIVAKDLLEFLIKECEVKSFNIEKEFSGKEFEGTICTHPFLDIGYDYDIPMLEAKFVTTEQGSGIVHCAPSHGPDDFNLCLKNNIKALETVDDDGKYTKNIIKFEGTHIFKANPIVIENLKNQKKLLANGKLTHSYPHSWRSKAPLVHRATAQWFISMESHGLRTKSLKAIDETVFYPSKAKERIKSMIETRPDWCVSRQRVWGVPLPIFLSKKTGKALIDDEVFENIAKIFEKEGSDCWFSE

SEQ ID NO: 161826 - protein, 110 aa, Unknown
  Bacterial polypetide isolated from the Sargasso Sea
MNKSQINLPKTAFSMKANLPTKEPEILEYWKKINLYDELRNESKGKEKFVLHDGPPYANGNIHMGTALNKILKDIIVKFHQMDGKDSIYVPGWDCHGLPIEWKLRNSIKK

SEQ ID NO: 161827 - protein, 145 aa, Unknown
  Bacterial polypetide isolated from the Sargasso Sea
MSKSSVNLPKTSFSMRANLPLKEPDLIDYWNKISLYEKLRANSKGNEKFVLHDGPPYANGNIHMGTALNKILKDIVTKFHQMKGKDSVYVPGWDCHGLPIEWKIEEQYKKNKKNKNDIPIVEFRKECRDFANKWIDVHKKQFQRL

SEQ ID NO: 161828 - protein, 78 aa, Unknown
  Bacterial polypetide isolated from the Sargasso Sea
MSKSQINLPKTAFSMKANLPTKEPEILMCWDKISLYKELRSSRKGQEKFVLHDGPPYANGNIHMGTALNKILKEYYCK

SEQ ID NO: 161829 - protein, 354 aa, Unknown
  Bacterial polypetide isolated from the Sargasso Sea
DIIIKFHQMDGKDSVYVPGWDCHGLPIEWKIEERYKKNKKNKNDVPIIEFRKECRDFASKWINIHKDQFKRLGVIGDWENYYSTMSFDAEAQIVRELGKFLKEGSLYKGYKPVLWSTVEKTALADAEVEYQDHISDTIYVAFPVKKSNINELVSSNVVIWTTTPWTIPANKALAYNQSLDYVLCEIDNKDILQNDKIVIAKELLPSVVKDTQYNIKILKEFKGKEFNGTICSHPFHKIGYDYDVPMLEARFVTTEQGTGIVHCAPSHGPDDFNLCINNGIKAIETVDDDGRYTKHIPMFEGTHIFKANNIVIEKLKEIKALLNNGKLTHSYPHSWRSKAPLVHRATPQWFISME

SEQ ID NO: 161830 - protein, 391 aa, Unknown
  Bacterial polypetide isolated from the Sargasso Sea
AEDFDKTSDIVEVWFDSGSTHSFVLEKREDLKWPASMYLEGSDQHRGWFHSSLLESCGTRGRAPFESILSHGFVVDGKGLKMSKSTGNVIAPEDILKKYGADILRIWVASSNYAEDLRIDYSILDQHSESYRKIRNTFRYLLGNIQDEYSKVDFDKIDLTNIPELEKYMLHRLYLINESFNEYFKSYNFHNLYKELLNFCTVELSAFYFDIRKDLLYCDPKDSKKRSDCILILKVILECLLKWFAPILSFTTEEIYHLIHKEDNNGSIHLQKFVKIPNQWKNEELNSKWDKLKLIRDEANISIESKRADKIIGSSLEANIEIKIKDEAMYSLAQNYDFSEICITSSASILNDNNLEKEIEITSSKAVGNKCPVCWKIRENICERDGNCHLS

SEQ ID NO: 161831 - protein, 129 aa, Unknown
  Bacterial polypetide isolated from the Sargasso Sea
MEFKDTIFLPKTTFEMRANLPQKEPKILEEWDKEEIFLKLREKSKGREKFVLHDGPPYANGHIHMGTALNKILKDVIVRTQQMSGKDSIYVPGWDCHGLPIEWKIEEEYRKKEQNKDDVPIVQFRQECR

SEQ ID NO: 161832 - protein, 335 aa, Unknown
  Bacterial polypetide isolated from the Sargasso Sea
TTTPWTIPANRALAYNEGLDYVQLELNDESDFKNKKIIVAEALLQSVINDCKVKNYKKIKTFKGKELKETICNHPFLDLGYDYDIPMLEARFVTTEQGTGIVHCAPSHGPDDFNLCLNNGIKAIETVDGDGKYTKHVSLFEGIHIFKANPIVIEKLKEQKKLLSNGELMHSYPHSWRSKAPLVHRATPQWFISMESHKLRDKALKAINDTTFYPSKGKERLKSMIETRPDWCVSRQRVWGVPLPIFINKKTKEILVDDEVNETIATIYEKEGSDCWFSDDPQRFLGNKYKAEDYDKLSDIVEVWFDSGSTHSFVLEKREDLKWPASMYLEGSDQH

SEQ ID NO: 161833 - protein, 88 aa, Unknown
  Bacterial polypetide isolated from the Sargasso Sea
MSNSQINLPKTAFSMKANLPVREPEILEYWQKINLYRELRNSSKGKEKFVLHDGPPYANGNIHMGTALNKILKDIIVKFHQMDVKILS

SEQ ID NO: 161834 - protein, 358 aa, Unknown
  Bacterial polypetide isolated from the Sargasso Sea
GWFQSSLLTSVAINDQAPYKEVLTHGFVVDEKGHKMSKSIGNTVSPQSVINNMGADILRLWVASTDYTSEMKISDQILKRNADTYRRIRNTARFLLSNLSDFDPTKNQQKIEDLVLLDQLAIQRVAVMNEEIKNEFNNYSFHKIIQLLHNFCVNDMGGFYLDIIKDRLYTMPTDSHGRRSAQTALYIIAESLTHWIAPILSFTAEEIWKHLPERKEESVFLSDWIDIEEPKSNVDWDQLNDINSIVLKALEVARDDGKIGSPLDAHLEIYADQNTYDFLQEFSEELRFLFITSSVHLEIDDTIDSNEKLRVKVNKSKAEKCGRCWHRQESVGDSSEHPEICARCVSNISDSPEERSFF

SEQ ID NO: 161835 - protein, 184 aa, Unknown
  Bacterial polypetide isolated from the Sargasso Sea
MTDYKQTLNLPDTAFAMRANLAQREPQMLANWTEKNLYQKIRQAKQGKKTFILHDGPPYANGNIHIGHAVNKILKDMIVKAKTLSDFDAPYVPGWDCHGLPIELVVEKKYGKPGVKLSAAEFRQKCRDYALTQIEAQKVDFIRLGVLGDWDNPYRTMDFNTEANIIRSLGRIIDNGHLQQGFKP

SEQ ID NO: 161836 - protein, 202 aa, Unknown
  Bacterial polypetide isolated from the Sargasso Sea
ALDAIDATRFVLGRGKNRLRTMIEQRPDWCVSRQRAWGVPITIFINKETGEPLKDQKVIDRIGDIFEVEGSDAWYSSDPQRFLGDKYDANDYEQITDIVEVWFDSGSTHAFVLEDRPELKWPASLYLEGSDQHRGWFHTSLLQSSGTRGRAPFEAVLTHGFVLDESGRKMSKSMGNVTAPQDIIERNGADILRLWVVGSDYS

SEQ ID NO: 161837 - protein, 343 aa, Unknown
  Bacterial polypetide isolated from the Sargasso Sea
LIDQDVIENIANIYEKEGSDCWFSDDPQRFLGDKYKASDFDKMKDIVEVWFDSGSTHSFVLEKRKDLKWPASMYLEGSDQHRGWFHSSLLESCGTRGRAPYENILSHGFVVDGKGLKMSKSLGNIISPDDILKKYGADILRIWVTSSNYAEDLRIDYSILDQHAEAYRKIRNTFRYLLGNLNDEFKKINLNELKIEEFPELEQYMLNKIFNLNKNFLKYYKSYNFHNLYKELLNFCTVDLSAFYFDIRKDTLYCDTKDSEKRQNTILLLNIILDCLLKWFAPILSFTAEEIFSIINKNNTSIHLEKFPNIPSNWENKSLNEKWTTLKKIRDNCNISMKKKEQA

SEQ ID NO: 161838 - protein, 293 aa, Unknown
  Bacterial polypetide isolated from the Sargasso Sea
MKVNYRDTLNLPDTDFSMKAGLPRKEPEILEMWSSSDLYGKIRKKYKDKELFLLHDGPPYANGDIHLGHSVNKILKDITIKYKTLQGFNAPYVPGWDCHGLPIELNVEKKHGKNSELVKNKQSFQKACKEYAESQINKQLDDFKRLGVLGDWENSYKSLDPKFEADIVRSLGKIYKEGHLEKGEKPVHWCQESGSSLAEAEVEYIDRTSKAIDVAFKVDNTCLKKVKDLFDIEDIDEIAFVIWTTTPWTIPSNVAVCINPEYKYSLIKMKNKFCVIAFDMIEECSKRWEQKLN

SEQ ID NO: 161839 - protein, 308 aa, Unknown
  Bacterial polypetide isolated from the Sargasso Sea
ALADAEVEYREHKSDTIYAAFKVKDSKIRELKKSEVIIWTTTPWTIPANKALAYNEALKYLIIKIKDDTDFKDRQIVIAEALLKSVIEENKIKNFNKILEFDGKDFEGTICTHPLSGIGFNYDIPMLQARFVTTEQGSGIVHCAPSHGPDDFNLCLKNGIKALETVDDDGKYTKNIPQFEGIHIFKANKMVIEKLKQQKNLLASGELVHEYPHSWRSKAPLVHRATPQWFISMESHGLRKKALKAIEDTKFYPNKGKERLKSMIETRPDWCVSRQRVWGVPIPVFISKKTNEILIDEQVTENIATIFE

SEQ ID NO: 161840 - protein, 165 aa, Unknown
  Bacterial polypetide isolated from the Sargasso Sea
MATPQWFFSMTKSGLLDGATRALEEIKFIPEWGKERMEIMLNDRPDWCISRQRDWGIPIPLYYDKNTGEPHPEQDNIFNAVSESIKDKGIDSWNSIDLKLSDSENYEKSKDIFDVWFDSGITHFCVVDELYGSNTQSDLYLEGSDQHRGWFQSSLLTSIAMKGTA

SEQ ID NO: 161841 - protein, 317 aa, Unknown
  Bacterial polypetide isolated from the Sargasso Sea
EKQKADFIRLGVFADWDNPYTSMDKEVEAGIVKSLSKIMDNNHIYFGSKPVHWCIESSSALAEAEVEYKNIVSKAVCVKFKITSSSELTFTKNIDQKAHISIPIWTTTPWTLPANRAVAISKNVEYSLVQVDKNYLIIAKKLVGSVMEKAGISDFKIIEESIKSEMNAAMLEHPFYDIKVPIIFAEHVTDENGTGAVHIAPGHGTEDYLAGLKHGLEVYNPVDDYGRFKESLPIFGGMKVRDSNEEIVSLLNKNDALLFKEDYEHSYPHCWRYKTPLIFRATPQWFMSMDKSALRKSIKDDIKNIKWLPSWGEDRIF

SEQ ID NO: 161842 - protein, 300 aa, Unknown
  Bacterial polypetide isolated from the Sargasso Sea
KEVYIGGFKPVLWSTVEKTALADAEVEYQDHKSDTIYTSFSIKKSNLKDLVGSEIIIWTTTPWTIPANKALAYNEALDYIQLEINDDNDFKNRKIIVADALLQSVINDCKIKNYKKIKTFKGKELKETICNHPFIDLGYDYDIPMLEARFVTTEQGTGIVHCAPSHGPDDFNLCLNNGIKAIETVDGDGKYTKNVSLFEGIHIFKANPIVIEKLKEQKKLLSNGELMHSYPHSWRSKAPLVHRATPQWFISMDSHKLRDKALKAINDTTFYPSKGKERLKSMIESRPDWCVSRQRVWGVP

SEQ ID NO: 161843 - protein, 353 aa, Unknown
  Bacterial polypetide isolated from the Sargasso Sea
EYKDHKSNTIFLAFKVKKTDKDYLKDTSIIIWTTTPWTIPANKALAYNKGINYVVLDINKNKIVVAEKLIQSVIESCELGKYEVLNTFKGSEFKNTFCSHPFKNLGYEHDVPMLDANFVTLDQGTGIVHCAPSHGPDDFNLCLKHGMKAIETVNNDGLYTKNIPIFQGTHVFKADEIIIKNLKEQNNLLGSGSLMHSYPHSWRSKAPLVHRATPQWFISMESHKLRKKAIDSIDQTTFYPEKGKTRIRSMIETRPDWCISRQRSWGVPLPIFIDKKTNEPLRDPEVIENIAKIYEKEGSDCWFHDDPQRFLGKKYNKENYIKSNDIVEVWFDSGSTHSFVLEKRKDLKWPASM

SEQ ID NO: 161844 - protein, 303 aa, Unknown
  Bacterial polypetide isolated from the Sargasso Sea
SSNLKDLVGGEIVIWTTTPWTIPANKALAFNESLDYVILEINDVGDYKNRKIVIADGLLESVVKECEIKNYKKIYTFKGKEFKNTICSHPFLNLGYDHDIPMLEAKFVTTEQGTGIVHCAPSHGPDDFNLCLNNNIKAIETVDGDGKYTNNVKLFEGIHIFKANNIVIEKLKEQKNLLFNGELVHSYPHSWRSKAPLVHRATPQWFISMESHKLRDKALKAIDETTFYPGKGKERLKSMIETRPDWCVSRQRVWGVPLPIFVNKQTKEILVDDETTENIASIYEKEGSDCWFSDDSSKIFRQE

SEQ ID NO: 161845 - protein, 293 aa, Unknown
  Bacterial polypetide isolated from the Sargasso Sea
GVFPDKEYGGVPIPVFMSKKSNEVLVDDEVTENIANIFEKEGADCWFEGDAQRFLGEKYKIEDYEKMTDIVEVWFDSGSTHAYVLEKREDLKWPASMYLEGSDQHRGWFHSSLLESCGTRGRAPFESILSHGFVVDGKGLKMSKSLGNIIAPEDILKKYGADILRIWVAASDYAEDLRIDYSILEQHAESYRKIRNTFRYILGNLNDKFEKVDFEKINISNFPELEQYMLHKIYNLNILFEKNFEKYNFHTIYKEIINFCSSDLSAFYFDIRKDALYCDSLESKKRISTIEFL

SEQ ID NO: 161846 - protein, 288 aa, Unknown
  Bacterial polypetide isolated from the Sargasso Sea
FLFIKKTQELHPDTSNLILKAADLVEKNGINVWFDLDITEILGKDSKNYTKVTDTLDVWFDSGVTHDTVLQNDERLECPADLYLEGSDQHRGWFQSSLLTSLAINDNQKPYHCVVTHGFTVDADGMKMSKSKGNVISPQKVMNVYGADVLRLWVAATDYRAEMNVSDEILKRVSDAYRRIRNTSRYLLSNLHDFDPEANSVNFPDMLDLDKWIFEHAQDLQKEIIEAYNNFEFHLIYQLLHQFCVVEMGGFYLDIIKDRQYTTSKDSLLRRSGQTVMYYLIQMWLDGG

SEQ ID NO: 161847 - protein, 349 aa, Unknown
  Bacterial polypetide isolated from the Sargasso Sea
ANQISVFSDMFLKGYIYRGMKPVNWSPSSQTALAEAELEYPDNHISKSVYVKFPVLKKTYPNEIKETCDNLNFLVWTTTPWTLPANKALSLNQDFVYGIYEIGNEQIIIELDLAIKLNDKSDLNLNKIDEISGKTLLEMKYLSPLTQQECSVYNAEYVTKDAGTGIVHTAPGHGVDDYNTGIKNNLDIFSPVDKYGKFTDDVHEELQGLSVLNEGNLKVIELLDNENYLFFSEDYNHKYPYDWRTGKPTIFRSTYQWFASVDKFREQALSEIEKVKWYPTQSMKRISSMIYERSDWCISRQRSWGLPIPVFYYKESNEAFINKEILNKIIDIFKHEGSNSWWEKDVDYF

SEQ ID NO: 161848 - protein, 221 aa, Unknown
  Bacterial polypetide isolated from the Sargasso Sea
MSDYKFTLNLPETEFPMRGNLANREPEMLERWTKDGLYQQIRDSRIGRTPFILHDGPPYANGSIHIGHSVNKILKDIIVKSKTMSGFDAPYVPGWDCHGLPIELKVEQKVGKPGQKISAAEFREECRKYAAEQVDGQRADFIRLGVLGDWQKPYLTMDFATEANIVRSLSKVIENGHLHKGVKPVHWCTDCGSALLKPKLNTRIKPLPLSMWPLLRQIAKL

SEQ ID NO: 161849 - protein, 145 aa, Unknown
  Bacterial polypetide isolated from the Sargasso Sea
MVSASETSYKDTLNLLKTDFSMRANSRQREPELQGFWAELDLYNRLSQDNPGPIFTLHDGPPYANGALHVGHALNKTLKDIINKVQLMQGKRARYIPGWDCHGLPIELKVLQSLKTEERRELKPLELRRKAHAYAEKQVKGSVRA

SEQ ID NO: 161850 - protein, 308 aa, Unknown
  Bacterial polypetide isolated from the Sargasso Sea
SYKRPSSKGEKPVHFCYDCKSALAEAEVEYEDKVSKSIDVGFKVKKDSLIKLSAAFSKEIDSCSFVIWTTTPWTIPANAAVSIGPELKYTLCSSKFGNLILASDLIDQCSERWDEDLEKISEAKGSDIKDVVLEHPYLKRDSILVHGDHVTTETGTGCVHTAPAHGIDDHNICKKFNIETIHALDGNGFFDAEYEGLAGLPAIKADNIVIDILNDSGALINVEDFHHSYPYCWRHKTPLIFASTPQWFISMDKSGLLEGSIQAVKDVEWEPSWGYERIKSMLEGRPDWCISRQRSWGVPIPLIINKKT

SEQ ID NO: 161851 - protein, 216 aa, Unknown
  Bacterial polypetide isolated from the Sargasso Sea
MKDTLNLPKTKFSMKANLAQKEPEILKFWEEINLYDALQEQNKDKPKFTFHDGPPYANGPIHLGTSINKTLKDIACKSRLLSGYNVSFVPGWDCHGLPIELNVEQKSGKPNKDIPAKDFRAKCRDYANQQIAIQKKDFKRLGVLADWNNPYKTMDYSFEAGIIRALSEIVKSGHLIKGDKPVYWCPDCNSALAEAEVEYKDKTSTSIDFLFEMETS

SEQ ID NO: 161852 - protein, 310 aa, Unknown
  Bacterial polypetide isolated from the Sargasso Sea
SKAPLVHRATPQWFISMESHGLRDKALKAIDNTDFYPSKGKERIKSMIETRPDWCVSRQRVWGVPLPIFISKKTGDVLVDDEVFENIAKIYEKEGSDCWFNEDYQIFLGDKYKAEDYEKLSDIVEVWFDSGSTHSFVLEKRDDLKWPASMYLEGSDQHRGWFHSSLLESCGTRGVAPFESILSHGFVVDGKGLKMSKSTGNVIAPQDILKKYGADILRIWVASSNYAEDLRIDYSILDQHAESYRKIRNTFRYLLGNIQDQYENLDFEKVKFEKFDSLEKFMLHRILCINENFKKHFKVLYFHNLYKELL

SEQ ID NO: 161853 - protein, 304 aa, Unknown
  Bacterial polypetide isolated from the Sargasso Sea
NILDHTSDTIYVSFPVKETKTKDLLNTEVIIWTTTPWTIPANKALAYNQALKYVIVQINDQSDFINRKIVVAKDLLKSVIEDCEIKDYKIVSEIKGSDFHGTICLHPFNKLGYDYDIPMLEARFVTIEQGSGIVHCAPSHGPDDFNLCLNNNIKAVETVDDDGKYTKHILNFEGIHIFKANPIVIEKLKNEKNLLANGKLNHSYPHSWRSKAPLVHRATPQWFISMESHKLRDKALKAIDDTEFYPSKGKERLRSMIETRPDWCVSRQRVWGVPLPIFISKSDGKVLVDEEVFENIAAIYEKEG

SEQ ID NO: 161854 - protein, 316 aa, Unknown
  Bacterial polypetide isolated from the Sargasso Sea
WTLPSNEAVALGEDIPYGIYSLTLHERDILVVVANELRESIEKRWGVSNLEMLEEVSAENLSGLQLQHPFDERTVPVLLGDHVTTENGTGSVHTAPAHGQEDFQIGKENDLDLKCYVNSYGVFTDSKESFAKQHIFKSESEIIERLDESNLLISSEKFEHSYPHCWRHKTPVIFRTTRQWFISMENEDFRSSCLESIKDVEWKPKWGEDRINGMIETRPDWCISRQRYWGVPIPLFTHKDDQTIHPDTSELLYQIAEKIEENGIDAWFDADIEELLGDDSNSYEKSTDTMDVWMDSGIAHKTVSHLFDHITDKADL

SEQ ID NO: 161855 - protein, 309 aa, Unknown
  Bacterial polypetide isolated from the Sargasso Sea
YTTMSYEAESTIVKEFFKFLENESLYRGSKPVMWSTVEKTALAEAEIEYKEHKSITIFVKFPVISSLENNEVNTSVIIWTTTPWTIPANRAIAFSKDISYSIYSVNGLEENSLLNEGDQIIIADELIDNVRTQCKVKELTKIRAIKDLDQIICGHPFRDSGYDFEVKLFDADFVTLEQGSGFVHIAPGHGADDYNLGIANNVEVPETVDENGQYFDHVPLFKGKKVFNDDGSDADANVAVIVELKNHNNLAGKGSLRHSYPHSWRSKAPVIFRNTPQWFISMEKNGLRSTALNEIDKVNWFPKQGKNRI

SEQ ID NO: 161856 - protein, 329 aa, Unknown
  Bacterial polypetide isolated from the Sargasso Sea
INLKDLVDDHDDYVKATDTLDVWFDSGSTHFCVLDKLYGKDLIADLYLEGSDQHRGWFQSSLLTGIAINGKAPYEAVLTHGFVVDENGRKQSKSLGNVVSPQKVCNNLGADILRLWVASTDFRSEMVATDEIFKQVSDQYRRIRNTFRFIMGNLNDFDKESNNINKNDLVEIDKWIISEAIKLHEEVKKLNDNYAYHHVIKKIHNFCVHELGGVYLDIIKDRMYVTKSNSNARRSAQFALFEVAEILIRLISPILVFTAEEIWQSHELFKKQSVSIFTAPQNILSKIESSISDDDWEKIFVVKDAVNQSIEKARADSVIKGSLDSKITI

SEQ ID NO: 161857 - protein, 305 aa, Unknown
  Bacterial polypetide isolated from the Sargasso Sea
LIDEDVIENIASIYEKEGSDCWFSDDPQRFLGKKYKASDFDKMKDIVEVWFDSGSTHSFVLEKRKDLKWPASMYLEGSDQHRGWFHSSLLESCGTRGRAPYENILSHGFVVDGKGLKMSKSLGNIISPDDILKKYGADILRIWVASSNYAEDLRIDYSILEQHAEAYRKIRNTFRYLLGNLNDEFKQINFNEVKVEDFPELEQYMLNKIFDLNENFLNYYKTYNFHNLYKELLNFCTVDLSAFYFDIRKDTLYCDTKDSEKRRNTILFLNIILDCLLKWFAPILSFTTEEIFSIINKNNTSIHLE

SEQ ID NO: 161858 - protein, 316 aa, Unknown
  Bacterial polypetide isolated from the Sargasso Sea
TNKVLIDEEVTENIANIFEKEGADCWFESDAQKFLGKKYESADYEKMNDIVEVWFDSGSTHSYVLEKRDDLTWPASMYLEGSDQHRGWFHSSLLESCGTRGRAPFNSILSHGFVVDGKGLKMSKSLGNIMAPEDILKKYGADILRIWVAASDYAEDLRIDSSILEQHAESYRKIRNTFRYILGNIKDNHEKVDFEKLEIGKLPELEQYMLHKLFCLNENFNKNFKKYNFHALYKDILNFCTVDLSAFYFDIRKDTLYCDKINSEKRKSTVLFLNILLDILLKWFAPILSFTTEEIYSLVKMNGKSIHLESFPSIPE

SEQ ID NO: 161859 - protein, 289 aa, Unknown
  Bacterial polypetide isolated from the Sargasso Sea
SFEKLKNFKGKDLKGTICNHPFLKLGYEYDIPMLEASFVTTEQGTGIVHCAPSHGPDDFNLCMNNGIKAIETVDGDGRYTKNVALFEGIHIFKSNSIVIEKLKEQKKLLSNGELVHSYPHSWRSKAPLVHRATPQWFISMDSHKLRSKALKAIDETTFYPSKGKERLKSMIETRPDWCVSRQRVWGVPLPIFINKKTGEILIDNEVFDNIAKIYEKEGSDCWFSDDPQKFLGKKYKAEDFDKLSDIVEVWFDSGSTHSFVLEKRKDLKWPASMYLEGSDQHRGWFHSSL

SEQ ID NO: 161860 - protein, 239 aa, Unknown
  Bacterial polypetide isolated from the Sargasso Sea
YDQVKDVVEVWFDSGSTHAFCLEQRSDLKWPASMYLEGTDQHRGWFHSSLLESSGTRGKAPYESVLTHGFIVDGKGRKMSKSLGNNISPDDILKQYGVDILRLWVVASNYYDDLKIDNAILKSQAESYRRIRNTFRFLIGNLNDFRKEEIINEEKFPELEKFLLHRLWEVDQIIKKCVKNFNFHLMFTTLLNFCSNDLSAFYFDIRKDVILCDSQDSLNDVHPNYALSYIYYLVRWFAP

SEQ ID NO: 161861 - protein, 107 aa, Unknown
  Bacterial polypetide isolated from the Sargasso Sea
MTVDYSKTIFLPRTDFPMKAQLPKREPDILKRWSEIDIYSKLREASAGREKFVLHDGPPYANGHLHIGHALNKILKDVIVRSQQMMGRDSIYVPGVGLSWGNKLNGK

SEQ ID NO: 161862 - protein, 147 aa, Unknown
  Bacterial polypetide isolated from the Sargasso Sea
MTAEPIDYKNTLNLPKTDFPMRAGLPNREPGWLERWEKIGIYKKLRQKTSRKPFILHDGPPYANGNLHIGHALNKILKDMVVRSQQMMGSDARYIPGWDCHGLPIEWKIEEKYRKKGKNKDDVPVIDFRLGMPKICGWLDRYSERRI

SEQ ID NO: 161863 - protein, 252 aa, Unknown
  Bacterial polypetide isolated from the Sargasso Sea
FNCDEPDEISFIIWTTTPWTIPSNVAVCINPIYKYSLIKMNEKFYVLAFEMTEQCTKRWNQKFDLISTINGEKLIDINLIHPFLDRKSVLLHADHVTTEAGTGCVHTAPAHGMDDYLICKKNNIDTIHSLNNKAFFKDELDFIAGLPALKADPLIIEKLQEHNALVNIEDYHHSYPHCWRRKTPLIFTSTPQWFISMKKNNLINEALNQINNVNWEPSWGLQRIKSMLTDRPDWCVSRQRNWGVPITLVVHK

SEQ ID NO: 161864 - protein, 293 aa, Unknown
  Bacterial polypetide isolated from the Sargasso Sea
NFLKFVENGSLYRGSKPVMWSTVEKTALAEAEIEYKEHKSTTIFVKFPVLKSSDLDLKGSSVVIWTTTPWTIPGNRAIAYSKNIRYSLFEINETEENSHLKIEDRIIIAHDLEESFKQQCRVKSITKIKDIENLGGLVCNHPFAKSGYDFEIKLYDADFVTLEQGTGFVHIAPGHGADDYILGISNNIEVPETVDQDGFYFDHVPLFKGKKIFNDDGSDADANIAVIIELKNHNTLAGKGSLRHSYPHSWRSKAPVIFRNTPQWFISMEKNDLRKKALKAIDDVSWFPKQGKK

SEQ ID NO: 161865 - protein, 252 aa, Unknown
  Bacterial polypetide isolated from the Sargasso Sea
MSHGFVVDGKGLKMSKSLGNVIAPEDILKKYGADILRIWVASSNYSEDLRIDYSILDQHAESYRKIRNTFRYLLGNIKDNFEEIDFKKVDLNELPELEQFMLHKLYSLDVNFKKYFKNYDFHNLYKELLNFCTVDLSAFYFDIRKDSLYCDSTDSKKRKSTILLLNIILNSLLKWFAPILSFTTEEIYRLIFKDSKSVHLEKFLNFPNNFENEKLYQKWLELIKIRNICNISIEEKRANKEIGSSLEADLNI

SEQ ID NO: 161866 - protein, 220 aa, Unknown
  Bacterial polypetide isolated from the Sargasso Sea
FVLEKREDLKWPASMYLEGSDQHRGWFHSSLLESCGTRGRAPFESILSHGFVVDGKGLKMSKSLGNVIAPEDILKKYGADILRIWVASSNYAEDLRIDYSILDQHAESYRKIRNTFRYLLGNINDNFEKINFDELDVDELPELEQLMLHKIFILNQNFKKNFNNYDFHNLYKELLNFCTVDLSAFYFDIRKDTLYCDPKDSKKRKSTILLLNIILNALLK

SEQ ID NO: 161867 - protein, 276 aa, Unknown
  Bacterial polypetide isolated from the Sargasso Sea
MLKNFLGKKYKSSDYEKLNDIVEVWFDSGSTHSYVLEKREDLMWPASMYLEGSDQHRGWFHSSLLESCGTRGRAPFNSILSHGFVVDGKGLKMSKSLGNIMAPQDILKKYGADILRIWVAASDYAEDLRIDKSILEQHAESYRKIRNTFRYILGNIKDKHEKVDYEKLDPKKLPELEQYMLHKLYLLSQNFNKNFDRYNFHALYKDILNFCTVDLSAFYFDIRKDTLYCDKLESEKRKSTILFLNILLDVLLKWFAPILSFTTEEIYSLVNKNGKS

SEQ ID NO: 161868 - protein, 279 aa, Unknown
  Bacterial polypetide isolated from the Sargasso Sea
KDYKNTLNLPKTDLPMKAGLPNKEPEILSFWDSINLYNLIREENAKKDKFILHDGPPYANGDIHLGHSVNKILKDIVIKTKTLQGFDAPYVPGWDCHGLPIELNVEKKFGRDSDTVKDKSKFISACREYALSQIENQKKDFIRLGVLGDWENSYKSLDSSFEADTVRSLGRIVTNGHLQKGEKPVHFCYDCKSALAEAEVEYEDKVSKSIDVGFKVKKDSLVKLSAAFSKEIDSCSFVIWTTTPWTIPANAAVSIGPELKYTLCSSKFGNLILASDLID

SEQ ID NO: 161869 - protein, 252 aa, Unknown
  Bacterial polypetide isolated from the Sargasso Sea
MEYKNTIFLPQTSFEMRGNLPSKEPKILEEWNNENIFKKLREKSKGREKFILHDGPPYANGHIHMGTALNKILKDVIVRTQQMAGKDSIYVPGWDCHGLPIEWKIEEEYRKNGQNKDDVPIVQFRQECREFAQKWINIQKKEFRRLGVEGDWDNPYLTMSNQAEAQIVRELGKFLLDESLYKGARPVLWSVVEKTALADAEVEYEDHTSNTIYVKFKITKSKISNFIGTNIVIWTTTPWTIPGNRAVAYGKD

SEQ ID NO: 161870 - protein, 201 aa, Unknown
  Bacterial polypetide isolated from the Sargasso Sea
AKESFAKQHIFKSESEIIERLDESNLLISSEKFEHSYPHCWRHKTPVIFRTTRQWFISMENEDFRSSCLESIKDVEWKPKWGEDRINGMIETRPDWCISRQRYWGVPIPLFTHKDDQTIHPDTPELLYQIAEKIEENGIDAWFDADIEQLLGDDSNSYEKSTDTMDVWMDSGIAHKTVSHLFDHITDKADLYLEGSDQHRG

SEQ ID NO: 161871 - protein, 271 aa, Unknown
  Bacterial polypetide isolated from the Sargasso Sea
LPIFINKKNNQILIDDEVFENIAKIYEKEGSDCWFSDDPQKFLGKKYKADDFDKLKDIVEVWFDSGSTHSFVLEKRDDLKWPASMYLEGSDQHRGWFHSSLLESCGTRGRAPFESILSHGFVVDGKGLKMSKSLGNVIAPEDILKKYGADILRIWVASSNYAEDLRIDYSILDQHSESYRKIRNTFRYLLGNLKDNFQEIDLKSIDIKKLPELEQFMLHKIFSLNLNFHKYFKNYDFHNLYKELLNFCTVDLSAFYFDIRKDCLYCDDINS

SEQ ID NO: 161872 - protein, 304 aa, Unknown
  Bacterial polypetide isolated from the Sargasso Sea
GDKYKAEEFDKLSDIVEVWFDSGSTHSFVLEKREDLKWPASMYLEGSDQHRGWFHSSLLESCGTRGRAPFESILSHGFVVDGKGLKMSKSLGNVIAPDDILKKYGADILRIWVASSNYAEDLRIDYSILDQHAESYRKIRNTFRYLLGNINDNFEIINFEKLNLDDLPELEQLMLHKLYVLNTNFKRYFSNYDFHNLYKELLNFCTVDLSAFYFDIRKDNLYCDGKDSNKRKSTILLLNIILNALLKWFAPILSFTTEEIFKLLFKDQKSIHLEKFLEFPDKFKNEKLSKKWIELIKIRDICNI

SEQ ID NO: 161873 - protein, 159 aa, Unknown
  Bacterial polypetide isolated from the Sargasso Sea
MSDYKFTLNLPETEFPMRGNLANREPEMLERWTKDGLYQQIRDSRIGRTPFILHDGPPYANGSIHIGHSVNKILKDIIVKSKTMSGFDAPYVPGWDCHGLPIELKVEQKVGKPGQKISAAEFREECRKYAAEQVDGQRADFIRLGVLGDWQKPYLTMDF

SEQ ID NO: 161874 - protein, 301 aa, Unknown
  Bacterial polypetide isolated from the Sargasso Sea
NINLPKTLFSMKGNLPSKEPEILKIWEKIELYKKLRKLGKGKEKFVLHDGPPYANGHIHMGTALNKILKDMITRFHQMDGKDSVYVPGWDCHGLPIEWKIEEQYKKNKKNKDEVPIKIFRQECREFAEKWINIHIDEFKRLGVEGDWKNHYSTMSFDAEAQIVRELGKFLLDGSLYQGYKPVLWSTVEKTALADAEVEYKDHTSNTIYTSFEVKKTDKDFLKNGHVIIWTTTPWTIPVNRALAYSGKIKYSVIKLGNETENFKNKNIILASELIKKVSEECNFKDFKIIKEFEGNEFKNTI

SEQ ID NO: 161875 - protein, 245 aa, Unknown
  Bacterial polypetide isolated from the Sargasso Sea
VYTKEVPYFTNTHVFKADPIVIEKLKEQKQLLKNDKLNHSYPHSWRSKAPLIYRATPQWFISMQKNKLRDKAVKAINETIFYPNKGRDRLLSMIEGRPDWCVSRQRVWGVPLPIFINKKTKEPLRDQKIIDRIASIYEKQGSDCWFTDDAKIFLGDDYNVKDYEKLNDIVEVWFDSGSTHSFVLEKRKDLKWPADMYLEGSDQHRGWFHSSLLESCGTRGKAPFKSILSHGFVVDGKGMKMSKSM

SEQ ID NO: 161876 - protein, 299 aa, Unknown
  Bacterial polypetide isolated from the Sargasso Sea
TVNIYNKATGQPLVDSKLNERIVKMYEENGCDIWFEKSIEELLGNEYNADDYEKVDDILDVWFDSGCTHAFVLEGKEDQIWPASIYLEGTDQHRGWFHSSLLESCGTRGVAPYESVLTHGFVLHEDGNKMSKSSSNIVPPAEIVEKSGADILRLWVASSDYSEDLKIGPEIIKSNVDSYRRLRNTLRFILGNLNDFSEDEKVKFLDLPELDQYILHKLAHLEDEVLKSYQSFEYQRVFSAIFNFCTNELSSFYFDVRKDSLYCDHRNSLARKATRTVLDILFNHLLKLLAPILCFTTEE

SEQ ID NO: 161877 - protein, 300 aa, Unknown
  Bacterial polypetide isolated from the Sargasso Sea
MSKFQINLPKTAFSMKATFPTREPELLKFWDKINLYKELRNSRKGQKKFVLHDGPPYANGNIHMGTALNKILKDIIVKFHQMDGKDSVYVPGWDCHGLPIEWKIEEQYKKNKKNKNEVPIVEFRKECRAFAEKWIKVHKDQFKRLGVVGDWQNYYSTMSYDAEAQIVRELGKFLKEGSLYRGFKPVLWSTVEKTALADAEVEYQDHKSDTIYASFQVKKTNVQELSDSEIVIWTTTPWTIPANKALAYNENLDYLLIKISDTSDFKNKKIVVAEALLESVKKDCNIENYEILKKLKGKEL

SEQ ID NO: 161878 - protein, 250 aa, Unknown
  Bacterial polypetide isolated from the Sargasso Sea
DILNFWDKTNLYKKIRQKYQGKELFLLHDGPPYANGAIHLGHSVNKILKDITIKSKTLHGLDSPFIPGWDCHGLPIELNVEKKHGKNSELVKNKEAFQKACKEYAESQINKQLDDFKRLGVLGDWENSYKSLDPKFEADIVRSLGIIYKEGHLEKGEKPVHWCQESGSSLAEAEVEYIDKTSKAIDVAFKVDYSSLKKVKDLFNAEDSDEISFVIWTTTPWTIPSNVAVCINPKYKYSLIKMNNKFYVIS

SEQ ID NO: 161879 - protein, 261 aa, Unknown
  Bacterial polypetide isolated from the Sargasso Sea
FTVSAKRFGANVVADLYLEGSDQHRGWFQSSLLTSIAMNKSVPYKTVLTHGFVVDEQGRKQSKSLGNVVSPQKVWDSLGADILRLWVASTDFRSEMVASDEILKRTSDQYRRIRNTFRFILGNLSDFGDKDKVMFEDQVELDKWIINEIKTLQKEVISLYESFSYHKAIQKIHNFCVNELGGVYLDIIKDRLYTCKNDSLARRSCQTSLDCILNILVRLISPILSYTAEEIWQTSNRLNSQEDSVFLSNFDNFEEDSKSNI

SEQ ID NO: 161880 - protein, 304 aa, Unknown
  Bacterial polypetide isolated from the Sargasso Sea
EPGILEMWEKLNLYNKLREANKGKEKFVLHDGPPYANGHIHMGTALNKILKDIITRFHQMDGKDSVYVPGWDCHGLPIEWKIEEQYKKNKKDKDQVPIKDFRSECREFAEKWIKVHIKEFRRLGVEGDWKNYYSTMSFDAEAQIVRELGKFLMDGSLYKGYKPVLWSTVEKTALADAEVEYKDHTSNTIYVGFKVKNSKNNLLKDTEIIIWTTTPWTIPANKALAYNKNLDYSVIEINSVLENFNNKKIIIATKLIDQVSKECEIETYKLIGKIKGKDLEGTICSHPFEKLGYQYDVPMLEANL

SEQ ID NO: 161881 - protein, 251 aa, Unknown
  Bacterial polypetide isolated from the Sargasso Sea
MSKSNINLPKTAFSMKANLQNKEPGIIDYWDKIDLYKKLRSSSKGKTKFVLHDGPPYANGDIHMGTALNKILKDIIVKFHQMKGEDSVYVPGWDCHGLPIEWKIEEQYKKNKKNKNEVPINEFRKECRDFAKKWIEVHKKQFQRLGVVGDWENYYSTMSFDAEAQIVRELGKFLKEGSLYRGYKPVLWSTVEKTALADAEVEYMDHKSDTIYAAFNIKKSKNEKLLNTQIIIWTTTPWTIPANRALAYNEN

SEQ ID NO: 161882 - protein, 312 aa, Unknown
  Bacterial polypetide isolated from the Sargasso Sea
RYAVADLYLEGSDQHRGWFQSSLLTSIAMNKSAPYKTVLTHGFVVDEQGRKQSKSLGNVVSPQKVWDSLGADILRLWVASTDFRSEMVASDEILKRTSDQYRRIRNTFRFILGNLSDFSDKDKVMFEDQVELDKWIINEIKTLQKEVISLYESFAYHKAIQKIHNFCVNELGGIYLDIIKDRLYTCKNDSLARRSCQTSLDCILNILVRIISPILSYTAEEIWQTSNRLNTQEDSVFLTNFDNFEEDFESNINQSEWKRIFEIKDAVNQTIEEMRNENKIKGSLDSIVDVQATSDDISVSKKLGEELHFLFI

SEQ ID NO: 161883 - protein, 242 aa, Unknown
  Bacterial polypetide isolated from the Sargasso Sea
MADNNLNLPKTSFSMKANLPSKEPKILETWDKIKLYERLRKKSAGKTKFVLHDGPPYANGHIHMGTALNKILKDIITKFHQMDDKDSIYVPGWDCHGLPIEWKIEEQYKKRKKNKDQIPIKDFRKECREFAEKWIVIHKKEFKRLGVIGDWENYYSTMSYDAEAQIVRELGKFLKEGSLYRGFKPVLWSTVEKTALADAEVEYKDHKSNTIYAGFDVKKSDKDYLKNTSIIIWTTTPWTIPA

SEQ ID NO: 161884 - protein, 294 aa, Unknown
  Bacterial polypetide isolated from the Sargasso Sea
KTNKVLIDDEVTENIAAIFEKEGADCWFEDDAQKFLGKKYKSSDYEKLNDIVEVWFDSGSTHSYVLEKREDLMWPASMYLEGSDQHRGWFHSSLLESCGTRGRAPFNSILSHGFVVDGKGLKMSKSLGNIMAPQDILKKYGADILRIWVAASDYAEDLRIDKSILEQHAESYRKIRNTFRYILGNIKDKHEKVDYVKLDPKELPELEQYMLHKLYILSKNFNKNFDQYNFHALYKDILNFCTVDLSAFYFDIRKDTLYCDKLESKKRKSTILFLNILLDVLLKWFAPNFIIYYR

SEQ ID NO: 161885 - protein, 289 aa, Unknown
  Bacterial polypetide isolated from the Sargasso Sea
MHIGHALNKILKDVINRCQQMLGKDANFVPGWDCHGLPIEWKIEEKYRKKKKNKDRVPVVEFRRECRVFADEWIDVQRNEFKRMGVIGNWDNPYTTMTYAAESKIAEELGKFLLDGSLYRGSKPVMWSPVEKTALAEAEVEYYDHTSTTIFVRFPVISPSVPEVDGAAIVIWTTTPWTMPGNRAVAFGPAIEYTVFEVTGTAEASHAQVGETLIVATERLGEMTRECGITSHETRATLKGGSLTGTVCRHPLRGQGFDYDVPALEADFATTEEGTGFVHIAPGHGADDW

SEQ ID NO: 161886 - protein, 285 aa, Unknown
  Bacterial polypetide isolated from the Sargasso Sea
NFKKDFFLMNSYITIWTTTPWTIPANEAVAVNPKINYVFAIDEDRRIYLFAKELSSEISNKFNKDFMTLLDVKGSSLEDIEYQHPTKNKNCRVVIGGDYITTESGTGIVHTAPGHGIDDFNVGKKYDLPTTCVVDEKGNLNEHSGQFKGSNVLKDANDLIIEYLKENNLLLLQEKYKHRYPYDWRTKKPTIFRATEQWFASVNGFRSSALKAIEDVEWMPATGKKRIYSMVVGRGDWCISRQRSWGVPIPVFYKKNGNEILLNSDIINHIKKLFSEHGADIWWDW

SEQ ID NO: 161887 - protein, 299 aa, Unknown
  Bacterial polypetide isolated from the Sargasso Sea
VKAINETVFYPNKGKDRLLSMIEGRPDWCVSRQRVWGVPLPIFINKKTKEPLRDQKIIDRIASIYEKQGSDCWFTDDAKIFLGDDYDAKDYEKLNDIVEVWFDSGSTHSFVLEKRKDLKWPADMYLEGSDQHRGWFHSSLLESCGTRGKAPFKSILSHGFVVDGKGMKMSKSMGNVISPEDILKNYGADILRVWASASDYAEDLRIDKNILIQHAESYRKIRNTFRFMLGNLKDNFEKQNFQKIKLNEFDELEQFILHKLFSINQSVDENLKNYNFHKMYKDLLNFCTLDLSSFYFDIR

SEQ ID NO: 161888 - protein, 252 aa, Unknown
  Bacterial polypetide isolated from the Sargasso Sea
TCNNRGVGQRKYFKKLRDNSKGREKFVLHDGPPYANGHIHMGTALNKILKDVIVRTQQMAGKDSIYVPGWDCHGLPIEWKIEEEYRKKGKNKDDVPTVQFRNECREFAEKWIEIQKKEFRRLGVEGDWENPYLTMSNQAEAQIVRELGKFLLDESLYKGAKPVLWSVVEKTALADAEVEYEDHTSNTIYVKFLIKNSTDKDLIDSNIVIWTTTPWTIPGNRALAYGKELDYSLIVVEELEEDSLVKENDRLI

SEQ ID NO: 161889 - protein, 276 aa, Unknown
  Bacterial polypetide isolated from the Sargasso Sea
FLKDASIIIWTTTPWTIPANKALAFNSSIEYSVLEIDDLENFKDKKIVVAKNLIDEITKECEIKNYKELKTFKGSEFKGTICTHPFAKMNFDYDVPLLDAQFVNLEQGTGIVHCAPSHGPDDFNLCLKNNIPSLYTVDNAGLYTKEIPYFTNTHIFKADPIVIEKLKEQKKLLKNDKLNHSYPHSWRSKAPLIYRATPQWFISMQKNDLRKKAIKAINDTNFFPNKGKERLLSMVEGRPDWCVSRQRVWGVPLPIFINKKTKEPLRDQKVIDRIAN

SEQ ID NO: 161890 - protein, 160 aa, Unknown
  Bacterial polypetide isolated from the Sargasso Sea
MKSQNSKEQKLEFSYKETLNLLQTDFSMRANSVLREPEIQEFWAKNNIDFELGSKNSGNTFTLHDGPPYANGALHMGHALNKVLKDIINKYKTLKGFQVHYVPGWDCHGLPIELKVLQNLKSDERKNLDILSLRKKATDYAQTQINSQMEGFKRWGIWGD

SEQ ID NO: 161891 - protein, 293 aa, Unknown
  Bacterial polypetide isolated from the Sargasso Sea
MAENNLFFPKTAFSMKANLPSKEPKILENWDKTKLYEKLRKRSLGREKFILHDGPPYANGHIHMGTALNKILKDIVTKFHQMNNKDSIYVPGWDCHGLPIEWKIEEQYKKKKKNKDEIPTKDFRKECREFAQKWIDIHKTEFKRLGVIGDWENYYSTMSFDAEAQIVRELGKFLLEGSLYRGFKPVLWSTVEKTALADAEVEYKDHKSNTIYAQFKIEKTDQNFLKDAFVIIWTTTPWTIPANKALAYNQNLTYSVLQVDNKKIVVAEKLINSVVENCSLGKYKIIKSFEGKL

SEQ ID NO: 161892 - protein, 319 aa, Unknown
  Bacterial polypetide isolated from the Sargasso Sea
MEYKNTIFLPKTSFEMKANLPVKEPKILEDWDREKIFYKLREKSKGREKFVLHDGPPYANGHIHIGTALNKILKDVIVRTQQMAGKDSIYVPGWDCHGLPIEWKIEEEYRKKGKNKDDVPTVQFRNECREFAEKWIKIQKKEFRRLGVEGDWDNPYLTMSNQAEAQIVRELGKFLINESLYKGAKPVLWSVVEKTALADAEVEYEDHTSNTIYVKFLVNKSEDIDLIGSNIVIWTTTPWTIPGNRALAYGEELEYSLITIDEVNENSLAQIKDKLILAKELLDTVTKEIGITKYSIKKNFKGSNLCSCECEHPFKKLGY

SEQ ID NO: 161893 - protein, 298 aa, Unknown
  Bacterial polypetide isolated from the Sargasso Sea
ERKFLNGLYNPDQYEQVKDILDVWFDSGSTHAYVLRDRSDGEWPADLYLEGTDQHRGFFHSSLLQSCGTQGRAPYKGVLTHGFILDEKGLKMSKSLGNTVSPQQVIKQYGADILRLWVAQSDYTVDMRIGPEILKGVADSYRKLRNTARFLLGNLIEYSKNEFDYNGLPDLEKYILSRVFEVDKRIREAYDNYSFQNVFQIYFQFCTQDLSSFYFDIRKDVLYCEDKSSTKRKATLAILDLLFYRLTTWFAPILPFTMEEVFLERFPHEDKSVHLLDIPKSEDHWKNKEIEEKWDLIR

SEQ ID NO: 161894 - protein, 264 aa, Unknown
  Bacterial polypetide isolated from the Sargasso Sea
MKSQNNKEPKSDFSYKETLNLLKTDFSMRANSVVREPEIQNFWAKNNIDFELGSNNRGETFTLHDGPPYANGALHMGHALNKVLKDIINKYKTLKGFKVHYVPGWDCHGLPIELKVLQKLSSDERKELDTLNLRKKATDYAYIQINNQMEGFKRWGIWGDWDNPYLTLKKSYESAQIGVFGKMFLNGYIYRGLKPVHWSPSSRTALAEAELEYPEEHYSKSIYVSLKITKIPDEIFLKLCQENTINKKDHFLSNSFITIWTTTP

SEQ ID NO: 161895 - protein, 264 aa, Unknown
  Bacterial polypetide isolated from the Sargasso Sea
NLEQGTGIVHCAPSHGPDDFNLCLKNNIPSLYTVDNAGLYTKEIPYFENTHIFKADPTVIEKLKEQNRLLKSDKLSHSYPHSWRSKAPLIYRATPQWFISMQKNDLRKKAIKSINETVFYPKKGKERLLSMIEGRPDWCVSRQRVWGVPLPIFINKKTKEPLRDQKVIDKIASIYEKQGSDCWFTDDPAIFLGDDYDSKDYEKLNDIVEVWFDSGSTHSFVLEKRKDLKWPADMYLEGSDQHRGWFHSSLLESCGTRGKAPFKS

SEQ ID NO: 161896 - protein, 273 aa, Unknown
  Bacterial polypetide isolated from the Sargasso Sea
SKAPLIYRATPQWFISMEKNSLRNKAIKAINDTSFYPEKGKERLLSMIEGRPDWCVSRQRVWGVPLPIFINKKTKEPLRDKKIIDRIAEIYEKEGSDCWFTDDSEKFLGKDYDPKSYEKLNDIVEVWFDSGSTHSFVLEKRKDLKWPADMYLEGSDQHRGWFHSSLLESCGTRGRAPFNSILSHGFVVDGKGLKMSKSSGNVISPEDILKNYGADILRAWVAASDYAEDLRIDKNILAQHAESYRKIRNTFRFILGNIKDNFEPQKFNSIEIK

SEQ ID NO: 161897 - protein, 290 aa, Unknown
  Bacterial polypetide isolated from the Sargasso Sea
LKLWKNINLYDELRKSSKENEKFVLHDGPPYANGNIHMGTAYNKILKDIIVRFHQMNGKDSVYVPGWDCHGLPIEWKIEEQYKKNKKNKNDVPIVEFRKECRAFAEKWIDVHKDQFKRLGVVGDWNNYYSTMSFDAEAQIVRELGKFLKEGSLYRGFKPVLWSTVEKTALADAEVEYQDHKSDTIYASFPVKSSNIKELNNAEIIIWTTTPWTIPANKALAYNESLDYLLVEINDEGDFKNKRIVFADALLESVVQDCKIKNYKKIKKLKGKDFKGTICNHPFFKLGYDY

SEQ ID NO: 161898 - protein, 295 aa, Unknown
  Bacterial polypetide isolated from the Sargasso Sea
KINLYNLLRKNNKGKEKFVLHDGPPYANGNIHMGTAFNKILKDIITKFHQMDGKDSVYVPGWDCHGLPIEWKIEEQYKKNKKNKNDVPIVEFRKECREFANKWIKVHKEQFKRLGVVGDWENYYSTMSYDAEAQIVRELGKFLKEGSLYRGYKPVLWSTVEKTALADAEVEYLDHVSDTIYVSFPIKKSNLKELKDSEIIIWTTTPWTIPANKALAYNKSLKYVVVQINDQNDFNKRKIIVAKELLERVVKECDIKDFNIINEIEGKDFSGTICSHPLLKIGYDYDIPMLEARFV

SEQ ID NO: 161899 - protein, 292 aa, Unknown
  Bacterial polypetide isolated from the Sargasso Sea
LSKDYNETLNLPKTDFSMRANLPNNEPDLLSYWDSINLYGILSNKSGEKFELHDGPPFANGKIHIGHCLNKILKDIILKFNSVQGRSIAYTPGWDCHGLPIEHQVSKKIKTKDITKLEIRNLCEDFAMNFVNSQRDEFKRLGVISDWDNPYLTMSPVFESNQIRVFSEMYFKGYIYRGLKPVNWSPSSQTALAEAELEYPENHISKSVYVKFNLQGNPKEIENVSLLIWTTTPWTLPANKAVSVNKNFTYGIYELENENLIIETSLSKIIEDKLGKSLRKVHELMGQDLLSF

SEQ ID NO: 161900 - protein, 284 aa, Unknown
  Bacterial polypetide isolated from the Sargasso Sea
YLEGSDQHRGWFHSSLLESCGTRGRAPFDTILSHGFVVDGKGLKMSKSLGNVIAPEDILKKYGADILRIWVASSDYAEDLRIDYSILDQHSESYRKIRNTFRYLLGNINDTFETIDLEQTNIKKLPELERFMLHKIYVLDENFKRYFKNYDFHNLYKELLNFCTVDLSAFYFDIRKDCLYCDPKNSEKRKSAILILKVILESLLKWFAPILSFTTEEIFRLVSNNKKSIHLEKFLDFPEIIKDDELNAKWSELIKLRDICNLSIEQKRGEKIIGSSLEASLKIK

SEQ ID NO: 161901 - protein, 274 aa, Unknown
  Bacterial polypetide isolated from the Sargasso Sea
KDGISAWDTLDLKDYIDDHEDYIKTSDSLDVWFDSGVTHFAVSAKRFGANVVADLYLEGSDQHRGWFQSSLLTSIAMNKSVPYKTVLTHGFVVDEKGRKQSKSLGNVVSPQKVWDSLGADILRLWVASTDFRSEMVASDEILKRTSDQYRRIRNTFRFILGNLSDFSDKDKIMFEDQVELDKWIINEIKTLQKEVISLYESFSYHKAIQKIHNFCVNELGGVYLDIIKDRLYTCKNDSLARRSCQTSLDCILNVLVRLISPNTFLYCRRNLANK

SEQ ID NO: 161902 - protein, 285 aa, Unknown
  Bacterial polypetide isolated from the Sargasso Sea
HVSDTIYTAFPVKKSNINELIGSNVVIWTTTPWTIPANKALAYNQSLDYVLCEIDNNDILENEKIIIAKELLSSVTKETEYKIKILKEFKGKEFDGTICSHPFHKIGYDYDVPMLEARFVTTEQGTGIVHCAPSHGPDDFNLCINNGIKAIETVDDDGRYTKHIPIFEGTHIFKANDIVIEKLKELKALLKNGKLTHSYPHSWRSKAPLVHRATPQWFISMESHRLRDKALKAINDTTFYPSKGKERIKAMIETRPDWCVSRQRVWGVPLPIFISKKNGEILIDE

SEQ ID NO: 161903 - protein, 193 aa, Unknown
  Bacterial polypetide isolated from the Sargasso Sea
MEIPVSKESRDAAEGRPSYKDTLNLLQTGFGMRANAIQREPELQGFWAEQGIDLSLGLENSGAVFTLHDGPPYANGALHMGHALNKVLKDVINKYQVLRGRRVRFVPGWDCHGLPIELKVLQSMDQEQRQALTPIKLRKKAAAYARKQVEGQMKGFQRWGIWADWDHPYLTLQKEYEAAQIRVFGEMVLKGHI

SEQ ID NO: 161904 - protein, 261 aa, Unknown
  Bacterial polypetide isolated from the Sargasso Sea
LELKDYISDADDYVKTSDSLDVWFDSGVTHFAVSSKSFGKNIVSDLYLEGSDQHRGWFQSSLLTRIAMNGDAPYKTVLTHGFVVDEEGRKQSKSLGNVVSPQKVWDNLGADILRLWVASTDFRSEMVASDEILKRTSDQYRRIRNTFRFILGNLNDYQDKDQIKFENQVELDKWIINEAKGLQNDVLKMYESYSYHKAVQKIHNFCVNELGGIYLDIVKDRLYTCKSDSVARRSCQTSLDYLLNILVRLIAPILSYTAEEI

SEQ ID NO: 161905 - protein, 296 aa, Unknown
  Bacterial polypetide isolated from the Sargasso Sea
MGVTGDQPYLSLDKKFEASQIKLFGEMVFKGYIYRGLKPVHWSPSSQTALAEAELEYPTGHISKSIYVGFKVNQIPKRLTQEISKQAPDLINSEGQLKEVKLVIWTTTPWTIPANEAISVNQKLEYVIAQSSDLSLIIIANDLLEEVSKSVGIDYEKRVLIKGSILDGIIYKHPLFDKTSPVVLGGDYITTESGTGLVHTAPGHGVDDFNTGKKYNLSISCPVDEKGFLTKEAGKFEGLNVLKDANSVIISDLINAGSLLKEIPYEHRYPYDWRTKKPTIFRATEQWFASVEGFRD

SEQ ID NO: 161906 - protein, 272 aa, Unknown
  Bacterial polypetide isolated from the Sargasso Sea
WTTTPWTIPANRALAYNPNLKYSIIKIEDETDFKNKNIVLADDLLKSLIEECNIKKFSKVDTFLGKDFNGTICEHPFSSIGFDYEIPMLEANFVTIEQGSGIVHCAPSHGPDDFNLCLKNKIKAEETVDDDGKYTKHVPVFEGIHIFKANKIVIEKLKEHKKLLSNGELIHSYPHSWRSKAPLVHRATPQWFISMESHGLRAKALKSIDETSFFPNKGKERLRSMIELRPDWCVSRQRVWGVPIPVFLSKKTNQVLIDEEVTENIAKIFEKE

SEQ ID NO: 161907 - protein, 219 aa, Unknown
  Bacterial polypetide isolated from the Sargasso Sea
VENWEKGEIFKKLRNNSKGRKKFVLHDGPPYANGNIHMGTALNKILKDIITRFHQMSGQDSIYVPGWDCHGLPIEWKIEEKYKKNKKNKDEVPVKDFRNECRDFAKKWIDIQAKEFKRLGVIGDFKNYYSTMSFQGEAQIVRELGKFLMNKTLYQGFKPVLWSTVEKTALADAEVEYKDHISNTIYVAFKITQTDKDFLKDANIIIWTTTPWTIPANKA

SEQ ID NO: 161908 - protein, 315 aa, Unknown
  Bacterial polypetide isolated from the Sargasso Sea
KETNQLHKDTSKILDNAAKIISEKNIEGWFDFDKSKLINNSEEYYLITDTLDVWFDSGVSHISVMQQRGLGDTADLYLEGSDQHRGWFQSSLITALAIMNKPPYKKVLTHGFVVDAEGQKMSKSQGNVIAPQSIIKDKGADILRLWVATTDYTKEMHISEEILKRASEGYRRIRNTIKFLLSNTSDYSQKDNKEIDNLTIVDKWILNQAFDLQHLIQKNYEDFKFHQIIQDIQNFCSVQLGGYYLDIIKDRLYTSKTDGEPRRASQYVCNNILKMINIWIAPILPFTAEEVYQSMDDKKFESIFLEEWSSDKFII

SEQ ID NO: 161909 - protein, 80 aa, Unknown
  Bacterial polypetide isolated from the Sargasso Sea
MEIKDSITLPKTGFSMKADLPKKEPGILDKWLKNDIYKKLREQSNSKEKFILHDGPPYANGHLHMGHALNKILKDIIVKY

SEQ ID NO: 161910 - protein, 248 aa, Unknown
  Bacterial polypetide isolated from the Sargasso Sea
SDKLNHSYPHSWRSKAPLIYRATPQWFISMQKNKLRDKAVKAINETMFYPSKGKDRLLSMIEGRPDWCVSRQRVWGVPLPIFINKKTKEPLRDQKIIDRIASIYEKQGSDCWFTNDAKFFLGEDYDAKDYEKLNDIVEVWFDSGSTHSFVLEKRKDLKWPADMYLEGSDQHRGWFHSSLLESCGTRGKAPFKSILSHGFVVDGKGMKMSKSMGNVISPEDILKTYGADILRVWASASDYSEDLRIDKN

SEQ ID NO: 161911 - protein, 165 aa, Unknown
  Bacterial polypetide isolated from the Sargasso Sea
MKDYKETLNLPNTEFAMKANLPNKEPGLLDYWEEIDLYEKLKEKGKGKEKFILHDGPPYANGAIHIGHAVNKTLKDIVIKSQSLSGKYAPYKPGWDCHGLPIELNVEKKKGKAGNKISVGEFRTACRDYAKGQIEVQKQEFKRLGIIGDWDRPYLTMDSKFEAGI

SEQ ID NO: 161912 - protein, 186 aa, Unknown
  Bacterial polypetide isolated from the Sargasso Sea
MNYKETVFLPRTDFPMRAGLPKKEPEILEGWKQIDIYNRLREARADAELFVLHDGPPYANGQLHIGHALNKILKDVINRSQSMLGKNANYVPGWDCHGLPIEWKIEEQYRKKGKDKDEVPVEEFRQECRDFAAHWLDVQSEEFQRLGVLGDWHVPYTTMAYEAEATIAGELGRILMDGSLYRGASR

SEQ ID NO: 161913 - protein, 279 aa, Unknown
  Bacterial polypetide isolated from the Sargasso Sea
TINYRDTLNLPVTDFSMKAGLPRKEPEILDLWSNSDLYGKIRKKYEDKELFLLHDGPPYANGDIHLGHSVNKILKDITVKHKTMQGFNAPFVPGWDCHGLPIELNVEKKHGKNSELVKNKESFQKACKEYAESQIKKQLVDFKRLGVLGDWENSYKSLDPKFEADIVRSLGIIYNEGYLEKGEKPVHWCQESGSSLAEAEVEYIDKTSKAIDVAFRVDDSSLDTVKDLFNCDEPDEISFIIWTTTPWTIPSNVAVCINPIYKYSLIKMNEKFYVLAFEM

SEQ ID NO: 161914 - protein, 294 aa, Unknown
  Bacterial polypetide isolated from the Sargasso Sea
SLLESCGTRGRAPFESILSHGFVVDGKGLKMSKSLGNVIAPEDILKKYGADILRIWVASSNYAEDLRIDYSILDQHADSYRKIRNTFRYLLGNINDKFKEINLDNLKVHELPELEQLMLHKIFVLNIKFKQYFNNYDFHNLYKELLNFCTVDLSAFYFDIRKDNLYCDPVESKNRKSTIMLLNILLSFLLKWFAPILSFTTEEIFRLLSKDKKSIHLEKFLEIPVKFKNDKLNEKWLELIKIRNICNISIEEKRANKEIGSSLEAHLKIFLNHKFKKLTNNIDFSEICILQKLK

SEQ ID NO: 161915 - protein, 287 aa, Unknown
  Bacterial polypetide isolated from the Sargasso Sea
LGVPGEWDNPYLTLDKRYEAEQIRAFAEIYGNNHVTFGHKPVHWCLDCQSALAEAEVEYMDKVSTSVDVLFKIVDPSEFIERTNASKINNEKELFIPIWTTTPWTLPSNEAVAMGEHISYGIYSLTLHERDILVVVANELRESIEKRWGVSNLEMLEEVSVENLSGLQLQHPFDERTVPVLLGDHVTTENGTGSVHTAPAHGHEDFQIGKENDLDLKCYVNSYGVFTDAKETFAKQHIFKSESDFIERLDESNLLISSEKFEHSYPHCWRHKTPVIFRTTRQWFISM

SEQ ID NO: 161916 - protein, 315 aa, Unknown
  Bacterial polypetide isolated from the Sargasso Sea
ILGNDFEGTICSHPFHKLGYDYNVPMLEARFVTTEQGTGIVHCAPSHGPDDFNLCLNNGIKALETVDDDGKYTNNIPLFEGTHIFKANAIVIEKLKKEKKLVFNGKLNHSYPHSWRSKAPLVHRATPQWFISMESHGLRDKALKAINKTVFYPEKGKERLKSMIETRPDWCVSRQRVWGVPLPIFINKKDGKVLVDDEVFENIAKIYEKEGSDCWFKDDAQKFLGKKYKAENFTKLSDIVEVWFDSGSTHSFVLETRKDLKWPASMYLEGSDQHRGWFHSSLLQSCGTRGEAPFETILSHGFVVDGKGLKMSKSL

SEQ ID NO: 161917 - protein, 279 aa, Unknown
  Bacterial polypetide isolated from the Sargasso Sea
NLPKTAFSMKANLPAKEPNLVKHWDKIKLYNKLRESTKGKEKFVLHDGPPYANGNIHMGTALNKILKDIITKFHQMDGKDSVYVPGWDCHGLPIEWKIEEQYKKNKRNKNEVPITEFRKECREFANKWIKVHKDQFKRLGVLGDWENYYSTMSFDAEAQIVRELGKFLKEGSLYQGYKPVLWSTVEKTALSDAEVEYMDHTSDTIYTSFLVKKTVIEELNDCEIVIWTTTPWTIPANKALAYNQNLKYSIIQIEDDNEFKKRKIVVAKDLLNSVKSECN

SEQ ID NO: 161918 - protein, 295 aa, Unknown
  Bacterial polypetide isolated from the Sargasso Sea
KKFIGSNIMIWTTTPWTIPANKALAYNQNLVYVLCEINNKDKLQNKKIVIAKDLLVSVAKDTECKIDILFEFKGREFEGTICSHPFHTIGYDYDIPMLEARFVTTEQGTGIVHCAPSHGPDDFNLCINNGIKAVETVDDDGKYTKQIPIFEGTHIFKANVIVIEKLKETKNLLSNGKLTHSYPHSWRSKAPLVHRATPQWFISMESHKLRDKALKAIDNTTFYPAKGKERIKSMIETRPDWCVSRQRVWGVPLPIFISKKDGEILIDDEVFENIAEIYEKEGSDCWFEENFQRFL

SEQ ID NO: 161919 - protein, 278 aa, Unknown
  Bacterial polypetide isolated from the Sargasso Sea
RDKGVIENIAKIYEKEGSDCWFYDDPQRFLGNKYKKEDYIKSSDIVEVWFDSGSTHSFVLEKRKDLKWPASMYLEGSDQHRGWFHSSLLESCGTRGKAPFESILSHGFVVDGKGMKMSKSAGNIISPEEILKKYGADILRLWVASSDYAEDLRIDHTILEQHAESYRKIRNTFRYILGNLKDNFTPQNFKLIKVKELPELEQVILHKLYFLSLEIKKSLKDYNFHKLQKELLNFCTLDLSSFYFDIRKDSLYCDDLNSEKRKSCIISLNIILECLLKW

SEQ ID NO: 161920 - protein, 284 aa, Unknown
  Bacterial polypetide isolated from the Sargasso Sea
GHALNKTLKDTILRYKWMQGYNAPYIPGWDSHGLPIEHKVSREIQESGRTDYTPLEVREACAAFADKYRQVQTAQFQRLGVLADWANEYWTIQPQYEAAELETFATFVEQGLVYRSKKPVYWSIPCATALAEAEIEYQPHKSISIYVKFALSPEACQALGLPVGEASILIWTTTPWTLPANLTVSVHPQIEYSAIRTEKGILVVASALVDQIAGECGLKEAATVATFSGAQLEKLEARHPFIDRASPILLADYVTTEAGTGCVHTAPGHGLDDYLTGMQNGLDV

SEQ ID NO: 161921 - protein, 99 aa, Unknown
  Bacterial polypetide isolated from the Sargasso Sea
MSDYKSTLNLPETGFPMRGDLAKREPGMLARWTDDDLYGIIRAAKKGKKTFILHDGPPYANGSIHIGHSVNKILKDIIVKSKGLTGYDSPYVPGWDCHG

SEQ ID NO: 161922 - protein, 304 aa, Unknown
  Bacterial polypetide isolated from the Sargasso Sea
IRPDWCVSRQRVWGVPIPVFLSKKTNKALIDDEVIENIANIFEKEGADCWFEGDTQKFLGKKYKSEDYIKMTDIVEVWFDSGSTHSYVLEKREDLKWPASMYLEGSDQHRGWFHSSLLESCGTRGKAPFESILSHGFVVDGKGLKMSKSTGNVISPDDILKKYGADILRIWVSSSDYSEDLRIDYTILEQHAEAYRKIRNTFRYLLGNLNDNFSEINFEKININKLPELEQYMLHKISVLNEKFQKNFESYNFHNLYKELLIFCTVDLSSFYFDIRKDCLYCDSIDSQKRKDCINVLNIILEML

SEQ ID NO: 161923 - protein, 105 aa, Unknown
  Bacterial polypetide isolated from the Sargasso Sea
PSWGEERILSMLEDRPDWCISRQRNWGVPITLIIHNQTGEIHPKQNILFNQIAEVIEKEGIEGWDNLKLDSLIDDAESYSKVHDTLDVWFDSGVTHMCVLDKLYG

SEQ ID NO: 161924 - protein, 160 aa, Unknown
  Bacterial polypetide isolated from the Sargasso Sea
MTDKSQNNDQKNYKDTLNLPKTGFSMKANLAQREPGVLKRWQDENIYHKIREFSAGGKSFVLHDGPPYANGPIHIGHAFNKVLKDIIVKSKTIAGFDAPYIPGWDCHGLPIELQVEKKVGKPGVKVSHNDFRRACREYAKKQVERQSVSFQRLGVFGLWK

SEQ ID NO: 161925 - protein, 252 aa, Unknown
  Bacterial polypetide isolated from the Sargasso Sea
MSKDHINLPKTAFSMKANLPGKEPALVEYWDKINLYSKIREENKGNKKFVLHDGPPYANGNIHMGTALNKILKDIVTKFHQMSGEDSVYVPGWDCHGLPIEWKIEEQYKKNKKNKNEVPINEFRKECRDFANKWIDVHKKQFKRLGVIGDWNNYYSTMSFGAEAQIVRELGKFLKEGSLYRGYKPVLWSTVEKTALADAEVEYMDHKSDTIYAAFKVKNSQNKNLLNSDVIIWTTTPWTIPANRALAYNQNL

SEQ ID NO: 161926 - protein, 213 aa, Unknown
  Bacterial polypetide isolated from the Sargasso Sea
KKSLVISSKLLQKTLERYELEKFKSLGQVKGKELVGIKCKHPFLDQESLIISSSHVTDEIGTGFVHTAPAHGLEDHEACRDYDFDNSSLVQADGKFLEGVPYVGGKKISEANQVVVDTLNSKNLLMSKNKYRHSFPHCWRHKTPLFFRATPQWFISMDKNDLLDSCLKKIDEINWLPEWGKSRINSMLSDRPDWCISRQRHWGAPIPLFVNKE

SEQ ID NO: 161927 - protein, 263 aa, Unknown
  Bacterial polypetide isolated from the Sargasso Sea
MSKEKLNLPRTSFAMKAALPSREPLILEQWEKNKIFNQLRKNSQGREKFILHDGPPYANGHIHMGTAYNKILKDIITRFHQMDGKDSVYVPGWDCHGLPIEWKIEEEYKKKKKNKDQVPIKDFRQECREFAKKWINIHITEFKRLGVFGDFENYYSTMSNEAEAQIVRELGKFLLDGSLYQGFKPVLWSTVEKTALADAEVEYLDHTSNTIYVAFKVKKTQYDFLKDTNVIIWTTTPWTIPANKALAFHKSIEYSLVEIDELN

SEQ ID NO: 161928 - protein, 311 aa, Unknown
  Bacterial polypetide isolated from the Sargasso Sea
KFLGRKYKAEDFEKLSDIVEVWLDSGSTHSFVLEKRKDLKWPASMYLEGSDQHRGWFHSSLLESCGTRDRAPFESILSHGFVVDGKGLKMSKSLGNVIAPEDILKKYGADILRIWVASSNYAEDLRIDYSILDQHAESYRKIRNTFRYLLGNLNDNFEQINLDTIKIEKLPELEQFMLHKIYNLNFKFNKYFKNYDFHNLYKELLNFCTLDLSAFYFDIRKDTLYCDPVNSEKRKSALILLNVILNSLIRWFAPILSFTTEEIYQLISKNKKSIHLEKFLDFPKKFKNSHLNSKWEQLIKIRDICNLSMSK

SEQ ID NO: 161929 - protein, 316 aa, Unknown
  Bacterial polypetide isolated from the Sargasso Sea
EVEYKDHKSDTIYASFKVKKSKIEKLKNSEVIIWTTTPWTIPANKALAYNPSLKYIIIKIEDEGDFVGKQILLAEDLLKSVVEDCKIKNYKKILNFKGKELEGTVCSHPFYEIGFKHNIPMLEALFVTTEQGSGVVHCAPSHGPDDFNLCIKNGIKAEETVDDDGRYTKNVPLFEGTHIFKANKIIIEKLKEQKKLLASGELVHDYPHSWRSKAPLVHRATPQWFISMESHGLRSKALKAINDTKFYPNKGKERLKSMIETRPDWCVSRQRVWGVPIPAFISKKTKEILVDETIIENIAKIFEKEGADCWFEKDYK

SEQ ID NO: 161930 - protein, 298 aa, Unknown
  Bacterial polypetide isolated from the Sargasso Sea
LRFWFDSGSTHSFVLEKRDDLKWPASMYLEGSDQHRGWFHSSLLESCGTRGRAPFESILSHGFVVDGKGLKMSKSLGNVIAPEDILKKYGADILRIWVASSNYAEDLRIDYSILDQHAESYRKIRNTFRYLLGNINDNFENVNLNKLDLTELPELEQFMLHKLYILNDNFKKYFNNYDFHNLYKELLNFCTVDLSAFYFDIRKDNLYCDPIDSKKRKSTILLLNIILNSLLKWFAPILSFTTEEIFKLLFKDQKSIHLEKFLDFPDKFKNEELCEKWIELIKIRNICNISMKKKEPVK

SEQ ID NO: 161931 - protein, 272 aa, Unknown
  Bacterial polypetide isolated from the Sargasso Sea
ILHDGPPYANGNIHMGTAYNKILKDLITKFHQMDGKDSVYVPGWDCHGLPIEWKIEEQYKKNKKNKNDVPVVEFRKECREFASKWIKVHKDQFKRLGVIGDWENYYSTMSFEAEAQIVRELGKFLKEGSLYRGYKPVLWSTVEKTALSDAEVEYLDHVSDTIYVSFPIKKTNSKNLDNCEVIIWTTTPWTIPANKALAYNNSLKYLIITIEDDGDFKRKKIIVAKDLLEVFVAENKIESYKIINEFSGKEFKGTICSHPFLSLGYDYDVPMF

SEQ ID NO: 161932 - protein, 285 aa, Unknown
  Bacterial polypetide isolated from the Sargasso Sea
MDSVVQKCEIKNYKVISNFPGTEFEGTSCSHPFLEIGYNYNIPLLEANFVNLEQGTGIVHCAPSHGPDDFNLCLNHGIKAVETVDDNGIYTKNILKFEGIHIFKANPIVIEKLKEHNKLFSSGKLNHSYPHSWRSKAPLVHRATPQWFISMDSHGLRDKALKAIDETSFYPAKGKERLRSMIETRPDWCISRQRVWGVPLPIFISKKDGKVLIDDEIFENIAKIYEKQGSDCWFSEDYQIFLGAKYKADDYLKLSDIVEVWFDSGSTHSFVLEKRKDLNGLLQCI

SEQ ID NO: 161933 - protein, 162 aa, Unknown
  Bacterial polypetide isolated from the Sargasso Sea
DEEVIENIASFYEKEGSDCWFSDNPQRFLGDKYSAKEYEKLSDIVEVWFDSGSTHSFVLEKREDLKWPASMYLEGSDQHRGWFHSSLLESCGTRGRAPFESILSHGFVVDGKGLKMSKSLGNVIAPEDILKKYGADILRIWVASSNYAEDLRIDFSILDQHA

SEQ ID NO: 161934 - protein, 317 aa, Unknown
  Bacterial polypetide isolated from the Sargasso Sea
QRFLGEDYSITDYEQVKDVVEVWFDSGSTHAFCLEKRSDLKWPASMYLEGSDQHRGWFHSSLLESAGTRGQAPYESVLTHGFVVDGKGRKMSKSLGNVISPDDILKKYGVDILRLWVVASDYYDDLKLDDAILKSQAESYRRIRNTFRFLIGNLNNFNNDENISEDHFPELEKYLLHRLWEVDKIVKRCIETFNFHLMFTTLLNFCSNDLSAFYFDIRKDVIYCDSNESKTRRSSRTLLNIIFNFLVRWFAPSISFTTEEAWKSIGNKTSIHLEDFLNCKDSYQNNKINEKWSIIKNIRKVSTGAIEKLREEKLIRS

SEQ ID NO: 161935 - protein, 290 aa, Unknown
  Bacterial polypetide isolated from the Sargasso Sea
KMSKSLGNIIAPEDILKKYGADILRIWVAASDYAEDLRIDYSILEQHAESYRKIRNTFRYILGNLNDKFEKVDPEKINISNFPELEQYMLHKIYNLNVLFEKNFEKYNFHTIYKEIINFCTSDLSAFYFDIRKDTLYCDSLESKKRISTIEFLNIVLEILLKWFAPVLSFTTEEIYSLLKIKEKGSIHLEKFPVIPSNWNNPNLNNKWTELIKIRDKCNSSIELKRASKEIGSSLEANLKIHLNDKLIKLSKGTDFSELCITSGADVDKIKEDDKEEIIVETNKAEGKKC

SEQ ID NO: 161936 - protein, 290 aa, Unknown
  Bacterial polypetide isolated from the Sargasso Sea
VNERLDYALADDGTGRMLLVASDLIEPLTATLGLPLSRKLTVKGALLAGLMYRHPLLDRTSPVVIGGEYITTESGTGLVHTAPGHGVDDFHTGQKNGLPVLCPVDEGGTLTAEAGPFAGLNVLRDANPAIIEALDAAGALLKQETYGHRYPYDWRTKKPTIFRATEQWFASVDGFRQQALDAIDDVQWTPASGRNRIEAMVKERGDWCISRQRTWGLPIPVFYHRSSGEVLLNADTLSHIESLIGEHGADVWWEKDEADLLPPAYADQANQWRKGTDTMDVWFDSGSSWP

SEQ ID NO: 161937 - protein, 209 aa, Unknown
  Bacterial polypetide isolated from the Sargasso Sea
MGSPFTNFVNKKTNEVLIDNEVFDTIAKIYEKEGSDCWFSDNPQKFLGKKYNARDFEKLSDIVEVWFDSGSTHSFVLEKREDLKWPASMYLEGSDQHRGWFHSSLLESCGTRGKAPFESILSHGFVVDGKGLKMSKSLGNVIAPEDILKKYGADILRIWVASSNYAEDLRIDYSILDQHSESYRKIRNTFRYLLGNLNDKIEEIDLEKY

SEQ ID NO: 161938 - protein, 299 aa, Unknown
  Bacterial polypetide isolated from the Sargasso Sea
EKEGSDCWFSDDPQRFLGKKYNSKDYEKLSDIVEVWFDSGSTHSFVLEKREDLKWPASMYLEGSDQHRGWFHSSLLESCGTRGRAPFESILSHGFVVDGKGLKMSKSLGNVIAPEDILKKYGADILRIWVASSNYAEDLRIDHSILDQHAESYRKIRNTFRYLLGNLNDNFEKIDLQKINLSELPELEQFMLHKIYMLNSNFKNYFKNYDFHNLYKELLNFCTVDLSAFYFDIRKDTLYCDPIESQKRKSTIILLNVILNSLLRWFAPILSFTTEEIHRLIFNDNKSVHLETFLDYPEK

SEQ ID NO: 161939 - protein, 244 aa, Unknown
  Bacterial polypetide isolated from the Sargasso Sea
KFVLHDGPPYANGDIHMGTALNKILKDVIVKFHQMKGEDSVYVPGWDCHGLPIEWKIEEQYKKNKKNKNEVPINEFRKECRDFAKKWIEVHKKQFKRLGVVGDWENYYSTMSFDAEAQIVRELGKFLKEGSLYRGYKPVLWSTVEKTALADAEVEYMDHKSDTIYAAFNIKKSKNEKLLNTQIIIWTTTPWTIPANRALAYNENLKYVIIKIEDQSDFKDKQIIVAEDLLKSLIEDCNIKKVYK

SEQ ID NO: 161940 - protein, 298 aa, Unknown
  Bacterial polypetide isolated from the Sargasso Sea
TTDLPMKAGLSAKEPKILDFWKTENIYNQIRIERKEAKKFILHDGPPYANGDIHLGHAVNKVLKDIVIKYQTLIGYDAPYVPGWDCHGLPIELSIEKKHGKNNALVKDKKQFLEACRKYAETQISNQKDDFIRLGVLGDWENSYKSMDAEFEADIVRALGRIVTNGHLQKGEKPVHWCFDCKSALAEAEVEYSDKTSKAIYVKFGVQHKSVAQINSAFGKSDIKSCSAVIWTTTPWTLPANVAVCVGQSIEYSLCNLDDSYLIIASDLVSACSEKWDKKINILATCKGEMLEGVTLDH

SEQ ID NO: 161941 - protein, 305 aa, Unknown
  Bacterial polypetide isolated from the Sargasso Sea
FDEASLPLKEPEILKKWEKNIIFDKLRKKSKGKEKFVLHDGPPYANGHIHMGTALNKILKDIITRFHQMNGKDSVYVPGWDCHGLPIEWKIEEQYKKKKKNKDEVPIKDFRQECREFAKSWIEVHIKEFKRLGVVGDFENYYSTMSFEAEAQIVRELGKFLLDGSLYQGFKPVLWSTVEKTALADAEVEYLDHTSNTIYVSFKVKETNKDFLKDSSIIIWTTTPWTIPANKALAFNSNIEYAVLEIDQLEHFKDKRIVVAKNLIETIIKDCEIKNYKELKTFKGSEFKGTLCSHPFVKMDFDYDV

SEQ ID NO: 161942 - protein, 282 aa, Unknown
  Bacterial polypetide isolated from the Sargasso Sea
KLRDKSKGREKFVLHDGPPYANGHIHMGTALNKILKDVIVRTQQMAGKDSIYVPGWDCHGLPIEWKIEEEYRKKGKNKDDVPTVQFRNECREFAEKWIKIQKKEFRRLGVEGDWENPYLTMSNQAEAQIVRELGKFLLDKSLYKGAKPVLWSVVEKTALADAEVEYEDHTSNTIYVKFLIKNSSDKDLIDSNIVIWTTTPWTIPGNRALAYGKELDYSLIVVEELEEDSLVKKNDRLIFASELLESVTKEIGIKKFSTKKKFKGDNLSSCKCEHPFKKLGYD

SEQ ID NO: 161943 - protein, 287 aa, Unknown
  Bacterial polypetide isolated from the Sargasso Sea
ADAEVEYLDHVSDTIYAAFPVKNSNINELIGSNVVIWTTTPWTIPANKALAYNQSLDYVLCQIDNNNILENEKIVIAKELLSSVAKDTDYKIEILKEFKGKEFDGTICSHPFHKIGYDYDIPMLEARFVTTEQGTGIVHCAPSHGPDDFNLCINNGIKAIETVDDDGRYTKHIPIFEGIHIFKANNIVIEKLKELKGLLKNGKLTHSYPHSWRSKAPLVHRATPQWFISMESHKLRDKALKAINDTTFYPNKGKERIRAMIETRPDWCVSRQRVWGVPLPIFISKKN

SEQ ID NO: 161944 - protein, 300 aa, Unknown
  Bacterial polypetide isolated from the Sargasso Sea
MDHTSNTIYVGFKVKETDKDFLKDTSIIIWTTTPWTIPANKALAFNSNIDYSILEIGNLENFKEKKIVVATNLVKEIINACEIKSYKELRKFKGSEFQNTVCSHPFLKMKFDYDVPMLDAQFVNLEQGTGIVHCAPSHGPDDFNLCLKNNIPSLYTVDDAGLYTKEIPFFEKTHVFKADNIVIEKLKEQKKLLKNDKLNHTYPHSWRSKAPLIYRATPQWFISMQKNDLRKKAIKSINETNFFPKKGKDRLLSMIEGRPDWCVSRQRVWGVPLPIFINKKTNEPLRDQKVIDRIAFIYEK

SEQ ID NO: 161945 - protein, 239 aa, Unknown
  Bacterial polypetide isolated from the Sargasso Sea
HSWRSKAPLVHRATQQWFISMESHGLRKLALKALDQTKFYPSKGKERIKSMIETRPDWCVSRQRVWGVPLPIFVSKKDNKVLVDDEVFENIAKIYEKEGSDCWFSDDFQRFLGKKYKAEDYVQSKDIVEVWFDSGSTHSFVLEKRDDLKWPASMYLEGSDQHRGWFHSSLLESCGTRGKAPFESILSHGFVVDGKGLKMSKSLGNVIAPEEILKKYGADILRVWVAASNYAEDLRIDHS

SEQ ID NO: 161946 - protein, 283 aa, Unknown
  Bacterial polypetide isolated from the Sargasso Sea
VLDVVEVWFDSGSTHAFCLEQRQDLKWPASMYLEGSDQHRGWFHSSLLESTGTRGRAPYESVLTHGFVVDGKGRKMSKSLGNVISPEKILTQYGVDILRLWVVASDYYDDLKLDNNILKAQSDSYRRIRNTFRYLIGNLSNFNDVEKITSEKFPELEKYLLHRLWEIDQTIQECISTFNFHLMFTTLLNFCSNDLSAFYFDIRKDTIYCDSLKSIKRRSSRTLLNLVFEYLVRWLAPSLSFTCEEAWQSRGYKSSIHLEDFKRVDENFKNTKLGNKWNTIKIV

SEQ ID NO: 161947 - protein, 159 aa, Unknown
  Bacterial polypetide isolated from the Sargasso Sea
MSVDYKSTVFLPTTDFPMRGSLPEHEPKILERWLKIDLYKLLRDESKGREKFILHDGPPYANGNLHIGHALNKVLKDVINRSQQMLGKDANYVPGWDCHGLPIEWKIEEKYRKEGKDKDKIPVADFRQECRDFADHWIGVQSEEFQRLGVIGDWKNPYT

SEQ ID NO: 161948 - protein, 282 aa, Unknown
  Bacterial polypetide isolated from the Sargasso Sea
HGFVVDGKGRKMSKSLGNVISLDDILKKYGVDILRLWVVASNYYDDLKIDNSILQAQTDSYRRIRNTFRYLIGNLNEFQESEKIDIQEFPDLEQFILHRLWELDQIIKNCITKYNFHLMFTTLLNFCSNDLSSFYFDIRKDTIYCDNFSSKKRRSTRTLLNILFDYLVRWLAPFLTFTCEEAWQSLGNSSSIHLENFLIVDNKYQNSNLSQKWEIIKNIRKVITGALEKKRAEKLIGSSLEAQVDIYLPNKIKLIIEDVDMAEVSITSSVNLIVDENFISRF

SEQ ID NO: 161949 - protein, 133 aa, Unknown
  Bacterial polypetide isolated from the Sargasso Sea
MSSNEKDYKETLLLPKTNFPMRANLPERENEWLDRWEKLNVYKRLRKDSKNRRDFVLHDGPPYANGNLHIGHALNKILKDFVVRSQQILGNNSIYVPGWDCHGLPIEWKIEENYRESGRSKEDISINILRKDC

SEQ ID NO: 161950 - protein, 269 aa, Unknown
  Bacterial polypetide isolated from the Sargasso Sea
MADNNLNLPKTSFSMKANLPSKEPKILETWDKIKLYERLRKKSAGKTKFVLHDGPPYANGHIHMGTALNKILKDIITKFHQMDDKDSIYVPGWDCHGLPIEWKIEEQYKKRKKNKDQIPIKDFRKECREFAEKWIVIHKKEFKRLGVIGDWENYYSTMSYDAEAQIVRELGKFLKEGSLYRGFKPVLWSTVEKTALADAEVEYKDHKSNTIYAGFDVKKSDKDYLKNTSIIIWTTTPWTIPANKALAFNKDIDYVVLDIGKNKIVIAEK

SEQ ID NO: 161951 - protein, 303 aa, Unknown
  Bacterial polypetide isolated from the Sargasso Sea
QKDLFEKFAQIIEKDGISAWDKLDLKDYIDDHEEYIKTSDSLDVWFDSGVTHYAVSEKKFGNKIVADLYLEGSDQHRGWFQSSLLTSIAMNNYAPYKTVLTHGFVVDEQGRKQSKSLGNVVSPQKVWDSLGADILRLWVASTDFRSEMVASDEILKRTSDQYRRIRNTFRFILGNLNDFTDKNKVKFEDQVELDKWIINETKILQKEVLKLYESYSYHKAIQKVHNFCVNELGGIYLDIVKDRLYTCKNDSLARRSCQTSLDFILNILVRLIAPILSYTTEEIWQTSDRLNSQEDSVFLSNFD

SEQ ID NO: 161952 - protein, 207 aa, Unknown
  Bacterial polypetide isolated from the Sargasso Sea
TDFPMRAGLPRREPGWLERWEKIGVYGRLRAQAGRAPFILHDGPPYANGHLHIGHALNKTIKDMIVRSHQMMGYDSRYVPGWDCHGLPIEWKIEEQYRQKGKDKDEVPVVDFRQECRRFAEEWVDIQREEFKRLGVAGNWDDPYLTMDFHAERVIAEEFMKFLMNGTLYQGSKPVMWSPVEQTALAEAEVEYHDKESFTVWVKFPIL

SEQ ID NO: 161953 - protein, 283 aa, Unknown
  Bacterial polypetide isolated from the Sargasso Sea
GSALAEAEVEYQDKKSDAIDVAFPIEDADKLAAAFGLSELSKPTAIVIWTTTPWTIPANQALNVHPEFTYALVDTGERILLLAEELVESCLQRYGLQGQVIATAPGAALELIRFRHPFYERFSPVYLAEYVELGAGTGIVHSSPAYGEDDFRTCKAYGMSNDDILSPVQSNGVYTPDLPFFGGQFIWKANPAIVEKLAEVGALLKHQPIQHSYMHCWRHKTPLIYRATAQWFVGMDTQPKQGGTLRERALAAIEQTQFVPAWGQARLHSMIAGRPDWCISRQR

SEQ ID NO: 161954 - protein, 172 aa, Unknown
  Bacterial polypetide isolated from the Sargasso Sea
MSDYKFTLNLPETEFPMRGNLANREPEMLERWTKDGLYQQIRDSRIGRTPFILHDGPPYANGSIHIGHSVNKILKDIIVKSKTMSGFDAPYVPGWDCHGLPIELKVEQKVGKPGQKISAAEFREECRKYAAEQVDGQRADFIRLGVLGDWQKPYLTMDFATEANIVRSLSKV

SEQ ID NO: 161955 - protein, 258 aa, Unknown
  Bacterial polypetide isolated from the Sargasso Sea
MEYKNTIFLPKTSFEMRANLPLKEPKILENWDKQNIYKKLRENSKGKEKFVLHDGPPYANGHIHMGTALNKILKDVIVRTQQMTGKDSIYVPGWDCHGLPIEWKIEEEYRKRGKNKDDVPIVQFRKECREFAEKWINIQKKEFRRLGVEGDWDNPYLTMSNEAEAQIVRELGKFLLDESLYKGARPVLWSVVEKTALADAEVEYEDHTSNTIYVKFKVKQSKINELVDNNLLIWTTTPWTIPGNRALAYSSEIQYTLI

SEQ ID NO: 161956 - protein, 300 aa, Unknown
  Bacterial polypetide isolated from the Sargasso Sea
KELKTFKGSEFTGTVCSHPFVKMNFNYNVPMLDAQFVNLEQGTGIVHCAPSHGPDDFNLCLKNNIPSLYTVDNAGVYTKEVPYFTNTHVFKADPIVIEKLKEQNKLLKSDKLNHSYPHSWRSKAPLIYRATPQWFISMQKNKLRDKAVKAINETVFYPNKGKERLLSMIEGRPDWCVSRQRVWGVPLPIFINKKTKKPLKDQKIIDRIASIYEKQGSDCWFTDDAKIFLGDDYDAKDYEKLNDIVEVWFDSGSTHSFVLEKREDLKWPADMYLEGSDQHRGWFHSSLLESCGTRGKAPFK

SEQ ID NO: 161957 - protein, 317 aa, Unknown
  Bacterial polypetide isolated from the Sargasso Sea
KLRFSSKGKTKFVLHDGPPYANGDIHMGTALNKILKDVIVKFHQMKGEDSVYVPGWDCHGLPIEWKIEEQYKKNKKNKNEVPINEFRKECRDFAKKWIEVHKKQFKRLGVVGDWENYYSTMSFDAEAQIVRELGKFLKEGSLYRGYKPVLWSTVEKTALADAEVEYMDHKSDTIYATFNIKKSKNEKLLNTQIIIWTTTPWTIPANRALAYNENLKYVIIKIEDQSDFKDKQIIVAEDLLKSLIEECNIKKFTKVLSFSGKEFEGTICSHPFSKIGFDYDIPMLSANFVTTEQGSGIVHCAPSHGPDDFNLCLKNNI

SEQ ID NO: 161958 - protein, 317 aa, Unknown
  Bacterial polypetide isolated from the Sargasso Sea
LESSGTRGKAPYESVLTHGFVVDGRGRKMSKSLGNVISPDEILKKYGVDILRLWVVASDYYDDLKLDNSILQAQAESYRRIRNTFRFLIGNLNDFNELEAIEDNNFPELEQYLLHRLWEVDQVVQKCVATFNFHLMFTTLLNFCSNDLSAFYFDIRKDTIYCDSKESIKRRSTRTLLNIIFNHLVRWFAPSISFTSEEAWKAIGNKDSIHLQDFLRCKKEYENNQLNEKWSLIKNIRKVATGAIEKIREEKIIRSSLEAHIDIYVSRESLKKIEKVKFDEITITSSFSLYLISEESNGFSIDEISDVIVKASKSKEK

SEQ ID NO: 161959 - protein, 206 aa, Unknown
  Bacterial polypetide isolated from the Sargasso Sea
MGNLHIHILILRRSKAPLVHRATPQWFISMESHKLRDTALKAINDTTFYPSKGKERIKSMIETRPDWCVSRQRVWGVPLPIFISKKDGKILVDDDVFENIANIYEKEGSDCWFEENFQRLLGDKYKAEDFNKSSDIVEVWFDSGSTHSFVLEKREDLKWPASMYLEGSDQHRGWFHSSLLESCGTRGRAPFESILSHGFVVDGKGL

SEQ ID NO: 161960 - protein, 277 aa, Unknown
  Bacterial polypetide isolated from the Sargasso Sea
TALADAEVEYQNHKSDTIYASFKVKSSDFKDLVGSEIVIWTTTPWTIPANKALAYNESLDYIIVEINDEGDFKNRKIVIADALLESVVKECELKNYKKIHTFKGKEFNNTICSHPFLNLGYDHDIPMLEARFVTIEQGTGVVHCAPSHGPDDFNLCLNNGIKAIETVDGDGKYTNNVKLFEGIHIFKANPIVIEKLKEQKNLLFNGVLVHSYPHSWRSKAPLVHRATPQWFISMESHKLRDKALKAIDETTFYPSKGKERLKSMIETRPDWCVSRQR

SEQ ID NO: 161961 - protein, 259 aa, Unknown
  Bacterial polypetide isolated from the Sargasso Sea
MVGTRNTYQYFEGTHIFKANDIVIEKLKELKSLLNNGKLTHSYPHSWRSKAPLVHRATPQWFISMESHNLRDKALKAINDTTFYPGKGKERIKAMIETRPDWCVSRQRVWGVPLPIFISKKNGETLIDEEVFENIAKIYEKEGSDCWFDDNFQRLLGDKYKAEDFDKTSDIVEVWFDSGSTHSFVLEKREDLKWPASMYLEGSDQHRGWFHSSLLESCGTRGRAPFESILSHGFVVDGKGLKMSKSTGNVIAPEDILKK

SEQ ID NO: 161962 - protein, 300 aa, Unknown
  Bacterial polypetide isolated from the Sargasso Sea
CADYVTMDSGTGCVHTAPGHGLDDYLTGKANGLETYCPLDDSGCYLDDGQIPANLVGVSVLEKKDGCPANKEVIAILEQSGDLLALSEHHHQYPHCWRSKTPVVFRAMDQWFVSLDHGRLREACLEEVEGVRFTPDWGKNRIKGFLEARPDWCISRQRSWGVPIPVFYDEEGEPLLDGSLIRMIAEKVEKEGTDLWFSQSAAEIVEGFALPDEWMGKTLVKGMDTLDVWIDSGCSHRAVLKCQDELEWPADLYLEGSDQHRGWFQSSLWTSMIAYEKAPYRHVLTHGFVVDGDGRKISKS

SEQ ID NO: 161963 - protein, 283 aa, Unknown
  Bacterial polypetide isolated from the Sargasso Sea
MEGSDQHRGWFHSSLLESIGTRGKEPYRSVLTHGYVVDGKGKKMSKSAGNVMAPQKIIDQYGAEILRLWVASENYREDIRVSNEILKRLTESYRKIRNTFRYLLGNLHDFDPKIDRLPLESLPEIDRFILSRFNILREKILSAFDNYEFHTFYHSFSNFCIVELSAFYLDILKDRLYTYPEKSKGRRAGQTTLHILLMGMVRLIAPILSFTAEEIWRYLPKESVKEKSVHLSLFPEEEVLIFDDKLTRNWELLVQLKSEVSKASEKSRRNKVIGHSLDSIVKL

SEQ ID NO: 161964 - protein, 271 aa, Unknown
  Bacterial polypetide isolated from the Sargasso Sea
SLYRHPLLDRTSPVVVGGDYITTEAGTGLVHTAPGHGVDDFNTGRKHDLPVLCPVDEGGWLTEEAGPFAGLNVLKDANSAIIEALREAGALLMEQRYEHRYPYDWRTKKPTIFRATEQWFASVEGFREQALKAIAEVEWLPSSGRNRIEGMVRERGDWCISRQRTWGVPIPVFYHRSSGEVLLNADTLQHIQGLIAEHGADVWWEKEEAELLPASYRDQADQWRKGTDTMDVWFDSGSSWAGVLQGLAADQDKDDLKYPADLYLEGSDQHR

SEQ ID NO: 161965 - protein, 261 aa, Unknown
  Bacterial polypetide isolated from the Sargasso Sea
NKSLEGCEIIIWTTTPWTIPANKALAYNKDISYQIIKIGDDGDFKSKKIVIAHDLLETVLKECEIKKFEKLDKLSGKEFKNIICSHPMEKEGYTHDIPMLEANFVTTEQGSGIVHCAPSHGPDDFNLCINNGIQAIETVDNDGKYTKNILNFEGIHIFKANPIIIESLKKNKRLLSNGKLKHTYPHSWRSKAPLIHRATPQWFISMESHELRKKALVAIDKTQFYPNKGKERLKSMIETRPDWCVSRQRVWGVPLPIFISK

SEQ ID NO: 161966 - protein, 285 aa, Unknown
  Bacterial polypetide isolated from the Sargasso Sea
GHGDDDYILGIENNVDIVQTVQDDGKYNHHAVGFEGEHIYKVDQKIADKLKEFSKLLFKGTLRHSYPHSWRSKAPLIYRNTPQWFISMEKNNLRNIALKSIDETIFYPPQGQTRLRSMIETRPDWCVSRQRVWGVPLPLFVNKKTGQPLRDKKIIDRIADIYENEGSNTWFTEDPQRFLGNDYSIDEYDQVKDVVEVWFDSGSTHAFCLEQREDLKWPASMYLEGSDQHRGWFHSSLLESSGTRGKAPYESVLTHGFVVDGRGRKMSKSLGNVISPDGNFKEIWS

SEQ ID NO: 161967 - protein, 199 aa, Unknown
  Bacterial polypetide isolated from the Sargasso Sea
MTAEPIDYKNTLNLPKTDFPMRAGLPNREPAWLDRWEKIGIYKKLRQKKSRKPFILHDGPPYANGNLHIGHALNKILKDMVVRSQQMMGSDARYVPGWDCHGLPIEWKIEEKYRKKGRNKDDVPVVDFRQECRKFADGWIDIQREEFKRLGIIGNWENPYLTMDFKAERTIAQEFMKFLMNGTLYRGSKPVMWSPVEKT

SEQ ID NO: 161968 - protein, 243 aa, Unknown
  Bacterial polypetide isolated from the Sargasso Sea
LYNKLRLSSKGKEKFVLHDGPPYANGDIHMGTALNKILKDIIVKFHQMNGEDSVYVPGWDCHGLPIEWKIEEQYKKNKKNKNEVPINEFRKECRDFAKKWISVHKKQFKRLGVVGDWENYYSTMSFDAEAQIVRELGKFLKEGSLYRGYKPVLWSTVEKTALADAEVEYLDHKSDTIYTAFKIKKSNNKNLVGKEVIIWTTTPWTIPANRALAYNKNLKYTIIKIEDETIFKNRQIILAEDLL

SEQ ID NO: 161969 - protein, 256 aa, Unknown
  Bacterial polypetide isolated from the Sargasso Sea
KNEKLLNTQIIIWTTTPWTIPANRALAYNENLKYVIIKIEDQSDFKDKQIIVAEDLLKSLVEDCNIKKFTKVLSFSGKEFEGAMCSHPFSKIGFDYDIPMLSANFVTTEQGSGIVHCAPSHGPDDFNLCLKNNIKAEETVDDDGKYTKHVPTFEGIHIFKANKIVIEKLKEQKNLLSSGELIHSYPHSWRSKAPLVHRATPQWFISMESHGLRKKALKSIDETNFYPNKGKERLRSMIELRPDWCVSRQRVWGVPI

SEQ ID NO: 161970 - protein, 305 aa, Unknown
  Bacterial polypetide isolated from the Sargasso Sea
MSKESLQLPKTAFSMKANLPNKEPDIIKHWEKVDLYKKLRKKSKGKEKFVLHDGPPYANGHIHMGTALNKILKDMITRFHQMDGKDSIYVPGWDCHGLPIEWKIEEQYKKKKRNKDEVPIKDFRQECREFAESWIDVHIKEFKRLGVVGDFDNYYSTMSYEAEAQIVRELGKFLLDGSLYQGFKPVLWSTVEKTALADAEVEYMDHTSNTIYVGFKVKETDKDFLKDTSIIIWTTTPWTIPANKALAFNSNIDYSILEIDSLQNFEEKKIVVATNLVKEIINACEIKSYKELKKFKGSEFQNTIA

SEQ ID NO: 161971 - protein, 286 aa, Unknown
  Bacterial polypetide isolated from the Sargasso Sea
APFKSILSHGFVVDGKGLKMSKSLGNTISPDEILKNFGADILRVWVAASDYGEDPRIDKSILSQHAESYRKIRNTFRFILGNLNDEFNSQNFERLKINELEEIERFILHRLFSIDQSFRENLKNYNFHKLYKELLNFCNLDLSSFYFDIRKDVLYCDSIQSIKRKNCIVVLNIILEILLKWFAPILVFTTEEIYKLINKEASIKSIHELNFSKLPKTWNDPSLSDKWTKLFKIKQDANIAIEEKRSKKEIGSSLEAEIKITLGDQNFKLLENLDLAEYFITSKAQK

SEQ ID NO: 161972 - protein, 308 aa, Unknown
  Bacterial polypetide isolated from the Sargasso Sea
SPYTTMAFEAEAKIAEELGKILMDGSLYRGAKPVMWSPVEKTALAEAEIEYENHSSVTIYARFPVQTSALEMLRDASIVIWTTTPWTMPGNRAIAYGDDIAYRIIEVTAVKDDVLVCKGDVLCLADELCDAVADALGIEAMSVRATVTGHELAGTIAAHPMAADGYDFDVPLLAGSHVTTEQGTGFVHIAPGHGVEDYELAHLKHGISVPETVGEDGYILPHLPLYGGMHALRDNAKIADMMAAHRGVIGIGKLVHSYPHSWRSKAPVIYRNTAQWFVSMESHGLRDTALYELAKTAFYPAAGQKRLT

SEQ ID NO: 161973 - protein, 195 aa, Unknown
  Bacterial polypetide isolated from the Sargasso Sea
MKVGSLSDPSKFLGDDSDEYEKITDTLDVWFDSGVTHYCSNYQPKDSIVPADLYLEGSDQHRGWFQSSLLTGLAINNESPYRTALTHGFVVDADGRKMSKSLGNVISPQSIWNKKGADILRAWTASTDFRNEMNFSEESLERTSDAYRRIRNTLRFLMGNLNEFNFQRDKINPENYSELDKWIIMKGIELQEEVI

SEQ ID NO: 161974 - protein, 261 aa, Unknown
  Bacterial polypetide isolated from the Sargasso Sea
SFVIWTTTPWTLPSNVAVCINPDIQYSLISMNEKYYVIASEMVDQCMERWGTKCKKISSVIGNKLKEVELLHPFINRKSILLHGNHVTTETGTGCVHTAPAHGMDDHIICKKNNLSTINALNNKAFFKDELDFIKGLPAIKADPLIIEKLKECNALINDEDYHHSYPHCWRHKTPLIFTSTPQWFISMNKNNLIKDALGAVKDVNWEPSWGLQRIESMLDERPDWCISRQRNWGVPITLVVHKETGDIHPDQSELFEKFAV

SEQ ID NO: 161975 - protein, 249 aa, Unknown
  Bacterial polypetide isolated from the Sargasso Sea
MGKSSVNLPKTSFSMRANLPLKEPELIDYWNKISLYEKLRENSKGDEKFVLHDGPPYANGNIHMGTALNKILKDIVTKFHQMNGKDSVYVPGWDCHGLPIEWKIEEQYKKNKKNKNDVPIVEFRKECRDFANKWIDVHKKQFQRLGVIGDWKDYYSTMSFKAEAQIVRELAKFLKEGSLYKGYKPVLWSTVEKTALADAEVEYMDHISDTIYTSFPIKKSTNKSLEDCEIIIWTTTPWTIPANKALAYN

SEQ ID NO: 161976 - protein, 212 aa, Unknown
  Bacterial polypetide isolated from the Sargasso Sea
MEKREDLKWPASMYLEGSDQHRGWFHSSLLESCGTRGRAPFESILSHGFVVDGKGLKMSKSLGNVIAPEDILKKYGADILRVWVASSNYSEDLRIDYSILDQHADSYRKIRNTFRYLLGNINDKFEILDLEKLDIDKLPELEQFMLHKIYNLNNNFEKYFKNYDFHNLYKELLNFCTVDLSAFYFDIRKDTLYCDPIDSQKRKSTIILLNII

SEQ ID NO: 161977 - protein, 302 aa, Unknown
  Bacterial polypetide isolated from the Sargasso Sea
LKEGSLYRGYKPVLWSTVEKTALADAEVEYLDHKSDTIFAAFKVKKSNIEKLIGSEIIIWTTTPWTIPANRALAYNESLNYVIIKIDDDSDFKERCIVVAEDLLKSTLESCKIKKYKEIMKFPGKNFKGTICSHPFFDIGYDYEIPMLEAGFVTTEQGSGIVHCAPSHGPDDFNLCLKNNIKAEETVDDDGKYTKYVPLFSGTHIFKANKIVIEKLKEQKKLLSSGELVHSYPHSWRSKAPLVHRATPQWFISMESHSLRKKALKAIDETEFYPSKGKERLKSMIELRPDWCVSRQRVWGVP

SEQ ID NO: 161978 - protein, 111 aa, Unknown
  Bacterial polypetide isolated from the Sargasso Sea
MTDYKDTVYLPKTDFSMRAGLPKKEPQILKLWEETKLYKKLRDQRKNSKPFILHDGPPYANGNLHIGHALNKIIKDVINRSQSMLGKNANYVPGWDCHGLPIEWKIEENYR

SEQ ID NO: 161979 - protein, 210 aa, Unknown
  Bacterial polypetide isolated from the Sargasso Sea
MKDYKDTLNLPGTSFPMKANLPNREPEILKFWDEIDLYRKIRKKRKGEKPFLLLDGPPYANGKIHIGHALNKILKDFIIKSKTLFGHDAPYLPGWDCHGLPIEHQVEKKKGKVGPKLTAREFRDYCREYALKQVEEQKEDFIRLGVPGEWNNPYMTLDKRYEAEQIRAFAEIYGNNHVTFGHKPVHWCLDCQSALAEAEVEYMDKVSTSV
